United States Patent Application Publication US 2014/0057251 A1 - sequence listing, part 176

SEQ ID NO: 352783 - DNA, 891 bp, Cannabis indica
tagaagtgaaacgatggttccttagagcttcgcttaacacgataaatgatagagcactcattttagtaattatattaatttttttaatatcatttacaaatagctaagtgttttaaggataaaatatattgaagggtaaatagtaattttgtcctaactcgacgtaaaccatatataagggatcaatgattgttgtgattgaaacaatatataattcgtagcgtatatacttgatgtatatagaattctatgtaatcagaagtgcaatttcgaatctatagtgaagtcagaagtaattaataagttagaaaatttactcggtaaatgtcaagatcttcttattaggagcttgattacataggcccatggtccccacattgtctgagataatatcatcttgtacactcaactgattcacttattaagtcaattagaattcgaaaataaactatgtcttaatgagaatttttaccaaatttggccaattttgagaaaaaaagagaaatagaggtttatttattaattagtgtactttgtgggtctaattgataaatatatttaaattgtattttatttaataattatttataattattaaaataaaattagtatttaaataattagataagataagtgctaaaattagaaaatacactttacttttattagttgaaataaagtggcgaaaatctaactttaaagcccacaatgcatttgaccctaagagttagatatcaacccaagtctttatttaagaccatatcatctaaaccttgcctaagtgaatgcctctataaagaaagtaatgataaaagaaattaaccctaattctatgtcaacaactctcttctcttcttttttttgtaaattcaaaattcactaagtatttct

SEQ ID NO: 352784 - DNA, 732 bp, Cannabis indica
atataatcctcccacacaaagtttctcctgggacccttgtgattcgtccatgcactgctgatcatgctggtaatgaatatagagagaatgatacccttatgaggaaatgtcagtagatagtcggcgcgtcgcctcctcagcatatggactgctgcatctatatgctacatatgaaggttagagaaagcagttagacaacaaaatatattaattgtagattagttgtaaagtaaagtaaaattataaattagtttacttacgtcatctgtaagccattcctatagtgtcaacagcttccataagaacgatgaaccgtaatcaccacttttcaaatcacgaagctggtggttgggaatgagtctagaacaccactttcggaaactatccaacaatctctcatccggtggcgccagcggatcaaacgtcgaagaagacctttgtttcttcttcatctccgtgtagtcacggaaccatacaaggagatttctcttcctcttctcactcttaacccctgcaggttgtgcctctatcgccaaaatttcacccttggacttgctgtcatctatacagataacacctgcaccgataggagtagctggagctccctcataaggatcatactcgtcaggagtagctggagctccctcctcttcaggtttcaaaagttatgctgatccgaagtgcagagatgttacatttcaggcaggggaacatgttttcctgcgggtttca

SEQ ID NO: 352785 - DNA, 783 bp, Cannabis indica
aaatgcatttcagaattcaacaataaaagcataataattatttaaatagttataaataattttccataaattaacataattaactgctaatttctaaattaactaagcggtctttacaagatatctgaacggaaggagtcattatattccgctgcacccaatgtaaggtttctcatactttatatgtgtttatttcaaaatcgttttagaagttcatatttagggtgttaatcaacatacttgtgagtagatctaagatcctggtaaaataatttccatcaactggcctcaaagccatggtaattgatttgcttgcaagaaatttggactttaattgtttgtgatttggatggtttcatgttgtgttgagtgttatatgatgattgattgatgtttatgaatttttgtgaaaaataatagaaattctgtttttgtaattatttttattggatagtacggaaaaaattaagcaattttcctttttagagaactcactttaaatttaatttgaattagttatgagtttttgaagtttcgaaaaaaatcagggtcgtgcaacagggccacgcgcgcggacgagggtgacactctcggacagcacgcgttcatacagctgctcgaccgagcgccagtctgaatctcctccctgcgcgcgcggaataggctgcgtgcagcctcctgcgccgagggacctcggttgtgcactccccatgcacgtgcgggcagtatgctcagcatactgtccgtacagctcgcatttttttcgtttcttcgatttttcat

SEQ ID NO: 352786 - DNA, 920 bp, Cannabis indica
cattaattattgacatttttatagttatttatgattatattatgttgtgggtcccattatttagaatgaacgctagagttataatttctcgattctgaaaatttttattaaactctagaagtattatttacgctatatatgaattacgcaatttttataattttgttcggtggcgactgaaaatatgatggatggtcgttagaatcacatgggtaagtctagaacccttttcttagtcgagatattatttgagatatttagaataccgagtttgagcggggttatgactttttaccattttacccttaagcttgtaattacttaacttaagaggtcaagggcattttgggaaatttacttagtgggattaggtggcttgtcccttgaatggcagctggccattattagtattagaatggtttattcttttacaacaattagaaattaaaattattaaggaaaaaaaaaagaaaatcctttcatctttctctctctatactcagcttccccaaactagaaggaaccagccttcatccttggtattttctaaaaaattaagcaaagattcaagaagtatctagtgaaggtaaaccctagaactctagcttttgtgttatttaagcttttaattgggttatagcatacaattttgagttgtagtggtcgtaggggtgttcatccagtccaattcgcactattttactcatagtgcatctgattcgcatgaagtgcggattttattttttgaatccaatgtgtacaatagctaaaatctaatccaatctaatccgcaaaagcgcggattggatcggttattttggatttgttactttttaatataaaattagttaatatttatgaaaaaaaaatattttttttctacaaactagcaacaaataaaataaattatagttatttta

SEQ ID NO: 352787 - DNA, 653 bp, Cannabis indica
ataactatcacacggtctatccaatttactaaagattctggctgacagaatcaaacagcactgagtaaaaagagttattaaccgagagctgacctgttacaactgaagggctggcttctgcatcagcctgcgtaatggcgaacaccctagctggagtgggtctcgccggagcccttggtgcctctgatctgagctggggacaatccctcttgtagtgtccgggcatgccgcactgaaagcatccctgacctgtgcactcacccggatgatgccttttacaaatgggacactccgggtaggaataacgggtctcagcactaccctgacgaccgcctcgactctcgttccctcggaacctcttgttctgccccgagccacaggatgcagtggacgttttcctcttctggtccatggccgaaccactacctcccctgctgaagcctgatgccggagaggtaggagtcccgccactcactggagccctaatcgactccgacatacatccaactgcgccctcaactcgcagtgctttctccaccatctcagcataggtggtcttgtcgtctgtagtgatcattaggtcatgcttaatcttcacatttaatccatcaagatatttttccttattacttaaattggttggcacaattccc

SEQ ID NO: 352788 - DNA, 615 bp, Cannabis indica
tttcctccttcatccgatgaagaactgctcgcagagaagtcctctcatctcgaagactatttacctcagcagataagatctcgatggtctctcctcaaaacggtcagcaacctcgagatccttagttagcacagtgattttcttctcagcgacaaatagcttcttattggcttcacccaactccaaccgaacaactccggcttccgccctgtcttcttcagcatccttcttggccaagtccgcctacgccttcagggtgtcggacaaaggcgtgttcttggaagcagcacacttagcccgagagtaagtgtaggccaacttcagaccggcctgctcaaaaagaaaaactttagcatattaagttaagtgtgtaagattaaaggaaagtatcaaaaaatacttaccctggtgaacttcgccaaccagcacatcaaaagaagagtcattgtcagcaccagccagttgcacactgacatcaggaaccagccggttcgtgtaatgagctagcatctccttgccctttttggcctctagaggcactagcaaagatggagttggtgcccgcatccgttcaggatcactcctgaccagtttagacccaaccgttggtggtcc

SEQ ID NO: 352789 - DNA, 548 bp, Cannabis indica
tatggactttttaaggaccttttctagattgttatggaatagtactatggactttataagaattgttacgaaattttcatggattattattatgccttgttatggagtttataaagattgatatgaattttttaaggacttttatgcattgttattaacaggtataaatttttagttaattttttttttcttgtgacaatatactttggaagttttgatttttaagcaacccaaaccgcccaaaaaaccgcataaaaccgccccttaaaaaaccgcccaacccaaacttttattgggcaggtatgggttgtgattttaaaaaaccgccaaataaaaaaaccgccaaaccgcccaaaaaccgcccaacccaacccatgtgcaggcctaatatatacacaaatatattaaaccataaacatgaaaacaacatgtaaacataaatgacttctaatattttattgataacaaaacagattagatcgtaataggttttatttaaggcataaaatcccaacaaactcccacttgcactaacataaaacaagttg

SEQ ID NO: 352790 - DNA, 920 bp, Cannabis indica
aaaaaaaaaagaataattagcattttcgccatctgaacttttagcactacttgattttgcctcctaaaatatacggtttgttaaaaattccccataaaatataacagttacataattatgtcctttctgttaggttctggttttttttatcgttgaaaattagtatgtttatcccctaaactttgaccaatacaaaattttacctccttttatttaaaaaaattaattttaaaaattataatattctattttttatgaaagcaattataatattctattaattcagaaaaaaataataaaaattattaaaaattaaataaaaatattaaattaattaaaaaatattaattttagttaaaagaaattcaaactttattttatttatcaacgtgtatcttaaaaattaaatcaaaattattgagaatctgataaataatttaaataaactaaaactttttgaagcaaaaatcaaacttatttatatttataaactcatatcttaacatataaagaaaaatagttaaaaaaaaaaatcaataaaaatataaaattattcttaaaaaaagttatagactaaactaaaaaaaatattatgtttacttaaacaaatctactttttttttaataaaaacaaaatattctcaagtttgttcctataaaatttagtttttacaaattgaatttttaatatattattttaatatctaaatgaattttctaataaaaaataaataatttttttatatctctttattagttttaaaattttaatttatttttttagtttccttaatcattcaaaataatttttttttaagatctaaattaatttttttaagatttactaaaaaaatattgaatcttttgttactggaatttgggttaattttttacaaaaatactgtcacacggaaatcttt

SEQ ID NO: 352791 - DNA, 1280 bp, Cannabis indica
acttaaattattaaactcttatggtataatttagcctaggtaaaattgtgttttgcatttatttttaataatctaaatgtaaattttttgcttaacataatttttggcacgaccttttcatctcaaattatgatgactattatttaactttaattttatggtgctaatcatgtttaccgttttcagggaataatagcaccacaagtcacagtttacttccacaaactactaacaacctcttctgcccaaggagggaaaaataactgcttcttggcggcattctctatcgatcgagaacccatttcatgcagggtacccgaaccagtggagaatgtgaagacatcgataccagttagaaaggatggaagagggaaagatgtgaagagtattcttaagactgcgtaggccttgataggcaaggcaacaaagggcttcaaaaagaggcaagtctggttaatgaaaaggtctgcgacaaaggttgtgaagatagaagggaggccaacgaagattggctccccgtaatgatccaaaaggaatgggggccgtgagtgtatcttgattggttccattcctactttcttgcccactgtcgcctcagtgatggttatctctgtggaggaaattgaggcaacaacgacttctcaaacttggagtggtaggaaggcaacaaaaggcaagaaagggacaaaaacttcaccttcaccaaaccctcttgaaacgagggaattagtaggaggcacaccaattaggcctccgatcgtggtccctgtcaattgccaatgtcaacagggggcatctgctgagatcaatgaacaccctttattagatgaggggtgtaggacacctttctccttcctaaagaaggctagaagtgacaatgtaagggttccaaaaacaagcccgaactcattctgaaaagaacatggtgactgtatgttcttccagggataccgaccaacaagggtcacttcaactcttaagcctacctcctacacgggccctgtaactcaatcaagagctcgtgccatgcgtacaattcccgttcaggaattaggaaaccactttgttcaaaaagttcaagaagagaggtgttgcacatctgaacactctttagaagacactccctttgttgagcatagtgagggggtgtctgctgatctcattactcagttcgaagcactaaccattggctatgataaaaatatgccagtggtagtaactggggcaatcagtaatgaagagaagattcaggaactaaaaagattattggccgagaggga

SEQ ID NO: 352792 - DNA, 1299 bp, Cannabis indica
tcttgttgtgacatattattttagtctgaaactataagttccttctagactaagtcatcaacatagcattctagtattaacattaatgtaaaatacttgcttaaggataagtaatcattaaagataccttgaggactagggatttttgcctaagtcatttgaatagactatgcaaaattctcctatcctatcctcataattctgataagttatttctatccatatgagtggttagatttactttctcagttgaattctgtagttcctatcatgatcataacatagtaagttatcacaagtgtcatccaaataaagatgagcttagagttttaaaattttttcactcaagtaaggtactgtgatactatgtccaagaactttattggtatcaattttcattacaacagtaatatattaattggaacaaaaatacaggatcaagaataagttctaataatttattaatttgttcattatattatatccatgtctaatcaaaatatgtgtgctatagagatactgtggtgtattgagtatagtctagagttcaaaatgaactacttatgtcaatagcttcttccacccctaattgttatagagatcttgtggagttatgaatataatctagagttcaaaagatgtaaaagatcgttgaactagatatattacttattaacttcttccactcctatcagatcaaaatatgtttttattaaacaaaatcttaataatttcttaagaattaacaattattcatgaatattgaatttgaattcgaaatgtttatgtggtattatctctttgcagagatgaacataccatagattttgtatcaataataaaacacaaatacatacgaaacatgatcaacatataaatataattggtattggcatacacaagataaagaaaatataaagctcaattcataaatgcaattcataacttaaagagaaaactttattaatattctcaaaaaaaataatgaattgtctgcataaatatgaaatagggaataaaatcccaaaccaataattgaaactaaattgttcataaactaaaacaattaattcaaaaaattagagtagattttgagcttcatcttcaatcttggacaatctccaccctcctgtccaaccatccgactcaactcactaggatagtaatccaagtttaagcagctggagctgaaataagaagaaaacaaacatggtttgtagatctagaattaataacccaaggggataataattctctaaaacacataagtttattacatagatagaaataccttgtttc

SEQ ID NO: 352793 - DNA, 721 bp, Cannabis indica
ttaggatgttaatgaaatatacatggtagtaaatctagatcctggtaaaatatttccaacagactcgccatactattggtactcagtttgtatatcgcataatatacgctaagtatttttagtgttgtcgcttctttttcacgcagcgaggttgaggcctcgtcatgagtgtatgcactcacatggtttctcgtcaatacataaattaggagttcgtatgtttctgtcttgcagaaggctattcagccagccgagttataaacctaccatgcgaattatatttccaatgagttgttccatgctaagcgtacttgtcgtttgcgtgtttgagtttttcccagctcgacacgtgtcctcctcagatgtgcttaatgaacttcgggtataagaattttatatgaacgagtaccaagaatttgttaatattgatctatatcctattgatcccaaaaattgagcacacattcagagaaaagaagaaagggcgtcaaacatagggcgacaagggggaaatagaaatgatagataaccaaggagatggacggccagctcaaggggaaacggcccctaatataataatggtcaaaatgcagtgatcatggcggattatagagatcaagtcatccgacaatacgcaatacctcatttcaatgagctcaatccggacattgtgaggccaaaaattcaagctccacagtttgaattaaggtcagttatgttc

SEQ ID NO: 352794 - DNA, 554 bp, Cannabis indica
taaccctagatattggtttcatgtttttttttaagcttttaccttagtttgaacttgtggttttgtgttttaatggctgttatgatttgagatgattagggatcaaattctaggcttagtttgaattgattaagggttatagcagctggtttggttggttgatttaggtttcgtgttaatttgagcataaaaccttaaactttggtctttaatggcaagttgagtttctttggtttattctgtgaaattctggctgggttttattgtgtatgcattgtttaggtgtactggagagtttggtaaagtttggttgagttttgaggtcatgggggaatttttcgggttcccagcacagaaccggaattccggttctgggggacctgtggcaaccgatcgaccggttggtgacccagaaccggacttccggttgggaaccggtctgccggttaggggaatttttggaaccctagtttttcccaattttgagatatttagggtattgccatgtggtttctcgatagggaaacttttagtttcaagtttaagtcccggaa

SEQ ID NO: 352795 - DNA, 875 bp, Cannabis indica
ttaacaccatggctccacttgaatagctttttcctattattattttcattattttaatgcatactcattgccaacctaaacctattagttgcctataaatagaaagtgatggctcacaccaaaacaagcaattcagtaattcaggaaactgcctttttcagaaaattgagccatcttcttttctctctatagcgaccctcctctccttcttctctttaacacaattttgagataccctagtgaaagagtagtgcccacacacagcaagtggtacctcaatcatagtttggaagatcgtgaagaatccaaatcaaagagaaggacattcggactttttagaaagttcatgtttaggatgttaaataacatatttgtgagtagatctaacatcctggtgaaattatttccaacagcgttacaggccaaggcggaggagctgatgactcgggacgaggctgtggccaaggtgaggcgcgagctaggggaggccaaggaggtagttgaggatctgactgctaggctgaagtctatggaggagccgcatcaggcggacttgcagacgatgaccaatttgaccgttgaggtgaaagagctcagggattttaaagatcaggccctcaaataggctaaaagagataagctcctagcccgagttgtctgcaatcattgcactaagcgctttgatgacggcgtctttattgcctggcagactaatggccaaaacctcaagctcgacttctatccaaagcctgaggaagtccttgttcgtttctgggagaagaagaagagacttgatgccctgctggaggagcgcagggggcctcgtcttccaccccgtattgattaagccaaccatcatccattactgcttttat

SEQ ID NO: 352796 - DNA, 492 bp, Cannabis indica
atcatgattatattccactgtgctaacgacactataatcatgaacaaatacatatgttctggatttaatagaatttatacattaaacataattatgaaataaatcatgtgaaccatgcaacataaaacgatttctgatctttattaattagtaaatctgattatattgaaatgagttttatttaggacacaaaatccaacattatctgaatcacttacaaaattatcaaatttttcaggatcattaagaaattcctcatgtgcttcgtcaagcaagtccattggataatcatcgaaattattaccctctatatcatctaccgcccgcttctctaatggatatagatgatcagttcaatgttcaccatgctaatacaaagtagtataacttctattgaaacctcttaaatacacataatccttaatcatcgtaatatttcattttgatttattacaataatctacacatgaacaatgaatacgtttgggattt

SEQ ID NO: 352797 - DNA, 677 bp, Cannabis indica
catgaagacgaacaatttctctaacatataattcaggatactgatcaatggagaagttcgttcgaataggtaggaagtgcgctaactttgtaaacccgtccactatgacccacacagagtcgtattgtcccgtggttctaggtaatcccaccacgaagtccatagcaatgtcttcccatttccactctggaatattcaatggatgcaccaatcctgcaggcctctgatgtttagccttcacttgctgacaggtaagacacttagcaacaaactcagcgatgtcattcttcatgcttggccaccaaaacatggccttgaggtcttgatacatcttcgttgaccccggatgtactgagtaaggagttgtatgagactcattcataatctctctctgaataccgtcatccataggcacataaacacgattcataaatcgtaacattcctgttttatcaactgtaaagtcactagtcttcccagctgaaaccctatctcgagatttcattaactccgaatcttgcaattgtgcttcttcgattcgctctaaaagagtagattgcagggtaatattagccaactgccctacaaccaactcaattttagctcgggtcatctcatttgttaactgctgggagatttgtttcacagtatttatctgactctgtccctttctactc

SEQ ID NO: 352798 - DNA, 791 bp, Cannabis indica
aataaaaatgtaaatacaataaatgaagaacatttttgacccaattcactaattatagcaacgtatgcgactttcatggtacgagttatctgttcatattctcacataagctcgcaggctcaagaagcgtactagactgattgagtttagaatgtctgcgtcctaatcgagtcgcatatacggacatcctgtaacagatcgataacttaggatatgcgagtccttatcgggttatcaagaacgttgggtcatccggaccagctcgttgattagagaatcgatctttactacttcgcaagaagacttttatagtactcgcatatatcttggtatatgcgactcttatacccagttttcggtcttgctttgtgcgagtcataagaatgcgactagattctgtcaaggtcacatcatctcgccgagtctagttcaggagaggttcacactcaagaggtctcctcctgacatctcagctcttctcgagaaaagtgagtccacgtgtcatttttatgggagcttggtctcgagttttcaggtaaaaaaatctcactataacataaataagtggtgaaaagctgaaatatagaccatttaacaaaaagtatgctccaatggtgtgccaaaaagtgatgtaaatttggcacataacaaattttgtgccaaatttagcacaccatttgctatgatataaaatttacaccacaataaatgcactactttttcatttatattcatgtcatttctattattttattagtatatttaacaatcacattaaattatgaaacatt

SEQ ID NO: 352799 - DNA, 943 bp, Cannabis indica
tttgggcttcctttcttccacggccaggatgacttcttcttgctcgtactgagccgtccgggcatatctctctcgacctttgcccgtgtctccaacgatgtgcgggcctccaataatgacttgtaagtgtccatctattggcggaggcatcagatcctggttattcttaccttggtcggccttgacatacttttgtaagtgtgggttgtttttcttgatcaaaagttctatttcccgcttcaagttgtgacattcattggtgtcgtggcgtagtctccatgcaacagacaaaatttcgtcatgccccttttgttggtatctttcttcatgggcccgagcttcttgtacggaattaacgactgagttgctatgtacacactctctatatgttcggttaagatggtgaatgtagtgtgtttggcgtgatcacggggagtttgtctgggcttttcagtgagcttcctttcttcccgtttccttgcttgtgtttgttgcctgaacgcttgcaacttgaacagctagaataatggggaagttgggcggacgttccagtcaaaagaaccttcgttttgctcggcttttgctcaccttctgcttgctgaatgacttcctcaagcttgatgaaaccttcggcccggtcaaggaaatcactcattgagtcgacaggtttgtttttccttatatcctcccatagttcaccaaggacttcaatgccccccagtattgcggataattttccatcctcggttacccgtgacaccttggtcgcttccgtcatgaatctactgatgtatgcctggagtggctcgcctagtcgctgttttacttcgaccaaatctcccagatgcaatgggagctggcgtgaggaagagaattgtgcatggaattccaaagagaaggttttccatgaactaaactttccaggggccaacttgaaatccat

SEQ ID NO: 352800 - DNA, 501 bp, Cannabis indica
ctgctcgcacaattctaaagctatagcctcaagcagattccaagagaggaaaatacaacagcagatgtgctagcccgattggcgagcaacaatataagtgacaaggagaacctggtctcgatccagtttcttgaagagcctagcatcaccggcacggaagaaatcgaaatgatcgacacatctccgaattggatgacgccaatagcagcctatctcaactctggggaactcccaaataactgaaatgaagctcggaaaatgagaagaaaggcagcacggtacatcatcgtagacgggatcatgtatagaagaggattctcaatgccattactcaggtgcgtcacaccaaatgaagctgcaccgcttctatacgaagttcacgacgaattctgtggaaatcatgcagccggacagagcttatcaaagaaaattctaaggcaaggctacttctggccgaggatgattgaagattcgaaagcttatgtcaagaagtgcgacaaa

SEQ ID NO: 352801 - DNA, 527 bp, Cannabis indica
agggtcattttgcatcttgacccgttgtactttttgagcttgtcgtgtgtcatgattttcgagctagcctatttgtgcttacgtattgtgcctttcgtgcttctcatgccatgcttaaagacatatttttcgtgtcatgtcgtgttaatttgtagcatcaggtcgtgtcgtactcaaatccatatttttttgtacctagtcgtgctcgtaccttccgagtttgtggcgattttatattgtgtcaaaaaatctaacccgtatttacaacactagctcaaattagctcatttaattaaagtgctctaagctggtaataacatctctgacaagggttgcttgttgttgaatgcttggagaaaaaacaaactaaaaagtggcacttatgccaatttttggtattagtgtcatcctccttttttattttttaaataaaaataaaataaattgatatattgaataagatcattgctattaggcaccagtggtacctagtaactttctcgacatgtcacgttgcgattggctag

SEQ ID NO: 352802 - DNA, 508 bp, Cannabis indica
atatatatatataggtgagttgagtagctagctagtattaattaattggaagcagttttgttgatcattccagcagtgaggggggatgagaatatatgaatgtgatgtgttgtttggtgtgtttgaagtagacattattaatatatatatataagtactgaaagaagaaggtaaaacctttcaaatttgatcctcccacaccactactcatccaacatccgatccgatccaattggatttttaaaatttgcatccgatccgatccaatatgattggatttccgattctacttgattctgccatctaaaatatacgacttgctaaaaaaatggtagaaaaaaatgcaaaaatagagaaaaataataaagaaacaaagtttaccttacccgtttgatcagttgggtttgggcgattttggtatgggcgagatggaggctcacatgggtttgttgggtcgagggtctactgggtttggaagggttctgtcgaggttatagcagagatatat

SEQ ID NO: 352803 - DNA, 455 bp, Cannabis indica
gagacatattattccgctacacccaatgtaaggtttctcatactttatatgtgtttagctataatcgttttagaagtttatatttagggtgttaatcaacatacttgtgagtagatctaagatcctggtaaaataatttccaacacacccaagcaaaaccaatctaactaattagagagaaaaaataaataaataaataaaataaaagtctttgtcaaaggattatgaccacacgcccatatgcccatttacattcttccaaaccctcttctagttactacctaaattagttccaaagatggagtcttatctccttcatattcaccatacatgtaatgaacgctttagtaatttaaattagtaaaagaaattagtactaatttctgatatttttataattagttatgaatttaattatctctgggccccattgttagaaatgggcattagagtta

SEQ ID NO: 352804 - DNA, 550 bp, Cannabis indica
ttcatatttagggtgttaaataacatacttgtgagtagatctaagatcctggtaaaataaaatccaacacataacgtatttcatgtctccatgttaagaaaaatacgtttcagatccgactcatgtgttgagttatgaaaacctagagctccagtaggatttatcgtacgaagagcaaccagttcagattttagacagaaaatataaagtccttcgaaataagaccatagctttggtcaaggtgctctggagaaatagtaaggtggaggaagccacctaggagttggagtctgacatgtgggctcaatatctagagttgtttaggttacattacgaggaaaaaatccttttaatagggataattgtaaagatcgcctaattttaatatgaaaattagcaaataattagggtttaatttcgaattagacttttaattataatttatgaatttatggagatatatttaaattctaggtgtattatttatgttatatatgaaatttcatattttttatattttatgccctgtaatagtggaacgcgacgtttg

SEQ ID NO: 352805 - DNA, 883 bp, Cannabis indica
catcatcagcagttagctcattccacagttcagtaagcttttattgctttagtagtttattttaatagtataatttaagaaaagcatgttaggaagcatgttagtagtttgatagtagaataggcccatgcttttaatttccaaataagcagcattaatatgttctctttgatcattatctgaccagactagctcttggttacgcaggctctttagagtagatggacgccatgcgaaataccatgagccagggcaactcggttggatcaaatgaaggtcaggaagctgagtttcccctaaatgtctggggtcgaggtagaggtaccaggggtagggcacgtggtcggggtgatgctaacccgccacaggttgcccaggctgcccaagctgctcaagatgcccaaaattgggaaaataggtttgcagcaatgcaaaccagaatcaaggaacaagataataaaatccaacgattgagacatcagggtgctcctgcagtgcctgctctagaaattacggtggcatctgcccctgctatccaggccgaaccagtggttggagtgaatcgaatagaacctcagtatgaaaggttccgcaagcaaggacctccagtttttctgggaggtccgaatgttatgaaagttgagcaatggctaacagtgattactagaatcttaaattttatgggcgtcactggtaatgatagggtggtctatgcgaccttctaatttcaagaagacgcactggtttggtgggacatggtgtccctgattcacgatgtcacgacgatgacctaggaaaagttccaggaacttttcaatgcgaagtattacaatgaagtagttaggagtgctaagagaaaagaattcactcatttgactcagaa

SEQ ID NO: 352806 - DNA, 433 bp, Cannabis indica
ctgtaagctcctcctccttagaatttttctcctcttccagccaacggaggatagctcgaagggacgtcctttcatcttgaaggccatccacttctgtagataaggtctcgatggtctcttcaagtcagtctgaagcctcgagatccttagtcaactcggttattttcttctgagcagtaaaaagcttcttgttgacttcaccaagctccatccgaacagctccaagttccaccctggcgtcatcaacattcttcttggccaagtccacctccgccctcttggtgttggacaaagccgcgttccgggaagcagcagacttagctcaagagtatgtgtaagccaacttcagaccaacctgcacatagataaaacattagaatatgagccaagtaaagaggattaaaggaaactttcaagaaagacttacccttgt

SEQ ID NO: 352807 - DNA, 661 bp, Cannabis indica
aaattgtttttagaaatgagaacaaaatgtttttgaagtttttaaaaacaagtcatgtttggttagtgttttttaaaaataatattgaccaaaagtgaattggtttttaaaacagaaaacaatattttgttgttttcaaaattcttgttttttgtaattttgtttttttgaactaaataagtcaaattgttttcaaaaaataattttctatttttaaaaacacaaaacagttttttagttatgatgcaaaacatgtacttaagttttggtgtttttttatttatttttttaaattgtgatttgtgactcaaataaaacaaaatatatttaaaaagaaattgtgactgtttcttttttggaacccttgaaaacgaagaagcatattcctcatagcatatacttgacccaaaaaagtgcaggtaatgtttatgatgtgcattgttgaaaataaatgactgaatatatttttttatttaaagtaatttatagtataaatatttaaatttaactttcaattataaataaatagtttaatttttagaagtaagaatatacgttaccgtcaaattattttatcattttcttagtaatatatttaaattattttttaaaaaaaaataaaaaatttaataacgtacaataattaaaattgtcacttgac

SEQ ID NO: 352808 - DNA, 983 bp, Cannabis indica
tcacctaaaattttccaactctcaagattttttaaaaaaatttgacagcacttccccttaaaaatccacttcccgggaattaaccctttcacaaacaaactcaatttcactcacaacaataattttgaacaatgtatggagcaaaaatctcaaaaatccaacacaaagtctaaaattctctaacaatccacaaataatccaatcaaacttgtgtagagagatttaaaattgttacctcaatgagaatccatctttattcaacctccattgatgaaagtcttgaagttttgtgaggaagaagaagatgaatagtgatttttgaaatttgggtgaggtttagggatttaggattggatttttagaggaaaagagtgtttgatgagagaaataatggtttatgatgatttaggatgaaaatttatggttagatttgatggaaaggggttttgaatgggatttgaagaagaaaattggtgtagaggatgggtgttcggcgtggataggttagggttgataaaggtttgaagtttgaaatgtgatggaaatttgggttttaaatcccgttttacccatctcgccgcggctagaaatgggctcgccgcggcgagataggcccagaaaattgacattctgtaaggaccttttagccgcggccacgtatgccctcgccgcggccagatgaccaggaaaaattggtcattctgtaaggaccttttggccgcggcggcctacatctagccgcggccactgggtcgaacttttttttttcaatactaaattaacaagaaactaaagattgttttaccagtttcttaaagaaaactaaacagagcagaaaaagaaaataacgctaaaacataaaagagttcaactaaatcataaagaacacttgggttgcctcccaattagcgctgcctttatcgtcgcacagctagacgttgatcgagtttttcatagtggcgccagaatcatggcggacttgg

SEQ ID NO: 352809 - DNA, 528 bp, Cannabis indica
aagcctgaaagcaggcggtaagcttgaggaatgagttggtatggagcaaggccgacaaatacaaggaaattaatgaagtaatcttgaaggggaagcatagccccggtcatcaaatgtgtttggctccaagctccgaagcctccgtagttgtgattgggcatctccgtgtcccggggcggccggtggtaagtcccggaagtggcgggcttgatgccagccaccagcacaatgtgctccagctgaggagggcaagtaagcgttgagtgaagctcggccacttcccacccccgtagcacgaggcttataaccttcctaggccacgggacctctcatcacctcctccagggtggctaggcgcttcccgcctttctgagaagacttggaaccggatgcagacattttgattctgaaaaagatttaaaattccagcagtgaggccccataccaaaccctaagtcaaaaagggaatgggggtcccctaaccgctggaaagaggccccctccagacggttgtcaacaagaaagcct

SEQ ID NO: 352810 - DNA, 76 bp, Cannabis indica
aatatcaacctatactcggtacgctagtcatactctagccgtaccgatgtgatactgtcggatggtacaaagtcaa

SEQ ID NO: 352811 - DNA, 515 bp, Cannabis indica
aaattgtgaagagtgtgagtgagtggtagcttaataatgttaatataatggggttttgttttttttttctttgctttattttattagtaattgtaattgatacttttcaagtatgtgaataatgtggtttgtttttcatgattgcttgggtgtgagtggtattttttcttcttcattattagttcctatttttttttttatcatgataataagtcttttgtttagctgagttgcattagtttgtgtataattagagtgaataatcattttcgactcgaaataatttgaattctaattctttgattgagtttgactttcaggcccccaaaaacttgtttctaaatttttgaatgagtgacttataatttttatttatatttttagcttcttaatgaggtattttattattaataataataataataataatagaatagattactaattttatataagttttaaaaatattattctaatttttttttattatgtatttactattatatagaattatt

SEQ ID NO: 352812 - DNA, 737 bp, Cannabis indica
atccactaactggtcgatccttggcagtagaaataaatcctttcgacacgccttgtttaaatctgacaagtcaatacaagttctccaagttccatttggttttgggacaaagacagggttggatatccacaagcgacaaaattcctcgcgtataaagtcgttactcaacaacttattcacttcctgcttcagtgccccttgtctctaagaatacaagggtcgtctcatttatatattgtctgggtaatttgggtcgatattcaagtcgtgacagataattttaggatcaatctctatcatatctgaatggctccaggcgaactgatcctggttttccctcaaaaaagcttattagttgctattttagtttttcttccaggtttttcccaatgaatatacactttgtaggattttttggatctaaaagaacttcttccaattcctcaatcgattggtttcaattggttctgctcatcttgaacccaaggattaagatcctcatcctgcttctcgcctttttcagttgtgactcccattagctgatgaccaacttttctattctgtagctctatgcggtagcattcacgagctagaagttggtcacctcgcaccacacatatacctttcggtgtctgaaacttcagggatagaggtttaattgaactaattgaccctaggccaattaatggtggtcgatccagcagtatgttgtaggccgatggcaggtcaacaactaa

SEQ ID NO: 352813 - DNA, 906 bp, Cannabis indica
tcttgctcttcttcactttcttcaacttccccaggaagagcccattgctcttcttgaccttttttagcttcctcaagaagtacctactcctcatccactaagtcaatagtgtttggaggggcactggaagaagccttcacggggtgaccatctgggaagaagttggaggaagggaagcatcaggactgtgggctccggcaagggtggccaagatcgcctccatgggattagctgctgcaacaagagaaaagagttaagtgttagaatatctgtgaaagcagtaaacacttaaaaagcaatcaagctagtcctaccctgactctctaattcggccctagcaaagttccgaatcttaacactggctgcatcatccccgagatagctgtccgagggacggaaccagctagaagaaagataggccgaaggatccaagggaacgggcaccggaggtccagaacccatccgggaccgacctaaataatctcctaagttggagaaataataatcctttgcatgatccccccaccgggtcaagggcatcctaaacctaaggagacgttcatcgaaacctacaggcctaaggctagcatattcgcgaacaggagggacgtaatgtattgttaaaggggacttaccagagccggaagtgctggcatcaggagcccccgtattcggcacctggacggtaggccttggcctgggagccctcctctcaaccgggctcccaatgcgaaggggtctcccggcagccgcctgggtcctcctctcaaccgggctcccgacgcgaaggggcctcccaacatccgcctgggccttagtgtaagccttctcctgggccttccggtagaggtactctcggtacttctcttccgcagtggcaatgatctcatcccgaaaggtcttctc

SEQ ID NO: 352814 - DNA, 766 bp, Cannabis indica
aattcaagaactttaataaaataatatttactatgggcagagactacaaaaaatcttacttttagtcacaacaaaacttgtgactaaaattgaaaaaattatgactaattataaatcatgatttttcaatattgtgactaaaaggtccatgaccaaaagtattagtcacaaaaattacaatttattgtaactaaatgtatttttagtcacaatacttgttgtgactaaaactaaattagtgacaacttgtaactaaacattatgttttaatcacaagtaacattttgttgtgactaaaagtcacatttagtcgcaaaacaattatattgtgactaaaaagttatcactaaaagtagcagttttttttgtagtatgctaataacgtgttataaaataatatagaatagataataaaaatagaagaagagagaaagagaaaaagagaagaactgaatgagagagtaaatgagattttctcagttttctatttaaatggggtgaactcatatttataggactaaaagattgagaaactaaatcgatgtaataaagaaaaatacaatcaaacattattaataatgataattaatttagtgattttgacatctatatatcatatttcataacatttgcactataattgggcatttatccttacacaaacaattctaaaggcaactccaatgtcaaaatctaggtttagtgttaaatgaatactaaagggtattattttaacactaattttttttaattccaatcacaatac

SEQ ID NO: 352815 - DNA, 753 bp, Cannabis indica
atctctgtgatctgatccaaaaattataggcatttcttcggtgactcacgatgcgaaagctgaaattactaagtgttggcgtgctgttcggactgctcactgcccggttaagaaggcttcgtccgagcgaatatatgtggtgctctgttcgacatatctcttgcgatcaggtacacaaagttgattccatgtgtcactattgtatgatgccatgtcagtgtgcaaaaattgggataacatacatgattatataaataatgtaattaaagtaaataattaattttatacctaaattttttttttgagccaaaaaattaaactttattaaatcaaatcagcaaccaagatagctttcaaaccagcagggacaaaacccccacggaaaacacagccaagaatagaaccaaacgagctaaaaagttagtcgcctggttcccggaccgtttaacaaaattaattgaaataggaaataaaagagaggattgcatgagagcaacacaatccgaaatcaaaagtccaaccggagacaacaaccgcttcttctgttaattaatataatatgataaaatttaaaattattaaattaattgaaattttaaattaaatatatataaagaaaaaaatattatttttaaaagattgaactcatgacgttttgattgttttaagagtgcttatatttattactaggcggatggcccgtgcttcgcacgtgcatgatattttatatgttataatttatagagttaattg

SEQ ID NO: 352816 - DNA, 536 bp, Cannabis indica
aaagactagtcaaccgtatgttcatacctaattaggaagtctatgtcgatgatatgctagttaacttaaagagatccaaagaccacatcaaagacttaaatgagtgcttccacatcctgcgagaatatcaaatgaagctcaatcctctaaaatgtgccttcagcatccaaacacggaaatttcttggattcattgtcaactcaagaggaataaaagttaatccaaaatagatcaaggccttaaaagacatgaagtcaccatcacgagtcaaagacgtgcaaagcctaaccggatgtttttgctgcacttagcaagatcgtctcaaagttaaccgacaagtgtgttcctttcttcaatttactaaaaggaagcaacaagaggtttgaatggactaatgaatgcaagcaagccttccaagctctcaaacattacctagccaggccttccatcctatgtaaaccaatagatggtgaagaattattcatctatttggctatcaccgagcatgcaatgagttttactctagtgcatgagga

SEQ ID NO: 352817 - DNA, 472 bp, Cannabis indica
gtgcatgaggaagaagggatacaaccctcggtctattaatcagtaagcatctcattggggccgagtcaaggtatcccccccattgagaagctagcctactgcttggtactggcctctagaaagctaatgccttactttcaagctcacacgatcaaggtgttaactgaccaaccacttaggtaagtttcgatgaagccagaagcatcagggcacctactcaagtgggtagttgaactaggtcagtttgagatcacctatcagcctcgcacaataatcagaggacaaacattagcaaacttcattgctgagtgtactggccttgaagaatatgatcccatgatctgtgaagaccaagtccacacgcttgagactccagctcaggggacactagactttcttggaagctttatgtagatggatctgttggattttatgccctaaataaaactttttacaatctgattagttatca

SEQ ID NO: 352818 - DNA, 877 bp, Cannabis indica
gatgccctgagcaggaagggtcccaggtagatagctagtatggttcagatttcatcttagttagcagaggacatggtcagatctaacatcgagtttgttgtaggcgagcctcataacttgacgctgcaatctgaatttttagaacaatttaaagccgctcagttaactgatccagagttagtaaagatcagaaaagaggtatcagctggtcaagccaaggactttacagtcttagacagtgggatgctgttgttcaaaaccagggtttatgttcctaataacgcggaactcagaaatgaaattctcgaagaagctcatactactccatattccctacatcccgacaccaccaagatgtacaaagatcttaaaccttacttctggtggagcggaatgaagaagaatatggtagaattcgtatcgagatgcttaacctgttaaaaaattaaggttgaacatcagagaccggcatggtcattgcagcctttaacgctacctgagtggaagtgggaaaatatcatgatggacattgtggttggattacctagagctacgagtttgtttgattctatttgggttgtggtagaccgattcacgaagtctacacattttctaccacttagaacaaccttctcagtggatcagtacatggatttgtacgttaaagaaatagtaagactacatgctataccaaagtccatagtttcggataaagattcgaaatttacctttaagttttggcagagttttcaacgggctatgggtactaaactgaaatttagtacaactttccatcctcagactgatggacagtccgaaaggacaattcagatactaaaagatatgttgcgagcctgtgttatggattttgagggct

SEQ ID NO: 352819 - DNA, 846 bp, Cannabis indica
ttttttattattatttttatttaccaacggttatgtacatcagagaaaaaaaagagaaagatgtatagtactgaaaatactagacttattgtattacttttctcagtattttacaaatgattgatacatcatatttgcacagaaagtaaatgattagagaaaatgttcctaataatatttgcacagaaagatgtatagtactgaattaatgtgtcaattcgtgatcctttattttaacattctcccttaagctgtgctgtggtgattgagcaaaacatgtttaatttatttttacatttcatgcttcaaatgatcatctttgttctggctgttttatttatatttttcaaaacttgctttactcttttttgtttttgatgtcggagttgaaacgttacaatacctgcaagatttccttccaatctttagcaaccctatttaagaaattaggatgagcatatatatcacatatcaagagaatcgaaatggttttgtatctgtggtttgagaaggatacaccacaagcttcattaggcaatgatcaaacacacctttctgagaaagagtgactttattatgagcatatagataaaggtagaggcaattcggaaggaatttttaggcttaatccaagtatgaatatatactgacttaaggcttcatgataggttatagtttttaggtatattttatatgaaatattttagaaatgtgtttcagttgattatatttattttatgcagaattacgtacgtttgttttctagttattttaggttatgtgacagtcagtagtcccgtgatccgtaagaagaaacaccgggtaagctgtgcaatcccacaccgc

SEQ ID NO: 352820 - DNA, 1265 bp, Cannabis indica
ttgcgattgaaaggtactttatctccgctgatctcttcatttcagagtgcgtttgtgccgggtcgagctattcatgataatgttatggtggggtttgaattgctacattccctatttaagaagaataatggtgtccggggatttatggctttgaagctggatatgagtaaggcgtatgatagagtggagtggagtttcttgcgggcaattatgtgtaagttcgggtttccttgtcgatgggtggatctgattatggattgtgttactacgccggagtacagctttttggtaaatggaagacctagaggttgtgtggtgccttcgaggggtttaaggcaggggtgtcctctttccccctacttatttctattttgtgctgaggcgctatctaccatgcttcaacaggctgaggctgctggtgatttgatgggttttcggtgttcccgggctgggcctcgggtgtctcatcttttctttgatgatgatagtttaattttggggcactacaaaaaaaccccaaattcccgtcggttttacactgtcggccgaaaaattcccgacagtccataaaaccgtcgcctatacgagcgtcgcgaatactgggtaaaattgacgatggtcgaaaactgtcgggaaaaaagtatgggctacggttaaaaaccgtcgcctatagtgttcactataggcgacagttttaaaccgtggcctatagtacaggctacagtttaaaaccgtagcctatactataggccacagtttaaaacagtagcctatagtgttttagggacagttttaaactgtggctatagtataggccacgattttaaaccgtagcctatactataggccacggttttaaatcgtggcctataatgttttaggcacagtttttaatgatcgcctatattaaaagttttcagtttaattataaatttcgtatttttcagcgccggtttttgccagacattggattgcaaaaaaaaaaataaaggataaagtatatatattgtcactaataaaacagaaactgatttatatttagtaaagttttccctacattaattaatttttactaatttatatatatatatatattgtcactaattagttaggataaagtataaacaaaaaaaagaaactgatcattgatttagtctttgtcgcactgtctgtgctcggacatattcaatccactgatcacgcagaatattcatctcgttaattgagtacaaatcactcttgccctgcaaaaaaaaaaatagaaa

SEQ ID NO: 352821 - DNA, 668 bp, Cannabis indica
agtaattgctggtagatcttgtcttactcatagtctgcgtcctactcaaagactttgtctttaactggctcgcggatttacttgttcccatactttcttgatcattagctcgctgagtactttctcctcttcaagttgatcacctatgggttctggatcgcctcgaagtcacacttgcttcttcacgctctgttctttcctcccgggagcaatttgtcgtatttcccccattagggtacttacgagtcctctctctatgagtttgggaagaacgttggtgattcctagcaggtgatctccattctcccgatttagttccaagatcctcgtcattttcataagggatttctcgttcatcagtttctggttgtctcccttctagctgttcatcctgattctcaaggggtgtctcattttccctaggttgttcttcccaggccttttcctgtctcctagttcgtgagccacaaggtctgcttcgtggtcttctcactccaggttcaggttgattttgagcgttcgttcctcgagcgcgttgtctgcgtactaggaccaacgtcgggttaagttctccggggacgtgtggtccgagcactggggccatcctcaggttgagccctcctgaaatgggtggtccttctggactgcggattggtagatcttctaga

SEQ ID NO: 352822 - DNA, 732 bp, Cannabis indica
gaatttatacattaaatataatcatgaaataaatcatgtgtactatgcaacataaaatacgatttctgatctttattaattagtaaatctgattatattgaaatgggtttcatttagggcacaaaacccaacagttctctcaccacccttggacttcatggtcggaggaggtaagcccgagcttcctcccactctcttcttcagggcctcaagcattttccgagacatgtctgcacgaaataaaagtaatataatcagagaaaagaataagaaatatgaaggcatgataaacaatacagctaaaaacaagatggagtaccctgcacttttgcaggggcatctacccgaacaagtactgatggggcatcatcatccgacgagtcttcttgctcctccaggacagctttcccctttccttctacaggggtggatggccgagcatgtacaccgggctccgtgatctagatcgtatgttcgatgggcctgtgcccggccagaattttcttcttccttttgagcggtctttcctgctcttcctcacactcatcctcttactcagaatattcttgagcatgctattcggccccagctcctcccttcaacttagcctcacgattaagttgaataagctccttctactgctcaaaatgctcctgagcatacttcttggctcctgcacctcccttcaacttagcctaacgcttgagttgaatgagctccttctcttgctca

SEQ ID NO: 352823 - DNA, 798 bp, Cannabis indica
agttcagataattgacgaaacgaggtccgcccttcctcttcggcgaggattccttcttgggaggagacttggccaacttcggacttcgctgtctccgcgggctgcgtcttcttgggcttcggcccctggagttcttcccatggggactgcgagatcgtgaacgcggtattggcgatttgcgcttgtccttgcccttctccaactctgccaaagaattctcgattatcttgtggggttctgccatggcgaagaattcgactaaggattctggtcttcgaggttgcaactctttccagaagtcggtcctcggcaaaatacctgttatcagcatacaaacaagcgaagactcgggagccttctcgaattttgttacctctgcattaaactatttaaaatagtcttgtaaagactcaccgggttcttgcttgatgttggccaaagtcgtataaggtggcctataggtcatcgtggcctggaaatgtgtgaggaataagtcgacgaaggtttcccatgtcgatattgatgccttaggcagttgggaaaaccaatcgtgggcgttttcctcgagtgttgccgcaagaatgcggcattttgcaagctgtggtacctgatccacctccattatagtattgaatttttcaagataatctatggggttagaagtacctttatactttagggattcggatagacgaaatcccttgggaagttgggcttgtcgcacttccgtagtgaagggtgaggtcccatgcaacttgtatatgggctttcgttactgctccagcattttcaaagcct

SEQ ID NO: 352824 - DNA, 595 bp, Cannabis indica
ttcgagactcgatgtgaagctgactgggcgtcccttcaattttcggctaattaatgctctgacaattaatatttgaaaatccgaatttctctctccacggctgacggttgcactcgattacttttgatttcccatattcgcttttgaggcaggaagccgaggcgtctaaggttcctttatgtacgattacccttttgcctataaatacttagagtactggcacattacttcattttatcacccttcgttgttaagtaaactttagagtgaaaagagagaattttctggcttcgaagtttccgaagtgcctacagacaatttctggctttgaagttgtcgaagtgcctacagaagatttctggcttgcttgaacccggacattcgaatctttgagtaagtttctgattccctttatgcttttcctttgcatgcttacgctttgaatgtaacttccttagagaaagaaagctttaggaaaccctagggtttgaaacttctgcgactcttcttttccatgtccttatgttagctttcagccataaggcttattttataactgcattgcgtctgttttccatcttgcttatttcaagct

SEQ ID NO: 352825 - DNA, 503 bp, Cannabis indica
ctactctggtgacttttccggcaccgatagaaaacttcggacagtaaactccgagaaatttgtcgtaattggcattgtcgccagaaaaattaccgaaaaaatcaacaagaaaccaatttcttgatgaactggtttttgggaaatttttttgtgatttttccagcgataatgccaattccaatgatgtttttagcgccggcagcaactccaatgactttctcagtgccgtcagcaactccagcgactatgccaatttcgatgacttgtttcagttaactttattgtttagcatttatatttcgttataatttttcatagcgtcgaatctggtttcacagtgttcataagttcaaaacttgttttacaggttttaagggttttgtaatgaggttgctctattttatgatgttattgtatattttttattttaagtttctttttattattttgtttctagttatattttgttttagattattgttgtgcattgtgcgttgttttgt

SEQ ID NO: 352826 - DNA, 712 bp, Cannabis indica
actaagcggtctttacaaaatccattttcgagttgaagcttgtttacaatatttggtaaattgtcactgtttagcatactcggagattctctgtaaagagcaaagcataagaaatgttgtccagaatcatattccaaccatatctctaatcatcttgatatgtaacccaaagctgccgtgctcaaaattttctataaaaaataaagaaatcccatcatcaatagctaatatcatgactatagtagataaaaaatagataatgagaacaatcatatatgggcaagaaatcaaaaaaaccatatcagaaaaaccagtagcttaagaaaaatagatacaaattcaattactcacgcgtatatgttgaaaatcaaataaaacaaaaatatattgtcatgtattgtatgatttttaatatagtgactcacgttgaagagagtaaatgcgagctcccatggatgaaatgcaccctctataggacccaaaaagttacagaaatcgaacgacggaagagggtcgtggtggttgtcggtgatgaaggtgttgccggaattccctggctgcatacaaactacgacagaacgggcaaaggtctatgaacgggctgaaccctcttcgttgctgcgatcgattccaggtattatatatataatatcaatatacatatgaaagaatatatattaccctattttaaaggtgaattaccttttcgatg

SEQ ID NO: 352827 - DNA, 698 bp, Cannabis indica
ccttattttgctgatggccttgtggtctgtcccgctcaaccacttgaagcctggctgagagaagtaaaaatacctcgacctgccttgcttgggggtagacttcaagtcgaagaaccaagcgacctcgtggggagaaggagcatcccatccctgggaagcgtagagtacgaagagagcggataatgcccttgggagtaatctgggccgggcacaggccgaagaagtccgccaaatcccggaagtacttatggaagggcatcagcgccccttgctggtcgtgagcccccgaccaggtgcacatccccttatcagggtttgtggcacgattgtcatgggcgggaatgtagcagtgcccaagtatccgtcctggtcgagagtacggaggcgtgcctccgaaatcttggacgaaggacttacccacctggcgcctaaggcaccctgcctcctgtgtggaaccgcctcagcaagctcctcactgacgtagtcaacgccctcaaccaggacgtccccgtcagcatcgactggttgcccagcctcattgtactccccatagttagggggttcaatctcttcctctccctcagcagctggaggactgcccggacgcgcctcgtccaactcctcaacctcttggacttcggcatccccctcagggtcctcctccattgcgaccgccaaatcctgttcggcgtcgggca

SEQ ID NO: 352828 - DNA, 532 bp, Cannabis indica
aatacaagaggctaggaaggaaaaaagttacggttgatgcgattgcgagctaaaggagggagggcgggtgttgtagtggtggtcaaggacgacagggtagtgtctttacttgctacgaagatggaggctagaggtcctatggaatgcgaattggctgccttaatcgctagtttgcaggtctctaaggagctggccctgaccaatgttaattttctctcacactattgactgctggtttcattccttcttgttttcgcaattttggtttcgaagaagtgtaataccccggttcatgagctgcccaaatggggatcaaacaacagttgtaaattgtaatggcttttgttcaggggttccaaccaaacatttaataatataaaaatatattactttaaatatacacatatatcatatatatatataaatatataaacatatatcatatatatatgtatactgctttaaataaaaataagacataaatttacgtagttcagcaaattgtatttgcctacgtctacggtagcaaaca

SEQ ID NO: 352829 - DNA, 781 bp, Cannabis indica
gtggcattttcgtaaatatcttcaatattgtccggaatgggataagacttggtattcgccatttatttaggtctacgaatacaatggtgagagactctgtgatttggtatgtagtttggccatatgtctacaaagcctaaatcatgtatgttcttggtaaaaggctaaaagcttagaatgctctttaagggggagactggtatcagctctccaccgccccctggtaccttggtgttaagtgagctactactagtcagcgagactagtagggcaggcatatgaggaccacgaggggactcatatgtctccatgagttagagtactcatggacattatcgggtcgatccggtagtgcgcttgagaagctgccagaggttaaagggtacatttccattggcttgcagtatgccgcttgcacgggacatggcctaaacctccttgagatattgtggtgcgccttggccatgagtctcaacacgagatgacacaggtagtcattcgtgggctagtttgcatacgcacatgggacagatgcaccatgctagaaagagatagaggtctaacttttgctgctagtttggtggcttgtctcgatggcctgccaacatgcatgaaggcatggcgccttaaggaactgtccatggatatatgggagtccttgggcaatgagggagactgattagacagtatcgaatgttaaaagcgttggcacgtcagcttggtgttggcatcttgccacacatgctaccttggtcacgagtgactaggtgagcgtcggtgt

SEQ ID NO: 352830 - DNA, 732 bp, Cannabis indica
cactgtcggattggctgcctttgatgagtcggtgccacgtgtcggctgcagaataaaggagaaaaattgcattttgtggctgaaggaaacggaccgaacgatgcccattcgcggggcatggcgtgaggcgcacacacggctagggtgaggccgtgtgcctcacgcgcgcgtgaagagggagagagggccaaatggagctgctgctcctgttgcttttgccgagccaatgggcgatcgccacgtggcgctgatgtcggcaggggaagaagaagagggccaatagggcttttgtccttttgtgctctcttttgggcttcaaaaataccaattttatagctttggcctttatttttgtcatttttttttttatttcttttcttttcttttaataatgctatattttttttttcaatcaaacacaaacaacattaaatccaaacaaaatattttcaacatgaaatatatcataataattttaatgaaaatatttatttaaaatctaattaatttgtatttctttaaataaaaacaatgcattttcttaactttttatttctttttctctattatgccataaatactaattattatttataaacaaagataaaattaatctttaataaattattttcaatataaaaatatattgtattaatttcatgaaaatattataaagaattaattttattttgtatttttacactataaaatatgtaatattttggcatttaa

SEQ ID NO: 352831 - DNA, 498 bp, Cannabis indica
aaaaaaaaaaagtcaaaataaaacaaataaataaactaataatcaagcacggagtaatcaaaatgtaaaaaaaaaaatacaagaatacttagttgggatataaccagcgtagttaatcctacttcaaggctagccaacaattgcctatgtcaaatatatccactatctcagaaaagattacaattctctaggttctcaaaagattgcaacgcaacaaatgtacaaccatcttctactcaatactcttactcttgagttaacaatagttcttgctcgaactaaaactctcagaaattgaattgtacttaggtttgatctaggcctaacatatatatagggtcgagatacatgagagacaatcaaacaataagtacatgtttgacatcataaccaaaaaattgttttttgtttttaaaaacagaaaaaaacaatttagcttgtttgtaccttgtttttgtaaaacagttttcagaaacaaagttacaaaaaaataagaat

SEQ ID NO: 352832 - DNA, 757 bp, Cannabis indica
aaaattttaaaaacaaaaaaatatcactttcaatatttttttaagagtttttttttctttttggacttcgattacactcggactcaaatcctcccacgaccctagcgctgaacccgtcctctgaccttaacacgaattcgaccccggacctagacccgacgtaaataaaatcgaaaaataaaaatgaaaataaactttacagaacacacttttgttttctgtttttaaaattgaaaaataaaagtggttacagaacgtatttttgtttttcaaaaacaaaatttttataaatgaaaattttactttcattttttgattaaaaaattaaaaaacaaaagtgttactaaacgacacctatataaatttggtgttgaatttgatatatcctaacaaataaaattaatatattatattgtagtaataaaattatatactataaattttttttaataaaaataaaattagtatattaatactaaaaaagtatataaaatactagtaaaattatagatactaccattaaaatatatatatatatatcatgctataagtattatatataataaaatagaaattaaaaattaacttaactaaatgatatattattgttaattcagaaattttctttggtgacgtggacatcaatgtttgacgcgtggcataaaggatgacatcacggagttgagtagacccgagtcatagcggtcaacctaggaggggatcctagccctgtgtcacgggctcacctttttaggca

SEQ ID NO: 352833 - DNA, 944 bp, Cannabis indica
gctgccatttgagactttttctctgacaatgtagcagtcgattttcacgtgttttgttctttcgtgatgaactgggttttctgcaatgtgtatagcagccaaattttcacagaaaagagttgagggaagttgtggttgaatgttgaaatctttgataatattgtggagcaaagtaagttcacaagttgcatttgccatggctctgtgctctacctcaactaatgagcgggacactgtgggttgcttctttgatttccaggagataagagatcgaccaaggaagacgcaatatcctgaaattgatcttcgagtgtcaaggcaggctccccaatcagcatcagcaaaggcctggaagtgaatggcagggcaattggcatagaagaatagaccttggccacgggtgcttttaaggtagtgtaggattcgagttgcagcattcatgtgaggttcccttagagattgaaggaattgactgagtttgcttacagtaaagctaatatcacgtcttgtgatggtgagatagagaagtttgctaattaaacttctatattgagttggatttggcaaaagttgtccatcattgttgctgagttttgtattgggttccataggtgttgatgcaggtttagatgcgaggcaacctgagtttttgagaagttagagagtgaatggtcgttgtgtgacagatatgcctttggggcatcgagcaatttcaagtccaaggaagaaatggaggctgccgaggcctttaagtttgaattgtgcatctaaagtggatatgaagttgtttaacgttgtagtattgtttgtagcaactattatatcatctacataaataagaatggcaaggaaattgttggattactatcttatgaataaggaatgatcattgtgggactatttgaaaccttgttgtagtaaggtattgttaggttttatgccct

SEQ ID NO: 352834 - DNA, 621 bp, Cannabis indica
atatatatatgtaaattaggttttcaaatcccatatttaatatttttatttgtttagccagttttattagtcactcatgctgaaaaaatcatcagagtttgctgtcgatgctggaaaaaacacaggagtagctgtcggtaccgaaaaagttgtcggaattgccgttattaccggaaaatcaccggaaaaattaccaagaaactggtttcttgatgaagaaacactagtttcttgatgaagaaaccactttcttggtatttttccggcaacaatgccaatttcgacgacttttccaacaccgacagcaaacttcaaaaaaagtcgtcagaattggcatagtcgccggaaaaatcaccaagaaaccagtttcttgatgaataaaccagtttcttagtgattttttcggtaatttttccgtacgacaatgccaatttggacgaattttctggtgtcgacagcaactctgacgactcttttgacaccggaagctacttcagtgacttttccggtactgacagcaatctctaaaaaattcgtcagaattggcattggcagcaactccgacgacttttccggcaccgaacactactccggcgacttccggcaccagcagcaactccg

SEQ ID NO: 352835 - DNA, 1268 bp, Cannabis indica
ggctcgcagagccttttcaaccatatctgcatatgacatcgcttcatttgtagtaatcagcaggttgtgtataattttcacatttagacctactagatatttctccttcttgctaaagtctgtaggcacaatacccgaagccaacttggtcagacaatcaaattttgtcgtgtattctgttactgatataccctcactctgcaccaactcgataaattctttccgcttagcactacagactgcctcattgtagattaaactaatacttactcacaactcccactcaacaacatgtgtctggtctaatgcaaaccagagcatacatgagacctctcactattgaagcttaaggaattctttgcatgacttttatcttttttggaatatttgaaactgttccttagataaataaaatctatgtctaggagccaagagaattcctttacaattagccattagaaaaatgttccaacattttactaaagtaagttgcttgcacttgagtaaataaattaccaggcataccacaagccataggtttagatgatctcaaacctatgatactaggatcaggaagttttgttaagtccattgaatagacttattatcaaaatttcccttcttgtccttgtaatagaaaacttttggttactccatatgaatggctttaacaatagttttcttgatttgcttcttagttcctcattttgactatctattgattgtttaaactaacaatgtatttttatcacatgtgtcttctaagtcataacagggtaggttccttgaaacccttccactacgataaggtaccgtgactttttatctaggaacattagtggtattgactcatcagttgtatcaatacaacaaaggcagtgagaccatcttatatagaataagatgatagaatactttggaattgaatcaaaaggtatctcctttgccttgctacttttttttagattagtcatgttcttagaaaagtagtatttgttgaaacaaatacctttttatcttaatgaccataggatctccacccttaatcactttagaatagctatcaaacatgcaaaccttagttaacagttctggcttttcttgttcatgatcaagcatccctaaaactagacttagcatttccctagagggactcaggcatctgctagtaactaatcatacacctttcattaatatgcaatctgaatttctagggaggtaagtttggatacaattcaaagttcaatttaatgatctttgaactgcat

SEQ ID NO: 352836 - DNA, 502 bp, Cannabis indica
aaacgaaaaaattgcaagtggtacggacaatatgcattgcatactgtccacatgcacaagcagccaggcgtgaccgaagtccctcggcgcaggtggctgcatgcagcctcatccacgagcgcatgggacgatttcagagagccaatcttgttagaccgaggtagctcgatcgagctggatgtctgggcgcgtgtggtcgagggtatcaccctcatccgcgcgcgtgaagggttccacgaccataatatttttccaatcttcaaaaaatcataactaattcaaattaaatcgaaattgagttttgtaaaaaggtaaattggttaattttttgcatactatccaataaaaataattctagaaacagatattcaattatttttcacgaaaattcaacaaacatcaatcaatcatcaaacaacactcaaaacaacatgataccatccaaaacacaaacaaatcgctttatgtccaaatttcttgcaagaaaatcaattaccatggc

SEQ ID NO: 352837 - DNA, 788 bp, Cannabis indica
atgctttgttgaggtctgtgaaatcaatacacactcaccatttcttgttcggcttgggtaccagtacgggatttgcaacccaagctgggtagaaagcttcaattatgaagttgttgttgcgtagcttttctacttcttcttttaaggctagtgctcgctctttgtccaatagccttcacttttgttgaactggtcgaaagttgggatcaatatttaggacgtgcgaaatgatagaaggatcaattccgaccatatcctcattgaccaggcaaagacgtctaggtttgctctcagaaattttatcaaatctgattttacttcgagcaacaaaccctttccaatcttttgttttttggccgggatatcttgatcgatctcgatctcttctaattcttttacaggtccaacattactgtttgggtccccaagtcgacgatccacatcttcatccctgctttgggaagctccctacttggaaatgttttttcccttgtctgtgctctggctggaggatacttccttcttaaccttggccactgcaaggttataacattcccgagcagtctgttggtttcctctcagacaccctaccccattctttgttggaaacttcaaacacgaatggaatatcgatgtgacagcctttaagtcatacaaggctggacggcctagcattatgttaaaggctgaaggaacatctaataccaggaattgtaccatgatagtcatgctcatcggagcttgcccaatagttaggggtaagcaaatttgtcctagaggtgcaactc

SEQ ID NO: 352838 - DNA, 983 bp, Cannabis indica
cataaaaattcataaaatttatagttttctcaataataataataataataataataataataataattgtagccaaattataggatgcaagtcctaatttaaataagtggcattgagtggattgcatgttatattatagtggtcccataatcattagtgatatcccttttttcttcttttttcattagtgcattccttcatatccaagataactaactacttataattaagtaccgctttaccaaaacaaacacatcccatactcttaattatttcatgaaattagctaaaatttctacccacacttattaccatatatatacagtatacgcaaaataaatgactataattaaactccatgaataatatagacacaaaatattagatgagtcatcctaaaatataggtttaaaattaataaaatgctatttattaagttatagtttaactcatgaatttaagaagcgcaagaataattaggaatgaaaaagattagtttggtttggtgtacctgattttcataattaatatttttctcttactttgtttgattagaaggattatatttggcaatgtgtggtggattcgtgttaattaatgggacatattgagtgtgtagttcttgactttaattaccacaaaaatccctactaacttaggcaaaccaaacttaactttcaactgctcaccaccttcaccttcgagctccctttatacatataaaataattttttaatgattattacctattaataattactataaatattaattttaaaaatattaaattataaaattttaatacaatgacaaatgataaaaaaaagttatactaaatttaattacttaattaaaaaaaatattaaaaaatatccctttttacattatattaaaaaatatatttatacaaataaatacttaagtaaaactcaactttcttttatcttttcttttgccgaaaatttttttatcttaattttttt

SEQ ID NO: 352839 - DNA, 594 bp, Cannabis indica
aagtgtccaagtactgttggtgattataggccattgttgcaatgtgttgtataaagctgctaccaagttgatttgttcaaggctgaaactggtattaccagatttgatttcacagaatcagagtggtttcgtgtaggggaggttcattgggcataatattatggtctgtcaggacttaattaggcattatggaaggaaaacctctaaggcgaattgtatgatcaagctagattttcaaaaagcttacgatacagtcgaatgggattttattgaagagatgcttatggctttcaagttcccagctagctttgtcaaactcattatggtgtgtgtcaggactccaaaattctccttgatgttcaatgattccttacatggatactttgaatcaaaaagggggctacgacaaggtgatccaatgtctcctcttttgtttgttttgggaatggaatacctatccagaattatgaggaaagttgggcttaaacaggactttaagtttcatgagagatgtggagaattgaagctcaaccacctcagctttgcagatgatgttttgttgttctgtaatggagattacaagagtatatacct

SEQ ID NO: 352840 - DNA, 719 bp, Cannabis indica
aagtccatcatcacctgacatgcctctaatttcagacataatggctttcccttttccaagcacgggagaaggcggccgagcaggcgagatgggctccctaatgcgaatagcatgttcaataggcctaggctgggtcggaagtttcttcctccttttgagcagagtcacctgctcttccttggcttcatcttcagcattcaagggctcctgagcatactgcttggcccttgcacctcccttcaacttagcttcacgcttaagttgaatgagttcattctcctgatgagctcgttcagcccgtcaaccatcatatttcctcttcctccccttcactggcttaggaacgaaatacttgggatagagctcgtacttcacaaagttatccgcggaggtcaactggatgatattccggtcttccctcagcagtcgagcaagcttttgagctttatccctaagagtaagagttaggggagggcagtgatatgttggaatctgctggaaccgagtacaggtgatgcccgtgccatccaccatgaagtactcatcaacaaaatgcccaatcttgctgatggtcgaatcatcggtgcccgtcaacaacttgaagtctggttgagagaaagagaagtacaaggacctgccttgcttaggggtggacttcaaatcaaagaaccagctaacttcgtggggagaaggtgttggaatttattttaccaggatct

SEQ ID NO: 352841 - DNA, 909 bp, Cannabis indica
tgttactaagactgcgcctagtgtgcaagagaccaaaaacaacggttccgcacacagccaggacgttcataacatgactgttccaccagccatcaacgcccagacgaccatcggagacgcaactgaattgcaaaataccctacatcacgcagggccacaacaataccctacatcacgatcaggaggaattacgtgccgcagtcctcgcgtttgacgaacagaggcgtatgttcgccgagtcgagggacaaagagatggaggcattaagggctcaccatgcagaaatcgaagatcgtagttggcaagctactatgctaatacgaagagcctatcagactgtaggccagcaggcgtcgagcgtcattctccttggagaaaccgaggatgacccaacggtgaatgcttcccagacaaacaacagtaagccgtccaatccccgatcactagttccactcgtgggccaagaggtaggcggacaaaccttgtccgggaattcatcaagaggagtcatgctcgatggatccacgcaaaataatggagctattccacctgccaaccaagcgaaccaatcgctaagcagccaggttcttctgtgttcgaaaggttgggaacaccccgtgacctaagggacgacctaaatagaagaaggggaatacaacaaatgtgcagtccggaggtcatactcaaatccccgctcagaaagacgctgacgtaacccaaccgaccagaatgccaatcaagtcagcccaccgtacaggcccagctgacgacttaagaatatgttcatggcatggcatggccaggcagcgtaacaatgatcttgagttagaccgtgcacgcggaactcccgtctcggcagaaactcaacctcctgccactcctcacaagttcaagactgccaacatggaa

SEQ ID NO: 352842 - DNA, 952 bp, Cannabis indica
aaaaaattaaaataaaattaatatacgggactttgcacgtaacatctatccagtaaatatataaatatagtacgtactactgtgaaggatgcatgcataatgtttttgacaaatctctcaccaccgttgattagccctaatagaggcgactcaaatgcctacaaaatgtgttgttatgattcttctcttaacatatatgtactgttaattaatattacggtgaagaagtattattagaaaaaattgaatttttatacttaattttactatctaattaaaataaacttttcatttatgcattatataattaaagttgttctataaaataaagagagataaaaaaaattgagtttgagttagagaaaaaaggataaaaaataatgttaaatataaacatattttcgatatagtgtaaaaatagaaaaaaaatattaagtagtaaatataaataataattgtcacagtcagtagtcccgtgatccgtaaggagaaacaccgagtaagttgtgcaatttcacatcgcttgggaaggtcaagtggaatgattctgagactgtgtaggtatgggactacacagttgaagaaggtttaaatggattgattgctggtactacctatatcaacaagatgcatcttgttttgcggcagcccatcacgaaaaaactccatagttaagcatgcttgacccggggtaatttcaggataggtaacctcctgagaatttttcccaagaagtgtgcaagtgaggacaaagcacgctggaaatactcatgaagcagccagagtggcatattcgtgtataagagccattattccgtgggtgtaagggcccaatggaggcttgaagcggggatgttacaaatggtatcaaagccttgacccagccgaaagtgtggtcgacgaggacatcaaaccccgtaaggggggtgattgtgacagtcagcagtcccgt

SEQ ID NO: 352843 - DNA, 332 bp, Cannabis indica
tagggcacaaaacctaacaataatccttagccaactccaaccgacgcctctgcctcatattgaaatctttttatgtaaagaagtatttgaggctcttatggatgctataaatctcacatttcttttcgtacagataatgctgccaaatcttcacagcaaacactactgcggtaagttctaaatcgtgagttgggtatcgctgttcatattcctttaactaacaggaggcataagcgatgaatcgattggtctgcatcagtacacaccacataccctttttggatgcatcgcagtaatctatgaacttttccttatcagattgtagggctaat

SEQ ID NO: 352844 - DNA, 714 bp, Cannabis indica
gattgggttagaaaatatataggataaaccgcccaaaccgaccgatgtacaaccctaatgtggaggtctcatttatatgactcagtttgaacaatcgaatgagatacatcgtctataagagttatagaatgagctacacttacttttagtgcaagtgagagattgcatgttggaatttatgccctaaaaatagtaattaatatatgaaatacaattataaaataaatgatatattaattataagagtataattatctcaaaaaaaattataagagtataattattaaatatcataaaattccttattcgtatggagaaggtataatcttgtaaggatgtacaagagaattaaaattatacgatatgaataaaataagtctgtattattaaagtattgagaatctttaatatggagctgttaagtacgatttactatacactatacttctagtgtgtgtaattttgattcggatcacatatgtagatggacatatagtaaaggtactgtgtataattagattatgcacgaatgaaccgatatgtaataaacatctttcatcaaatttgtcgtttaccatgaaaagagtttatcatatcacaatgatgatcattaatagatcagcatgaatcctgagtatatatgagctcttgtttgtgttcattatgttatttgattcactcgttaaaatttctcagagaatatgattcttacaa

SEQ ID NO: 352845 - DNA, 868 bp, Cannabis indica
aattaatttattgtgtttttcattttctgtgcgacttacatgcgatttatatgcgatttgtatgcgatttatatgctatatttgaactttatgtttaatctgtttatgcgacttttatacgatttatatgcgatgtgtgtgcgattattattcagtgatttgtgtatttgttgcgacttatgtgcgatgtttgtgcgatttttgaaacaattttggtaattgctttgtgcgatttcctgcgatatttgtgcgacttttatgcgacttctttctaactgttttcatttggaacacagcaaattgatgccatggcgcacttattgagaagaagacggaccctgtacccagaagtctacacccgaaaaggtgtagttttggacacatctgctccacagttcttttccatgttttggaatatgtgtgagggtgacaggagcaagatgaaatgggatgagggcgtcatgagttacgtgcaggggataccgcacagatacttgccatgttgggagaagcaggagtacatatactttgtgttgcaccttcccaaagagcgccactgggtggcagttgaggtggatatcgagaactgggagatcattgtatatgattctgatatcggtgccaccgttgaggcagccatggagtcatatttgaagccttacagcgagctctttgcaaatctaattcgagatagcggttatttccaatacaacaattatgtacatccggtggagttgggcgatctcagtcagctcctacccctccattatagacgagctacctcggaggttgtaccacaaacgaacagcaggtgaatctcttttttttttgtatattttgagtaatttatttaattttgcactccatt

SEQ ID NO: 352846 - DNA, 748 bp, Cannabis indica
aaaaaaaaaaaattaacttgtgatatatttgcatcaattttttagcattatgctccaatgcatatttgcaaaaacttgagcaacttattttagatttttttatgtataattttttgtacaatatcttttttctagtcaaatatttttattattaataataaaatattattacttgccaccttaagatgcctaacactatacaaatatatgacacttaataattattggttagcagtttctcatattattcactaaatcaaaatttttgagactcgatattaaaatacactaataacgatatgccataatttatggtgtttaccacctccctcagaattttcattatcatctccaatggatgatgtataatttaatctaaaaaatgagccaatattaggtaaaattattcattgtttgataaaaatgtgtaaaaaagaatgtcaacaaaaccattaatttttttattaaaagtatataaacattctattaaatatataaataaaatttaaaaaataattaattacactaataagtggtaaaatagtaaatagaaatataatatttattgtgtctaaaatttcgtccgtgttatattttgtgccaaatttaatacaatttttacaaaatgtacatatccatgacacaatatttaatatgtacatatccttattcactttagttagaattttaacttttttttttccaattatacataactttgtatgttttttttacttgttgcgcaccg

SEQ ID NO: 352847 - DNA, 843 bp, Cannabis indica
gtaccacgtattggaatgacatttaagaaaatattaccaataaaataccaggtcggacgatcacactaagtactgaaacaatatttacaattaagtaaatgaactgctgggcagactacgctcaaaggtttcaacaaaagaaaaaaagtactcaggtcggatgactaccatttaaagtacaatttcttatttctgcaatttgttttatttcatattaagctaaaagatcagattagatcaaatagccctgatgtaagttactacggtaacaaacacatgttcgatcaataaatgaataaagatgtttatttcaaaattcaaatttagttgaaatttttaacatgttgctaatttcccatccagtgcgtacaaaaggtttggtcgaagccaaaaccctgaacagataaaaagtatacttgtaagaaacaagtaaccaagagttataagtctgctcggtcacttggtgggcacctacacctgtacaaagcatttgataaagataaaacacccacaattgcacgatgattgtaaacagagaatgaaatccattaaagataaaaaaatcacgtaatagtggggttaaaagctgcccggttagcccgttgtctgtaaaatgaaaaataattcgaagtttaaagaccgattggccggtcatgatgtcttaaaaaaggccttatgtcccaggctctcggttcagatcttctgggcaggtaggagctggaggatctattgtttgaacgggaggtacatcagaatttttgccggaggtagaagcagccgcctcagtttcaccataaaccacttgggaagcacagaactcgagatacatatctttggcttcac

SEQ ID NO: 352848 - DNA, 721 bp, Cannabis indica
ttgaaatttgaatttttggtgtatggttgaatgagggggaaaatttgaatttatagaaaaaaatcgcgagcaagtcgcgacttggcctagggctagtcgcgactagctcacactcgaatttaagccgtctctggaaaatagggaagtcgcgactggggtcgcgacttgaaaaataggtcgcgactttaaaaataggtcgcgacccaggaaccaccaggtcgcgaccactgggctccagtcgaaaataactttttttttcatgattttcacgattcaactaaaaagaacaatgtctggtaccgatctaaaaattaaacatactaaaaatactaaagcatagactaaaaacataatcaaaaagtttgaaaaattaaagaaaacacttgggttgcctcccaagagcgctgtctttatcgtcatatagccggacgctgagccttgttcttcaaagtggcgccagaatcatggcggacttggcttggtcaaattgacctcccaagtagagctttaaacgctgtccattaactttgaaagttgctggaccatcaccttttaactccaccgctccataaggaaacaccttgaccactgtgaatggtcctgaccaccttgacttccactttccaggaaacagtttcaaccttgaattgaagagtaacacttgctgcccaggttgaaactccttccttactagaccttggtcatgccacttcttagttct

SEQ ID NO: 352849 - DNA, 1144 bp, Cannabis indica
accagagagaacttgtgactttacagagtcaaattcagatgagagtcctacaagaaaactcataatagtcatcttctctcgttagagctgttgaactcttacatcaaaactaaatggcaataacacattaagctctacatatgctttcttaaataccataaagtaactcataagagacttatcttgtttatccgcacgataaaaggctttacaaacatcatgtatgtgagatatgttgtctttgccagaataaaaaaactccaagtaatccattagttccttaaccaattcacaatgattaatcaaactattacctcattatcgatagaattttgaatttgaaggaacaagcgagcatcctcacagagccatattttccttgaatcgtctttttctttgggaggattgttagtcaagtgatcatctttgtcaatactccttagatacagtcgaatcttcttactccatttcaaattattcgaatcaatcataatattcttgtcaaatctatcaattaaacatgttatgatatttttgtcccccgattgagtctccgaggtcaccaaaactgtaaatatttttattacaccggtaactcatattacattcacatatgtcatataaatctcagtaatttataaattacgcatatttatccacttatagcaaatttaaaatttatgttgaattagattagtaggatcataatcccacttattacttgattaactcataatataactataaactctaattatttaccattaggcctatcgggagattacacagaaaataccaaattacaacattagataaatgcaagtgggcttagaagaaccgagtatagaattggtaaaataacaccgtcgaagatgccgtctcacccgccggcgtgtgggattgtgcgtagaaacttcaagtggcgcgtgagccctacgcgcgaggaatccggtgaccgtactttagggtttggtagatcgacagctaggcaactttcttgagtgggcggtgagaataaaattgcactccaaatagggtttttaaaaaagaaccctaaattcaaaccctaatcttcttttttatgaacctatttcaaatttcaaattttgaatcacaattctaagtatggctctgataccatgta

SEQ ID NO: 352850 - DNA, 991 bp, Cannabis indica
atttagtaattaattataattattaaataaatagttttggcatttagtaggcaaaaatctaaactgaaaagaggtccactatcatgtacggccatagttgattttttgcctaatattttattcttttttaatccatacaattcaaccctaagcccttgttgaaacactataaaaggaacatgatactctcactcatccaaattttgtcaacttgactattaaaccaaacctagatgagagacttccttccttagtgatttcaaaacctcgttcattatttggattccttgtgaaaaacaaagcaatttttgtttttactgaactcgattccgctaaaaattgagaaagttatggttgtttgaaaaattgggttcaatggtgtcgagcatggtgctcgcacgcaccaggtgttcggacaagacgcctatctacgcgcgcgtgctcaaaaatcttgtgtctgaagcccgtgtctcgccctgccttcagacacgcaaggctacatcccttgcccaccttatgctgcacggcccgaggatgcttggtcagggaggctgcaaactaccttgtacgcgcgtggacagggctacttgcagcctgtctgggctggacgtccagcctcctggcagccacactcacatatgcgatttttgtgggatttttccccaaatttcaaatattttcaattttcaaaccctaatttcaaaaataaaatattattttagtatatttaaactaaaatatcaatattaaattaataatatttaattttttatagattattattaatttatgatatcttgaggtttaaatttaaaaattgacaaattaattttttaaatatggttagattttaaaattttgtcaatttctttaatatttatatattatttaattataagatcagatattttaatatttgtcatatttaaattaaaagataactttatccttttaatttgaaatattatattaaaattatcttataagataa

SEQ ID NO: 352851 - DNA, 625 bp, Cannabis indica
taataataataataataacaaagaaataagaatgctataatcgcattcttccacaacagtgaaaaggacaaacaatatatatagaattgaaaaactgtaactgatttactaatacatatatgccagagagcagcaaaggtgattactacattatatatataatagtaatccaaaatcaaaaaacttaacagtagccgcagtcacctttatatatattacattcaaatcaaaaacttcaattgcacctattcataaatgatatatatatatatacacgatgacttagcatatatgaattacactgactataatcaaatagtcaattgtaccgcccatgccattaaatatccttaaacgattgaaaacaaaagcaatatatttaaatatacatatgcgattgctataaatatatgtgcgatagcataaacgattgaaaagatgcggaatcacatatcgatcaatcgcgcatatatataaacaattataactaataaaacatgtactcatcaaatacaaaataataataataataataataataatagaagatcaatattactataaatcctcaagaattaatttagagatgctcttgataccacatattaggaaatactgtaaatct

SEQ ID NO: 352852 - DNA, 1039 bp, Cannabis indica
acgaccgtgtccgggcccgagttccaatcttactttgggtctgaggctttgtttttgttaggttctaggtctgggtccgggtccttgtcccgatcctagtcttgctcaacggtcctggttcgacgattcttgttcaggttctaattttgggtccaaggtctaggtctgggttcgagtttggttcttcgtctcgattctggtcatagtctgagtcccagatctacacaccgactacaggtttgttccaggccccattacccgaatcccgagtcaagatctggatcactatcacgggtctcggtttggttcaggttcatgtcccaggtctcatttctgaggttgggttctggatcgagactggggtgcggttctaagtcccgacccttgatttgtgtccctagtttggttccatgtttgggtctgagttcaggttcgggttcgggtcccgagtcaaggtttaggtcgggatctaggtccggctcccgattcgggtctaggtctaatttggagtcggggtcctggtccggttacggttctggatctaggtccaattttagttacgattccaagtccaaggtcttcttctagtcctggtcaacttccagttttggttccaattttgggttagagggtacgggttcgggtccactttttggtttgggactgggttcaggtccgggtgtgggtttgggtccttgtcagggttggggtccaaggctgggtcccaaatccagacaccgactatgggttttgtccaagccctgggtctagatccggatcccaatctcgggtcccattctggttacatttctgctgccgagtaacaagatgggtcctaggttcaagttagggtactaggtccggtcctagttctgtttcctaggtccctttccttattcttggtcaaggtcccgattattgtgagggcttgggtcacggtctaggttcgggttcgagaccaagtctcagttcgggtttaggtctctttctgggttttgatctgggttcgggtttgcgtttaggtgctggtcctggtcct

SEQ ID NO: 352853 - DNA, 511 bp, Cannabis indica
agatattctgaccatatctgaaagtttcgaagtgaaaacatcaaggttttgtttgagaaatgtcgttagtttttctcgctgttgaaaagttagtttggaaccaattttcaaaacattattactatctcttggatcaataggtacctcaatggtgtcttctgccgcttgggcggttacatcataatcgaggatcttaggatcccaatccggtccgtcttcatgcgacacttcttctatcctgaagacttcttggcgagggggtggtgcctctaacagatatatgacattgactaacttcttttctgtgagcttaattgctgcgttgtagaattctcgcgagtctgattggactcctcacatagaacctactccagcgggagtagggaacttcattgtgagatgatagattgacgtcacggtcttcatctcttttcagaattggccgaccaatcacgacattgcatgctgagtattggtcgattactgcaactttctggagtcacctgcaata

SEQ ID NO: 352854 - DNA, 1332 bp, Cannabis indica
aggttgagaagtacaaatcagaggccgagcagcaaagaaatgaaatggtgaggcttggagggaaggtgcatgccttagagacagtgggtcttgagattttttatgacttttggaaggctaatcccaatgcaaactttgattacttgggtcattccaaagacatgtttctcgagtattgtgcttctcaggtggcatatggagaatctaaggcgaccacttctacctctggttagaatgttgacatgccccccgctcagacaacttatcctccagctccaaccagccaagaagattcgtacaaagagcctgggactccaaccatttgaatactttttctttctatcttttattttttatatctgtccggccataaggccttttttttaagacagagtgatcgaccaagcggtctttaaacttgaaattatttttcatgtttcagccaacgggctgactgggcagcctttaatcccagttttacatgcttttgatatctttaatgaatttcatcctctgtttatgatcataatgcaactgtgtttgtttaatttttaccaaatgctttgtacagatataggtgccccccaagtgacctagcagacttatgaccctttgtcacttataattttttgcaagtatgctcttttgtctgttcggggtttttggtttgaccaaaccttttgaatgcactagatggtaaattaatcgagaatttgtttgttaccgtagtaacttacatcaaagctattaatttgatctaatctgatctttagcttaacatgaaataaaacaaattacagaaattaaaaattgtactttagatggtggtcatccaacctgagtactttgtaattttatccgaacctttgggtgtggtcctcccagaaggccattcacttaagagtaaatgttctttttgtttagtacttgatatggtcatccgacctggtacttctattggtagtattttcttaaatgttctctattccaataccttggtaccaaaacaatttgcattttttcatcatacttacccaatttgtatgcgcctgattcgagaactttgacttcctgttattgtccttcccagttaggtccgagtacacctgtcgtactgtcttcggtgtttagaaatactcttcttaggaccatatttcccacaaagaatttctgagccttcacttgtttgttgaaataccgagctactttttgttgatgggccatcagctttaagtttgttgtggttcgcgtcccttcgatttcatcaagtgatttgacaaggagtacgtgatttggttcttggatgtacgtcagtcttctgtgggatggtgg

SEQ ID NO: 352855 - DNA, 684 bp, Cannabis indica
tttttctcacaagaacagaatcatcaagcttttcaccaagagcaaaatattcattagctatatcaaatagtatttcatagaattcagttagggtttcattatcagacatcctaagctcatcaaatttagtttgaagcataataaatctagagcgcttaacatcagatattccttcaaactaagtttgaaggatctgccaagcttccttagcagattcacatgatgatataagtttaatataaccttcacctacaccattaaatatagcatccaacgctttgttattttaggcaaaaagtaaatcatcttcattagaccattccagttcaaattttattttagaataaccttcggaatatatctcaactggagaagaccaacccgatagaaccatcctccaagcttaagggtggtctagaaatcaaacttccttatgcaaaaaatgacatttacacaaaaacacacgaaaccattaaaaggaccacactaagagtttagtgtcccgctctgataccaattgaaaaactgaggttttgcaaatgtcaataataaatacaaaaatataaaactgtatacgtctgcataagcagaaaccaattttgcagcgataaaacaaaacaaacagaatatgaaaataattacagaaaattaaatcacttgacacaagagatttgtacgtggtat

SEQ ID NO: 352856 - DNA, 554 bp, Cannabis indica
tttagctatgcgagactcttcaaccatgatgtctctccttcggaccacacacctttgattctgaacacaaattttcgaaataaagagcaggggcatcggcattttaaattcgaaaattggtggttgagtgaaccgggttgtgaggaagttgttcgaggatgctgggaaaataatataaggggatcccttcagttcaaaattagtaaatgtggtgaagctcttgcggagtggggcagaggcatggaaggcaacttttctcaaagaattaaaagctgtaatatggctcttaagcggcttaagggaagaagtgatgaggacgggttgcaacagtatagtgaaactaagaagaagttgtttgaagttcttcatcaaaaagaggtctattggaagcagaggtctaaacaactatggctcaaagatggcgatcaaaatagtaagttctttcatgctagagctagtgctagacgtagaaacaatcagattgtgcgtctaaaaaatgagaatggagtctttgtggattgggaaagtgggttgaatagtgtcatttttgatta

SEQ ID NO: 352857 - DNA, 721 bp, Cannabis indica
ggcataaaacccaacattttcatgcctcgttcttgtcagttggaagttggtcgttgagtagataattgattataggagtcatccacgtgggcgagctatctatcatctcgacatcttcctttttgcatatacttggcttgtttaacatttccaccagaacaaagtttagttcatccaagtcattctgcgaggccacttttgctaaggcatcggcgttagagttttgttctcttgggatttgctcgattttgaaataattaaacttttccaagttcttccgaactttctctagatactacgatcagttgcgaatcactatgacatatgagatttttgaccttcaacgcttcaactatcctcaaaccagcgatcaaggcttcatactcagcctcgttgtttgacacgtcgaattggaatatcaaggcataatgaaacttaaagccttctggcaaaattaatattacacttgcacccgagccctgctcgttggatgcaccatccacgaataatctccaagtattcgtgtctcgctgaacaagcagatttccctttggagttattccttctatcaggaagtctgccaaagcttggcccttgatggatgttcgtgggtgataagctatttcaaattgccacagttcagttgactattttatcaatcttccagaagcatatggttttgataaaacttgtctcaggggttgatcagttaacactttaa

SEQ ID NO: 352858 - DNA, 695 bp, Cannabis indica
caaatcacacatacattcgttttagctgatccattcaccaaagttttgactataactacatttgaaaagcctagactgaatttaggattaattgaaatataatgatagttttatgttagtgcaactgcgagtttgttggactttgtgccctaaataaaactctatttcaatgtaatattttctattcaattatcaataaacacatagatcaaaaagaatcacatcaaaatcacacagacatcattttaaatccatatttcttgaaagtaaattattaccatggctctgatactagctgtcagattatattttgccaagacctagatttactaacaagtatgtttttaatatcctaaatatgaatctctaaaacaatgaatcttaaacacatataaagtatgagaaaccttacattggttgcagcagaattaaatgactccttctgctcagatctctaacccttgttcctttctgtcgcggagtataatcaagatttgagcccgatactccttcaattgtttggatgcctcatagtcttacacactatgattgagaactaacttgctattggtgggcatgcactcaatcaccaaggctcaatttttaatgtgaagaacattatagaatttcaaaaatagaagagagaaaaagagaaagaagaaagtctcaaaactctctagttgtctaacaagatg

SEQ ID NO: 352859 - DNA, 684 bp, Cannabis indica
gtcttccaagtcataacagggtgggttcctttaaatcctcccactacaacaaggtactgtgactttctgtccaggaacattagtcgtattcacctcatcggttgtgtcaatacaacagcagtagtgggaccatcttatatagaataagatgatagaacaccttagagttgaatcaaaaagtatctcttctactttgctactttgattttcagatttagccatgttcttagaaaagtagtatttgttgaaacaaatactttcttatcttcatgactttaggatggtccacccataatcattttagaataactatcaaacatgaaaaccttagttaatagttctagcctctcttaattcatgatcagggcatccatgaatctagtaatggtgtacactaagtatatgaccattccatcattctgaggttttcttgggattaaacttagatgggatgtcatagaatattatttgctatttctaaggaatttcccaagaaggactcaagcagctgctagtaactaatcatagaccttttatttttatcaatatggcactccgaagttatggataggtaagtttagatacaattcaaagttcaatttaatgatctttgaacataactaaatatttcttcatccctttcagctcacaagttctttaaccacttaccttaatggttttcac

SEQ ID NO: 352860 - DNA, 684 bp, Cannabis indica
tccatcaaccggatgacgcatcactcgttcatccttagattttccagtatgatgccataccatatattttgctgtatgtcttgaaccatataatcttttcaaccttggtgtcaacggaaaatagcgcaacactttacgaggcactttttttccattagtttttgttgaagtaatccatcgactacttccacaaattggacaagcatctttggttgcatgctctttataaaataagcagcaatcatgctcacacacatgaattgactcataccccaaccctagttttttcagtctctttttagcctcgtagtatgttgatggaactttatttccttttggaaaagcaaggttcaacaatttcaataattcatcaaatacgctaataggtatttttccacgaactttcaaatgcaataactttgccagaaagttaagtgaagaaatccaatggcatccagggtacaattcagcttcaatctcttcaaataagtcatcataatactgaaaagagtcggggttggtttgaacttcttcagttgttggtcgaataaaatcttcaatgatgggaatcatctcgtcatcttcatcatctaaaattgactcaacaacttcatttcgtgaaacttcatttcgtggcacttctacttctggctccccgtgataaatccacttttgataaccatt

SEQ ID NO: 352861 - DNA, 495 bp, Cannabis indica
cgtttgatccccttcattggagatactcgtaaaaacatgtgatcccctacttggaactcaacctttctacgtttcggatctgcataactcttttgcctactctgagaggcaagcattcgagctttaatcttctcaattgcctcattggtccgctgtattgattctggacctaggtatttcttctcccctgtctcatcccaatggatgggagacctacactttcttccatacaacagttcatagggagccatacgtatcgtactcttataactgttattataagagaaccctatcaacggtaggtacttgctccaggagccctcgaaatccataacacaggctcgcaacatatcttccagtatctgtattgttttttcgaactgtccatcagtctgaggatggaaagctgtactgaatttcaatttcgtacccatagcccgttggaaactcgacataaacttggaggtaaacttcggatctctatccgaaactata

SEQ ID NO: 352862 - DNA, 734 bp, Cannabis indica
aggcatcctgctcggcctatcttcccgagcagatgttccaagtggactccacgtgtcaccattctcgtgatgccacgtcagagtgcaaaatttgggataacaatgttaatgaaacaaacttgttagtaaatctagatcctggtaaaatatttccaacacataatccccatgaaaacgacaaaacttggtcatatctcttttgctgacatctttttccatgggtgagggtttcttgtacggggataatgactgggtagccacgtacacactttctatatcttccgtcaagatgggaaatgcagtatacttggtaggattctccctgggcgtttattcggtcttgccagtgaactttccctttttcccattcccttgcctattgttgttgttggatcgtttaccacccgagcttgaattgtttgggtaatgggggagctggacagatgtcccgatagaaggaacttttgactggctaggttttatttcaacctctagtcgctgaatggcttcttcaagcttaatgaaaccttctacgcggtcaagaaagtcactcatcgaaactactggtccgttcttccttatttccttccaaaattcaccaaggacttcaatgcccccagtattgcggacaactttccgtcttcagttacccgtgcaaccttagtcgcctctgtcatgaatttgctgatgtaggctcggagaggctcccctggtctttgctttacttcgaccag

SEQ ID NO: 352863 - DNA, 715 bp, Cannabis indica
cattatgacgcctgaggcaatccgttgaatggtcttggcgcacctttagtaataggactagatcatgtcctagaacagtctcacgtgccggagatattggattcgaagccacctaagacgaggtgggtttctccagcttccgctctttctagtgaggcttttgacaaggtcattactagtggccttgttgggggtgttcgttgtgagatttctcgtaagaattgtaggacgcacaggccccctacgggctggctagcatggtcagggcgccatatagaacatggggcggtgttgtcgcttcatcattacttcttaaacgttgcatcctatttcaggatgtgcccaacacagctcatgccgaagagcattaaatgtctgtcagcgatgttcattttgtacagggatcttggttggcctttgcctaccccttatgagattgggtactttcttgagttgaaatctgggccgaaatagagcagaattggctatttatatttcatccagcttggtcaccaatggttgggtgacaccaactacaaggccatgtcaaaagtaggcaagtatgccaaaaaaatacattatggcatgtttaacgcccgaatgtgacttccactagcggtggttgtagtatagatcgagcggtcgattccacgggaaggtgattatggacaaaagcgttagtagaaaaataaaacaaaaggttaataataagtga

SEQ ID NO: 352864 - DNA, 681 bp, Cannabis indica
taggctattaccgaactgttaggggctgaacctctataaaattcttgtgtcttattattgctttattttttattcgttacgacatatcgttcatcacttatagaaaagactcattgtcgttggctaaaagcgaagtcaacattttggtgctttcattgagagaagaatcacaaatcgctcttttcgacgatcaacacgatgctgcaaacttgtagagacttgtctgacccagaaaattcacagacactggatccgacattataggaccaagggaggagttcaagggttccgcctactgtcaatcctggacagacatgaagcgtggtgaatggtgaaacaactcctgttactgaaactgcgcctaatgtggcagagactgggaataacagttccgcacatagcgaggactcataagaccgttggagacgcaatcgaattccaaaatctctgtgccgcgctcggactcatgcagagtcatagcaacactctgcgtcatgatcaggatgaactatgtgccgcagtatatctcgcgtttgacgaacaaaggcgtatgttcactgaatggagagacaaagagatggaggcattaagggctcaccatgcagagatcgaagatcatagtcggcaagctaccgtgcttatacgaagagcctaccaaattgtaggtcagcaaacgccgaa

SEQ ID NO: 352865 - DNA, 1029 bp, Cannabis indica
tcaaggttgatgtatttttggactcttttcttgaagtcctgaaggtttgcagccccttcctgttgtagttcgttccagaatggagtccctgtacggatgcctgcctggagaagggcaagctgttgtccgtcatcaactttcttggtcttcgaggcttcctctcggaacctctttatatagttctttaaggtctctgtaggcagctgcttgatgttagtcaaggcactgacctccaggttgacctttcttgcggcgacaaactgtctccgaaagttggtctgtaacttgttccaacagcccacggatcctggctccagtttcttgaaccattcctccgcggacccgcttagagtaagcgggaagcacagacattttgcgtcattgctgactctcatgaccgtcatgacacggttgaaccgcgacaggtggtcgcttggatcggagttcccggtataagctgccatttcgggcatcttaaaattcttggggagctctgcttccaggatgtgcttggcacatggctcccggtcttcacagtctgagtcagagttgtcgcctttctgtctctgggagactcgggcgatatcttttcggagtatggcgagttccgccatgattccttcatttaacgttcccgtggagaccgcgggtccgtatttcttttggtcaaggtgatcccggaggtcaccttgattcccattgatttgatttgtcaaatcgaccggagggcatttttgtccccttcttcctctacccccgggctcctagtgcacggacacgctttttcggtcctctcgatcctgagggccaagactccctttttggagtttgcccctctgtggacctttccctttcgggaaatctgagcggacctttcgcggagcctgcgccttttctttctccccagggtagaagcagggtttttcttttggttcccttcagcgggataccttatagggcttggttccctagacctttgctgttgggtactgggcgaggattcctctggttccttgccgagtccagcag

SEQ ID NO: 352866 - DNA, 575 bp, Cannabis indica
gatccggtaaaataacttccaacaaaccactgcttcaaaaatcataattttatttacttcatgttatgcttgaggtgtttaagataattatctcatcttgaacaaatcttaaaattattactgatgaacaactaaattatttaaggtaaaaataaccaatgttattataaggtgaaataaaatatttctatgataattttttatataaaacctaattaaaataaaatgaatacaccaatgtaaaactcaatgtataacaacacataatttcatgagttataggaaatttttctaaccaatgtactacaaaacataaaggcacgaaataggtacttgatattttgtatttttttactaaacatcatgcataaactataaatgtactcggtacgtgatataacgtactccactaccaatgcacaaatatatagaaaataagaaggactgaaaagacaaaaataaccacaatctgacaacatagacccaccctctgcaatactattctactatatattaactaccaccaactgtcatttgattaaacatttttgtatatttttgtatttttttatttt

SEQ ID NO: 352867 - DNA, 446 bp, Cannabis indica
tttactgggtcaaaataatcgtgaattaacacatatttaattgttgtatctggagatgtctcgacagaagcttggttccagtgatctcaatagcgagctagggccatttttccttccgcggtcaacagtgcatgtcttgtgactatcacggttcttattcataaagagttcttcgaagctcatttgaatgttagcttttgactcgctagagttttaagcctcactgacgttaactggatgaagttacaggaagccttcgcatagcgagacgggcacctcgcttacttggtctcgagccgatccgactgttacacttagtttgtacattatacactaagggcttttgcaattgatatgtgacgctttcgtcttcctatgtgtactgtccttgacgcctcgctcttcgcattcagtgatatatagtttctcgctaatacactaagcac

SEQ ID NO: 352868 - DNA, 910 bp, Cannabis indica
atatagaaagtaagtgtcatttagaattacataactaataggtttagaaccgtttcacattaaatgaaaatatttaataaaagtaaatatttaaagaataaatgaagaactgtttaatctgttcttgtattaagtgtagaaatgtatgcgacttgataatccacgagttgcatgttcatattccaacacacgagcacgcaggctctttgatattttgtattcgtagggtggccttcgggcctatcacttgaatttatgcgtttattctcaaacgcatagtcgaacattctatgttttgacaacatagaacatgtgagtccctaacgaggtgtcaaacacattagtcattcaaactaatcttatgtaaagaagtgatctttattagtcgcaagagagatatacttggtcatcgcatataatcgatatacgcgaccagtattattaacttctcttgatcttgcttattcatttgactatgcgaggcatagtatgcgactagatcttgtcccggtcacatcttctcgcaagtttgtaccaagaattacggtcggctctatgggagctacctactaacacatcatcctttacatcaggatttgattccgcgtgtcagttttatacgaggttgtacttgtatttctagtaaaactttgccttataatagaaagatagaacctgattagtcttggcaaactagagataagtctcctcaggttggcttaccagtttaatactttgtactatccattatcaatgtgtctcaagaattgaagcattagttacattttcgcgataaataaaatgatcattttctaagttgtggaggaaatattataaatggctaagtgaaaataattttttaattttctcaacaatactttctatcgtatcagtatgatatttgttgacc

SEQ ID NO: 352869 - DNA, 1038 bp, Cannabis indica
tgcggtgcgggcggtttgagcggtttgatgtacacccctagtcagatctaatccgactatgatctgccctaatctaaatcatgtaaggattcgctccgcctcgccctactagattagatactcggatcggatcaaatctgactcgacttattcagatcgaatctgatccgacctgacttctcttttttaaaaaagaatttaaaattatatctaaacatataatttcatatccatattaaattgttattagtattatttaatacaatactatatttggtattgacttgtattaatagattgtgtaaagatgatatatttttaataaactcgacccaaacaccaactacagctccgagtttgggtccaggtccgggtctgtgtctgggtctgggtcatggatctaaggtccgagtctcgggtctaggtctcagtctgggtccgggtccgggtcaaggtcctaggtccgagttcgagtcctaggtctcaggtccaggtccaggtctgggtcccgggtcaggatttgagtcatggtctggatcagggtctgggtataggtctgggttcgagtttgggtctgggtccaggtttgggtctagattcgggtctgggtctcaggtctcgagtccagggtccaggttcgggtccaggtctcgagtctcaagtcggggtctcgggtctcaagtcttggtccaggtttgggtctgggtctcaggtccaaatccgggtcctcgatctgggtccgagatccaagttttggtacgggtccaagtccaggtctgggtccgatgcccgagttcgagtccgagtttgagtctaggtttggattcggatcccgggtccagtctgggtttgggtcatggatctgagcctgtatcatgagttcaagtctggtttcgggtcttgggtctcgtgttcgtgtctaggttcgggtctgggtctcaagtcttaggtctgggtttgagtccgggtttgggtccgggtttgagtctggattcgggtctcgggttcgggtccgaggtccatgtttgggtcccgagt

SEQ ID NO: 352870 - DNA, 683 bp, Cannabis indica
gatctgttgtttgaacgggaggtacatcagcattttggccggaggtagaagcagccacctcggtttcaccataagccacttgggaagcgtagaactcaaggtacatgtccttagcttctcccaagtagtcgatatttgcctgaggattagccttccaaaagttgtagaagagtttaagaccggctgtctccaaggtatgaaatttattttttagcttcgtcacctcagccgtaagctcctcctccttagctttcttctcctcctccacccgatgaaggactgctcgaagagaggtcctctcatcctgaagactgttcactttagcagataaagtcttgatggtctcctcaagtcagtcagaagcctcaagatccttagtcagatcaactattttcttctgggtgggaaaaagcttcttgttggcttcacccaactccatctgaacagctctgagttccaccttggcgtcttcagcatccttcctggccaagtccacctccgccctcatggtgttggactaagccgtgttcttggaagaagcaaacttacccgggagtaggtgtaggcaacttcagaccggcctgcacaaacgaaaaacttgagtatttgagcccagtaaagaggattaaagaaaatcgtcaagaaagacttacccttgtgaactccttcaagactcctcccac

SEQ ID NO: 352871 - DNA, 646 bp, Cannabis indica
acgatcaacaatcacccaaacaatggcctgcttcaaatgtgtcaatggcaatccagtaaaaaagtccattgtattcccacttccattctggtataggtataggttgaagtaaacctgaaggtctttgatggtcagcctgaacttgttgacaaactatacacttagctacaaagctagccacatctcttttcataccttcccaccatttttgtctctttaaatcttggcacatctttgtacttccaggatgtacagcaaacttggatctacaggcctcaattaaaatggactccttaagattagggatatctgcaacaattagcctacccgtatggtataagtaccctttaccatcaactgtccacccatctagttgctcaccatcctagattcggttccaaataattcttagcttttcatctttccactgatgttgcttaacatgttcaagtagcactggtgtagccactatgttagggatacaagctacttcttccccttaatagtattgcaagttataatcacccactgtgtttgtccttttccagacctcaagagccaaacatgccaaagtaccatgagggtttctacttaggtgcatcagctactacattagcttttcaggggtgatattgcaaagtgaaat

SEQ ID NO: 352872 - DNA, 771 bp, Cannabis indica
ttaaataaaaggaaagaaaaagtgttattttactcaatattttcaaattaagaaaaatcaaggaaaatttttttttcactctcaaactctctctccctccttcggcctccttgagcagcaaggattgtcactttttctttgtggattcaagctttgtttgtgttcaatccaagctctaggttagcttttactatttctctctttaatttcttaaaaattaagaaaagatgatagttgcatgtttagtttttgggttgtgtttgctacagtttgttgttgttgttttcagaggttttgaagtgtttatttgagtgaattcatgcttgatatgttgttagtttttcgattttaacattgtgtagagattttagctcaaaactatgattttcaaggaattatgataattttcgttgctgtagttgttgttattgtttaatgttgttttctggggttacattatggtgaaacatggtgaatggagcaggttttaatgcatgtaggtgagctttagccaagtttgagttttgaactcaaagcttggagctcacatggcatttttcatatctgtgatttctgggttgttttgatgctttggaaatgtttattggggtatttagaacaggtctggaaggtttggtatgatttgggttcgaattgaatgagatatgaatttttgagtgtctcctgcactaaaccggaatttcggttcagtgaagcctgcagcatccggtctaccggatggggcttccaagaattcccagaaccggaatt

SEQ ID NO: 352873 - DNA, 898 bp, Cannabis indica
atccgaaacgtagagatgtagaaattcaagtaggggtcatgtgtttctacgggtgtctcctatgaaggagatcaagcatttcgggaagataggcaagttatgccctagatttataggacatttcgagattctcgagaaggttggacaagtggcatatcgattagcattgcttcaagcactttaggcaattcaaaacgtattccatgtctcgatgttgagaaaatacgtttcagacacgactcatgtacttggctacaagaatcttgagctgcaacaagatatgtcttatgaagaacaaccagtacagatccttgacagaaatgataaggttcttcggaacaagaccatagctctggtcaaagtactctagagaaatagcaaggttgaggaagccacatgggagttagaatcagatatgagagctcaatatgcagagttgttcaggttagatttcgaggacgaaatccttttaagggtggataattgtaaagaccgcttcactttaatttggaaattagcagataattagggctttattatgaaaattatttattaatactgaattaattatttatgatgattatttaaattcagaatgcatttttaagtcacatatagaaatttcgtaattttgcatatttttgtgcccggcaacattggaatgcggtgaatggctattagagtcacatcttagtatatttagtttaacgggacaatattttagacactgggaatgtcgggaatagtcgggatttcagagtttcccaaaatacccctaagtgctcttttatgtttttttgtggggaaagggtaaaattgtcattttggccactagtctttttgtctttagtgaattaaatttattgttaatgatttgatttttattagttgatttagc

SEQ ID NO: 352874 - DNA, 587 bp, Cannabis indica
taaattggatccaaaacataggctaaaaatagcctaacattcggctttgagttggggtctcgcatcagcaaaattcctaggatacctgcctttacagatcagattttctggaaacacaatcagactggaaagttctcagttaaagctgcttatagtgtggaaaatactccgagatttgctccggaaaaaaagatttggaagtggatttgagacgcgggaatccatccaagaaacttggtgctattatggagaatcttgaatgaggccattcctacaaagaaccggttgcactttctgcatgataaaatttgcaacatttgtgaagcagatgaggaaaatgcctttcatctgtttagaagttgtagtttttcaagagctatctggtttggaggaagattctccttcagaatagatgacatcccaagaaacgatctcattagtatgttggaaggtaaaatcgaaatggtgacaggagttcataggaatgaattgattaactacattggatgtatgttctctgaaatctggcttcaaaggaatgctttctgcattcagaatgcagagatcaatctctcctctgcagtggt

SEQ ID NO: 352875 - DNA, 884 bp, Cannabis indica
aggaatggcttaacactcaattcaaaatgaaagatttggtgaagctgcttatgctcttggtattcaaattatccaaaactggaagaacagatcacttggcctctcacaagcagcttacattgataaggtgctagagagattcttaatgactaacactagaggggccatgatgccttctagacctggtatccgtatatctaaggaacattgtcccattgatctccaagagatagaggacaagagaaaggatccatatgcttcagtagttggaagtctaatgtatgcaatgttatgcactagaccagacatttgctatgcagtaggaattgtgagcaggtatcagacaaacctaggagaggaacattggactacagttaagcatattttgaagtatttgaaaagtataaggcattatgtgttcgtctataagggtggtgccttaaatcctgtaggctataccgacttgaatttctaagcttgtcttgatgacagaaagtctacatctgggatggtatttactcttgggggtggagcagttgtttggagaagtgctaagaaaactgcaatatcagactctaccatgaaggcaaaatacatagttctcgttgaggctgctaaggaactagtctggttaagaaagttcttctcaggacttggtgttgtttgtgataacactggtgctatagccaacagtaaagagcctcgaagcaacaagagaagcaaacacattgagaggaaataccacatcatcaaagagtatgtggaaagaggggacgtactggtagagaaagttgatagtgaagacaacttagctgatcgattcaccaaaattttgactgtaactgcatttgaaatgcacagactgaatctaggattaattaaaa

SEQ ID NO: 352876 - DNA, 1325 bp, Cannabis indica
cacaacacaaaaataaaagatatcattgttctgccaccaaaccagaaaataagatctggaagaccaaggaaacgaagatttttatctgaatgggatacaaaaaaacataacaggtgcagcaaatgtggtcaacacgggcacaaccgaaagacatgcaacaatcaagcaataaaatagatacagatgaattatttgaattgtttaattctctgtgagaattcacacaggttgatatgttatattcgatacacatgggattttattttgaaaatttttaaacagtttggtaatagttgcaaaatcgttttatgacagttttgacacttgttaaatatttactacgaaaataacttctttattaaagttttaaaaaaagtcagataggaatttataaaacataattaataaaggataatgaaaaaagggaaaacagtgaataaatacattgataggcaattaaaattacaagtacgctgaaaagtggacattgtttgtatatagttgtataatagtttctatatagttgtgcgactggatataaaaacttgaaaaattagaaaaacataaaacttctgctgatacaaacatacagaagaaacatattataaggattaatgtcaaatatcctaaaagtttaaaaccagatccagagtataaaaccaaatataatacctagaaacataaaatcactaacaattgtctgataatagattcaaccaataacaccaaattgtcactaaattaaaagaccctactttttcaatttagaagccttagaagacttgctttgcttctcatcctcgctatcaatgctttcatcaattttcctttggccatatgagaagaaaagggcagcaagtcgagtacgataaacttcgatgtcaaaatctgcaggaacatcttttccatggatgaagaactcggcaaatgcagccacaaatgctccgcaatcactaaaaaccagaaaaaggaaaaacagttaagcaactaaaaaacaacataaaataaacttaaaagaaacaactcactttttctgctgagacggaagaccactaatctccacaattcttagaggagctttagggtcagaacctaaatcaggagcatgtgacctattcttccaaaatccaaggagatcaaaaaacaaagggagcaacacagaataagccttcattgcattcctagctgcagcattcattttggcagtcctcaaagaattataaagaaacaaaatcccctcattcaagtcaagacgaccaaacacccaatgactttccctccttagatttatgatgaataacacatgatcggcttcataccaaggc

SEQ ID NO: 352877 - DNA, 700 bp, Cannabis indica
agcgtaaactgaaggcatgcactgatgagctccgacgatcatatcaaccacctgggggtcatgatgacgttccacttgctactgatggcggtgatacaactatggacccgtagtcttatctgctctgatttgttttctctcctttaattttattggaagtggggacactgtttattttaagtttgtggaggagaatgcaattttcatatttttaatttttaatttttttatttattttggtttttatgggtagatctaagttttatttttatttttggatgattgtatcaacgttaacttatgacctatgggaatttataaacttatgctaaactctttgacattatttagtatgtgtgaaagactttggattgtgtgcttaccctgttatgcttgattttgatattgtgatatgagttatgtgttgttctacttgttctatatattgtgattttatgtgcttatgtagacttggtttgatttggttgatattgagataactagaacttgtgtgattaatttattgaggcgaaatcctaaatctttgttgtgtagaggtgattaaggcaattttctttgaatcgtttgagccaaaaagctaaccttaatacattatcctttgttgtcctattttgagcataatttttttcgattttcattctttgttaaaaacaaaatgcaaatttatccttgattacga

SEQ ID NO: 352878 - DNA, 718 bp, Cannabis indica
gagggtttctttctctctgaaaaatttgaagaaatttggtgaaaggctgaaagtaaccaaatgaaggaggagtgttggcttttataggccaaggtgcatgtggaagacacacgattcgaattcctaggatccaatggctagattggtttgtcatcaaggcggtggaaacgcttgagtgtctgtctgacaccctttaatacgtcgtatcaattaatggacatgaaatgaatcgacgcctgcaaaaagtgaatcgctgcaataatggtgatcattaaatacaccttcacgtgcccgaagcacgtgccaggaaaccgaggagccaaccggaggcatctgaacaagccttgttcatttttcaaataaacaaggcttggggggtaaatgttgcccctgattttgcccaatatacgtggaccaaccagacagggacacgtggacacgacggtcttaacactcaaattaatagctaagtctttataaagaaaggcgctatccgggagctgcctcccggagaaggcatacgaagtcctctatgctcccggaggtctaagtggtatcaaagcatctccgggagatgtcagacttcctctgagcagtcatctcgcatttaatgccgcatgggaggaggcgtgttggaactgccacacacaataaagtctgacgacacaacccccgatttgcacctacaaggctatgatcacttaagtctaatgacggc

SEQ ID NO: 352879 - DNA, 500 bp, Cannabis indica
actttgcaaagcaacatgagacaataggttggcagttttaattcaaacagagtttatcgacctcacttgggcaagcaatccatcgaacactactcggtatgatctcaaaaattgtacctcacttgatgaagcgaggccgtgattatgtattgtgctgaactctttgcatttccaagtgttagacggttgtgtgagtaaaatacgtattgctgcctcacatccagttctagtgacatcatgaggtctcttttttctttgtctttccgttattgtgattcttttataaccctcagaacaacaaaccttcctgcgcattacaatgactccttgagaacgtcatacatcatcttttcttgtgccgaaacccatccgtttcgcgtacatttcgtagaatgcttcccattttcccagtttgtcgagactcttgcctaggacatcacatatttgaatctcattcactggttttgtgatgtttaactctgctgttatgctttcccatt

SEQ ID NO: 352880 - DNA, 513 bp, Cannabis indica
aggcctagctcgcctatgccgagagctgaccctttttctataggtaggtcacactcctatgagatctaatttttgagaagagcattgctattatttagacaccttaaggtgctcaacaccatactgatttgtcacattgtaattggttagcaattcttgtttactcgaaaattgagcctggtgacatggacatcaatatttgacacgtgaaaagaaagaaaacatcttggagttgagtagccctgagtcatagcaatcgacttgggaggggtccctatccttgcgcctaggttaacttcgagaacttcggaatgggtgtttggatcctgtcaagttgtttcaaactcactatcttttagtattttgtactatgaatacacaaagaatccaattccaaggtccgaaagctaaaaatacacgaaataacaccttggaagtcaacttgggagcctaaggtttcacccggtgcccaagttgatgttatattatttttaatataataatatgtagatt

SEQ ID NO: 352881 - DNA, 546 bp, Cannabis indica
taccataccagagcgtcttcttgaaattggaaggtggcacaggccaccctatcattgtcgatgacgcccataaaattcagattctggtaatcactgttagccactgctcgactttcataacatcaggacctcccaggaaaattggaggtgcctgcttacggaacatttcatataggggttccattcggttcactgcagatacaggtcctgcctgcacaataggggcaagagctactggtatttttggagcagggattgcgggagcaccctgctgtctcatacgctagatctcttcatcttgttcattaatcctggcttgcatttttgcaaatgtgctttccaaatcctgggcagctttggtagcctgtggcgggttagcatcaccccggctacgtgccctgcctctaggacctttacctcggcccatacttagctcatgcaatgagagtggttagcagatacatttcagaccctggcccagaacattgggaagcattgaaatggataatgaagtaattaaaaggtactttgtgttgggttttatgc

SEQ ID NO: 352882 - DNA, 883 bp, Cannabis indica
aacattaaatgttatttctgatctatattaaaaagtaaatctgattatattgaaatgagttttatttagggcataaaacccaacaatgtcaccacctcatacttctcctatataatatgtataaacaaaatacaaaagtaatactaacgaaagtaactttaaaagaatgatgtagaagtggaaaactattgttgaccgaggttttcagcaaccaattaaataatgtataagaagagatgtagaaagtttaatgcagaagatttttacgtggttggggcattaatgagccttagtccacgagtctttttcttttatgagagtatttattacagagaatgttcttcgtggatttctctcttgttttctctctttgattccgtaaacaaaatcgttcgaccccttttcaatctgtttgtggggtatctatagtattttttctcggggaatccctagaaatagatcgcttgtcattctgtgttagcttcataggggtacatatttctagcaaatacaaaataggaaatacatgacctataccgtaggtatcttaggtgttaggtggatataatcttttatcccctcttgactgatgtgattcctcataatgtagccgttactagactcatcgattgtagtgcaatcaccgtaaaaggggggttaagccatctatcatgttgtttatggaggctccaatacgacccatgcggtattaaatgcaaagcgattctacgagtaatctctttacctcccgaaactgccttagcatggctctagcctcccggagcataaagatgggccttatgctcttttccgggaggcacctttcctgaggtgtccttttttctgtcaaagacttagttgattttcatgagtgatggttctt

SEQ ID NO: 352883 - DNA, 909 bp, Cannabis indica
tgttgacttgaaaagatgttggagacggctctatcatccaccatgcatcttgttacagtcatgttccaaatttgtgtagtgatgaccagggaatcgttgtgcgggaaactgacttgagcggcatcttcttttatgaaggaaatcatgagctctccaagctttggttgcttagagcccctttctttgactgctaggatgtcactttaggctcgtgacgaagtgcccgagcatagcgctccctggctttgctggattcacctataatgtggggtacgcaaatgattacccctaagtgtcctaccctgatggtggcattgagtctccgttctaggcacttggagcctgagtttggtcgttctgcacataacgatgcaggtcgagattgttgtgcctgatcaggtatttaatctccctcattaaattctgacactcattgttgtcatggccgaagtcattgtgaaattggtagaacttcgacatgtccctctttctcaactcccttttgattaaagggcttcgtataagggactgttccctgagtggccatgaagatggcctaaggtttctctgtcagatggtaaagcaggtatacttctcctccttgttcttttgtggcgtgggagaagtgttaaacttcccctttttacaactatttctcccagagttattggtgctgcgtttttttctagtgttcttaccactagaagtttgggcagagttatttgtgtcggcctgcgtgcctagcaggtcatgagactacaggatgtcttgtgattacctgttgttgacatgccccgtctgggcctgtcagatagcttcttcgagtttgataaagccatcagctctatcaaggaactccttcatgttgttggttgagatcctttgaatgtctttccagaagttactcaa

SEQ ID NO: 352884 - DNA, 747 bp, Cannabis indica
gtctccataggaggagtatcagagactaacaacgattcgacgaatccaagagcaatactcgaggaaagagaatcgaaaaccgaaggagagacacctggacaatccgtattcgacattacaccacaactaaaatgacaatcgggacccaaagcctacccaaagaaaaaaaaggaggggagaaaggctaaccctaagaagaaaactgcccttacgaaacgaggaaatgccaggactaaaagggggaaataagagaatagggtagaagaaaggggaagatcccagaagaaaaatgggagggaagacaacggaaggatggaaatacaaaaaatatacacggtaattaaaacaaaacgtataaaaggggtaaaaatgaacgaaaagaaggcaaggatgaaaggaagatataaaaaagggagggagaaataaaaagggataaaaagaaataaaacttaagataaatagagaagcataatatatatacctgaagacagcaagatctagcacagagaagtagaaaaacacgaaatgaatttttgaaattggtagtcttatactcgagagtgcggtgccaaaacacagagggaggttagggaattaatagggcatttataagaaaaaacagttctcgaggttccaccatcacatcaagggtaaccgccacttcttaagaaattgaaaaattcaaaattagggaactgtacactaaaaaaggtatatgatgaaaaaatcagtaataacaaacaaaaa

SEQ ID NO: 352885 - DNA, 533 bp, Cannabis indica
aatgctattaaatcattaaaaaacgctgctggtgttacagaatattctcagcaaggcatgacagcaatcatagctgcctattttcaggatcttttcacagctcagcctatcgacttcactgctctcaatcacaccttaaacacaattcccactactgttactgctgctatgaatgaaaatttgacacaaccattcacaccagccgagatagaagcagccttaaaattgatgagtccggataaaagccccggtagcgatggtatgtcggctatgttctatcaaaactattgggaaattgttggctcttcagtcattgaggtggtcttggggattcttaatgatgggcaaccaatggatatgctgaataaatctattatcacccttattccaaaaataagttctccttctggtatgggtgattatagaccaatcagcttatgcaatgtcatttacaaactgatttccaaggtgttagttcttcggttcaaagaggttctaccatttgtcatctcagagtctcaaagtgctttctt

SEQ ID NO: 352886 - DNA, 587 bp, Cannabis indica
ctcaagctacggccattagcttgatcttcaacgacaccaccattattaccgttatttgcggcattagcattcacattagcagccatgatttcttatgtttcagcagttgctgaaactctttcttgcctcttgttccttcggtttctcctacaagttttgcaagagaaaggttagaaattaagcaagagaaaatataccaaagtagaagttagtataattttgtgtaatattaatctttaaacaattccccggcaacagcgccaaaaacttgttacgaaaattatgatcactacgcaagtatacgcaatcaagtagtagctcacgcaagtgaggtcgaaccacagggaattcgactaagtactactaaattatacttatgattctatctggtaaaacattacttttggtgaattaaataaaacaattcagaaaattaaaagaataaatgaagattaatcaagatgagagattagggagttgtaaactgttgtcaagttaccaatgttaatacctaattgctatccttttctcaatgtgaatgacaaattatgaattaacctaactcttttcagatcttttaggttcta

SEQ ID NO: 352887 - DNA, 676 bp, Cannabis indica
ttaagttttttttttcaaaaaaaaattaattttttaatagatttggatgtgaattattgcatgttgttgagattagtggaatttttgtatattttgtgctctttcttgtggtaggttgtatatgttggatatgtttcaatggtgtttgtgtgtttttacagggttatcgatgaaatgtcgataggatatcgataggatatcgatatatagttttctgtttgtgtgtttgaacattgttgtgaacattgttgtcgacaggttgtcgatatcatgtcgacaatttgtcgatggtttcaccttgtttgatgttatgtagttttgccatgtaatgtcgataatttatcgactgtatgtcgataggttgtcgataataagttgtagtgattcttatggtagttaattgtgattatgtcgacaatttgtcgactatatgtcgataggttgtcgataataagttgtagttgattcttatggtaattaattgttagaatgtcgataatttgtcgactgtatgtcgataagttgtcgattttggtcgtttgtcactgcttttatgaaaatgtcgatagcatgtcgatagtatgtcgacggtttatcgaccaattaggtggtcactgaatgtttgataatgtcgacagaatatcgacatgatgtcgatgttatgtcgacatttctt

SEQ ID NO: 352888 - DNA, 632 bp, Cannabis indica
taaccaaccaaagctctgaaactagcacgaatcgataatacaaatttttcggggaacccagcagcaaatccgggtaaccgattttacacaaaaaacccaaaaatctccaaaacctaaccaaaaagatttcaaactttaccaaaccttccagacctgcatattataccacaatagacatttcccaagcaataaaacaactacccaagctcaaaatctaaaatcaccattaaagctccaagtttgagttctaaaactccaagcttgcttaaccctactaacagccatcaaaacattcttaaatcagcataatacaacacaactaaacttcagaaacatacttcaaacaacaacagcaacaacatcaactaaattcataaatcatccaaaattctcaacccaaaacataaggaaactaaaaagaaggttacttaagctattaccttcaagggattcaccaagaacctgttgggatttgtgccgtaaataaaactctattttaatgtaatcttttctattcaattatcaataaagaaacagatttaatttcattacttgtttaatgtgttagttggtttatgtgatcatctatttacttatttgattaataaattcatccaaacccttatcacact

SEQ ID NO: 352889 - DNA, 540 bp, Cannabis indica
cctaaggtagttagggtgttagagagggggtaagtttttttagtttttaactaatttttttttattttttttaataaaaaggtaaaatgagaagttcatgtaatcaatggaattaatttgtacaaattagtggagggtttaaattttgatattgggggttttattaagggcaaaaaaagaaaatttctctttagaaatataggtactggtaaaatataatccaacataatttatattatacgtaaaaattgaataatttttttctaatatttattactattattattattattatgattattattattattcagtactacgaaaaccccctttagaggcagtttttaagccctttcagcgtcggtttttgcaaaattcgctaccgacgctgatcagggcgacgctaaagggttttgaggaaccgacaccatatacacccctatggcgtcggttattagctaggaaccgatgccataggggtatatatggcgtcggttcctagccaataaccgacgccgtatgtggtgtagcaccgacgcc

SEQ ID NO: 352890 - DNA, 857 bp, Cannabis indica
ctggccgaatactggacagaaaatccatcccaagtatgatatcaagatatcaaattctgttaattccaactctattaagctatcatcgatcctaactgtcatagacctagtacgcctattggagaaaaccaacaccccgctaagcaatatcacatggcctacccaaaagatcaattactcgtgttgccacatatgaatgtgtagcccccgagtaaaataacacattataaaaggagttgttgacaggaagctgacctgtcaccatagaaggactggctgcagcatcagtttgagtgatggcaaacaccccagcaggtacgggtttggcctctggcttgtgctcttctttctttgtctgagggcaatctttcttgaaattccccaccatgccgcaatgaaaacatgtcttttggttgcactcacccggatgatgtttcttacaatgtgggcactcagggtaagagtaaacctagcgtccacctctaccttggttcccatggaaccgcttgctctgtcccgagccactagatgccggggtaacctttcttttctgatcagtggtggaatcaccaccatccctaccatagataggagtaggaagagttggggttcgaccaacactcgaagtcccacggggctcctgaagaaacttagccgcaccctcagctcgcagagccttttcaaccatctctgcatatgaagttgcctcatttgtagtaataaccaagtcatgtctaattttcatatttatttcttattatttctgtgttatatttattacgaaaaggcttattattggttaatgaaaatctgcgttaacagtatgtatataattttattgacatgctacatatatt

SEQ ID NO: 352891 - DNA, 506 bp, Cannabis indica
tccaggttcagatcttggtgatgttctgctacaaaaaggaatcaagggctagagatctgaacggaaggagtcattatattctgctgcacacaatgtaaggtttcctaaactttatatgtgtttatttcattgtcttagaattcatattaggatgtgaatgaaacatacatggtagtaaatctagatcctggtaaaatatttcctacacctacttctccatgatactcacacctctttcttggctctttctagaattttcccacttgaggttttcgtggaggctttctataatggaacatattgcatgttgctttatgcacattttctcaagtatccaccaaactggagtactcagtataccttgggtcatactctttcatggcttctttggaactttgactctgttccagacactttcctcctctcatgtttcgagactggctcaaattattctttagaatttttgcttttcaatatccaagtgtggaactgcatctggtctgtgt

SEQ ID NO: 352892 - DNA, 744 bp, Cannabis indica
tggtgtattctgtctaatgcgcttcctacaagatcagtgatcaatagaagattccacattgaggatactagttgccctctttgtggatcaagggaagaaactatggaacatttattcctctcttgtgatgtggcctttcatctctggcgagcttctccttagggtttttatcccatttgtgattctgggatcagtgtatgggattgggtcaatttcatctggggtctaaacgggagaggagttctagtagaggatgcttttctgtatgcctccatcattgtggataaaatttggagggtgcggaatgacaaagtccacaataattgccttatggatgtgaaaaaatgtgttgatgatatatattttacctatgttgatattcatgctgctttattacccagtcccacctctcatctcaaggaagtttggtctcctcccccacgagattggattaagctgaattatgatgttaaagtgggctttgacaatatgtgtattgcagttgttgccaaggaccacctcggtagagtggttagagttcagacaacgagggtggatttctctaatgtgctctgcggagaagctgaggcgtgctgtttagcgatttcaactgccttggagatgggtttcaagtttattatagttgagaatgattcgagggtggtgatcaatgctatcaatgggatggaatgtcgttgggcgcttgagaactacgtctcattttgtactaagtcttctcactcg

SEQ ID NO: 352893 - DNA, 700 bp, Cannabis indica
aattgtgcatggaattccgaagagaaggttttccatgaactaaactttttaagagccaacttgaaataccattgctgtgcggcttccgacagagtggcggggaagattctgcaacatacgtctcctcgtaccccttgtaaatccatttgtatctcaaaatacttgagatgggagagaggatcttttgtcccagtgtacatcttccatgttggcatcttgatctctggtgagaagggagttccgcgtgcacagtctaactcaagatcattgttacgttgcccgatcatgccatgaaacatattcttcagttcgtcgagctgggcctgtacggctaggctgacttgattgccattatggtcgggttggattacgtcagcatctttctgagtggggatttgagtatgggctccgaactgcacgttcgttgtgtaattatgcttctctgttcccttcttctgtttagatcgtcccttaggtcatgggttgttcccaacctatcgaacacagaagaaaccagctgccttagtaattggttcgcttggttggcaggtggaatggctccattattttgtgtggatccgtcgagcatgacccctcctgatgaattcccgaacaaggtctgtccgcctacctcttggcccaagagtggaactcgtgaccggggattggacggctgatcgttggttgtccgggaggcatt

SEQ ID NO: 352894 - DNA, 816 bp, Cannabis indica
ttgatgggcactgccacaaggaatgggagtgctcttcaattttgattggcactgctacaagggaatgacagtagtcgctccttacaaaccatgaagggaaaattgttcaaatgggttcccttaacaccaaggagttaaaaacaagtgagaaaaactatttcccacctaggatttaccctagccgaccactgccataataaaatggcagtgctcttcaattttgatgggcactcccacaaggagatgacagtggtcggccatgtagataggaagtgagatttcttgccaacaatacattttcaccaataatatgtcaaaaacaagttaaagaagccaccaagtggtataaaaatcacttggtcgaccactgtcataaggaaatagcagtgtccatcaattttgatgggcactgctattatggagtggcagtggtcggcccttgcataaggaaaagggtttcattggccaagttacattttcaacatctattatatcaaatacaagtgagaaacaccactcatggcttctgggaagccatgcccaaccactgccactgtccggctccaactagtggcagtggcctcccaatagggtttcagatatcgaaatgagatttttgggtgacgagacccccaaaatatgactcaccatcaacctacagtcaaaacacaccccgagagatctgagaacatgcacgggcgagcactatcatttgaccatgtcaatgctcgtaactagtacaagttagcataaacttccttcagtaaaattagcataactctctcaatttttatccaaatgatctggttcaacttg

SEQ ID NO: 352895 - DNA, 594 bp, Cannabis indica
acttaggcattataggtggtcccagatgggttctggacctttggtgcccatactcttggaccctttagcctatttatcctctagctggttccgcccctcggacagctatctcggggatgatgcagccagtgttaagattcgggactttgctagggccgaattagagagtcagggtagggctagcttgattgctttttgttaagtgtacactgctttcacagatattctaacacttaacctttttctcttgttgcagcagccgttcccatggatgaaatcttggccactcttgctggagcccacagtcgtgatgtttcccctcctcctacttcttcccagttggtcactcccaggaaggcttcttccagcgccccttcgggccccattgtcttagtggacgaggaggaggcacttcttgaggaagctgaagaaggtgaagaagagcaagaggttgctcttgtgcgcaagcgcaagggcaagatggtagaagaggagccttctaaacgcccccgaagggtggacactccggccccgagtcatgactccgggatcccctccgaggcggaggaatacgcagtgcctctcggcattgtg

SEQ ID NO: 352896 - DNA, 620 bp, Cannabis indica
taacacataaagtcaaaaggcactaagcctttgcaaacaaactaaaaaaacaaataaacatgagtaaagatgccattaaaaaatgcaagatagataatttggttgaggcccaaatcgatccatgtaggccctccattgtgccatctcctctcgagcatcggcaaacccgtgctccatgtcactcctcattgtggaaatgtcacttcttatggtagccatctcattttggagagtagaaaattgagtgttcatttcacttctcaagttgttgaaatttgaagtaatggaggtattaaggttagcaaaagcctcttcgatgttctgacagctcaacactcatcgagaagaatgagtccacgtgtaatctttatgggagcctgatctcgagtttctagatgaaaaattcacattataactgattttttgtttgattatttaataataaaattgagagaaactaatgacgtttttggtaaaaaaaaatcaattagattttttgtttaattatataataaaaaattagtgaatgagagatttacgatacttaatttttttttaaaatttaattattataataatgttcagattttaatattaataaattttaatttaaaaaaatt

SEQ ID NO: 352897 - DNA, 656 bp, Cannabis indica
catgaagcttaatatcttgtgtcgtgtcttgttgttgcatccacaagttgatctattgttggaagtggaaaacagtcttcggggcacgccttgttgaggtctgtgaagtcaatacatactcgccattttttttggcttgggcactagtacggggctacctacctaagccgggtagaaagcatcaattatgaaattattgttacacagcttttctacctcttcttttagtgctaaggctcgttctttgtccaatagtcttcttttttgttgaacgggccagaagtttggatcaatgttcagggcatgtgaaattatagaaggatcaattctgaccctgtcctcatgtgaccaggcaaaaaagtcgaggtttgctcttagaaatttatcagagttgattttacttcaagcaacaaaccttttccaattttgagttttttggtcggaacatttcggtcaatttcaatttcttctaattcttccaccgacccaacatatttatttggttcccaaagttggggatccacaacttcgtccccgccctgggtagttccctatttggcaatgctctaccctttgtccaaactgtgactggaggattcttcctttttggccttggttagggcaagttgttgttggaagttattttaccaggaact

SEQ ID NO: 352898 - DNA, 1047 bp, Cannabis indica
aaaaaaaacagtataaatgttgtatttgccgtgtaacagtataaaagtaataaaatgggaaaaaacagtagtgggtgtaaatttcccataatttatgagggagggaccaagtgaagtgggcctaactacgtaatttgaagattgacatgtatgtctcctacttagagccggaatgtataggctttctcaattatctttatttttaggagattttacaaaaatattagatttttagtaaatgtttacatttatactgctacacggaaaaaattattttctactgccttcaccataatttttttttcttttatactgtaaactccaaaaataaaaaatgaggcatccatcttccacactcacggacagaaccatcacagcacaatagccagaaaacaacgattaatttcggcgagatgaagcataaacattcactactacaaaattgggctttagaggcagtttttaagagtttttagcatcggttttgacaaaatttgctacagacgttgttctaggtgacgctgtagggtaaataacaaccgacggtataaggaccctatggcatcggttgttatgaaaaaattgactccaaagggactctatggcatcggctgttatgaaaaaacttacgccatagggtcttggttttttttttcagctttacaattttataatttttttatatatattattttattattaatataattaaattaagtataaattatatataataagcataaataaaaattaaattgaaaagttaaataaatacacatttacattaatctaagtatttatatattagctatctttttattaatattttatattttacattatgtgtttgtatttttgtactatatattagtatcatttttataatttttaagttgtgttttgtataataattagtatattaatgtaatactttaatttttatgtaattttatatttttatacatttaaatttttcatgaccaataaaatgaaacaataatttaaggaccagaataaatggaaaaaattagagaaagggctaaactt

SEQ ID NO: 352899 - DNA, 523 bp, Cannabis indica
cgggtccgacccccaattcaggtctacgtctgatttggcgtccgagtcctggtctggttacggttctaatcaaggtccaatttcagttatgattcaaagtccaagtgctagttccattcctgatcaacttcttgttttggttccaatttaggatcacagggtactgtttcgggtcaacttttgggtttgggaatgggttcaagtcagggtgttggttccggtcctcgtcagggtacgggtctagtgctgggtcccaaatccagacaccaactacaattttttccaagcccttagtccagatccggacccaatctcggttcccagtctagatccatttctggtgctgggtctcgagcttggtcctaagttcaagttcgggtctttgtcgggtactaagtcctggtcatagttctatttcccaggtccctatccttattctgggtccatatcccagttattgtgtgggtttgggtcccggtctaggtttgatttggagtcctagtctcggttcgggtttaggtct

SEQ ID NO: 352900 - DNA, 1543 bp, Cannabis indica
tagtccaacgatttgcatgcacaagatactcctagaagctggctgtagtaactccattgagcatcaactaaggttgaatcttattatgaagaaagtagtgcgaaaagaagtgataaagtggctggattatggtattgtgtacccaatttcagatagttcatgggttagtcctattcaatgtgtgccaaagaaaggaggaatcacggtggtggctaacaagaacaatgaattgattcctactagaaccgtgactggttggagggtttgtatggactaccgaaagctgaataatacaactaggaaagatcatttcccactgccatttattgaccaaatgttggattgtttggcgggtaaagagttctattgtttccttgatggttattcaggctacaatcaaatttctatagcgccggaggaccaagagaaaacaaccttcacttgtccatatggcacctttgcctttaggaggatgccatttgggctatgcaacgctcccgccactttccaacggtgtatgatggcaattttctccaatatggcagagagtattcttgagatcttcatggatgatttttcagtatttggggaatcttttggcacgtgtttggctaacttggagaaagtgttaaagaggtgtgaagaaacaaatttggtactcaattgggagaaatgccattttatggtaaaagaaggcatcgttttgggtcacaaggtttctcacaagggtattgaggtggacaaggctaagttggaagtcattgaaaagctaccacctcctaccacggtcaagggtattagaagttttcttggacatgcggggttctatagaaggttcatcaaggatttttcgaagatttcaaagcctctttgttcattgttggaacaaaaccgaccatttgagttcacaaaggagtgtcatgaggcatttgtgactttgaaaaaggcattggtgacagccccagttatcgtagctctagattggactttgccatttgagttgatgtgtgacgctagtaattttactattggtgtagtacttgggcagcgaagaggaaatattttccattctatttactatgaaagcaagactctcattgatgctcaaattcattactcaaccaccgaaaaagagttgctggccgtagtatttgcttttgacaagttccgatcttatcttgtgggaacgaatgtgattgtatacactgaccattcagccatcaaatatttaattgccaagaaagatgcgaagccaagactaatttgttgggtgttacttctccaagagtttgatttagaaatctgagatagaaaagggacgaagaaccaagtggctgatcacttatctcggctggaaataggtgttgagtaggaagacaaaatgcaaattcaagaaactttcccagatgagcagctgcttgttgtaacacaagcaaacactccttaatatgctgattttgtaaattacttaatgagtgggttgcagcctcctgatctgaataggcagcaactaaaaaaattctttcatgatgtgagattctac

SEQ ID NO: 352901 - DNA, 659 bp, Cannabis indica
tttcaggtgttttctcacaagtcggggcggtatagtcataatcggatatttcaggccgaaccgagttcggggccgaaatacatttttgggattttatatattggcattttatggttgagagaataacttgaaatttatttgagtatgtatgtgatgaaaatgacattttttcccttgatttatgtatatgtcatatataggacctaggggcattttggtctttttgacgcattagttaattatcatcaaaaagggaattttgacaaaatgagaaattcattttttggtttttttagccctagccaaaccccctttgctcttcctagttcattattttcaatttttgctttaatcttgaaatcttgcttggattggagttaattgttggtgatggtaagcttcaaactttgctacttttgagtttaattctaagttttgttgctaaaattgatgattagaaaagcatgttcttgggtattgagtgttcttggatatatgtgaagtggattggagtttataaatgattattttgttgtttgaacttgtttaattgtgggctatggatctttatttattagtgagtttttagggttgttttcagaggtagaaagtctgatctttttagccctatttattgttgtttggatgagtaaagcttg

SEQ ID NO: 352902 - DNA, 965 bp, Cannabis indica
aattaactaagtgggctttacagttttggaagaaaaccaagaactcttaaagttttccttagatttacttgatgaaaaatgtactgactcgcaaattactaatacagtgtaccaacaccgagtaacgagatacttcaagaaaagggtgaagaaaagcctcttcaatgttggagacttggcactaaggtgagtatttgcatatacgagagacgtatctgcaggagtgttcaatccagactgggagggtccttatgtgattgaagcgatagtaggaaccgaggtttacaaattagctcaactgaatggctcgctaattaaaaactactggaatgtggaacatctgtgaccctagtaccagtaaattgatgttgtaactcatatttttaatgtaatgttctgaactttagtattaataaagttaatcatttttcaagtaattacaaagtattactctttaaaattacttgaggggcatatgtgtatgattaacaagaatttatccggaaatagatgatatagggcaaacccaccgctttaaatttttaaaagttcttgttgatcaaacctttctgaagagaaaggaagatcaaacgattaagaatgacttttgattaaagaacctttctgacgagaaaggaaaatcaaaagttccaaatgagatataacttctaaactacatgtgaagctgaatactaacggctcgcattgtataggaaagtataaaacgagtcaccaaggtgccttgaaaaaatactttaacctagtatatgaatagacaacctaactattcataaaagcaattaaaaatatacaaagtgataaatcattaaaagtatattcatgtttgcttaaaacaaattataactgtttatgcaaagcagaattggtaactgttcgcaaatcaaaagcatagcagataacaactgtgttggaatatgttttaccaagatctaaatttactacca

SEQ ID NO: 352903 - DNA, 547 bp, Cannabis indica
tatataccataaatattaccatcgttatgctacagaaattcaaattagccttaaatgaaaaacgccattaacgttcggactaagttttaaaaaagttccaaacttaatttttaaatcaaaatcacctcaattacaacaagtaaacatcaaaactagtcccatagctaccaaagaacaattctacaaagttataatctctataaccactctaagtcacaaagtcactatataaaaccaatcgtttttagcttaaaatgtaattaaaccatactttaatttttttcctctttaaggatttactatcccgctactactagaccttagattgctaggttttgggttaaaataaaaaaaatggatataggggaagaaagttttgttgaagagagagaatgagagtttcatttgtacattttcttctgatataaacttataatatatatatatactaaatttacgataaattaaatatatataaaaataatatgataatcataatatattactaataatataataatatagtattaataataatattaataaa

SEQ ID NO: 352904 - DNA, 631 bp, Cannabis indica
ctatataactgagagtgaaattccaagttctatggtggatgcaatgaggaattaataagttagggaatagttctgcttattggaagcttggttgtataggcccatggtccccatactagttgagacaatactactcgtaagacttagttaattgattttaattaatcaattataattctaaaattagactatgtctggtttatgaattttcactaagctaggacttatttgtgaagaaaatagattctagggtttttttgttaattaagagactttataaagtctaataaatatatatgttaatggaaattttatttgataactaattttaataattaaataaatagttttggcatttaagtggttgaattggaaaaatagcatttttaagaaaataagataaatagttgaaaaaatggcaaaattgcaaagtggggtcccacatccatggtcggccacttatgccctattttaccatttattttatcaattttttaatgccaaataattcaaacctaaacctagttggattcctatatatagatagtgataacctcaaatcgaaagaagatgaacacacttgccctcagtcaaaattttgacccatcttctctaccttattcgaaccctt

SEQ ID NO: 352905 - DNA, 642 bp, Cannabis indica
gcaaaacaacatttatgtttttacaagtgtcctgtgtaaagtataattataatacagaaggaatgggtttctttgtattaactttccttactgatgaatcaattcaacactttaattttggtgcatcatgcattatgatatactattttcattcatgggactaccagcccatgttaagtccaacgccaactaccttctacctatgttggtgaccccactttttgttttttattaaaatgtctataaactaaccaattagaaaagaaaaaaaaaaaaaatttaactgcccagcagcagagccatggcccatgttccttatcattgaaaagtcaaaaaaaaattttggactcccaaattcatagcaacaccattggacttacaatcccatcagttgaccacatatagacatatttgtaaaagtaattaattaaattttttgtttgttaaataataatttaaattatgtatttttaaaaatggtacaaaatttaaattcaattattcttaatattttttttaagaaaagataacgaacctgaagttattttctagttggtgttagactttttatttgggcttacattaagttttggttttattaaaacttgagttgattggatagttctttgctgtgttagccca

SEQ ID NO: 352906 - DNA, 802 bp, Cannabis indica
ggggcgcatattgcaggagagagagaaataatgcacagaagaggtatgtgaaggaaataaaaaacgagcaatcagtatttgctccagaacctttcaataaggtaaaaattgaagaacctcgaattatatttttggaggaagatgagaagagcatgaggtaccctcacgtcaatccattggtgattaccatccaactcgccaataaaaggataaagagggtgatgataaataacgggagttcagtgaacatcctttacagggaaacactaaagaagatggggctcgaaaaggccaaattaaggccttgcctggtaaatcgatgcggattcactgacgacagtatcaccagtcaaggtataagagctcgcattgaccttgggtgcggtacctctatccgccacaattatgcaagactttttagttgtcaacctgccatcggcttacaatatattatttggtcgtccagcattgattggactaggggcagttagctcgatcaagcatttattcctgaagtttcaaacaccagagggtgtgggagtagtgcgagacgatcatatgctagctcgcaattgctatcgcatagagctacaacacagaaaagccggtgactagttaatggcagtcttggtagaggaaagcaaaaagaaggaggaagatcttgatcctcggattcaaggtgaaagaaacttaatgaaattaattgaagaattagaagaagttgttctcgacccagaaaatcccataaagtgtgtttacattgggaagaacttggacgggcagttgaaatagtagctaataa

SEQ ID NO: 352907 - DNA, 1122 bp, Cannabis indica
ttcattgtaaatttgtctttttttgctttaaatgtactgacgaaactctggatcggatatagaattcaaattcgtgaataatttttttttgtcaacctttcttctatgacgttcatttctatcattgttactctttttaataactttttcttttagatattagcaatgtattacttcaaaaaccatcaatgtataaaataacagtacctaaaaaaggcttgaatatttgctatacaagcattcttctaatcttacaaatcatcaaaccaatctctatcctctaatttcattttcttaggtagtatagttgaatcctatactttacctcctgtttaattttataaacaaggtactttagagtaggaagtctttggtgccaatatatctcatttctactcctccaagtttgatacaccattgatgccatagcaggaacgaaaacctgtttctaaaagttagattttcttcttcgaataactcttaacaatggtagtagacttgttccaatcatattccaattgagccatctagtcacttcttccaagcatctcttgctgtaagtgcaatcaaagtagagatgcctaatattttcatctctccgataacatattaagcatttagcatctagactcaccttaaattgacaaagcctttctttggtttgtagcatattgttcactgccaaccacatataaaaccaatgctttgaaatgaggaagcgtccccatacctctccataccaggccatagtgttttgattaggtacaagtaagctacaccccatccgaatggtatatgccttctgaatcaactattgtacattgcctatctctttaaaattttctttcaccctcactatttggcgccaataccaactactttgagtagtagccttattgtaatgccctaatgctaaggcacgctacagtgctttttcaatcacagtgctatctttgctaatcaaagaattttcttgaaaaacgtgtcagattaaaacttttatattagttattaaactttataattaataaaattatttacaagtttcgggatcccgttttcaaacttttaaaacataatactccaaaatacatattatccaggtcgcacaatgactacaaa

SEQ ID NO: 352908 - DNA, 745 bp, Cannabis indica
tttttttttttttaaagaaactaatttttatgtttcaatttatcttttgattgttttaggatgtatcagtaactgatttccctatttagttattattattttttattttacataactggctataacaatctaattttcaatttggttgatttaaataattgatttctcaattatagttttaattagttgattattgtaactggcttcagtgtgttaaattctaatgtctaacactagtcacaactccaatgtctaactctggtgactttttggtaatgaagacaactctaacgccttttttgatgatttttcgacgacgataacaacttcggcgaatattttaattctattattatgcagcgaatattttattttaatggataatgactattttgtgtagtgtactgcattgatagttaagtcttggagctttattttaagaagtttgtaactagttttattttggtattgtatttaatttgttcaatattccatacaatatctagaatacaaacatgtaaaattaatatataatttttggcacctgtaactatatatttttttttcattaagatagcaactctagcgaatatgctctcattttattttctacttcttttgcggctaatattatgctttagtggacattgaatattttggtagtgagttgatggtctagtattggagtttctcaaattgttattggttttaatattagtattatgttgatattagttttggtaat

SEQ ID NO: 352909 - DNA, 726 bp, Cannabis indica
gatcagctcagatccacctttcgcttgctcaggtccctccgaactccctcctcaggaacctttggacttagtaactttcaaggcaagagggtccacaattgtttgttcctcaaagaggtcaatgacctcttcaacttgtcctttctctttggacggagtctcaccgcctttggacttcttggctagaggggataagcccgagttttcccccactctcttctttagagcctcgatcattttctgagacatttctgcacgaaaaaagcaatatagtcaaaagaaggtataaaatatacaaaggcatgaaaatcaagaaaaataaatgcaagatgaagtactctgtacgctggcaggagcatctgccagaacaagcacagatggggcatcatcatttcaagagtctttctgctcttctaggatggctttcccctttccctctacaggggttgatgggcgagtaggtacaccaggctccctgatccggattgtatgttttatgggcctctactcggttgagagggttttcttcttcttaagcggcctctcctactcagaatattcttgagcctccttctcctgctcagaatattcctcagcatactgcttggctccagcatcaccctgacaccaatagcagcctacctcgacacttggaaactcccagataatcagaatgaagctcgaaaaatgagaaggaaggtggcacagtattgttggaaatatttt

SEQ ID NO: 352910 - DNA, 642 bp, Cannabis indica
aatgaaaaaaaaaaaaaaaaaagctaagtgcaccaaaactagaaatgtcagtaaaaggacgcttaaaaaacgactaggagccaagagctcacaccaaaacttgatgaaaagataaataaaaacaagcagaatattagacaaacagaatagcaacacaacaacataaacaatatctcagaataatgaaatctataagagggataaaataaaaataaaaaaagaaatccacaatctaaccaacacaaaaacaaattatattcaaacaaaattaacaaagaactaactcaacaactatacactatatctattaaaaaacagaacaatgaaattatacactcaccttgaagaaacgcaaaatcacaacactacccaataatgaaataggttgctcgaattaaaaggaagaagaaaaacaaaacaaaaaaccagagggtaatattacaatattatatgagcatgatgaatatacacttaacttggataaactcaaaccactataccaaccaaaatgaaatgggttgccggcaacctggaagcaaagaatcgatggcaagagcaaaaaagaagaaggaaaaacaaaacaaaaaacaaaaggtaagattaaaaatattttatgaggattatgaatgggatgaaagggat

SEQ ID NO: 352911 - DNA, 1062 bp, Cannabis indica
aattctcgcataacctctctctcatttactcccctatatatacacgatcatatttccacattcaataactaccctcaatagccaatgcacaatgactcaaacacaaccttttatttactataccctcccacactctcctaaacataaggtctaacagatattgaaatatatttgcaaaatacattatctcggatagagtcctctattgagactatttctttatactaagggaaataaaatctattttataataaccattgggtatacaaggtactacttatactggatttaagcagagtgcggaacaattttcggtggttcttttccaattctgtttattgcaattaatttctactgttatgttgttgttttcatgtttcatgtttgttttttcactttgaaactaaacacacaaagttccattttttttaaaataaatgtattgtaagtattttatggtaccactttctagtcactgtggtctgtatatgcaactcgtgtacggacttccattgaatgtttaatgtgatgaatatctccttgtgcttaagcaaatcattttttttaaaaaaaaacaaatatattaaaaagtaaaagaaaaaattaaaaatatatatttaaaacggatcgggtcagatccgatccgtaaaaaaattaagcggggcgagtcggatctgatccaagatccaataactatccgaatgtttcggatcagtaatgatccgtcggatcggattactgacccgacccgaatgaatggatctttttgccatgcctagatacaattcaatccgtacgatccaatccaatccaatccgcaaagtgcggattagattggattaaaaaattcaaaatccgcacttatgcggattggatattgattgacatgtaaaaataacttatccaatccaatccaatccacacatatttataaaaaaattaaaattatatatgcaaataatattttaatataataaaaatagtaatttaaaagtttaatacatataatacaattatatttcaaaacttaataaatgacatgtatattccattctttttata

SEQ ID NO: 352912 - DNA, 671 bp, Cannabis indica
accaagaatatcgagccaaattcgatcgccaatgagaagtggcgtctgatctggggtgccaaaatgcatagcagagcaaaaatgatgtggtggagagtgctatccgactgcctcctcacaagaaacaaaattctcaaagcctttggtatctcggatccctactgccccctttgctcaatggcaatagaagactcctttcacctgttttgggagtgtccagtggccagagctgtttggtttggaagtaactggaatatcagaacaactctgacccaagtcacagattgggaccgatggattagatggttcaagcagaaggataaaagacccccgtctctcaactttgatactatcctggaaggggcagctataatcatggaaagaatatggtatttgaggaattctgttgtgcacaagaatacctttacaccaatcaacatcgtggtacacaacatcaatgcagattagcagagctggatggaaaacagaatgctcaacattctcttcaaactgaatggttgcccccacctatcaattggagaatgtgcaacactgatgcagctatcggcaaccgagtttcagcaagggctgctgtgttccgagatgaacagggcactataacgaatgtttttacaacaaaactcttttacagggattcattggcaggagaa

SEQ ID NO: 352913 - DNA, 659 bp, Cannabis indica
ttaatcacataatcttgattactttccactgtgctaacgacagaataaacaagaatataaatgtgacatgggtttggatgaatttataaatcaaataaacaagtaaatgataacatgaaccaaatgacacacaaataagtgatgaaaatacttctgtttctttattgatatttaaaagataaagattacattgaaattgaagttttatttagggcataaaaccgaaaatctgcacccttcaattgagattgggatttcaccatcctcttgcagcatttccgaaatcgaaacccaggcatgtgaatcatctaagttcgtgcagtgaacagtgattttaccaacatgctcgtacaaatacgcttgggccacaatgttctcgatgttgtcagagcagagatatacttgctaatcaagggccgcatggtcatcaaaattttacaagagagctggctcgttgagggaaacaaactcctcagcatatgtttgtggttgaccctcatcctcacgagtgtatggttgtggaacatacaaatcaccagctacctctcctacgtcctcttgttcggtagtgttttttttctatttaagggattggacttcgacttttaagttttcaatctccttcagttgccgagccacaacatcagacacttcccttt

SEQ ID NO: 352914 - DNA, 747 bp, Cannabis indica
attcccttccatctgcagctgctctatatcaacgaaaaattatcacttcagcagcgtgtagcttgtgttctaatgcatgggaatcagtgggacatgctatgtttagttgcaagcatgctagagcagtatggcgactttcagattaccatttcgattttcaatcggcctgttgtatgcagaatggagattacttaatgcttctgtcaaaattatataccaaacaagatatggaaaagattctatgcactatgtggtttatttggtttgacagaaataatatcattcatggtaaattggctctccaaccagatgcaatttataaccgatcaatggtttatcttgcaaattatcatcaggtacattcaacctcaacttcgcctcagcattctgcagcagcccctcaccaaccgtggcaagccccacctccaaatcagttgaagctgaatgttgatgcagcagtatcatctgtatgcaataaacttggttttggagcaattataagggactcaaatggccatgtgcaagctgccctttccaaaccagcagctggtaatcttaaagcacatgaaatggaggctaaggctttataccatagtcttaaatgggctcaaaatttaaatctccaagtggatttggttgaatctgattcactgatgttggttactgctctaaatggtttatcatctagaaatttaggatttaaaatcttatttcagatgttaagaatcaattatcttttttccctaa

SEQ ID NO: 352915 - DNA, 599 bp, Cannabis indica
tccaactgtgcctgcacaactggtctaactttttcggccacttggcagcctagagtcacgtcagcatctctttgagcgggattttgagcacgagtttttggctgaacgattggtgtgtcatgccggttgtccactcctctccttctgttcaaatcatctcagagatcatgaactgtacctaatcgattatatacaaaaacacctagttatctcaatgactggttggtttggacaaacagctagccgacaccattaacttggttggaagtattaggtataacctctcttgatgaatttctagacaaggtctgcccgcctatcacttggcccacaggtggaacctgtaactggggattggacggctgaccatttatagtctaagaggtgttcaccgctggatcttcgtctgtctcacctaggggaatgatggttgcaggctgttgtctggtagcctaataggctttttgtatcaacacagtggcgtgtctggtccggtcgtcaatggctgcctactaagcccttaacgtttccatctcctaatctctccattcagcaaacatgcaccttttcttttcaaatgcgagatttactgcagcacg

SEQ ID NO: 352916 - DNA, 1064 bp, Cannabis indica
taatagcatcctcatgtagaagccttctcttgttgaagggtgtgcaaagtatattcttccaattgcaactccatgttttcttcttgtccatattttatattttgaattgcaaacccaaaatgtagggaaatcagaagaagctagctctcatgcatcctcgttatttttgttttatctactccaagtgtggccaagacatcttcggtgcacttatcttctccaaatattactgtatgctctccaggtaaatggaacggtaatctttcaactaatggctttcgataatgtatgtcgaattgcaagattctccagcaagcttcagttgccgagatgtatttgcagtcaagatatgttttagtctcgcctatctcttcggtggtgtcgatagattccactgttgcagatgttctgtcatactctttatggacatacttgaaaagatatttgatggaccttgagtaattgtaaagctcgacattaatatgtgcatcgaattgtactattaagtttctatgataagggaccgcgtaacgattatctaataagacatgtttcttttcaacatgaacacctgtataaaagaatttgaattttttaaatgaattgatgaaaataagtatagtatttccaaagagtaataatattatagcttatctcatgaattttttaaaattactattgttaaaatgttatataattaactaaatgtgaattctaaattttgtaattataattttgagtacttgtatttctccttttgtagattggaaagccatttatgtcaattgtagtttgatcattgaattttttggggcaatatttcgtgcacttatcattcatcatacatggagaatttgcattgagctttccacatggtccatgaatcataaacttttttactgcattatagccatcagggtcgacattgatgtctgggatttttgcacttattattttgtcaatatgggctgctgaaggatttttcattgttagatcgaagaaaagtagtatgtgtgcatgaggtaaaccgcttttttggaactcaattgtgtagacacctgtga

SEQ ID NO: 352917 - DNA, 774 bp, Cannabis indica
  modified_base (39)..(39): a, c, t, g, unknown or other
taaaacatacaccatactctagagctcgtcgcaaagctnttgaaaatggtatatagaacgtctaaaaacggacatccgagtgaaaagttatgacaaaaatacgatttctgatctcctaagaatttctaaaaaacagtgaaactcgaaaatctcaaattttgcactcaccgaaacactaccaaaacttatccaaatcactcaaaacttcacaagacacatatataccataaatattaccatccttatgtaacagaaattaaaatcgagcccttaaataaaaaataccattaacgttcggactaagctttaaaaagttccaaactcgatttctaactcaaaatgatctcaaatttaacaagtaaacatcaaaactaatcccataactaccaaagaacaattctacaaagtcaaaatctccataactattctaattcacaaagccactatataaaaccaatcattttgagcttaaaatataattaaatcatgccttaatcttctctcttcaaggatctgctatcccgttactaccagagcttagattgctaggttttgggttgaaaatcaaagaaaataaatatagggagaaaaagttttgtcaaaaggagagaatgagagtttcgttcatattgtttcttcttatataaacttataatatactagttgcaaagcacatccatgagctgtgctgccatttttttttggctaacttgaaatttaaccccctgaactttgacatgtagtaaatcgtgccccctgaacttttttggccgt

SEQ ID NO: 352918 - DNA, 628 bp, Cannabis indica
ataggtttttacacttctccaagatcactactccaccccagagttatcaccatctcatcagcagactttctagcactaaggcaagtcaagaaacctgatttggtgtattctaagagtattaattaccacccttatggactaacatatagttcctcttcttgatctaaagattcacttgattgtcttccaatgttcctttcctggattaatctatatatctactcattactcccactcaacagcaggtgtctggtctaatgcattgcaaagcatatttgagacctctcgttgttgattcgaggaattctttcattggcttttattttctggaatagttaaaacttttagttagataaaatctatatctagaagtcgagaagcctctatagatttccattagaaaaatgctccagcatcttattaaagtaaggtacttgcactagagtaattaaatccctaggcataccatcagccacagatttagataatctcaatctattaatactgggaataggaattttcgttaagtccattgaatagacttattttcaaaaattacctttcttgtccttgtaatagaaaacttttggttactccatatgaatggttttaaccatagttctcttgg

SEQ ID NO: 352919 - DNA, 799 bp, Cannabis indica
cccaccaaaacactataaataccccctgtatatttattttaaatcaatcatggggcgtgaaacgaatccaccttttagagatgactaattctctgccaagcagtagggttccaaaccctgtatcataactatcatgcggtctacccaatttactaaatttttttgcttccacataagaatgagtggccccagagtcaaataacaaagaaaagtaaaagttgttgaccgagagctgacctgttacaactaaggggctagcttctgcatcaacctgaattagagcaaacaccctagctggagcgagtttttctccaatcttttgttcttctttcttaagttgttgacagtctcttttatagtgccctgacaaaccacactggaagcaccctttccttctacactctcctagatgatgcttttacaactggggcattccgggtaagtgtattgggtttcaaaactaccctgacagttgcctggaccttggttcccacagaacctcttgttctgacctgagccaccggatgcagttggtccctttcttttcagatcagtggtcgagccactaccacccctaccataacaagaggtaggaagagtaggggccccaccaacaatatgagtcccttgggactcctgaatgcactccactgcaccctcagctcgcattgccttccccaccatatcagcatatgtggtgttgtcaatagtggtgatcataagttcatgtcttatcttcgaattcaatccatctaggtatttttctttcttactaaaatcagttggcactattcccgag

SEQ ID NO: 352920 - DNA, 1096 bp, Cannabis indica
ggattttgaaacaggtcaaatactccaacactggaaattgtcacaccattggccgaaaggtcccaaatagaggttaaaggggagacagcagaagtatctgtttgaaccggcagcactttggctcacataggatcacaaacgactttttggaccggtggcaatttaggctcacaacggatcacaagtggctctgataccatgttaagaatcatggggttccatctcaaaaccaattggcaatgagaggagtagcacattcatcttatatatcacaatttatttccacacatagcaatgtgggactaactcttaatatatataaaataataaaaaataaatataaaatatttacaatttaatgcagtaattaaagtaataataaaatattaaaaatgatataaaaataattataaaaacagtacatttattggtatgcaatatttgcatcatactatattatgataaaaatttggatcaactttcgacatattattgcatcaaattttttaaaagatgagctatattttagcaattttataagaaccaatatgtttgttatgacaaattaagtttagttgtgtctagctagcctcttaggctctgtttgggggagctttttaaaaagctaaaatcacttttggaaaaagttatgagttaatatgtgtttggtaaaatttaaaaaatagatttttcaaaaacttaagggaaatttatagctttcaggaaaagttattggcccaccctagctttgagattttagcttttaaaggaagctacaattttggttaaatgaatttttcacttgacccaattgccctcatctaattttaaaattcctcatttaccaattaattttaagacttcttacattctttcaatttcatccttattcaaaaaaaaaaaaaaaaaaatacttctctgatcaaaaactatcaacagtcatcttattattatttttagtaaaagtctaatttattattttattatataaatatttaaaagaattaaatattataagaaaaaaattaacgtaatttataatataataaataatatttataaatatattaatatgtataaaattatttaaataaat

SEQ ID NO: 352921 - DNA, 784 bp, Cannabis indica
cacaagaagagcctcaaatacttctttacttagaaagacttgaatatgagacagaggcgttggttagaattggttaaggtttatgactgtgaaatcatttaccatcataggaaggccaatgtagtggtcgatgccttgagcaggaagggtcccaggcaggtaactcgtatgattcagatttcacctcagttagcaaaagacatggtcagatcaagcatcgagtttgttgtaggcaaacttcataacttgacactacaatttgatctgttagaacgaattaaagctgctcaaataattgatctagaattagtgatgatcagggaagaggtttcaactggtcgagctagaggatttacagtgtcagatagtgagatgctattatttaaggccagagtttgtgttccaagtagtgcggaaattagaaatgaaattcttgaagaggctgataccactccatactccttgtatcctgacaccaccaagatgtaccaagatcttaaaccttacttcttgtggagcgggatgaagaagaatgtggtagaattcgtatcgcgatgcctaacctgtcagcagatcaagaatgaacattagagaccgacgagtttattacaaccgttggcacttcctaagtggaagtgggaggatatcaccatggattttgtggttggattacctagaaccacaggtttatttgattcaatttgggttgtggtagatcgattcatgaaatctgcacattttctaccagttaaaacaacctttacagtagatcagtatgctgatt

SEQ ID NO: 352922 - DNA, 547 bp, Cannabis indica
tattaatattcttaaattgattagtgtgattataatttattaggctattaaaagactaattatgcatttagagtcatttgatgaccttagaagtagaactggacttggagctcaacatgaaagttgtagatctcgttctcagttttctagaaaatcttaaattgtccaattccaagttgtattaaagaagttatagataaaagactaatcacataatataaacttttcggcagcaagtcgtatcctcggcaaggaggtgatttctgggaaaaaattaaatttatatttgtagaaaataatgaatcgaattgtgtatgtatttcatagaatagtacatatttatatacaaagctaggagactaaatgggaaactactaaatacaaataggaaactactaaaatacaagttaccctaatttcttgacaactaatattctaacactccccctcaagctgaagcatagatgttagtacatgcccagcttgttacaaagataatcaacccgctaccccattctaaagcctttgtaaaaatatctcctagttg

SEQ ID NO: 352923 - DNA, 865 bp, Cannabis indica
agagagagagagaaaagagctttttccttaattttgtaaaaatgaaataaaaattggttttgttaaatcaattttcaactaaagtataacaaataaatcagattattaactttaaaaaccacaaaagacaaaacataaataggcaaaatgaccagtttccccttcacactaaaaatcataaagggtcacttaggggtattttgggaaattctaaaatcccgaatattgctgacactcccaatgtctaactatattatctcgctatactaaaaatactaagatgtgattctaatagccatacaccgcgttctaatgatgtcgaacacaaaatatgcaaaattatgaaatttctatatataacatataaaatgcattcttaattcaaataaatcatcataaataaataattcaatactaataaataattttcataattaagcactaattatctgctaatttccaaattaaagctaagcggtctttacaattatcccccctttaaaaggactttgtcctcaaaatctaacttgaacaactctacatattgagctctcatgtctgattctaactcccaggtggcttcctccaccctgctatttctccagattactttgaccaaagctatggtcttgttccgaagaaccttatcctttctgtcaaggatctgaactggttgttcctcatatgacatgtctgattgcagctcaagattttcattactaagtacaagagcagggtctgaaacgtatttccttagcatagagacatggagtatgttgtgaactgctgagagagctgaaggcaaagctaatcgatatgccagttgtccaaccttctcgagaatctcgaaaggtcctgtaaatct

SEQ ID NO: 352924 - DNA, 671 bp, Cannabis indica
acaaaagtggttacagaacgcatttttgttttttaaaaataaagtttttaaaaacacaaattttactttcattttgagattaaaaaattaaaaaataaaagtattaccaaacaacacctatatttgttagagagaagggaaagtaaaataattagagacttggaaggaggaagggtagtgtgattgatggagatatagtaacttttcactaagttagttagtatggagtgagagaagagaggaaaagatgatttggtcaatagaaattttgaatagcttataaggctcatattagttttgtaacacagtgctaggcagcatcaaattaattaaacttgtatcatgcctacatcacattctcaaatcttaccattttatttcattacttcacagaatgaaaaagaaagaaatcaaactacaaatataattcctttcttagaaaaagaaagcacaatgacaacattataaacaaatttaagcatgaactatatctaagaaatacgaggaggaatcattgcaagaaactatgcatggaggaataggaatagctagagttccttccagcatggccactactttcttcataggaggacgaattgttggctcttcttgtatacaccgaatcccaatcttcaacaatctgtcaaactcttcctcgttcacttcttcat

SEQ ID NO: 352925 - DNA, 652 bp, Cannabis indica
cactttaaattttgagtccgctactagtcgttctaaataaattctttttgttttgacgttgtagaaatttttttttagctaatttattactttatatactgtttttttaactttcttttttttttaaaaaaaaaattcgggtttgggtttttaaagtggttgcaggattagttgcaataggaatttttataagatttttttttgttgcgatttaagttgcagcactagttgcaatagggttttttttatgtagaattctgtaaaaatgtaaaaaaaaatatttagaagtgtaaaaataaaaaatactttttttttttataatcgtatattgtaactatttaaaactacttgtaaattttttaaaaaatttgaataatttacaataccaaaaataaaatttaaaccattactaactatgcattttaaaaaaaccaatcagacttatttagaatttttttaaaatttataattcagtggtctcaaataataactaaataaaaaataaaaaattagactaattttttttcaagtatcagaaataaagaggttacttaaaggaataattacataaggcaccattttatgtaaaataattacatttttacgttcaaagaatatttttttacatctttacggtttttcaaaaataaca

SEQ ID NO: 352926 - DNA, 781 bp, Cannabis indica
caagaggactacattcaaaagattatagagaaattttcatagaaagattcaaagaaaacttctcagccaataactagccagtacactttaacaaaggaacaatgtcctaagactgaagcaaaaaaggaagcaatgagtaaagtgccttactcaagtgctgttgggactattatgtacttgatggtttctacaaggccagatatggcctttgccataagtaccttgagcaaatacatgtcaaacccaggaaagattcattggcttgcaatgaaatgggttttcaggtacctagtaggaacacctaaggttggactcatctacaagcaacaaaagttcaacaccaacatagagggatatagcgatgctgactatgtcggggatagagacagcagaaagtctacttcatcttacatgtttttactaggagggaactgtgtgagttggaaagcccaactccaacctgtggttgcactttcaacaacagaatcagagtacatatcaaccacataagctattaaagaagccatatggatgaaaagactcttgatagagatcaagctactaaaagaggttcctagagtgtactcagacaatcaaagttgtgtacacttgtgtaggaaccctgtgttccatgaccggactaaacacatagagattaagtatcactttataagggacaaggtgactcaaggtgagatacaagtggaaaaagttcctactgaggagaaccctgcagatatgggaactaaggtggtgactctcaacaagttcaaacattgta

SEQ ID NO: 352927 - DNA, 676 bp, Cannabis indica
acaattaattttttttgcacattttttgtaattatttaagaaaatgtatatatttatgtaaaatgccctttaaaattcatcattgatgtgaataaacccaatatgatcaaggcccttccctttggttttcttcttagctatctcttccctcgcttaggaattcccaccttacatgaaaagaaaaatgttcccacctctagtgacattttaggatcgaaaactttcaaagctatgggttacacatttattaacaatgaatgggtgttcacaccaaagagaggccaaagaatgcaaattgatttggaaagtgatgatgaagaccaagatgaagacattaacttgtccgcaagtgaaagtgaagaagaagaagaagaagaaatgcctcctcaagctcctcccatgcctcacttttcccaattcaaccttgaggaagcttttactcgtcttcacacatcgtttgacaataaatttcaaaccttgaggaataacatcaactctcaattcaccaatctcaacaacgatatcaataccatgaggagtaacatggttcatgggtttaaaaatgttcaagaggagatggcacaatggagggcttacatggatcgttttcgcccccaccaaactagtttcttgcattattttttttcttttgcatatttactcttgtttttcattt

SEQ ID NO: 352928 - DNA, 500 bp, Cannabis indica
aaactcccacttacactaacataaaactatcaatacatttcaattaatcctaaattcagtttgtgcttttcaaatgtagttacagtaaaaactctggtgaatggatcaactaagttgtcttcagtatccactttctccatcagtatatcccttcttcccacatattctctgatgatatgatatttcctctctatgtatttgcttctcttatggcttcgaggctctataatgttggttatagctccagtgttatcacaaagtaaaactagtggttttttgtaacgtccccgcttcaagcctctattgggtccatacacccacggaataatagctcttatacacgagtacgccactttggctgcttcatggactcacaactggccttacagaccaacacaagtgtttttagcgtgctttgtcctcactcgcatgctcattaggaaaacttctcaggaggtcacccatcctaaaattaagccaagtcaagcacgcttaactgt

SEQ ID NO: 352929 - DNA, 740 bp, Cannabis indica
tacattttttcctgctcttctgaaattttgtttcatgatttagctcatgagatttacacttcttttcctaaggaagatgtagatctttttctgtgtattgcttggtttatttggtttaacaggaacaaagccctcaaaagtcaaccatccgatcaagctcacgcaattgtcagtttggctcagagcttcttggcagattacaactcatcttcgtcagcttctactcctcttggccgacctagtttggcagctggtacccttaaactaaatgtcgatgcagcagttcctaagaatggtggaagatcgggttttggtggagtaatcaggaatagtgaaggttttgtagtcgcagctcttgcccagccctatgttggaggcggtcctgttgccaccttagaagccaaggctctcctctccctgcttcgttggtgtattgacgaacagtttatggttcaggtagtagaatcggattgcaaagctgtcactgacgccattagccatcacaaggaagatctttcggtgttcggagacctcattcagcaaatcagagaaactttgtcccttttccctgcagcccggatatctcacattaatcgcaacgccaactctttggccgacaaattggcgcattgggcttcaggtttagacgaagtagcaatttggataggcgatgacccctgcaatctagtggaattcttctccttttagcgggctccctttctactaaaaaaaaaaaaaaa

SEQ ID NO: 352930 - DNA, 1270 bp, Cannabis indica
aaatgtctagattttcttctccatgcttgtgctaacgccaaagatttggataatgcccgtttgatttggaaggaatacgatgcagtcggccttccccataacattttaaatttcattaggtaaataaccaattaaattctcacattttatagtttttccttttaacgaattcctttgcttttcctgcatgagcaacgatttttattaacctctatctatgttgatggatttttatcttgaaatacttccaggatgtatcaagctctgttgattgcaggggaccataaggctgcaaagatcttgcttactaaaattcccaaggacgatccccatgttcgacttattatcaaagcatgtcaaacaacgtactcagagtccataaaaacaaaaaccaatacaaagaaaatgaaaacagaaaagagatgatcaaatgcatatgccaagagaatagggggagagcacaaatagcaaaaaaaaaaaataatttggatgctgttttgtcctaattcgtcaacccattgatttaaatggggttatagtacgtttgaatgtagccactgtagttagcaagtgctgttcaaccaattttcagctgaaaaaatttctgttcaaacaatgaggtaccttaatttttcataataaaataatgaggtacccgttttaattcagagctttagcaaataacaaatagcaaattcaaaagcttaatccactggtgtcttctcctaccaaacattccagctgaaatttactgtttttttaggcaaaagttgaattttggtgaaaaagaaaagatggaaaaatgtaagaagaaaaaagtagaaatttcttattaaaaaaattgcataaaaaatactctgttctacaaaatttctatatcaaatttaaaatatatattattttttttttgttcttttacacttttttcttacacttttttttttcctgtttacttttttttcgctaaaatttaactttcaaatatagtcttacagtacagaacattgtagagcactcattatttattaacaaaatatctatttaatatttgcagttatacgctatatcttttgtttgtatgttttttttttttaaataattaggaaatagctcgcggttcgggtgcggtatgagaagattttatttaactttttgcaagagtgacaaaacttgtcattgtattatgtttatgttatatttatttgacatacatctatattttgtattaggatttcaagattcaatttatcacaaaaagtagtaaaattct

SEQ ID NO: 352931 - DNA, 881 bp, Cannabis indica
ctttcaggcttatttattttttagtccgcccggggatggggctctcccagtccggcggagattttgtattttacgaacttgtttctgtccccaagaagggggacaaacttatggatggtttttatggctttcgggcccaccctttgaatgatggcgtggtcccttctaaccagcaaaaacacgttaaggagtaccgccatcgctttttcttctcctccgggttccgagctgtggagcacccggagctccttacggactgggttaggatccctccgtacgagcggactgcgcctactcagatcttccttcaacaggcccagatcttcgcgacttttgataaggcggatctcgacattgggggattggtcacgacggagaactgccggaaggccaagttgatcctggcgcaccagtcggtggaggactccaacctttctaaggtcatctgcccgaatgtgagggtcctggccgcagagaagaccttccgggatgagatcattgccactgcggagaagaagtaccaggattacctctaccggaaggcccaggagaaggcttatactagggcccaggcggcttcggggaggcttcgcgttgggaacccggtcgagaggaggagccaagcggctgccgggagatcccttcgcattgggagtccggttgagaagagggctcccaggccaaggcctatcgtccaagtgccgaatacaggggctcctaacgccagcacttccggctctggtaagtctcctttagcaatacattatgtccctcctgttagcgaatatgctagccttaggcctgtagggttcgatgaacgtctccttaggtttaggatgccttcgacccggtggggggatcatgccaaggattattatttc

SEQ ID NO: 352932 - DNA, 652 bp, Cannabis indica
agatatgataattaccgtaatatctattcaattcaatactacctagttgatcctagatcaaataatcttaatcctgacatggttaggtttgatctcaagagtgttatttgtgttcttcgatttgttagttaagcctaccttttggtgtgggtgatacgtatattttgagaacatggtagtaaaattgagtgggagcactaatcatagatatggaatctatagcttctatctggacatagaagtgaaacgatgatttccttcgagcttggttaaacagggataaatggttgagtacacatttcagtgattatattagttcactgaaatatcatttataaatggctaagtcttttaaggataaaatatattaaagggtgtaacggtaaattaatccctatgcaatgtagattatctatagagaatcattgattattgggattatagcaatggataattaatagcgtatctatatcgtggaacatatagagcgttgtatgtaactgagagtacaattctaaggtctatggaggatgcaatgaggaattattaagttattgaatttacttgggaaatcttagatctgcttattggaagctcggttatgtaggactgttgcgaaaattattaattgctacgcaagtgcacgcaatca

SEQ ID NO: 352933 - DNA, 512 bp, Cannabis indica
tacataatactaatatttcataatacgttatcagcacgagcctctaaccaaggtatgacaattatttttttatatgtgatctcgaattgctttaaagtcatgatacactaaatatatatttatgaatatatatactcatctgactgaaacacattcgagttagctatttttttaatgaatcaatatttatacaatatatgtctatgcttatatatatatatctttatagatgcctatatgttatatatgtgtgttgatttatttatcatattatattgtttaatcttattatcttattctatattatactatattttgttatatttttttttagttttcttcatggcaaaccttacaaaacttgactttgtggcacttgatacttttggaaaaaattatttatcatggattcttgatgctgaaatccatttagatgctatgggtcttggagacaccatcaaagatcaaaatactgaaacaaaacaaaataaggccaaggctatattttcctt

SEQ ID NO: 352934 - DNA, 499 bp, Cannabis indica
gcagcatcacaattgacacagtggctgtcagttgtaggtttctgccactgtttcggtttgggggggggggggtcgggaagttcgcacctagcttctagtgcaccctatccatgaggaattgctctcggatatgctaaaaacacccatccaaaagctgaattccattcatggttgggagtttattccattttctgttctgattctcccaaatagcccacatgactttaatcgcatcttcaaattcatttttgtccagccgactctgtaataacaccaaaatgtcaaacatggatccatcttccacagaatcacacttcttataccaaggaatgagtttccacaccgctttagttttgacacaactccacaatacatgagttaacgtttcagcattgtttccacaagactcacatatcgggtttacatgcatactgttggaaattattttaccagatcttagatctactcacaaatatgctgattaacaccctaaatatga

SEQ ID NO: 352935 - DNA, 753 bp, Cannabis indica
attaaataaatatttttttaaaaaaataaaataaaataaatatacacacatagtaaattttaaatttcaatttcaaatattcaaaatacaaatcaaaattatcaaactatataaattctaaaattttaaaatacacaatataaaaatacaaatttttaaatataaaaatggtttaactattaaacgtaatttatatattatgttataaataattttagtaaaaaatatgtaaatcggtttatttggtttattttgattatttgggcgggttagaataatattcaacccgccaatatatttattgggatgtttaaattttcgtaaagctattcagattatatttttttttgttgatttattctgtttaattgaagcaatttatttagattgggcggttatattttttgaacagccctaataattaatatatacatctcttttgttgcaaaaaagtcaatgactccacaaaccagatgccttaatatgttcatgaaatagataaattgccaaatttgaaaaaaaaaatagagacttcatgagctgcatatcgtagtgttcctagaaaaacgtattttaaattatgggtgtttattggatcacattcaatggatttggatccatccaatccaatccaattatttattggatattggatttttccatctgatccaatccaattgaattgagttatccgatccgatccgatccaatccaatggatgtattggaatggatcggttccatccattggatg

SEQ ID NO: 352936 - DNA, 653 bp, Cannabis indica
aatctcctaagttggaaaaataatattccttcatatggtctccccaccgggtcgagggcatcctaaacctatggagacgctcatcgaaccctacaggcctaagactggcatattcgccaacggaaggaacgtaatgtactgctaaaggagacttaccagagccggaagtgctggcgccaggagccccagtgttcggcacctgagccgaaggcttcggcctgggagccctcctctcagctgagtccccaatgcgtaggggcttcccagcgatcgcctggcttctcctctcgaccgggctccccacgcgaagtggcctcccggaagcggcctgggccttggaataagccttctcctgggccttccggtagagatattcctggtacttcttctcggcggtggcaatgagttcatcccggaaggtcttctccgcggcgggcaccctcacatttggacagataaccttagaaaggttagagtcctccactgattggtgcggcaggatgagcttggccttccggcaattctccgtcgtgactaggcccccgacgtcaagttccgcccggtcataagttgcaaagacctgggcccttcggagaaagacctgagtaggcgcggtccgctcataggggggaatcctgacccactctgtgaga

SEQ ID NO: 352937 - DNA, 635 bp, Cannabis indica
aattaaaaaaagataaaaattggctaaaatactccttaagtggccgaccatacaatgggccccactacttacgattttgccattttattcaataatttattttttctttcactaatgctatattttctaattttaatcctttaaatgtcaaaactatttatttaataattaaaattaattatcaaataaaattgacatttaacttatttattaattagaccttacaaagtctcttaattaacaaataaaccttaaaatcacttttatttacaattaagcccttgcttagtgaaaatatataaataatatatagtctaattttaaaattataaatgattaattaaaactaattaactaagtctacaaacagtattattgttgtgataaatccaacacgcaagtatacgtatcgttttaacaagtaatactcaggtaagtgagatcgttcccacgaggactgtagctaagtaccaatcaattgaattcttgtttctatttggcagaatcaataataaagttgaataattaaataactaaaaaataaaaggcaggataataataataaaaagtgtaattaattatggatgaatatttagggaaaagaatcctgttgatttaattacccaattgttaat

SEQ ID NO: 352938 - DNA, 1836 bp, Cannabis indica
gtccgagaaaatcgtagaaccaatggaggacgtcgaggagatatcagtgtgcgacctcgactccactaaggtactccggcttagaaaaagactagacccggaggaaaaagaaaaaataataaagacactgaagggtgccatcgaaattttcgcatggcgccaagaggacatgactggcataagtccctttgtcatcacccatgtcctcaacgtcaacccggacatgccgccagtccagcaaaagcgatgccccctcgattcagtaaaggctgaggccttagaaaaagaggtggataagcttttaacaaacagcatgatccgtgatgtatactatctggaatggctagccaatccggtcctggtgccgaagccaaacgaaacttggcgagtttgtatagacttcactaatctaaacaaagcttgtccgaaggactgtttccctctgctcaggatcgatgagatgatagacgccacctccggattcaagctactatccttcatggacgcatacgccggatacaaccagataaagatgcacacggcagaccaagagtgcactagcttcaggaccgataagggggtatactgctacctggtcatgcctttcggactgatgaatgccggtgcgacctaccaaagaatggtcaaccggatgttcaaaggcctgaagaatgccggcgaaacatggaggtgtacgtagatgacatgctagtcaagtctaaagcgtgcaatagccatgcagacgacttagaagagtgtttcgaggtagtccggagatacggaatgaagctcaacccaaagaaatgcacctttggggtcaaatcagggaagttcctgggcttcatcgtcagccagagagggattgaggcaaacccagagaaaattcaagctctcctgagcatgccatcccccaagaagcataaagacgtgcagagcctaaccgaaaaggttgctgccctgagccgttttatctcccggtctacagacaagtgcattcccttcttcaacatattgaagaagtgccagaagtttgaatggtctgacgagtgcgaggaggcattcaaaaaactgaaagagcacatggccaagcctccaatcctgtcaaaacccgtcctcggagaggacctgttcctatatttggccgtctccgagcacgcggtcagcgcggccttagtccgggaagaagagaaaactcaacatcccgtgtactacgttagcaagcgcatgataggggcggagacacggtaccccatcatcgaaaaattagttttttgcctcctaatggcctcaagaaaattaaggccgtacttccaagcgcacccaatcaaggtgttgaccaatcacccactccggcaagtcctgcaaaagccagaggctccagaaggctcctcaaatgggcgatggagttaagtcaattcgacttacactacataacccacatctctataaagggacaagcgttggcggacttcatcactgaatgtaatgaagcaaaggcaaccgcaaacgtgccggtaccatcggtccccacaaggagcgggggttgcgatgatatcgccgaccggacatcgactccaggcagccctacggttcgacttctcagcttcaaataacgaagtcgagtatgaagctctgatagcaggactgagattagcaaaggccgcgggggccaaaagagtagaagtctacagtgactcccaactggtcgtaaaccagatttcgggagagtatcaaacgcgcggcgaacgaatggccgcatatgtaacaatagtccgggaactgctccacgagttcacggactacaaagtagaaagaatcccccgggaaaagaacgct

SEQ ID NO: 352939 - DNA, 1170 bp, Cannabis indica
ggtttggggtttagggtttaaggtttagcgttaagcatttaaggtttagggattagtggttagggtttaaggtatagggtttaggggattagtgtttagggttcaggattcatggttgagggtttatggtgtatggttttgagtttagggtttagggtttattctttaggttttagcgtttagtgtttagtaatcaggtttcaattttagggtttaagggtttagggtgttttagggtttatggtttttttgtgtttagggctttagggttacaattaaggtatattgttttgggtttagggctttgggtatatggtattaggtttaagagttagggattatgagttttgggtttggggtatagagtttagggtttaaggtttagggattaggggttagggtttacggtttaatgtttagggtttagtgtttacggtatagggtttaggggttcagtgcttagggtttggggttcagtgatttgggtatagggattactggtttagggttcagggttcgggattcacagtttaggttttacagttttgggtatagggtttagggtatagagttcatggtttaggtttagagtttattagcgttaagggtttagagaggatgatttacgttttagggtttaaggtatagggtttagggatatggttaggggtgagggtttcaggttaatggtttggggttgggtttagggtttaggatttagcgtttagggtttagtgtttttaattgagtgtttagggtatagggtatagtgtttagggtttaaggtttagggtttagaggattcgagtttatggtatattttttagggtttagggtttagaatttaggtttttgggtttagtgtattgggtatagggtttagggttcttttaggttttaggatttagggtttacggtatatggtttagtgtttagtgttttgggcttacggtttagtgtttatgacttagagtttagtgtttatggttaagggtttaggcttcaagatataggggtaagggtttagggtttagggtttagtgtttttaaggctgtatggtgtagggtttaggtgtttagggtatatagtttagggtatatggtatagagtttaactgattttttaatttaatttaaataaaaaaaaataacaaaatttaaaagttagca

SEQ ID NO: 352940 - DNA, 930 bp, Cannabis indica
aacaacattaaattatacaataacaaaataaatatatataataaataaaaaagtatataaataaataaatgtatttgtaccgagcttggagagagagaaagagagagagggagacggacgggaggtggtggtggtccgacgtatgaggcgaagatgagaggaacaccgacgggaagtgttggtggtccgacataggcgacgaagagtagagagagaccgacgggaggaggggtgggtggagatagatggacgagagagacaagaagatatggagatcgagagagggaggaagactgcaagagaggagggcgatggtgcggaggcatgggtggggttttggagagttaagattttcgttttagggtgtgggaaatggagaagaaataggtgagaagatataggtggcatgtgggaaatagaaaaaaagtaggtgggcacgtgggaaatgtggaaagaagtaggtgatgattttttaatggacccttataggcgatggttttaaacagtcgcctataaaggtccattaaaaaatttcattttactaaaaaacgtcgcctattttgtttactacaattttaaacggtcgagaatactaaatttttcccgacagttttaaatagctacttaatttttttagcggcggtctccgaaaaaaatcgtttttagaaccgtcgcgaattctaatatttgtagtagtgcagatttacaactattgaaatgagaacccaatagccatttttggattttctttagctagtgaatatcaattcaacatagagaataacaatagtgtataggaacgaaattttaaagagaagagaacagaacaatattagttaatcaatcaattcagttactattaaaattaaacctatatttccagtataaaatttctaaccaatctatctatatataatataaaggaaagca

SEQ ID NO: 352941 - DNA, 1090 bp, Cannabis indica
aggaaaggaacctagacatgaacccataccaggaccaaacccaaactcagacctagacccaaacctagacctgcacccgcactcgaactcgaacccagactgggattggaagcaaagacttagacccggaactaaacccagactcagatcgagattgaaacctgggactcggacccaaacctggacccagaccgaggaccctattccacacctggagcccgatttgaacctagaccgagatccagacccgaaccaacactctgaccaagactggagccccaacccgaactcgaacccaaactcgaattcagaattaaaactggagttggaatgggactaggactaggaccaagaccaggaccaggacctagacccgaattcaaacccaaataaaaaaccagaccgagacccaaacccgaaccgcgactaggacccaaacccgaacctagaccgggagccaaacccagactagaactgggacttggaaccggaatcgggatagggacctgggcatttgaacaaggaccgatacccaagacccgaccccaaacccggacttgaaactaggaccaagctcgtgatctgacacacgaaatggaaccagactaggactcgagatcggtgttttgatttggcagccagcccagacctcgacccagaccaggtctggaacccagacctgaactcaaacccagtcccaaccaaaacctagactgaaacgcgtaccctgagacccaaaattggaactcaaattagaagtagaccaggaccagggaacgggaccagaacgagaactttgacctggacctgaaatcgtaacaagacctgcacgtagacccggaatcgtaatcggaccaggaccatgactctaacccaaacctagactcgaacttggacctggacccagatcccaacctagacctagactctgtgtcgaacctggactcgaacaggcccaaacatggaaccagatttgggacagaattggggtcgagacctagaaccgcaccccgtctcgttcccgaacataaactcagaccaaggactcgggacttgaaccagaactagaccaggacacatgacagggatc

SEQ ID NO: 352942 - DNA, 543 bp, Cannabis indica
tttttcactttttttacccaatattttccttacttctttctttccccactaaaatccaaacataaccttactgaagaagaaaaaaaaaccactcgatacacaacagtacaaactggtttcttgaaagaattagagacctgaatctttattgctatcacaagaattacaaaagttcccaagcacttggtgaagcttggaggtctctctgagtaagttttactcaattagaacaatcaaatcagccttcctatttatattaactaacacttaatgtctttaactaacatatcagcattattaactaacacatcagcactaacgggacagctcactaataagactgccacctcagatatacaattgtttacatcaggttttgataggattttctctattaattgataaagaagtgaacaagaacaagtgttgggtattcgtgagacccaatactactgctcaatacaattaattgtccacagtccacacgacaaatgaaccctctgctctctatctattctattagtacttaaggtgtagcataaa

SEQ ID NO: 352943 - DNA, 1019 bp, Cannabis indica
gagatctaagtctatcggaacataggatgaaatgaccaaaacattcttcgtaaaatatttctctatcaataagaccagtagtttgaaaagacaaatctcaatatttttccaaaagacaatgaaacattttatgaagtctgggagagatttaaagaactcttaagtcagtgtccacatcacgggtacgagagttggcacatcgtcacctacttctacaaaggcctcacaagtcgtgagcgccagttcgtagaaatgatgtgcaacattgagttccatcaaaaggaaatcgaagaagctcttgagtttctcattgagcttgttgaaaaatctcagacatggactagtcgaagtgtagctgaaagcaccaatagaaatcgaccagcggagatttaccaacttcgggaaaaggacaacttaaaggcccaagtcaaagctttaaaaaagaaaattaaaatccttacaactaaagatggccaaaaagggcgcatggatgcccaagcacaaacaagaccacttgaaccttattttgtttgtggagaaaatgagcatttagctaaggactgcttagtttacaatgaaatgagggggttcatgaggagcaatgtaatgccttagggcaatataacaagccattcagccatacgtagaactttagatggagcaaccacctaaatttcagctgaagagatagttccaaccaagctcaaacatctggaggacaatggagaaatgacactactacaaaaatgggttttcccgacgcttttaaacagtcgtttaaagtattgtcgtcggtttctataaccgtcgcctattcggccgtcgtaaattgggcaaaataggcaacggttcaaaaccgtcgctaatctgggattcccgacggttttaaaacgtgccttatatgctggtttcgtttttgaatttttttagcgacggtttttttcggtcggtacatttgaaaaataggaaaaaaaaaaacaaattttctgcaattttttccctgcattaatttttaaatt

SEQ ID NO: 352944 - DNA, 776 bp, Cannabis indica
ctacccccagctcttcgatttcgctatccgaggctaacttagccagacagtccgcgtgagcgttcttttcccgggggattctttctattttgtagtccgtgaactcgtggagcagctcccggactattgttacgtacgcggccattcgctcgccgcgtgtttggtattctccggatacctggtttacgaccagttgggaatcactatagacttccactcttttggctcctacagcttttgctaatttcagccctgctattagggcttcatattcggcctcattgtttgaagctgcgaagtcaaaccgtagggccgcctggagtcgcagtccggttggtgatatcatagccactccggctccagaaccgttttcattggaggctccgtctacaaatactctccatgtggggattggcggtaccgcgtattcgcggttgcctcggcttcgttgcattcagtaatgaagtccgccaaggcttggccttttatagaaattcggggcatgtagtgcaagtcgaattgacttagctccattgcccacttgaggagccttccggacgcttcaggtttttggaggacttgccggagcgggtggttggtcagaattttgatcggatgtgcttggaagtatggcctcaacttccttgacgccatcaggaggcaaaaaaccagctttttcaatgactgggtatcttgtttcggcccctatcatgcgcttgctgacatagtacacgggatgctgagttttctcttcttcccggactagggcagcgctg

SEQ ID NO: 352945 - DNA, 839 bp, Cannabis indica
agttagtatatacttagaattattatgtttatcttttactagttagaaattaagaaaaacacctccttccttctagtctctctctctcgaactctcatgaaggcagcaaggagttctagactttttagctattattcaaaggtttctagcagaattttagtgtatcatttcaaggtaaacccctaagggccattctctttgttttttcctaaattctatgtaggttttgtgtttgattttggattttgggttgttgtagttgttcttgatgattgagtttatattctgaagttaagattatgttatttgagctaaagtaaggttagttttttgcttggcttggttgttagacaaggtttgagttttagaacacaaacttaggtctttaacggtgttttaagtttcaagggttgtttctagtttttgttgcatggattgtgtatattattgtgtatataggtgatctaaaagttattgggtggtttggaatcgaattgaggtgtgtagaagattttgagtttttcctacactgaaccggtcgaccggttcagggagacctgtaggaaccggtcgactgattcatccctaggaaaccccacagaactggaattccagttggggaactggtctaccagttggggcagtttagggaaccctagtttttcctattttttcaatatttagggtattaccatgttattcatcgacagggaaacttttggtttcaagtttaagcccctaaaaagttatttagcgtgtcacttatcagtttttaaaataatgtgatttaggggcctataaatcgtcgagcagctgttccactcaggttggctggcaca

SEQ ID NO: 352946 - DNA, 774 bp, Cannabis indica
aaggttgcatactttgaaatgtccacgatcaccaagatcgcatttaagtcaccagtcttcggtagacttgtgatgaaatcaagcgagacactctcccatggtctgcttgggaccaacaaacactacaagaaatgtcacttttactagcacatttttgtgctggcaaaagttggtattgcgctggtaaaatagaatttacttgtgatgtgttgacaaaagggggttggcaaatcaatgttggtattggaactttttccagcataaaatgaaaagcggtgacaaaaatgacttttcctaacgcgtaaatgcgctagtaaaagttagattttagccactgcaaatgtatgctggtaaaaaattgacctctttgccagcgcagtttccaaaatgcgctggtaaaagttacttttaccagtgcagtagcgaactatgctggtaaaagtgacatttcttgtattaaaaggttctaacaaccctaatgtcttatgcctcttcactttgtcttgttggcagacgagacagatccttgtgtagtccaccacatcctcccacatctgttgccaatagtacccatgcttcaaaaaggcatgtgtcctatgccacccttgatgacccgcccacaacgtgtcatgacactcactcagcagcatcctccttagatttcctgcctttggaacaaacaaacgcccacctttggtccacaagaggtcatcctctacccaaaactgagttgtctttccttttcttgcaagagccatgatattctttgcaact

SEQ ID NO: 352947 - DNA, 664 bp, Cannabis indica
catcctctacccaaaactgagttgtctttccttttcttgcaagagccatgatattctttgcaactgggtccttctccaggttctccttgatgcgcttcgtgattggtgtacccacttggctagttgacatacccgctaacacttttagtggcgccaacactgctttacaactaagggcatcagcttcctgattgagacatctggccttgtgctcaaagtagaagtcaaattctgccaagaattcctgccatcgatcctgcttgggaatcagttttggctgcatgaggaaatgactaacaatagtattgtccatcttcaccacaaacttcgaccctaacaagtaatgcctccacgtctgtaaacaatgaataactggcaggaactctttctcttgcacagtatactgcctttttacttcggaaagcataatctgacgcatctgtctgtacgtcaaagggtttacatacatttgacagggctaacacaggatcttcgatcatggctcctttcagacttcaaaaagcttcttcgcacttctcagaccacgtccatataacacctgttggaaattattttaccaggatcttagatctactcacaagtgtgttgattaacaccctaaatatgaacttctaaaacaattataaataaacacatataaagt

SEQ ID NO: 352948 - DNA, 544 bp, Cannabis indica
accagttattaagacagaaaaataaacaaaaaaaaaagaatcacacaagtcataggactaaaaataaccagttatttacctgttgctttgagtgaagagcttgtccacaaactcatatgcaataggagtatccttcggcacagcataagggcctaactccaaactaatgtcgttcctaccatcataaaaatttaagaaatcaaggaagtatggcagtaactcacagtacacaaggagatcaggcaagatcttcttattcgtctgtgtattcttcatggaattgaatatgaagatcttcctccttaaaatgttgaagtgaagaaatatccaatgtcgttaaacaccgacatgacacggaccgacaacatcgtcaacaccgatccaaggctggaagcaaaacttatattgccccagaatgtaatcggtgaccatgttgtcgtacctgatgacactctgatcatgtttcgcctttataaaatcagcatacactcccttaatagttgcatcaaaatacgagcatatcgtcgtcactctcttattaaca

SEQ ID NO: 352949 - DNA, 771 bp, Cannabis indica
gaaaaggctttccaagagctaaaggcacaacttgctgaacctcccgtacattcgaaacctcttgacggagaggagctgggaatatacttagctgtcacagaacatgccatgagtgtcgtgctgatcagagaagagaacagcgtacaacacccaatctattacatcagtaaaagactcattgaggtcgagggcctagtgtctcattctagtaacaaggaagttgaggacttatttccaagctcatcctattagggtatataccgaccagccactacgacaaatactgtaaaagccatatgctttaggatggttactcaagtgggcggtagagttgggtcagtacgaaatcactttctgaccccgtacaacaatcaaaggccaagctttggcagactttgtggtagaatgcacaggcaaaaaagagagcacaccagaaagcaaccctaagctagcaccaatgcctcagccaagtcacaatgaggacaaaccgacttggaaactacatgtggatgggtcggctacagatcaacaatttggtgcagggattaccctcatcacacctgggggcaacacctacacactgcagtcaagttcggattcaaagcatctaacaagaaagccgagtacgaagctctattcgctggactaagactcgcccgggagattaaggccaaacacattgaaatctgcagtgattcacagctggtggtaaatcatgtatccggagaatacgaggctcagggagaaaagatgatagcatatctaagcaaa

SEQ ID NO: 352950 - DNA, 919 bp, Cannabis indica
aatataagttcaaagtggacaactaaactataaaaaccgtgttaggttatcatgaggggtttacgtctcatcctcatccatttatatgatcaaatagtgatgctcataacaaaaatgttaagttatttttgataatttcttgtgcatcatgaatttgtgcaaattattacttgttgcttctaattaaaaaaattaaatatgtgaaagaaaagatgagccacttctataagaattgaatgaagctcaattcttagaaaagcttttgtaaaaccataaagatatttatgacaaatataaagtataatgtgaaaagtaagacatatcagaaaagaattttaagtgcagtatatcattgttagcatgagtgacaaaataattcaaatgtatcgcgtgcgtttattgattagttgatacgttaaaaatttttacacaaagaaggctcaaatgaaaatacccttgatcaaaatcattcattggtctttctatgtatgtcatttttattgatgtagaaataaaatttgtgaatgaaatctagtcccacattgcttttaaagagtttttttttttttactttaattaactgttataaatatttctcactaagtttagttttaaacacacaaaaatatctaagagttgcataacttttatttagtatatttttttctaaattactcatagaactatttataattcaggattttttacgcaaaatattatatattttttaaaccttacatttatactatggtaggttttttacatttatactacctataccttttttttttttttttttctatttttactattttttatttatttaagtttctatgtatttttttttttttggttcttgcttcttctctttttttccaaccaatgctaacttttttttacaataactctctctctctct

SEQ ID NO: 352951 - DNA, 452 bp, Cannabis indica
aatcaagtttctactaaaattggaataaacaaaacattctctaaaactaaaaatttcttctgaaacttgaggcggtcttttcatttagcttggactgatactaattcgccatatccaactctgagcttcgactcccctagatttaaataatcccaagtttcaagcagctgcaatgaagaacaaacatggttagttgatccagaatcaacaatccagaaggatttgtcattctctaaaatacatgattcaaaaataaaagcattaccttcattcgaattatttagaagtctgggacatcgttcttcctgatgtctcttctcattacaatttgaacattgaagtgtactactatcaattgtttcacaatttgtacttaaagaaacaacattgttagaagtttcatacttaattcttttcctcttatttagttctacaaaactggagggtggcct

SEQ ID NO: 352952 - DNA, 717 bp, Cannabis indica
gactcgacctgaatcaaccaacccagatagaccaatctgtgaggtatcccaaccaggagacacagatcgaggaagaccccgaacgacgcaatcctcacagcagaccttcgcgagacaatgatgtagaatccgcctcctcgtcctcgcatggtcgcacacccagcaggtacacgaggtccgattctgtggagacatcgcagggaggacgatatcaggttcacaggggtgatctgcgtgatcaccttaatgctgtttttagagcacgctcccacgcacctcgtgacgaggaagagcctcgtgatcgtcaaatgggcgatcaggctgtaaatactagcaccaacccacctaatgcactggcttcgactactggggttaatatcccaacaaacctcgctgcaatagcaacaacccctgcagccgcaccaatcactgctcccttagccggtggtattgaccaaagcatgctcctacaggcattgaaaatgctcgagcagtagagaaagcccatatacaagctgcatgggacctctcctttcactacggaagtgcgacaagctcgactccctaagggatttcagttatccgaatccctaaaatacaaaggtacctctaattccattgattatttagagaaattcaatattattatggaagtggatctggtacctcagctcgcaaaatgtcgcattctggcggcaacattggaagaaaatgccc

SEQ ID NO: 352953 - DNA, 1136 bp, Cannabis indica
aaacttcggtcaatattttggtgctttcattgagagctgaagaaagcgtctgtaagtagacactgcattacaacaaaacaacaatggtggagactcgaagcacacgtcaacctcgccctcttcaagatgctcaagatccaaacgtgaggacgtggcctcaagagcaacggtgggttctgaggaagaagaaggaccccctgatgacgactacgaaggaaactttgacgagtacgcctatgacgaaggtagctactcagaattggtacccttaaggcaaaagacagtcgatcatgaagctgagatcgcagcccgaaaagagcaaaaccaaaagatgcaagaggtgatgctggccatgcaaaaagccatggaggcagcaggaatccacgtgcatcctaaagccatccctgctggacttggaaaggaaccgaaggagtcctcgccaagtacccaaaagtagaaatctagggaaccaagccctataaggtatcccgctgaagggaaccaaaagaaaaaccctacttccactcctgggaaaaagaaaaaggtgcaggatccgcgaaaggtccgctcggatttcccgaaagggaaaggtccgcagaggggcaaactccaaaaagggagtcttggccctcaggatcgagaggaccgaaagagcgtttccgtgcaccaagagcccggagggagaggaagaagggggcagaaatgtcctcccattgatctgagaaatcagattaacgggaaccaaggtgacctccgggatcaccttgaccaaaagaaatacggacccgcggtctccacgggaacgttaaacgaaggaatcatggcagaacttgccatactccgaaaagacatcgcccgagtctcccggagacagaaaggcgacgactccgactctgattgtgaggaccgggagccatgtgccaaacacatactggaagcagagctccccaaaaactttaagatgcccgaaatggcagcttataccgggaactctgatcccagtgatcacctgtcacggttcaaccgagtcatgacagtcatgagggtcagcaatgacgccaagtgtttgtgcttcccgcttactctaagagggtccgcggaagaatggttcaagaaattggaaccaggattcgtgg

SEQ ID NO: 352954 - DNA, 484 bp, Cannabis indica
ttacatttaaatagagttttatttagggcacaaagcccaacagcctgtaattcgttgagcaactgttccactcaggttggccgacacacctgaatttagaaacgaggtaagattagtataatgatatgcatatgtgtttacatggtttgcgtacatgttgtttatgcctgttagattacatcgatagcggtatcagtatacatagagttatattggatactgacagatgtatgtttgagtctaatgctgatcgacgctatcacatcagtatggctagagtatgactagcatattgagtataggctgatattatgggcgatagtattatcgtatgaacgttctacactcagtaccgtgtgggacacgtggataggattatggttgggtgtatgggcgcctgactataattcgggttattgctatgtttattatttatgcttttcttactgagtctattgactcatagttgctatttccatgtgta

SEQ ID NO: 352955 - DNA, 712 bp, Cannabis indica
tttcaaccacttcaaaggattctttcttttcaattctaggctcagtctcttccatgtattcatctaatggtgcttctactatattcaaacaactctcataactttcgttatttgagttattatccttgaaactctctaaatcatgcgccattaaattatcacatagagatcttaccatgtctatcaagtggttaatttcttctagaagtgatagtatattctcctcttcttcaattaatcggggtgagtttggacaataaggagggtattggtgactcccacactgaagtgatggatcccaatgccaatcgtaatcaaaatctgccatatcattcaacagatttattgcttcatggcctctccttaacaaaggctctccggtaacctctgctccataatccacccaactttttgtttcatcatcaactccattgtagaagaatatagtaaaacacccacttgagaaattaggatagcatctctcctcaagctccttaagtctcccccaagcagaatagaatggctcattgagttgttggacaaaatacacaaggtataacattgagatttaccttgcaggtcaaacacataagtaaaacattaaaacaaaaaaataaataaattagaatagacttcaactatattgatattaactaaaacagtccccgacaacggtgccaaaaacttgttgtgataaatccaacacgcaagt

SEQ ID NO: 352956 - DNA, 723 bp, Cannabis indica
agcccatttctcttcttgaccttctttagcttctcaagaagtacctcctcctcatccactaagtcaatagtgtttggaggggcacgtggaacgaagccgttcaccggggggtgaccagtctcggggaagaagtgggaggaagggaagcagcatcaggactgtgggctccagcaagagtggccaagatcgcctccatgggattagctgctgcaacaagagaaaagagttaagtgttagaatatctgtgaaagcagtaaacacttaaaaaagtaatcaagctagtcctaccctgactctctaattcggccctaacaaagtcccgaatcttagcactggctgcatcgtccccgagatagctgtccgagggacggaaccagctagaagaaagataggctgaaggatccaagggaacaggaaccggaggtcccgaacccattcgggaccggcctaaataatcccccaagttggagaaataatactcatttgcatgatccccccacagagtagagggcatcctaaacctaaggagacgttcatcgaaccctacgagcctaaggctagcgtactcgctaacaggagggacgtaatgaattgttaaaggagacttaccagaaccggaagtgctggcatcaggagcccccgtatttggtacctggatagtaggcgttggtctgggggccctcctctctaccgggcttccgatacgaaggggcctcccggcag

SEQ ID NO: 352957 - DNA, 567 bp, Cannabis indica
taacagatatcagagaaattttgaaatctaaatgtagagcaaatttctaaaaaatctttcacatgcatgtatggatcctctttacctaacccataaaaagatggcaaaagttgaattatggaaggtttcagctcaaaatgtgtagcatttgtttcaggaaaaataatgcatgatggtggattagcagaaatgggagaaaaatgatcaataagagttttttcttccacatttacttgatttggttccatgatgtcagaattttcacttttaatttcaacccacaataattttctttttaccaaacgatttttagaatttcgttcccagcgaatcatacaccaagtatcacaaaaattaaaataacaggaaaaattaggaggcggtgcctaccatataagtgcgtaaaataaagactgaatttaaaatatagcgagaaataaataatatgtatatatagcgggaaataaaaactgaatttaaaatataacgagaaataaataatatgtatatatttgacagaaatataaatattaatgttaattataattaataatatatactttatta

SEQ ID NO: 352958 - DNA, 540 bp, Cannabis indica
agagagagagagaggcaataagtaattctaattttgtaaaatactgtgggaaaaggccgaacagcatccaagaggaaaaagaatgtcttaacccaaacataaataaaaataataaaagaatggaacgaaatggagttccttaaaaagaaaatatatttctttggtagatgttcaaattatacatactttggttggttgtcaaccttttctttttctttcacaaattgattcctcaactttaaatttttggttgtattatttactcttaatcatcatgggctagcactcacattaactttctctattaaagaaaatttttgaaaaaattaaagaaccatgttaaaaatagttacactagatactaaagtcttttattttaaaattgttttaaaatttttaatcatgctttatatttatagaatattacttattattttaaagatattttattaattattttaagttttaataattatttgtgtataaggatatgtgtatatattaatattatatatttaaaataaataaaatacattaaaa

SEQ ID NO: 352959 - DNA, 616 bp, Cannabis indica
cactttacagatttgtctaaacctctccttatctgagttgctaatagcccctgtacgtacaaagcacccaggggcggagggtgtgcagaaagtcatccaatccagttataactgaccgatccaatagaatcgaatatccaatcataattggatcggatcggatgtaaattttgaaaatccaatcggatcggatcggttgttggatgggacatccgatccaatggataaccaaccaaaccgatccaattatatcatctaatagtgatccaattatatttatatatttttaaaatacatttataattttatatatttaatatattttatttaaaaatatatattaattaatttaatatacatttaacacatgagcttaaagaaaaaaaaaccttagatctgaaaaattaatttttatctttctaaatgctaataaaattatcaatgcatattgaataaattttattttttagcatttttattatgagatatgagaattaggttgggttaaactaatgtttattatgtgtgttggattataaagttttaaatcatgttttttatatatatttttcttttcaatgaaattaacttaaatggtagctaaaatagattggat

SEQ ID NO: 352960 - DNA, 565 bp, Cannabis indica
ttagtataatgatatgcatatgtcattacatattagcgtgcaagtttatgaatgcctgttagataacatattgaaatagtagtgtcagtatacatagatttatattggataccgatgaatgtatgtttggcgtaagtactgattgacactatcacatcgattcgactagaataccaagtataagctaatattatggtcaatagtactgtagtatgaatgttctagactcagtacacgtgggacacgggataggattatgattgggtgtatgagcgcctagtcataatccgatttaagtttatgatatgattatgcttttcttactgagtttgtcgactcgcagttattgtttacatgtgtaggtaagggtaaagctaaggctgcatagcagtgagtgcgagtagatgaagattgtacatatcagggcggttagacctagagtgttcaatcttcgggacagtaggctatatttttattagtcgctaggcgacaacttttataactaatattttgtaatataattgtaacattttttaaatacgggatcacagtttatgtaaagtat

SEQ ID NO: 352961 - DNA, 521 bp, Cannabis indica
gattagaatcactcatgaattacaatgcccacatccaccaccggcgctggaaccaccttgaaccaggataactcatcgtctaaccgcagagcatgctttgccaagccatgggctgctaaattctcagagcgagccacatgagacaaaactgtctccaaaaatttaaacaataaagctataacgtcttcaaacaacactcctaactcgttgaaatacatctttctgttgttgatagctgtcaccaaagctaacgaatctaaataaagtacatgaataggaagaccacacaaatgagctcaattaagaccaaccaacaaggctaaagctaacgaatctgaataaactgcatgaacatatttaggtccatcagtgttcatgcattttgtaggtgattaaacttactactttaaaattttaaaatagtatttataaaatttgatgttaaattttaattaattgcaaaatgtcttattatattcaatttattttggttgtatgtaccaaacctaaatacggttagt

SEQ ID NO: 352962 - DNA, 934 bp, Cannabis indica
ttcgttactgtcagtctacgattctttgttgatcaacagcaactcctagtttcaacagttcatgtaagtttatcgcatccctcactttactgtttgtgttcatggcatgctttactgtttatttgtttttctgggttttgtgtttgaagtttctgggaatgtttcaccttgggtttttacgtaatacgtctagatttcccttctctgatgttagggtcactctctttttatacattattattatttttgtaaaggcccattcactttttgtgtgatgaccttcaagggtatggagaagactttgtctttctcgactttctgccccttctcttccttttccttttatgcgcaatgtcaccatctgtgagatttttgcacccgacttttgtccaggaaatccttgtaaggctttcttgttgacaactgtccggagggggcctctttccagcggttaggggacccccattcccttttttgatttagggtttggtatggggcctaattgctgaaattttaactctttttcagaactaaaaatgtccgcatccggttccaaatcttcgaagaagggagggaagcgtctggccaccctggaagaagtcatggtgggtccagttgcccagaaggggtatagaccccgtgccacgggatgggaagcggccgagcttcactctactctgactttccctcaccaactggagaacatcgtggaggtggctggtatcaagccctcgacgtctgggacgtaccaccggccgccccgagacgcggagacccctaaccacaattacggaggcttcggggcttggagctagacgcatctgatgaccggggctatgcttccccttcaagattattttattaatttccttgtatttgtcggtcttgcgccatatcaacttattcctcaagcttaccgcctgctctcaggctt

SEQ ID NO: 352963 - DNA, 1145 bp, Cannabis indica
tcaaaagggcaatttagtcaatttaagcattccgattacgtttcctaataaagtaaacaagataaatcacaactatttcatttctaaaaaattttagtaaacaacatattacaaatattgattccgattatttttcatttattccgttacatttctccattaatttattccgattctgattactgtatagtaaacgtgccattaattggtattgttggtggccaaattcattggcaggcctcaaaagtagggatgcatattttctccatggggatggtgccccgcgagaatccgcccctaatggggcagggcgggaattccccgtctaaacgggaaacagggcgggcacgaggatcaaattttatccccaaatgttaaacggggcggggacggggatgatactccccgccccgacgaggacctgtttaatttattaattattttttattaatattttatatcttataaatgcgtttgtatttttttaatatattaatattatttttacaatttttgaagttgtatttttgtataataattactatattaaatagtaaataatatgtaatattttatcttttatgtaaattaataattttatacatttaatttttaaaaataaattttatttttacaataggggattctccgccccgtccccgcctcattagtggattccctgccccgtccccgccccattagggtgtttcccgtcccgtccccgatggggaataaacggggatggggattcaaatccttaacggggatggggacggggagatcactccccgctaattccccgccccgtgtggattcctactcaaaagtcaccaatttgatctaatctaaagctttgcaagcaagtctcgacttgagatgaatgaagctcataaaattttgcaagctcttactaatgattccccataggtaatgatatttatataatcggttcgataatttaattgaactatttttgagtttaattatatgattgaaaagttgatgaaatgtgttcccaaaacatttttgtactggaagataaatcaaactttatttttctgtgatgtattttgccacattaattatgatattttcattatgatatatgatattttgtgtgtgtatatatatagctacttatatta

SEQ ID NO: 352964 - DNA, 573 bp, Cannabis indica
ctttattaggtacacacactcttgccttatattgcagaatgccctcttcattaactgagatgtcctcgactttctcattttatagtttgacccgcttcttgattaaaaactcatcttgggcttgttcttctttgatctactctaataaatttgattcgattgtgagatcaactagctttcctgttaccaattctatgtcggatctcatgatttcctgttgcaacgacgcttctaatgcccttaacatcgataagcttgcatagttacgtctgctaagtgcattcgccactacattagcctttccaggatggtacagtatctcacagtcgtaatcttttaccagttccaaccatcgcctctacctcatgttgagctctttctgtgtaaagaagtactttaggcttttgtgatccatgtatatttcacacttctttccatagaggtagtgtctctagatttttaatgcaaagaccactgctgccaactctaaatcatgagtcggttaccttgtctcatagtcctttagctgtctagaggcataggctaccaccttctcattctgcatcaacacac

SEQ ID NO: 352965 - DNA, 903 bp, Cannabis indica
taataatataggtaaatatattatagcatattgtttaatttattattattattattattattatttattattattaatttattattattattagtatattactgttattattatttttgatattattattattattagaattagtattatcgtgcagtatgtatatatacatatatattttatatattaaaattttaagttgttgatttagggttatgttagggttaggactatatataagatgtttatataattgtttagggttgagagggtttagaaacggtggtgagacaacgatagagagaggccgtgggacgaacgaaatcgagccgtgaaaaaagtgagattttgggttgttgagtttgaaagtttttggactgccgtagattatttcattgagttttatttcatccaagaggatttttaaatgcgattagaaggtctgtaatcgcacctttcgacagacaccattgtttacgttcgaaaatacggttcttgaaacggactcggatttgaacgtgtttaagttgtttcagagatcaaaggaggttgtgtttaagtttatgggaccccaaatatcagttttaacatgaaggatcgaagctataaagtatgaaatgaaattttccatttttgactccattaacaatgatacaccggagttggagaagacgactccgatctgacgcatgggggttgttatcttgggtagttcttgattgttttgaggtcctaagcactctgggaagcttttccaatcgaaaggacgcgtcaagagcaatcgaggacaaagtcacatcgtgctggcgacggaactcacgtgaataccggcggtcgcgttctgggcatatctgaggatcttgttctcaacaaggaaattcattgaggtgcttggagtagcaa

SEQ ID NO: 352966 - DNA, 721 bp, Cannabis indica
aagtcttgcacttttttggacgtgatggttgccagttgctcgacctccgtccacttggtaaagtaatcaactgcaaccactgcgtactgcactccgcctttgccttgggcaactgtctgatcaggtcgattccccaaatggcaaaaggccagggactttgcatctgagttagttcgttgggtggtgcccgatgtatctttgaaaatatctggcgtttatcacatttcttaatataggccttggagtcttcaatcattttcggccagaaataaccttgccttagaattttcttagataaactctgcccagctgcgtggttaccacaaaatccatcatgtacttctgataaaagtcgtgcagcttcttcttgtgttacacacccaagtaatggcatggaaaatcctcttctatacataactccctctaccatgatgcatcgcgcagcctttctcctcattttctgagcttcgtttctattgtgtgggagttctccagcgttgaggtaggctgctattggcgtcatccagtttggggatgtatcaattatttcaacctcttccgtgtcgatgatactaggttttttgagaaactggataggaatcaaatttgctttatcattcacattactgctcgctagttgagctaatgcttcagtagtcatgttttcttcccttggaatttgcttgagagcatagcttttgaattgtgtgagcagatcatg

SEQ ID NO: 352967 - DNA, 374 bp, Cannabis indica
aatatttattttatttttttatattaatgtaggatatcatatttttttttatttatttgttgatcaaatgtatcagacttttttattaaataaataatttataataatacgataatatatataacaaagtaagaaaccctaaatcgaaccacatctctttctctctcaccctcattttgcacctcattctttctctctcaccctaaatcgaaccacaagatacaccttattgatataggtagtaccaatcaatccatttaagccctcatcaactgtgtagtcccatacctacacagtctcagaatcatcccgcttgaccttcccgaggtgatgtgggattgcacagcttacccagtatttccccttacggatca

SEQ ID NO: 352968 - DNA, 511 bp, Cannabis indica
tggtaaaaattttaaatatagtattttaaaaatataattggatatttttccttaataaaatatcaaatgttcgtatcttaaaaattaaattagttaggcattctagattcattgtcgattacattacgatttgaatcgcctcctccctctctcttgttttatcggttgtccaccatctctcccattcaagaattcatgcacacagtctaaattggagagtttttcggcaagcctgaggcaatggtatagacaataaacttgaggacaagatattaccgaaggagaagactattgtcttgatcttcttgattgatgccaaagtttttctcattcccacatcaacgtcttcttctctgagaggttcaagagcagttgtttaagagtggttcagttcggctcaatgacgtcctcagttttagatttttgtttgcatttattaatttactattattagtttaattccaattaatgtttttatggggttagaattataaggagttcattccttaat

SEQ ID NO: 352969 - DNA, 1627 bp, Cannabis indica
acatccttcttcatgggcccaggtttcttgtacggggctagcgactgagtggccatgtaaacagtttctatatcctcagtcaagattgtaaatgcagtgtactttgcttgattctcttagggagcttgctcaattttgctggtgaactttcccttcttcccattcccttgcctgttgttgttgttggaacgtttaccatttgagctcgaattatttgggtaatgggggagttgggcggacattcctgtggaagtaacttttgacttgccaggcttttgctcaccctccacttgctgaatagcctcttcaagtttgatgaagccttcagcacggtcgagaaaatcactcattgagtctactgggtcgttcttcctaatgtccttccaaagttcaccgaggacttcaatggcccccagtgtcgcggacaactttccatcttctgttagcggtgagaccttggtcgcttccatcatgaatatgctgatgtatgctcggagaggctcgcctggtctttgcttgacttcgaccaagtctcgtagatgcaacgaaagttggcaagaggaggagaattgtgcattgaatttcgaggagaaagctttccacgagttgaactttccaggagctagcttgaaataccattgctgggcggcttccgagagggtagcaggaaaaattcggcaacacacatcccctcgtgtccgttgcagatccatttgcatctcgaaatacttgaggtgggatagaggatcttctcttccagtgtacattttccacgttggcattttaaacttgtggggcaacgcgaggagattgatctcgggagagaaaggggttccacgtactcggtccaattcgagatcattgtttctctacatcctggaacatactctttagttcgtctagctgcgcttgcacatctagactaacctgcttaggattctggtcgatttgagtcatgtcagtatctttctgagtgggaatttgagcacgggtttcgggctgtacgatcgtcgtgccaagctgatcatctactcctctccttctattcagaagcacctggctgtctcattgattgattggcttggtttacaggtggaatggcaccgttagcctggttggaactatcaggtatgacttctcctgatgaattactagacaaggtctgcccacctactacttggccctaaggcgaaacctgtgaccggagatttggcagctgaccatttatagtctgggaagtatagtctgggatgacatgcagaggttgttgccagacaatttggtaggctttttgtatcagcacagtagctttccgactacgattgtcaatctcagcatggtgagcccttaacgcttccatctctttgtctctcaactcggcaaacatgcgcctctgctcttcgaacacgagatttaccgcagcgcgaagtacctcctgatcatgatgtacggtgttggtatgaccctgcatgagtccaagagcaacatagagatttcggatctcactatcatctccaacggacgttcgagcgttggtagcaggcgaaacgactgtgttatgaatgccctggctgggtcatgactcttgcacaccaggcgcgatttcatccacaggagtcgtcacacc

SEQ ID NO: 352970 - DNA, 1349 bp, Cannabis indica
ggtgcttactcacaaccttacattgggataataacttgtggaccgcgccctccaagtattcaagtcgctcagagagtaaataattggaagcaaaagaagcctggagaattgcaaacagatgaatatgaaagaggtataaaaagaatattataataagaaagccaacataccatgaagtgacagtccaagctcctcgaaagcatctcttttggactcctaagattgagaaaatcccaatcaggagggagaagagtttgaagtttgcgccaacaagcaactccatatgcttaggtaaattcagacccgacctcccctgctgcgaccaacaaggtctcaatagcattgcttgaagaagcagtagtagaggttgcctcgggacaaggagcattggcgtcggaaatggttggaggaggaacttgttcttggatcttgctgtcagaaacctcgagatcgatgggctcagccagtgatttcttcttaagggtggtggttttcctttgcctcttgggaggaaccacttcagcagcagtagggactccagggttataactccttttcttccccttctggcccatgatatcttcataacccatgtctggaaaacaagacaaagcgttaaagttattaaaaaagactgatgaaaaagggaagaatataattttctacctaagggatttaccaaaatcactagatgaaggggtagaaggaccataatatccactaaaatccctacagcctgtaatcttgaatacatcgaaaggctcgattggttctaaatcccagctcacatatatgtgacatgccctgtattccatagtatcgtattgctcagctatacaataaaatgactcgtgacagttaacctggacgtgaaatgtagaataccagctgtcaaacttatgagaaatgcggtccacgagaaggtaattccaattataaaaattaaaggtgagagtcttcaaaggtgactaatgtactacgctcagccctaagtacagtaagataccaaccacattgattacctcgggatgctccttcaccggattcccgaggggcgatgctttgaaggtattgtgcttgagcaaagcgatgccatgcctgatcctcgggcggaacagtaatctattgccaagaagaatacttgggaattttataatcacaaatatactccttatcggcgagaaggcctactgatcgcaggttaacctcgctcaaaaggaaattgcatgaccaaagaccgtagggaagagttaacaagtacctgtgcatactaaccattttgagggtaggagtaggtctcgtcaaaagagctgtcagaacaaaaaaaaaacattagtcataaacttgaa

SEQ ID NO: 352971 - DNA, 659 bp, Cannabis indica
ctgggcaaaatggtttagtgtagttcgttctcctagacaagctgagtttagtggtgaaggcgtctcgtcaaacggacaccagaggtgagcgcaaaatccgtttaaagtttgaagccccaaactttgacttgccatcccaatctaacggcggcaaaagaagcggcgccacttggggggtgaggtcaccggtaccagggttttcgttttgttcggcgcgtggggctgggcggtggcttaagatgggtcgccggagtgtggtggtgatggtggttatggcttgtttgaagcttgaagagaaagaaaaagaatgggaaagagaaagacagagagagtcctgatggtgatggtaaaaaaaaagttatttatattatatatatttatttattttattatattatatatatatttatcctctttgactcgatcaaaaccgagagtccttacaatatctctccatggatgttatggactcaaatgtaactcacaccataacaagcactacaaaaaactgttatttttagtgacaattttttagtcacaacataatttttttgtgattaaatgtgacttttagtcacaacaaaatgttacttgtgactaaaacatagtatttagttacaagttatcaattgtttagttttagtcacaaaaagtattgt

SEQ ID NO: 352972 - DNA, 530 bp, Cannabis indica
cttcttcaagagaaataaaaagagtacaatgctagggttattatgtaaacacatattgtattattcaattactcgcccaaagggccaatacaactaactcgtggactaggaatcattaatgcccgaaccatgtaaaaattacttgtatattaattactgttttattctttttgaagctctgcttatttagttttcaaaaacctcggtaaacattttggtgctttcattgaaagctaaggaaagcttgatagccgccacaccacctcaacaatggtgttcacttagaagaacgtaggcaagaaagctccttaagatactgttatggaggaggtggactccctttcccccggtctatgaccaggcggtgtgaaagaaaggggtactgctaatgttgaaaactagggagaagatgctaaaaagttgcatgatggcatcaacaatgaccaaaaccctgaagacatggaagaggaggatgacgatgatggttatgtgaaagatggatataacaaagatggttattattatgacca

SEQ ID NO: 352973 - DNA, 683 bp, Cannabis indica
ttatgaccatcattattgcagtttttgctttttgcagacaacgatttgtttcctatccatttaatgatccagcgcattaaatggttgtcagtcgagttctcaagcatttccaactatcttgatgaacgcttgttccagccgttggatctgtagaatgcgaatcgattgctattctgaccgtacgatgatgctcgatcacagctttctcacacccgctctggcctataaaatccaaccttcccacttcatttggttactttcaccattttaccatattttctcagagtttccatagagagaaaagattccagacaccatagattatctgctccttttccttcgcatttgctagtcttctcttcatcccagtcttcacacttcgtgtaagttctcaggatactttatacttgtctaatgtttgtttgtattgcgcgtttagagtttctgggttgaatgttgaacttttgggaagtaatcttgcctgagtttgttgtataatgcatagaatctctcttttttgggccttggttgtttctttttactgtgttttcttttgggaattgtctttttctgtcgtaatatcgcctttagggcctagaatgattcgtgtttctcagccttttcttttttcccctttttctttttctttttccactgtcgctacctttgggatttttgcaccc

SEQ ID NO: 352974 - DNA, 588 bp, Cannabis indica
gttcatgagtcaaccaccagggtccatagatccatcttaacctaaccatgtttgtcttcttcacaaatccctttatggcttgaaacaagctccaagggcttggaatgacaaactaagaaccagtctactacagtggggtttcattgcatcaaagtctgacacatctctttttgttcatggctcgggtacttctcttgttatccttcttgtgtatgttgacgacatactcataactggtcccaatccctcattgatttccaagttggttactgatttgaatcacaagttctctcttaaagatcttagggatgtacactactttttgggagtcgaaattttcagggattcaactggtatgtttctgtcccaaactaaatacattacagatatgttggtgaagttgcatatggaaggtgctaaagtttgctccaacccgatcagtaacactacaaagctttccctaaatgatggtgaattatttgaagatccaactctctacagaagttgcataggggccctgcaatatctctctctcacgagacctgatgtggcttttgttatcaataaactaagccaatttcttaaggc

SEQ ID NO: 352975 - DNA, 584 bp, Cannabis indica
tgtattaatagattgtgttgtattttattatattagtattatttaattgggtcccgagtcccgagtcccgagtccaggtccgggtccaggtctggggccgaatccaggttcaggtctgggttcgggtttgggttcgggtccgcgttcgaggtccgggtctgggtctaagttcgggtccgattttggggttcggggtctaggttcgggtcggggtccgggtttgggtctaggtccgaggtcttgggtccgggtctcgggtccagggtcctgggtcccaggtctagggttcgtctggggtccgggtctgggtttgggtcccagttctgtgtccagggtcagcgtccaggtctgggtcccgagtttggggtcggggtccaggtctagggtccgggtccgtgtctagatcccaggtccgaattggagattggtgttgaccccgaatcctttgtaaatattataatacaagctaatacgaccatttgttatgtattaaataatacaacatacattgtattaaaaattttagtcgtaataattaatacaaggctaattaataatattcccccccccccccccccgacccc

SEQ ID NO: 352976 - DNA, 125 bp, Cannabis indica
agagagagagaggcatgtggcattttctgaaagaaactaaatgatcaaagttctgtatgtgtgtttcctgaagccaacactttctatttatagaaaaccctctaggtttaggttagaattgtatg

SEQ ID NO: 352977 - DNA, 521 bp, Cannabis indica
ttttatggggtgcgcctggaagtatggccatagttatgagacgcgtggactaggcacaaagcaagtttttctagaggggatatctggattttgccccaagtaaccttttacttacatagtaaataggttgatggtgtttaccctcttctcgcactatggctgcactaatcgcatcttccgagagggccaaatagagaatcagcatctctccagttattggtttcgccaaaactggaggcgttgctagatgcctttttatgttctgaaaggcctcttcgcactcttttgtccactcgaactttttgttgcctcacaacatattgaagaatgacacacacttatcagttgactacgaaataatatgttaagtgcattcattctttcgttacggcttgtacttcctgatgctttatcactgatggcatgtctattaatgccttaattttttcgggattttcttcaatacccctcgcgttaactatgaatcccaaaaaaattcctaaggaaactccaaaggaaca

SEQ ID NO: 352978 - DNA, 562 bp, Cannabis indica
tcctcatagttccatccttctttttaacgaataaaaccggagctccccagggtgacacactaggccgaataaacccgatgtcaagcaacccctgaagcagaatcaacaaataggactgttgtcaacacattgaaaaagaggttagagaaagccaaaggaatgtgggcagatgaattgcctggcgttctgtggtcttatcacactactgcaaaaacctctactagcgagacccctttctcactcaccttcggagcaaaagcagcagagacaggaattcccacttccaagtatgaacatttgaccgatgattagaactggcaaagtatgaacctcaagctcgactcacttgatgaaaaaagagaggaagcctttatcagagtcgcaacataccaatagaaggttgtgttgggttttatgccctaaataaaaccccatttcaatgtaatccagattattcaatatcaataaagtaacagaagtatttttcattcatttatgtatgttttggttcaccttatcaattgtttgtctatttgatttataaattcattcaaaccctttt

SEQ ID NO: 352979 - DNA, 576 bp, Cannabis indica
ttttgggattatggtagccatcaaccaaatctagcgagattcttcaacgatgccatggctagcgatgcacgattggtgacgagtgtggtgatcgaaaagtgtagatgggtgtttgagggagtggagtcattagttgatgttggcggggggaccggaactgtggccacaaccattgcaactagttttccccaaattcaatgctctgttttggatttaccacatgttgtagctgatttacaaggtgcaaataacctagtcaattttattggtggagacatgtttgttgaagttcctccagctgaagtagttttgttgaaggtacatacatctaaatatcactacaaaaaaaaaagttacttttagtcacaatataattttgttgtgactaaatgtaactttttagtcacaacaaaaaattcattgtgactaaaacatagtatggtgactaaaaacatatttagtcacaaaaatcataacttttaaccacgaatattttagtattgtgactataatacatgtgaagaattttgagatgagaatttttttttttttttattttttttttttgtttaaagg

SEQ ID NO: 352980 - DNA, 457 bp, Cannabis indica
ctcttcctctcgcgatacctctctatctctttcctagttttccttctccctcatgcgatgtcggaaccaaaccagagttactatctttggtactgcgcccagattgacgtgggcatcaatatttgacacatgacaagagggattacatcacggagttgagtagactcgagtcatagcagtcgacatggaaggaaatcctacccctgcgcccacaccacaagaaaaagagcttttgtcagcgcagtcattgaactgtggtggaaaaagtgtacttttgccagcgcagttcgtgaacctcgccaacaaaaggcggcaaaattatcttcccattttactttgagaaacttctataccggcgagttacttcgtcggcataagtgacctatgccagttaggtgttggaaattattttactaagatcttatatctactcaaaagtatgttgattaacacccta

SEQ ID NO: 352981 - DNA, 673 bp, Cannabis indica
tctcataagtattgtaatcgtaggtggattatctaatctgattaatgcatatccattaattgttttgttttagtgaatccttgttactgaaatacttggggaaaaacggagtgaaactttggagttaatcagtatatttcgggttgggttgtgatttatatgatatggtaaccaggcgaatcatagtttggtggagctaactcaagcttggactaaggttcatctcaatctcatgtagatggaggaccaacctaacggctaacgtgaacaaactccgttatgatatctaattttgatacgctctaacattgactggaattttttattgtcaaactccagtccagaggttgaaaagaaattctgattcgtccactgatttgtacttgatgatggctgcttcagcaagttttttttcttttggtctttcgttgaagcttgaattgggctatgtgtttttcttctttttttttttcgaaaagaaggaaaattccattaaaaggcagacgacgaaaaaagatcataagatcaatacaaaatgaggaaattacatattggttttttaaaattttattagggggttcattcatccaattaaattcgtattattttgcactcagtgcatttgaaatttactaagggggcgtttggtatgaggtgttcaaaataatttgat

SEQ ID NO: 352982 - DNA, 604 bp, Cannabis indica
aatattatcattgataaatgacactttaataacccatttgatataactcaagaccataatgagcagtcaatgtcatgcttgtcctgaaatagtctttcaaataaaccaaaaaaagtctatttaaaatgaatatatactttatgagtaattatttgcatacaagacataatgtgcatctctccatattgcaatttgcatccctcttgatcataaatattaatttataacttattggttttacaccttatagcaacagaaaaaatattaatctttattgtctcacattaatttgtactccttatttaagatatcaatcaagtttttagagctaggaccttcatggcatgataaaagttgattggatcatcgtctatcattcttttatttcattatgtcctttctctcatggatttttaaatgacactgatctttgaggttgttgagtttgattatctgaaatatttaccatatcttgaatgagaagttgtttggtattgtcttatcaaggttctagtcttatcaaggttctggattcacttattgatcaataaaagtcatgaaaacctaaacattgtgaaaagtgatagttagaattgagtttaac

SEQ ID NO: 352983 - DNA, 1094 bp, Cannabis indica
taataaagtaagcaacaaataatgtacttcaataaccttgattatcaatgattagtgttattcaatacaatgaaacaaaataaacttgattattaaacattagtgacccatctattccataatccttcccaaaatagacaaaatcaaccattttaattcattattaatgtctccatttctaaaatattacaaatccctttattgtacttatcccaaaaaagcaatttttatacatatttatttatggtaaaacttgattataatcaatctatattgaattgaaattacttaaaataatctaattcagttattacgacataattattcctattttaatttccaaaagacaggttgtaaaacttccaaaaattgtatcctcttaagttaccataaaaacatttataatgataccttcctatacgacatagattacaaaccaaattccataaaatttgacttcccaaatatatctgaacacaataaattcgcatttgacaattagtgttcccacctccttttattacaatatcttcgtatttattattcttcaaattacttgattaattttaaataataatattagaatctgaatactaaattccaccactttccctttttgctaataattcctaaaaatatgaaccaaccatagctaaaagctattatcgtttaaacttaatcctctttaaaccttatttcacttgaaaatatttttaaaatatcactttaaaattttctttacatcataccttaacttaaataacccttatattccaactagtaaaatttgtctagtgcataacttgtttactttgcaattttattgtgccaacattttgttatactttcaatacaagaagtcgtgaaaattttaaacaaactaccctaaataattaggggccagccatataataggcgctatagccttgtaaggcgccaaagccataaaaatggcgcaaatatagaacaaaccaataacaaaaagattacaatatatcccattataacaactaacattatagaacaaaaccaaaaacaaacaacaagatatattcaactaaccaccatttcagcattcaacccaacaccaaact

SEQ ID NO: 352984 - DNA, 370 bp, Cannabis indica
tccacaatcaccactacaaattaaaaaattaataaatattagcaacaattaagttaagtaattcataatggagtgcaaaattaaataaattacataaattaaaaaagaaagagatttaccttgtgtccatttgtggtacaacctcagaggtagctcttttataatgtagtcgtaggagctggttgagatcaccgcaatcaaccggaaagacataattgttcagctcaaaataaccactagctcgaatcagattttccaatagctcgctgtaatgcttcaaatatgactccatgttctgctcaggggtggcgctgatgtcacaatcatatacaatgatctcccagttatcaattgttggaaattattttac

SEQ ID NO: 352985 - DNA, 1067 bp, Cannabis indica
taagatttcctctcgagttttgattaactcaggatcttctagttgggcacacttgattctttctattaggttagaatgaagtgtcaagttactaagtttgcccaccacaacctcaatacctgtgttgaccatgtcagtggctaactggggaggaattatcttggtactacaaacttgtccagggcccttcctactcagggcatcaactactatattggcttttccaatatgataaagaatcttgcaatcctagtctttgactaactctaaccaccgtctttgtctcatatttagatctttttgagtaaagaaatacttgagactcttatggtcagtataaatttcacactttttcccataaaggtagtgtcaccaaatttttaatgcaaacactactcctgcaagttccaaatcatgtgttgggtaacgttgctcatactccttcagctgacgagaagcataagcaatgaccctatcagcctgcatcaggacacacccccaaaccctgtctggatgcatcacagaccacaaacttttctttatctgatggtaaggctaacaccggtgatgtgactggtcgcttcttcagttcttagaaactggcttcacacttatcagaccacacaaactgttggttcttcttagtcaattctgtcaatggcatagagatcttagaaaatccctctacgaaacgacggtagtatccaactaaactaataaagcttctaacctcagaaactgtcttcagtctcggccaatctctaactgattcaatcttctcggatcaaccataataccattttcaccgacatatgacctagaaaggatacttgggataaccagaactcacacttcttaaacttagcataaagtttgctctctataagtagttgtaagatcattcgaagatgttgctcatgttctgtttctgactgagagtatacaaggttgtcattgataaacaatatgacaaagttatcaagaaaatccttgaacactctattcataagatccataaaggctgatggagcattagttaatccaaacgacattactagaaactcata

SEQ ID NO: 352986 - DNA, 1027 bp, Cannabis indica
aaggggatatgactgtgtgaatgaattttacatgaagtttgtagagctatcctcttatgcatatcctggtgttgttgatcaacccttggtgattgaacagttcatgcgtcgtttgaggcctgcgatacgtggtcctatagcccctttgacctttaacaacctgactgagtgtgtgacagcagccttgcgaactgaggctcatgtagaggggaatgagaagaagaacacaagcagaggaagaggaaatgaccgaaagatgaccaagaagaatcaaggacagtggtcccaaggacaacaatttagtgggggtagcactagtagtggttcatctggaaagactcgtagtggaccatacgggtgtttcagttgtggtcaacaaggtcataagaagaaagattgcccgcaacgacaacaaagatttcaagcatctcatggaggacccatagggagctatgtagagtctactccttttcatggacagcccaggacaaaccagtctcagtcttcatcctatggtttcacaccccaatcgggccagcagtctcagtatcaacatcagttcaggccacaaggttcagggttcaacatggggtactcacaaggtttccaaactcctgctcctagtgggagtcaaagagggtacaatcaaggtggagggtctggtgcaagtacaagctatcctagtcagggaaggggaaaggcaaaagcaaagtcatccgctcaagcctacgctcttggggttgatgatgtacagggcggtgctgaccagggagttgttgatggtatggttcttatctcacactcttgggctcatgtgttatttgatactggtgcatcgcattcctttatatctttgatgtttgctagtatgttgggtttgagttgggaaacttttagtcctgcattgcatttgagtgtacctatggggggacatggtgaggtatccaccatatgtaggtcagtttgtattgtgttcgagggacacaagttgtctggaaacttactagtgttgcctatggggaaattt

SEQ ID NO: 352987 - DNA, 735 bp, Cannabis indica
aattatctttttaacggtactaatatcactgaaaacaaataagtattgagatagatatcatatttttactaggacaacatccaaaggtaatctaaaaaaacgatttcaacaaccaacatagaaatataactttttgatagtgaaagaattctatttagtaaaacgtttcttaacaaaatatgtagatcaataaattatttttaaaatagtacctacgatcactaaaaaaagacatacgaggagacaaatatggtggttttacaaaaagatgttttttgaaaacgaaaaactaaaaaaaaaaatataagtacgaacctatatcaatttctaccatcaatagacaaaaaaaattattcataccttctacaaatttgaaatttaatgtattaaatctacaagctttgattggagatccaaaataagcagaatagaatagaagagcagaagatgaaaagttttcttttggggtatcaggttttgtgttgcgatattttacacacgcaagtgcacgtatcgtttacaagtaatagactcaccaagagtgaggtcgatcccacaaggattgtagttaagtacgttaaaattaaattcttacttctatttagttaaataaaaagatagaaaagattaaaagtaaaaaataaataaatagtgaaggaagaagcaattaaactaataaggaaattaacagttaataaaaactagggcttcgatttcaattgtttctattgatta

SEQ ID NO: 352988 - DNA, 673 bp, Cannabis indica
aatccttcccagccacccacttcccagccacccacccaccacccaccaccattccttccctaccaccaccaccaccatcttctttttcttcatcttcttcagtcatctgctaccaccacaaccattcaaatcataaaaaaataaataaataaataaaaccaagctcaaaccaattcaaacaaattcaaatccaacatataaacaaacacacatatatatatacgaaatcttaaccccaaaattaatatttgaaaaccctaaatttatttctccacaactatttgaaaaccctaaatataaagagaaagagaagagatcgggaaagagggagagagaggagatcgatctgagctggcttggtggtccccgacgtcctcctccataaccacgtcgaagctacatctttgttcgccgactttaatggcagatttgagatggaggagatggtgggtggtggctttaatggctttgaagtcggcggaggaggacaaggccggaggaggaggacgccggaggaggttggggttcggtggttgtggaggatcgggcacaaaagaagaagaaagagaaagggatagagggagattgagagatgtttcagagaaagaaaaagaaagaaaaagaaaaaaaggaaaaaaagaaagaaaaaaaatattttatttataattttatt

SEQ ID NO: 352989 - DNA, 687 bp, Cannabis indica
agaaccacagtttatttgactcaatttgggtagtggtggaccgatttaagaagtctgctcactttctaccagttaaaacaacattttcagtggatcaatacacagattcgtacgtcaaggaaatagtaaggttgcatggtgtgccaaaatccataatttcagatagagatccaaagtttactttgaagttttggcaaagtttacaacgggctatgggtaccaaactgaagttcagtacaactttccatcctcagacagatggacagtccgaaaggacgattcagatactggaagatatgttacgagcctgtgttatggattttgaaggctcctagagtaagtacctaccgttgatagaattttcgtacaataacagttaccagagtacgatagggatggctcactatgaactgttatatggcaaaaagtgtagatctcccattcactgggatgaaataagggacaggaaatacctaggtccagaatcagtacagcagaccaatgaagcaattgagaaaattaaagccagaatgcttgcttctcaaagcaggcaaaagagttatgcatattcgaaacgcagagaggttgagctccaagtaggggatcacgtgttcttacgagtatctccaatgaagggaatcaaacgtttcgggaagagaggcaagttatgccctagatttacaggac

SEQ ID NO: 352990 - DNA, 751 bp, Cannabis indica
acgtactccttgtcaatcactttatgaaatcgaagaagcaaaccacggcaaacttaacgtcgatggcccatcaacaaaaagtagcttgatatttcaacaaacaagtgaaggctcagaaattatttgtgggagatatggtcctaagaagagtatttctaaacaccaaagatagtacagtaggtgtactcgaaccaaactgggaaggaccatatcaggtggtcgaagttctcgaatcaggagcatacaaattgggtaactatgatgaaaaaatgcaactcgttttggtaccaaggtattggaatggagaatatttaagaaaatactaccaatagaagtaccaggtcggataaccatattaagtactaaacgaaagaacatttactttcaagtgaacggccttctgggcagacaacgctcaaaggttcagacaaaattctaaagtactcaggtcgagttaccaccatttaaagcaccatttctaatttctgtaatttgttttatttcatgttaagctaaaagatcagattatatcaaatagctttgatgtaagttactacggtaacaaacacatttttgatcaataaatgaataaagatgtttctttcaaaattcaaaattgagtcgaattaactagcatgttgttaatttaccatctagtgcgtacaaaaggtttggtcgaacccgaaaccccgaacagacaaaagagcatacttgcaaaaaattataagtgaccaagagtcataagtttgct

SEQ ID NO: 352991 - DNA, 723 bp, Cannabis indica
accgaaaatgcaacattatgaaatttcactatagacataaaaatgcattctgaattcaaaaataacaacataaataattatttaaatatctataaataatttttataattaaatcataattaactgctaatttccaaattaaactaagcggtctttgcactgcgcttccacgaactcaatctatcagattcaggatatcagcgctgctatgaccgcggtaagtctttaataattttctttctcttttcttttgtgctttactttttggcatctgatctctcatacttaactcttttttcttatttttccagatcgctgcagagaccggtcgcctctcaaagactttaattgatcactggtatgtcatgtctgagttcggaggcatggacgaggccatgaagagtctgagagatctggcggcagagaggaaggcattccgggaggaagcccaacagtgggaggctcaggcggagaggaggcatcaggaggcgttgcaggccaaagcagaggagctgaagacccaggatgaggccgtggcgaaggcgagacgcgagctgagggaggccaaggaggcagttgaagatctgactgccaggctaaagtctatggaggagctgcatcaagctgacttgtagtcgatgaccaacttgaccgttgaggtgaaggagcttagggatttcaaagatcaggccctgaagaaggcaaaaagggatgagctcctgg

SEQ ID NO: 352992 - DNA, 511 bp, Cannabis indica
catatccaccaaatatttctccacccctattagttcgcaagatctttaaccacttaccttaatgcttttcaacattgctagaaattcatgaaatttctcaaacatttcaaatttctttgcataaggtaaaatctagagtaattgttttaaaaatttaacaaaaaactcatacccacccctgaatgtacatccatattcgaatatagatgatcctactttgaagtggatatagacatattgactctttgtagagaatgatcttgtcaaaaccaccaagaacaagataataaagccatagatatagagaatgtggttctagtcttttaatgacttaggtctagttacaatgaaagagttcttagaatagtccaagtagatcctggtcacagaatacaaactcaaaaatccatacatagacatacagtttggatccattgacagaaaatggatattaaaacttgtgaaagttatactgtattgtccaatgtattctaggaaactgaaattaaaa

SEQ ID NO: 352993 - DNA, 586 bp, Cannabis indica
accctaatccaccataaccctagaatctccaaatcccccaaacccaaatcaccgaatcccccaaacccagatccccgaatcccccaatgggcatttggcctctgaacataagcacaacgcccatctgaagcaaaaccctgaaagtatccctaatgttattggcattgaattccttgaagctctcggcacaatccccaccctgaagcagaaacgctttccccatggcggcctgaccaagcttctcctctaggctccttgcctctctagcgaagacaatcggctccttgcctctctgacaaatgtgattttattattttatttattaaataatgatatcagagtttttttttttggcagagaagaagaataagaagaagaagaagaagaagaagattgtggtgggagattgctattaacgaaggaccagtgaagatttgacaaaattaagggcatggtcataggcgatatatagttagagattacacaatttttttgcctatgactagtgaagttttgtccttgttgttgttgttgtttgttgcagagagcaacaatggaggttggagtttcctaaagaaagaaaaaa

SEQ ID NO: 352994 - DNA, 658 bp, Cannabis indica
cccctatcagatcaaaagatatttttattaaacaaattcttaacaattcttttagaattaacaatttttcataaacatagaattaaaattctaagtgtttatgtagtattaactcttagcagagtttaatatactatagaatttgtatcaataataaaacacatgcacatacaaacattataaacatataaatataattggtataggcatacacaagataaagtaaatgaagctcaattcataaatgcaattcatttctaaaagagaaaaactttattataaaattctccaaaattgaatgaattgtctgcaataatatgaacaatagggaataaaatcccaaaccaataattaaaatccaaattgttctaaaaataaaacaattaaatcgaaaaataattaaaataaaaacagaagattccgagcttcatgttcattcttggactatctccacccatctaccaaccatcagactcaactcgctaggattgcaatccaagttcaaacagcttgagctgaaataagaagaagaagaaaacatggttagtaggtctagaattaacaatccaagtggataataattctctaaagcacatgagtttatagcatagaaagaaataccttgtttctttgctagaaacttagggcattggggttt

SEQ ID NO: 352995 - DNA, 983 bp, Cannabis indica
ttgatttgagctaggtttgtggattgttgtgatgtttgagcaagctttgagtttaagaactcaagctttgctctttaatggtggattttgtttctggatgtgtaggggtgttttattgcttggattatgttcattgtggtataataagcaggtctggacgggttggtgtgatttggggtcgatttgaggttgtgggatgattttttgtgattcctgcactgaatcggaaatccagttcagggggaccagtaggaaccggtcgatcggtcggtccctaagaaaccccacagaaccagaattctgattggggaaccggtctaccggttggagaatttttgggaaccctagtttttcccttttttacgatatttagggtattgccatgttatccatcgataggaaaacttttagtttcaagtttaagtccccgaaaagttatttagcgtgtcacttatcagttttacgaataatgtgatttaggggcctgtaaattgtcgagcagttgttccactcaggttgccagcacacctgaactcagaaacgaggtaagatttgtataatgatatgcatatgtgtttacatatttagcgtacatgtttattaagcctattagattatattgatagcagtatcaatatacgtagagttatattggatactaatagatgtatgtttagctcagatattgatcgacgctatcacatcagtagggctagaggatgactagcgtactgagtatagaatgatattatggttgatagattgtcgtacgaacgttcttgacttagcatcgtgttggacacagagatagggttatggttggatgtatgggtgcctgatcataatccgagttattactatgttattgattaaacttttcttactgagtctgtcgactcgcaaatattttttgcatgtgtaggtaagagcaaggctaaggttgagcagccgtgagagcaggtagatgaagattgtacatgtca

SEQ ID NO: 352996 - DNA, 514 bp, Cannabis indica
atttatataaaaaaaaataaaaaataaatataatcaagaagggagacggttgtgacttgccttgtgggctaagaaaatttgtgctttgtttggtaagtatcaacatttgatcttaattgatttattttgataagttaccttttatagtttgatttcatattcattgtattttgtcattaatcttgaaggattttcttaattggcctagttttggaaagtattttggttattcttgtttccttttattttttttaaaaaaataataattttgggaaaagagtgggtggttttctttggttcgtgggatggtaagtttttttttaaaaaaattttgagttggtttctttttttgctccactctcacatgtttatttaaatcaattttctttgtcatttaatttcaccatctacccgattcctcttccttgttctttgtttccttatttttcattctctctttcagatctccatggctaagacaaagaatttagggcaaccaaaaaaggtggtggaa

SEQ ID NO: 352997 - DNA, 765 bp, Cannabis indica
ggtttggaagtagaggcaaagtctgcctcagccttagccgccctattagcattctcagaatttagagctttagatcctcctttctgtggtcctccaatcaaatttttaaatgtctgagggttgtttactaactcgtgaaagtcaagttccaacttgttcatgacataatttgaagtataaggtagaaaagctggagtcaaactgttcaagatcagactcacttgagtggtctgatccatttcagctccatgattctgagcttcttggaagtaattagccatttggagaaggtgatcacacacgttctgatgaggtggcattcgtgcattgattaaattctttgtcgcttcaaagcaagcttgaattgatgtttgtccgaacagttcagccaactggttcaagatttctgcagccgtgagagtgttagcaaaccttgttttcaaggtgtcaaccatgctagaaagcatgaagtatcgagctttgttgttggcattctgccaacgcttgaacttctcctttactgctttgattgcattctcacccggctactcaggcgacgattcagttaacacaaacagggcattttcaccaatgagagcaatgttaatgtgctctttcaatttgggaaagttagatccattcagtttattatcagtcaacagtgaaaccatggggttcgtcattgtcatgttggatactacaaataacaataaatagaaatcaagtgaggttcaacacaaaatctcattcagaaattattagcac

SEQ ID NO: 352998 - DNA, 1222 bp, Cannabis indica
gtaaaatggtgggtatgtccaacccgaaattgctgagatcgtaagcatcaaagaagcgttgagttggatttgcgactcatcccttggacaatgtagtgctagaaccgatagtttggtgtgtgtccaagcagtccaaagtaagtttttattgccttcacagtttggttttattgttatagatgttagggatttactttttggctttaaccttttgtttgagttatgttttgttaaacgatctgcaaacaagttgactcattgcttggcaagagactcttgtttctctataggttgtgtgcttcagttggaggattgttcctctcaagtgcgttctattattttgaatgagttttaataaatctcctgattaattcaaaaaaaaaatataccatttaatgtataaataaatttttgtatgtcgcccatttaatttttaaaatttcctaaaaatcacaaataatcctaaataattattgttgttcgggattttcggtaaccaataattagagcggtataaagtaattaataaatattagaagagataattttttacgcagttaggcattagtccacaagtcactctattaatatatttattgcatagagtttttcagccgaccgtcatttttatttattattgaggtatttttaaacttataattgtggtaaaaagactattattgttgtgtttgtttttgtccccacaattaccaactttagtttttgcctacattataatcattttatttcatttttaattatttattttactattatttaaacaaatgtggctaatggctagatagataatgtactgaccgcatattagaatatggattagtaaagacaattaacgttaattattgatatttttataattatgcatgagtttattatgttatgggtctcattattagaaatgagtattagagttataatttctcaatttcagaaattttatcaaactctaagagtattatttaaattaaatatgcattatgtaaattttataatttttgctcggcgacgacagaaaattcaatggatggccgttagagtcacatgggtaactctaaaacttttttcttagtggaataaatatttgtgataaattaatatcgattttgagctgggttatggcttttgatcattttacccctaagcttgttattgtttaacttatggaataaagggcattttagtaatctcactaaggggctta

SEQ ID NO: 352999 - DNA, 573 bp, Cannabis indica
ttaagaataaaggtaaaaaaataagaaaaagtgtggaaggtttgagaggagcaaccatgaagaaaaaaaagactttgactaattggtttggaaaggaaaaataaaactatgatagtttagggttttataaaaaaatatgtaatgaagattatgagatatcgtattctaataggtttaggttaactaaaaataataatatataataaaatgctaaaatattattaaatcaacaaatatctaattttttaattttaaaaataagccctctatctcgtaactttaggctcagttttcacctagaaaacttccgaattatgatataactatttctacaaaatttatagatctttgaattatctttccaacgccactggaatcacctcaatcggagctctaaaactctagatatgatcattttactaaaacagtttttaatcctacgaatttatccaaacctacaaattttttaacattaattccattataatgttatttaatgcactcatacaataaattaaacccactaaataatctataaaactctaatagactttcatattgggctttaattga

SEQ ID NO: 353000 - DNA, 612 bp, Cannabis indica
actactactctctctctctctctctctctctctctctctctctctctctctccccgtgcatgtgtactgattctgaagtgtgcattgtactgtattttataatttttgattacccacaatgaagaacgaagatgtcattttgtattttgatttatgtatttttggtgcaatgaaagacttgcattgtttaatttgattgaagaaatctctgtttgttgatttggttggatttttaatttttgggtattggatgaatggagttgggttgatcaatatttgcttgagtttaggagaaacaaaagtttgggtttttaattagtatattgaaaacttgattttcatctatatgtgtttctacatttgtggaaacgaatgattaggagtttctattttaggtgtaaatgtggtagatttatctctaattttggcgtggactcatatagtactactgatacaagtataaagattggaacttgctcttctttttcactggatatatgtaaattaagcatagggatatactaaaattttagactattgtagctagtgattccattaaagacttaacatagggaaaactgttttattttgttatgaaatagaaaatgttaa

SEQ ID NO: 353001 - DNA, 594 bp, Cannabis indica
tccatagcccacttgaggagtcttccgaatgcttccggcttctgtagaacttgccagagcggatggtttgtcaacaccttgatggggtgagcctggaagtagggtcttaacattcttgaagcaatcagaacccaaaaaaactagcttttcaatcactggataccgtatttccacccgtaacatacgtttgctgacatagtacacggggtgttggggtttttcttcttcttgaacaaaggctgcgctgactgcgttctcgaagacggccaaatacagtaacaagtcctctccgtgaaccaattttcataaaatcggagatttagccatgtgttcttttagctttttgaatgcctactcacattcttctgtccactcaaatttctggcatttctgcagaatattgaagaaggtaatgcacttgtctgttgagcgggaaatgaatcagttcagatctctaacccttgtatcctttctgtagcagagtataatcaagatctgagcccgaatgtccttcttctttaagtttgatcattcacagtcttccaatctatgattgagttactccttgttgtgtgtgggcacttactctttcac

SEQ ID NO: 353002 - DNA, 677 bp, Cannabis indica
tttggtggagttttgagtaagaaataagattttttgggtgaactggtgcaaatcgggtaactggctttacacgtacttgtaaaaccgattagccagttttggtagggttccccgagtctctcatttcctcaattctcgtccaatccatgccatagttgggtgattccctacttcctgagttaaaataatccttagagagtataacagaacctagggttgtgggtttgggtttcccgaattagggtttttgatcatgtgatttagtcggttttattatgtgattagggcatccatcttgcaggagactttccgttcaggtcggccagcacacttgaatctggaaagaaggtaagaactgtatataatgtgtgatgtcaatatctgaatgtatgtatatgttatgtgtatatggatgcttatatgttgtgattcatacactaccaacacttgtacggttgtggtacagagtgcattggtaaagtgtatgatgtctgaaagtacatcgtggtattaccagcacttgtacggaaaggtaaaaggtgtctgtggtacaacacttaacagtactcaaggtgcggtccataacttacctaaactagtacatggtcgtatccttagtagtttgctcttactcatctgttaagccttgtaaatagcaacctcttcgcgggcgcagg

SEQ ID NO: 353003 - DNA, 639 bp, Cannabis indica
atctagaatgtacagatttttaccgtacaatattaagaaaagtaaatcacacttccttatcaccaataaattttcaatttcttttgtatgacttaatatagttgttgtgattattgatacatagttgattattttagatgattattcaacatgatttttgaaaggcttacaaataaaccaaacgaagtgagtaactgtgagtaaacattatccacagacaagatgatttctcacatttagaaacttcaagaacaagcaatatataatagtgactttgttttaaaattatcaaaaatcttatgatccaagtttctttagaaacttaatttagacacatgtctacaggtcttttacaatattaattataaaataatgttactcataaggatctacatgttcaatctggcaacaaagaatgtgatattattaaaaatttctctatattatggcaccgaagattatatagcttatctctacaaagaaaataaatgttagtaaatggtggggtactttcattactctggatttactaaatttatttaaaagttttgtgaatttcattaagaaaatgaatttcaacaactcaaaatcggtacacattagaattctatcatattagaaatcatacaagttaattaa

SEQ ID NO: 353004 - DNA, 881 bp, Cannabis indica
gtaagttctgaattcctttctctttaatttcttaggttttaagttaagggattctgcatgttttgtgagttttgctattgtagttgttgttggcgtttgaattgtatttttgaagttaaattaaggttagatatgttgatttatgctagttttgtttgctgttattaggtttgagcaagctttgagttttagaactcaagcttagctctttaatggtgatttttgatattgagcatgctatgttgttctgttgcttgataaatgtctattggggtataatatgcaggtctggaaggtttggtaagttttggagctgatttggttagggtttcaaattttttgggttttcggtgtaaaccggtttaccagttttacaagccttgtaaaaccggttaaccggatcagtgcagggttccctagattttttcatgttgccaattcgtgttagtttcaaagctttggttggttaattccctgttagtttagggtattgccatgttaactttcagtaggtagaattttggtttaaaacctaaggccccagttgtgatttaccatgtcacttatccttgttgtcatcgttgtgatttaggggcctgtaattggccgagcagttgttccactcaagttgaccaacacagctgaattcagaaataaggtaagattagtgtaatgttatgcatgtgtatttacatgtttagcatacatggtgtttatgcctgttagagtacattggtagcagtaatagtatacttagagttgtactaattactgaaaaatgtatgttttcacatcaatatggctagagtatgattggcatattgagtataggctgacactatggtcgatattattgtcgcatgaacgttctagactcagta

SEQ ID NO: 353005 - DNA, 727 bp, Cannabis indica
ggattgtttggggaatcctggtccaaaccggttaacatgtttgccaggtcctataaaatcggttaaccggttctgggataggtttaccaaacaatccacttcgtcgattcgtgtccatttcagagcctcggttgggtgattccttgttgctgagggtattgtagctgtagttatcaatagcagaaccttaagttggaggtttgggtttcccggattagggttttggctttttatttacccgattatgttatgtgattagggcatccatccggcatgaggtttttcgttcaggtcggccaactcagttaaattcagaaatgagacaagaatagcgtagaacatgtgatatatatatgtgaatgtatgtatgtgtaaaatatatatgcatgcttattatgcttagtacactaccaacacttgtacggaagtggtacagaatgcattggtacagtgtaaaatgtttaagagtacgttacggtgttaccagcacaagtaggagaatgtacaaggtgtgtgtggtataacacttagtggtactcagggtacgaaacaaaacctaccaacgctcgtacaatgtcggtacgaagtgtatgtggtatagtggctgtaccctagtaaagaacgttcttgctcatttgttaagccttgtaaataggtgtatgggcgcttggatacaagtcagtattatattatttgttatatggttttcctaatgagtctgtcgact

SEQ ID NO: 353006 - DNA, 594 bp, Cannabis indica
taaaataatttctaacagtatgggcgtctgatcataattcgggttattgctatgttattatttatgcttttcttactgagtctgtcgactcacagtgctatttccatgtgtaggtaagggcaaggctaaagctgaggagccgtgagagtgagcatgtgaagattgtacatgtcaggcggttaggcctggagcgtacgatctttgggacattatggcttttgctgtttggtcgctaggcgacaaatctttcgtatatgagtagtaaacttttgtaaatgtattttgtaaacgggatcccagaattttataaatgtattactttatgtttttaatctaataagaaaatttaaattagtcacgttttttgataatcccattgattagcaacgagctgcacagtacgtttaaaatcacgctaacacgcctatattagttagggtgttacagatgatatgaagatggtggctctgacatcaggattaaccacatgatccttgctatggagagatctccaacagaaaagagcagatactttgactaatttcttgataagagcctaaggattcataaacttagaagaagcttatactcaag

SEQ ID NO: 353007 - DNA, 499 bp, Cannabis indica
acttgtaattagatttattagcttgttaatacttggactaattttacaatatttgtgtaatctgtaattgtaatttatttaattgtttctatgaaacgaaattaagtctattgactaatcacaaaattaatttaaataatatttaatttagacttttaaaaaaaataaatatttaatttaaatttaaattaaataacatttaatataaattaataaatatataatttaaataagttaaatttaagtttttgaactaaaaaaataattattaataaatatacaatttaaaccctacaacgtcggtttttatctctacaacgtcatttatattggcatatagcgtcggttatttgtatataatcgacgccatagtgtatatggcgtcagttatagacaaataatcaatgttgtgtatcatttagtgtcggttcttttcaatcttacagcatcgcctggatcaacatcaatagcgaatttcgccaaaattgacgctgaaagg

SEQ ID NO: 353008 - DNA, 610 bp, Cannabis indica
gaaataaaggaaattacactttttatgggattttaaaggttttatgataaatatgacacatttaagtttgactaatttatatggtgttttttttaattttaggtctttttatggtatttgatatgccatatatatgtaattaggttttcaaatcccatatttgatgttttcatttatttaagaagttttatttgtcactgatgtcgaaaaagtcaacgaagtttgctgccggtgccgaaaaagtcgtcggagtagcggtcggtgcctgaaaagtcgtcggagttgctgccgctaccggaaaatttatcgaaattggcattgtcgctggaaaaatcactgaaaaaataccaagaaactggtttcttgataaagaaaccactttcttggtgattttatcgttgacaatgtcaattctgacgagttttctgatgctagcagctactctagcgacttttccggcaccgacagcaaacttcgcaaaagtcatcagaattggcatactcgccggaaataagtttcttcatgaagaaaccagttacttgatgaagaaaccagttttttgatgaagaaatgagtttcttggtgattttttccggtgatttttcttacg

SEQ ID NO: 353009 - DNA, 743 bp, Cannabis indica
tggagttaaacaactcccaaaatccttcccagggcataactgtgacgtcccgagtgagggttatcaactcccaccacacgagggcgtcctcttagaactggaaaaaggtgcaggtcacccgatcattaccaaccactcccataaagttgagaatacgttcaattactgtgagccactgctcaaccttcatcacatcaggacctcccagaaacactacaggtgcttatttacggaacctttcatatagcggctccatacggttgccagcaacacgttgttctgctggcatcgctggaactggaacgacctaggaaacttgctgaggaggcacggcagaaggagcctgctgcctcaacctctgaatttcttcatcctgctggcacatttgatcttgcatttctacaaatctctgctcccaatccggaggaacttgtggtggatttactggacgaccaccctgtgccctgccacggcaacgacaacgaccacagggattcttgggattttgatttccctcaccgcctccagtctcaaccatgttaccctgacttcttgtatttcgtggggtgtccattttataggacttagcctatgaacccataagccaagcaggttagacagcgatcaacaacttaatactgctcttatgaacttaaaggcaacacacttaaaacaaataattataatctaatatgctccttgacatgctttcataatcatttaaaatactaaacaagtacggg

SEQ ID NO: 353010 - DNA, 1049 bp, Cannabis indica
cttagcttctcccatgtagtcgaagtttgcctcaagattagctttcgaaaagtcgtagaagagctcaagaccggctgtctccaaggaatgaaccttctctttcagcttcgtcaccttggccgtaagctcctcctccttagcttccttctcctccttcacccgacaaaggaccgctcgaagtgatgtcctctcatcctaaagactgttcttcagtagacaaagtctcgatggtctcctcaagtgggtcagacgcctcaagatcctttaacagcttagctattttcttctgtgtggagaaaagcttcttgttgtcttcacccaactccgtccgaacagctctgagttctaccctggcatcttcagcatccttcctgaccaagtctacctccgccctcatggtgttggacaaagccgtgttcttggaaaaagcaaacttagctcggcgtgtaggccaacttcagaccgacttgcacacagaaaaaacttgagtatttgtgccaagtaaagagacttaaagaagagtgtcaaggaagacttacccttgtgaactctttcaagactcctccgaccagcagctctagagaagagtcattgtcggcactggccagctgatcactaaccttaggaaccaacgggttcatgtagtgagcgagcatctccttgcccttttttgcctctggaagcaccggcaaaggtggagtagaggtctgcaccagttcagacccacctctcggttggtctgacctatctgaactccctcctcgagactccgtcggctgggcaactttttgagtggaggggtttgcactcgttagctcctcagaaagatcgatgatttccccggcaggcgtattttccttggaagaagttccctcaccgcctttagagttcttggccaagagagatgcgctggagcttctgccaatcctctctgagacatgtctggacggaacaaaaagcaacatggttagagaaaacagacatcagaaacatgaggcataataatcaagaagctcaaaaacaagatgaagtagtgtgcaaggtgattg

SEQ ID NO: 353011 - DNA, 654 bp, Cannabis indica
ttatttgaggcaagaggaatagcacttatactagcagctccccccctccaaaaaaacagctttcaccaattgatttatgacaagaaggtatataataaaaactcatttgttgaatatttcatgcttttgtcaaatttaaaattagtaatttttttttcatgtaataacgtcttctcctaagcaaagtttggttgtgttgtgatttgagtgtgcgaattggtggggtggtggttcgacaataacagaaacataggattaaagagagagagaattggtaagttagaataattatatggccgaccctaagttgaaataggcaataggtaaaaaaaaatttaaatctttactataaagataaatggtatttttaaaaattattaaaaagatatgtaaatttttaatttttttttaatttgagtccctaaaatgagtgagctttaggcacgggcttagcccgtcttaacctagggccgaccttgaataattgataaaaatagtaaaattttgaactgtaatttgaagcatagaaacttaaatttcccaatggaaaacccactattaaaggctcctattggatatcaatgcaatgattaaataaacattaatttttttaatatttttatacttgaagttttcaattttttgtgttttcgg

SEQ ID NO: 353012 - DNA, 770 bp, Cannabis indica
aaacatgaggcataataatcaagaagctgaaaaacaagatgaagtagtgtgcaaggtgattgtccgaacaagcctcaaaagtccatcatcacctgacatgcctcttatttcggacataatggctttccctttcccgagtacgggaggaggtggccgagtaagagaaatgggctccctgatgcgaattgcatgtttgataagcctgggctgggctagaatctctttcctccttttgagcggagtcacctactcttcctcagcttcatcttcaggattattcaagggctcctgagcatactgcttagcccttgcacctcccctaaacttagcttcgtgctcaagttgaatgagttcattctcctgatgagctcgttcagcccgtccagcaccagatttcctcttcctcttcctcactggcttaggaatgaaatcctttggatacagcccgtacttcacaaaattatcctcggaagtcaaccagatgatgttccggtcttcccccggcagtcaagctagcttttgagctctatccctaagagcgagagtgatgggagggcggtcatatgttggaatctgctggaaccgagtctgggtgatgcccgtgccatcctccaagaaatactcatcaacaaaatgccttattttgctgatggctgagtcatcggtgtccgtcaacaacttgaagtctggttgagagaaatagaagtaccctaacctgccttgtttgggggtggacttcaaattaaagaaccagctgacctcgtggggag

SEQ ID NO: 353013 - DNA, 787 bp, Cannabis indica
tctttcaatgagattcacagttccgtcgagctagttctctcagatagaagttaccattcaaatgatattgactactgaagttcacctcgtcaccaagaactgcgattgtcagatggagtgttatgtcttcagagccgaagcgacgagattcacattatcaacctcagaaagatatgggaaaagctccagctcgctatcaaggttattggtagtgagttcctatcgagacatcccagaatattatgatttataacgtgtttaatacacgtttactttgacctagtaaaagcagactaatcacagttgtgtgatattcaaatattaattgcatttattttacgtgatatgtaatcaaacctgacgattttaggggatacttgttgtaaagatatcagtcaactctgaaattaactgcctgactatgtaattataaatagagacaggatagactgaaaaagggacgaaaaaattcataagagaaagggccctaaaacactatcagaaatctaataagattgactcttggactatgcagaattttaactgcaaaaccacgtaaaaaaacctttgtgttcatacttttttctttattgttcttatttttcggtgcaagtttatcactgttaaggctcatatctggttaacaaaaatctgcgttaacagtttcgtgctttcattgagagccttcgtgaaaaagctcagaaaaaatcctccttatataaaaaataataatcctctttatggttgacaacgaagaaaataataaggatcttttgacttatcattt

SEQ ID NO: 353014 - DNA, 230 bp, Cannabis indica
gtattctgatggatttgagcatgtcaactagactaaaaatatcgtcatcgtccacaccttttctttgagtataaccctttgcgacaagtctagctttaaaagttttgacttctccaccaacacctcttttcttcttgtagacccatatacatccaattggatgataatcattaggtgcatctacatattttgagactttatatttttttttcatggaatccatttctgaa

SEQ ID NO: 353015 - DNA, 505 bp, Cannabis indica
ttactgaattttaataaacaattgggactttttgtaggttgtattgtattatattgaattggattatgtattgtatgttaaactttaatttatactaatatattatgtatttaagtacatataattttacataagaatattgcatgaaatacaccataccaaacgaactaatgacataatttatacattcacggttaaaccatcttctatgcaaaatgtaaaagtttagctatatttagtataaaaagtaattttgtgatattttacatcaacttttactattgtgctctaattataaattttgatacaaaatttaatatattaattaatgtttactaagacaactttttcaagaaatataataaaaatgattcatgacaaacggtatacaaatactactttttgacataaaaaaatttagaatataaaaacgacgtgcaaacaagatacttgttaaaacaacacaaaaataattattaaaaaaaataaatccataaaaatgtta

SEQ ID NO: 353016 - DNA, 541 bp, Cannabis indica
aaatgttaattgtttccatttcagaaactattgtttccattttgaggttatattgtttctatttttcgatgttaaattatttcaaatttcaatgttagttgttttcatttttttatgatatattttttttttctatttaacatatatgaggttaaatgctagttgtttttatttcacaaattatagtttccatttcaaggataaattattttcattttcgaggttaaattgtttctattttcgaggttaaatttttcaatttcaatgttagttgtttttctttttaataatatttgttttaatttcaaatatacgaggttaaatgctagttgtttccattttgatgttaaattatttccattttttattatatttgtttttcattttcacatttatgatgttaaatgttagttgtttccatttcaatgttatatggtttccatttttcgagattaaattgtttctattttttaggttcaattatttctatttttcaatgtgagttgtttccattttttataatagttgtttccatttcaca

SEQ ID NO: 353017 - DNA, 419 bp, Cannabis indica
tacaacactcagtagtacttggggtacaatttaaccctaccaacactagtacagtagcggtacttagtgcatgtggtacaaaggtcgtacttgtattaagaacgttctttatcatctgtaaagccttgtggataggtgtatggacacctaaatacaagtcggtaatatattatgtgttgtatgcttttcttattgagtttattgactcacatatattatatgcatgtataggtaaaggaatggctaaggctgagcagtagtgagtccagagctcgaggatgattgtacatgtcaagatggtacgacctggaaagttctgtctcgggatgacttggtacttttattttgtagtcgttgtgcaccatcatgtttagttaaagtttattttgattatgtaaacaagtttagaagtgggatcc

SEQ ID NO: 353018 - DNA, 556 bp, Cannabis indica
attttaatttttcaattttttttcgtttgacttgttcccaggcctatttgattccacttactcacgacttaataacaactccccggggttagttattaagggtggatgggaactttgcaaaatttcttttaaactaaaattgcttatgttgaaagaacaaactttgtttttagttatttttttcaagtatttttttttaagcaaagtaagtaaattacactaactaaatacaataactaaaaaatgacaataataatgatagatagttatatcaaagttaggagacacaagataccatcaactaactctaaaaataatagtagtagtagtagtagtagtaataagattttaagaggcacaaaatgccatcaactaaaatgataaataaaattaaaagctaggaggcactaatgccatcactagaggagatataataggaggcaaaaatgcactcaactatcaagtatgtaggacgcacaaaaagcactcaactactaaaagaaaaaaaaaggttaggaagcaaaaattgtaacgccctaatgctaaggcacgctac

SEQ ID NO: 353019 - DNA, 979 bp, Cannabis indica
tttggtcataacttttgactcgggactccgtttgggatgttctttatatcgttggaaagctcttttggggctctatgtgaatatcttgaaattaaatgccaattttacaatttttggaaatgaatttaggggttaaccctatacttgtgtattccagatttgtgactaggattactggtacttggtcagaagcaccgggggatttggaatctccatacttgcgggacatcaggtaagatagtagttagcatgtagagatatgcgcaataacacttatatggaatgtgatttatatgaaaaactagaaacccaagattagagttattactctaaagtgagcggtttattggcttagggttattacccaagtgaattgttaatatgtaattgttatgccatgatgtatatagatgtatattgaagtaaagggttatgtgttcaacgtataatcgggttgaactcagtaactagaaccgagatgaaccattctaaggccttattgtaaatagacgtgtgagtgtaacacgtaggtctatgctatatagacataaataggtgtgtgagtgtaacacgcgggtctttgtcatacagacaaatatgaaatggcatatgtgatgtgttaattatgattattgataattatactgtcttgttgggcttggctcacgggtgctctactgtgcaggaaaaggtaatcagccatgagtgtgggagctagacgatgaatttacatgttcaggccgtactagaccaagcgggttggggtctaccattgttgaaacttctgtaattctgttttgccgcttaggttggctaagggaaaagacttgtaatattttgtaaaaaaaaatttgggatcacgaaacctgtaacttttgtttgtaaggttaaaattattacaactttattttcattatgttttcttttaaagtttaatttccacacttattttattagtaatcccgtttaggggattagg

SEQ ID NO: 353020 - DNA, 555 bp, Cannabis indica
ttttgactttcaacgcctcggctatcttaatgccagtgatcaaggtttcatattcggcctcattgtttgatgcgtcaaattgaaatctcaaagcataatgaaacttaaagccttctggtgagattaatattacccttgcactcgagccctactcgttggatgcgccatcccatataacttccaagtgtccgcgtctcggtgaacaggcataatttcttttggagttatgccttctattatgaagtctgccaaggcttggcccttgatgaatgttcgagggtggtatgttatgtcgaactgccccagttcgattgaccattttatcaatcttccagaagcatctggttttgataaaacttgtctcaagggctggtcggttaatacttttatggggtgtgcctgaaagtacggccgaagtttgcgagatgcgtggactaggcacaaagcgagttttttgagagggggatatctatactctgcccctagtaacctcttacttacatagtaaataggttgctggtgcttaccctcttctcgcactatagctacactaat

SEQ ID NO: 353021 - DNA, 695 bp, Cannabis indica
aaggattgcattcattttcaatccgtttatacatttatttacagtaattaagctaaaacgtaaacattaataagtgaataatagtttctatttcctaaatacagcaacgtatgcgactctaatgttcgagttggctgttcatattctagtgtaagctttcgggcttaggatatacctaagaattagttaagtctagggtgcatgcgttcttagatagtcgcatttacggacatcgtataacgagctgataaaacctagacgcacgagtctatattggtttatcgaggctgttggggcatcgtgaccagctcgcattatagagagtcgatctctatgttctcgcaggaggatggaaaggatacccgcacatatcctggtacatgcgagttagatctgttctttggttccacataatgcgagtcacacgaatgcgattagactttggtcatattcgcatcatctcgctgattctagctgaggtgaggtttaaactcgaggagtctctcatggatatcttagcttttcatggaaaactgaatacacgtgtcctccaaacaggattctggtctcgagtttctaggtgagagaaatctcacaataacacatgcccctagtttcgcgatgtgacagatgcggtcatgagggaaactatacgcgagagacaggtcaaaggttgtcacgaggaggtgaccttt

SEQ ID NO: 353022 - DNA, 558 bp, Cannabis indica
tttaagacatcttacaacattttgagaaattctgaatcatttacaatataaaaagtagtattaataaaaataagtctatataatgttcaatttaaaggtttgtgctatataataataaataggtatttataatttgcactataattaagatgtaaaatttaaattatataaaattttgttaaattatttttgaaataaaaattaataaaacaaaagtaaaaataaattgaaacaaagagaactagtcacgtgcataatctagtattttataaaaatatcatattttgcatatacaacaccaatcaaatttcaagcggtgtatttaaaagtgcaatattagagagtttcatattgctaatgtgtgaaaagataatataatatataagattcatgagctactccttttatgttggatttttttgccaattagttccgagatggaacccctaacgactatccgatccaaaataaaataagaaaagtcgatccaaaaagtaaagccaaaagtaaaaaagaatcaacttatatataaattcggggatagtgagccaaaaagag

SEQ ID NO: 353023 - DNA, 590 bp, Cannabis indica
atcagaacacatcccagaccctgtctggatgcatcactataaacaatgaacttttctcgatctgatggtaaagctagcactggtgctattattaatcattgttttaactcctgaaaaacttgcttcacacttgtctgaccatatgaaccattgattcttcttagttaactcggttagcaacatagagatcttaaagaatcctgtgataaaacgtcgataataccctgctaaactgaggaaacttcaaacttccgtcacagattttggcctcgaccaattcttcactaattcaatctttcctgggtcaaccataattccatcttttccgacaataggatacctctgacaactagaattcacactttttgaatttcgcatacaacttatgatccttgagtcgctttaacaccattcggagatgatgctcatgctcatctcctgactaagaatatacgaggatgtcatcgataaacactataacacagttattggggaaatccttgaatactctattcatgagatccataaaggccgctaaagcatttgtcaatccgaatgacattaccaagaactcatagtgcccatatctg

SEQ ID NO: 353024 - DNA, 520 bp, Cannabis indica
aaatcaaaccaatctattaacaccttactgtgacatataataaataagtactatcctaactatacttaatttgaatgataagttttagttaaaagctaaaatacattttaaaaagaaataataaataaaaataaaaataaataaatacatttctttgttgatcattctctttagagcatgtaaagattttacaaattaaaacaaaacaatcctttaactttcaaacatataaatttggagaaacaataaacttttaattcgtataagggagatgttgggtttaggttggccagagggtaatgttaattatttggagcttcttctattcagatcgaaacaaaaggatgcagatttttactttattctggataacctgacgactaaattgcatggttggaaagctaaaactctatctaaagcggggcgtgcaactcttatcaagtctgtcggcttagctcttcctttgtatgctatgcaaactaccaaactttctaatagacttgccaggaagattgatgga

SEQ ID NO: 353025 - DNA, 558 bp, Cannabis indica
gtaaaattaacttctattttttgaaacatgacacaaagtgagaagtttgattatgaaaatgtacaaaattaataaataaaaattacttttcactcacatagaaaaaaattgtagaaataattgtgatcatcattatatctatcaacgatcaacaattggttgtgtttctctaaatagagagaagtaaaaaatcttccaaactgaaatgtagctccaacaaaaaaaattattaaagaatattttaaaaacaaagaaataaaactacaaacaataatagtgattttatatgaagtattgatattttgtttctttttgcaatatgctaatagcataagaatgttctttaaatatagatgaagcatggctatagaattcaaaagacacttatataataaatgaaatatatttattgaatttacttcattattaactactaagtgagttttgtttagggagaattttaagagttagttgtattgtattagtgatatattattgattatatatattaacaattttacaattacatgcatatattaatcataacaataaaaataa

SEQ ID NO: 353026 - DNA, 541 bp, Cannabis indica
taccgcgccttagctgccaccaccagcgaaatcacatggatataatacttacttcacgatctccacattgatccagcccctgccttcatttcctgcgataatcaatcagccattcacatttccaataaccccacctttcacaaacgcaccaaacatattgaattggactgccactttgttcgtgaaaagattgcaacttcagtcattcggcttatacctcactacaagaaaaggactttttgccggcgcatttcgtcacatgcactggcaaaagttgtcgagacaaagaaatgtgtggacttcccaatttattttgggtttacttttgccggtgcatatttgcgccggaaaaacatagctataccggcgatgtcaaattaaatgcgccggtaaaacgtaaaaccattaggcgcgagaatttgccgcatttgatttcatttttggggcgcgtttctacttttacccgcgcataggtgcgccggcaaaaggcataaaaaaattggagggaaaattcccgggttggttttatgtggtaggtggg

SEQ ID NO: 353027 - DNA, 565 bp, Cannabis indica
aacgtaccctgacattcatttaatgtaccatgagactcatctaatgtaccacggaatacattccgttaaagtacatacgggacaaaatcatatccctacatatataataacccaatacaaataagtttattttcaaaataacccacacctcacgaaaataattaaacatctatgtatatatgtatatatatatatacaagtcctctattctcaaagttttttttcccttttcctcttctctattctttcttaccaagagagaaaaagtgatgagagaacaaaaaagaaagaaaaataagtagtctcttatactaatttatttatattatatatatatatattaatatgaaatgatgataatgatgatgttagagattttattacaatggaagataaatcaagatatgtacaactcaattataaaataatacaaggacaataaaagagattaattaaatatatgttacacaatacacacatgtacactgtatatatatattacatatatatatgaaaggtagaagaaaagattacaacacatgtaatataatatatatatatagca

SEQ ID NO: 353028 - DNA, 1096 bp, Cannabis indica
ctcacttgcgtgagctactacttgattgcgtatacttgcgtagtgtttataattttcgtaacaccacccacttcaagaacaacacgttcaagaagaaaccaacgtggtcatgatcaaaacccaaaaattagcaatgaggaagccaatgctaacactagttatgtacctagaagtgaggatgcctatgatcccactaggtatgtaccgttagttgaattggaaaattgccaactttggcaatatctggccgagtttaaccaataaaacgctgagttggaaagagaggtagccgcagccagagcaactcaagaaaataatgcacataactaacttgaacctggagtaagaaggccacgaggtagacctcgaggttcgagaaccaggaggcaggagacaaatcaggaaaatccccagaacacccaggatgagcaacctagggaaactagggatgctccagaaagcgaacaacagaacgatcaagcgcctcatcgaaaagtacctcaaagaccccatggatttacgaatcaagggaatgaaaataatgacttgccagagtcttctcgtagaaacgagaacataaggcagcccaaaactagggaataggagatccctcgtgataacgagagaaatcttaggactaaacctaggacaagtgggttaccaccgagaaaccctcaacgtccttctcgaactgatagggaagaggcatacacataccccagtaggggcatgtatctaacctttctcgaaggagaaggcctgtgcatgacgaggcaagttctagctcgggacgttcgagatcctgagaacacaattagttagaaaggcacacgtgaggaggagatagacctcgccgtgatgatgatcgagaaagtatgagcactacagggagctatcaatctgagagttactcaggtgcaaggtccacgagcaactatgatcgaagacagccagatcttcgtgaatgtttgaatcgaagacattccaatttatgcgagcgcttaaatcagaatgcacctgatttacgacaacaactcaatgctaatcgaaaggaagaggatccaatccaattgtgaatcaatgagttggaagataa

SEQ ID NO: 353029 - DNA, 663 bp, Cannabis indica
caaaccaattcaccgcactgcccccacctccgcagaatccggggaaataatgcggaggtttgcaatgctaatcctcctgctgaatggcagcagatgtttcaagaaatgcgaagtgtcatacttcgtcaagaagaagagttgcgacgattaaggcaactggttgcccctgttgatcaagtgttaccaccagcagctgtgccagtggtgggtaaccaggggtttgttatgccgcattgagactcggtgtttgagcgtttcgtgaagctgaaacctccgacttttttgggaggtattgacataattaaggccaagtagtggatgaagagaggactaaatgccacaatcagtcgggacttgaaggttaccacttcgcatgacactttgtacaagaaagtgatagagctagccttaaatgttgaggaggctgaatagtctgtaataaatgagcagaccgcaaaagatgccgtcacgacatcgaatcctcctgctagtggtaacatcagtaagggaaccgacagtggcaaccctgattacaaacggaaggctgaggctttcaaagtatcatggagtaatagaaagtaccggggaaattaaggtgatcgtcaaggtcacgaatcctctttcaagtcatatcttgaatgtccaaaatgtaagaatcaccat

SEQ ID NO: 353030 - DNA, 353 bp, Cannabis indica
cttgcactaacataaaacaagtggtgcatttcaatcaatcaattgtcttgatatccagatcgtgtagtgtatttgactaaacccaaattattggaattgtaagtctgttggtaagcaactactttctccacaattacttcctttgtggtcataaaacattatgcaacctcattttttatatgcattactcttctagggatactgaattctttactgcttataaagtgcatctgaatatacagaagacatatctctaattgtatccaaaatagaatagagataacacagtaagaactttcttcagttgaataacttttccagtgctttttgaaaacaacaaagttatgtatctt

SEQ ID NO: 353031 - DNA, 1021 bp, Cannabis indica
tttgtggtagtgttagaaatattgcaagtttgaacagagtagtggtgttggataaattagacattgcgtgagttacacagaggaagtatcatggccaagtactacatggattgtgtgtaaggtgtcaaaattctacttggtgtggtgtgggttggcaatagtagtgatttttgaacaagattgggttggggacagtgaagtacattgtaagagatattattgtgttgaggggcagcagtgagtaagacagcaaagaagaaattcattgtgttggggtagtgtgcaagtgaaaagaaaagaaaatgccaaaagttaagaagaccgccaacaagaataaaaagaaatcactgcatgaaattcctaagtttcattgcccggcagctgagacaaagtatcacgagaaggtggacaatcgggagttttatatggagcgtggattagtagccgatattgaggatattgatgagttgcccgaatgggtcagtgcaacggttcataagcgagattggggactttttgtccagcaaagagagccggcagtcatggaagttgtcaaggaattttacgccaacttcttatcccaagaatggcccactgtagtggtggtgcgtgaagtcccagtctcattttcagctgcagcaatcaacaacctgtttgggttaaactctgtcgagtgccaatactccgcgcaaaaagggcaagtgagcgacgagactgtgggtgacatgatgccggtgctcgccaagccagggtccgaatggggtttcgataattatggaaatcttcgatttcggcgcactgacttggagcacgagttgaaatgttggtatacattcgtgcaaactgccctctgccccacctcacatgattcgaccgtcagcagagaccgcgcctggatgctatattgccttagaatgggttgggatgttgacgtaggggctgtccttgcccaagagattgctgattgtgcacaccgggggaaggggaagttattcctccctgctactatcactgctctttg

SEQ ID NO: 353032 - DNA, 643 bp, Cannabis indica
gacaagatctccttcatgaacttcacataactgggcatttgttccaaggcttcagcaaaagggatgttgatgtgcaaccttttaaagacctctagaaattttgaaaactacttgtctagattggtctttcggagtctctgtgggtacggtatcttcacatgataatctatactgattggtggagactcttgttttggtgcaagaatctcagtagtcttcttttctgttgatgttggtaccggttgatccttaatctcttcttccactagttgttccccatcaggcccttcatacttcttcccacttctcagggtaattgctttgcagttttctttaggattaacctcgattgtactaggcaagtttccctaaggacgggttgctatctgagtttccaatcctgatattagtgtgtaggtccttaatggatgatctagtctccgtcataaattgtaacaataagtctgtctgaagaccagaactcccagtagagccttgttgctgtgattgttgttggttctgcgtatggttctgattcctctgctgatagaacccactattccttcgattccgtccttgattgaacccatagttgttgttttgagagtaattcccaatggctttagcttcatccattggcaaa

SEQ ID NO: 353033 - DNA, 525 bp, Cannabis indica
tccatgaatgatcttattgcaatcagtctatatcatccacatgatacatattagcattttgaaatcttgttggctgagaagattggcaatatagaaaagataatccccatcaaacaatctttgtgccttcgtataatcaatgagaaaattgaaatgtttccatacatctttcgcatgcctacaaaagaacaaggcgtgtccaatcaactcccaagcttgtgtacacatcgagcaagctgctgaacttagaacttttttttttgaaacaaagcagttgccacgggtaaagcattgtgtatcactctccaagcaaatatttttatctttgatggtaatttgagattccaaaaatacttctaccattctttatgagagtgggaagaagaatccatctcagcatcatccaaatctgaggctaagtgaaaaccggacttcaaacttgaacttgatttagcagctctttccaaaaggcgtgaatgcaaataaaaaacatcttcgggataagcttcgcggcccggtggtctt

SEQ ID NO: 353034 - DNA, 1194 bp, Cannabis indica
tgtacaatcttcatctgctcgccctcacggttgcttagccttagccttgcccttacctacacatggaaatagcactgtgagtcgacagactcagtaagaaaagtataacataaaacattaatatcccgggttattaaccaggcgcccatacacccaaccataaccctaactgagtcaggaacgttctcgacaaagtatgactaactgcaaatccagcctatactcagtactctagtcgtaccgatgtggtagcagataactcatactatctgatagcctagcatatatttgttggcatctcggtgcatttctatgtacacctcaccgatgccctgatatgctaatctgatggctatagacttgcctattctgacgtcaactaacatgtacgctaaacatgtataaacatatgcataacattatactaatcttatctcaattctgaattcaggtgtaccggtcaacctaagtgaaacaactgctcggtgaattacaagctcctaaatcacaccgataacaacaaggataagtgatgcgctaaatcacaaccggggacttaggttttaaaccaaaaccctatctactgcagcttaacatggcaataccctaaactagcagggaattaaccaaccaaaaacctaaaactagcacgaatcgacaacctgaatttttcgagaacccagtagcaaatccgggtaaccagttttacaggccctgtaaaacctgctagccgatttaccccaaaatacccaaaccattccaaaacctaaccaaatcggttccaaactttactaaaccttccagaactgcatattataccctaatagacattttccaagcaataaaacaactacccaagctcataatctaaaatcaccattagagctccaagtttgagttctaaaactccaaacttgcttaaccctactaacaaccatcaaaacatgcttaaattaacataatacaacgtatctaaacttcaaagaacaaccacaaacaacaacagccacaacaatagcaaaattcacaacacatacataaactatttcttaaaactcaagaaaattaaagagaaggttgttaagagcttacctaaacttgagatcacttagaactgctagaaatcatagcaattgatgaacaaacaaggaaccctagctggtctagggggtttgaaaagagagagagagagag

SEQ ID NO: 353035 - DNA, 994 bp, Cannabis indica
catcactgccttgggttgaaaaaagattttggaaatagtcagtgattaaacccacaatcccctcatgagtgttcaccaccgagccatcctcagttctaaggaacttaatcgtattcgttttcttcctaaaagaggcatgtttatgaaaaaattttgtgtttctgtccccagctttcaaccatttaatcctagcacgttgcctccaatagatctcctctttgtacagcagagaatccagagcagacttcaaagaactaagcctacgggactcctcagaactaagggccatcttactctgaagttgatcaatttctaaattgagtcgagagattctagtcttaaaaagagaattatgctttttaccccaagacttaagatggctagcacagtgttgctgcttatcaaaaaaagattgcaacccagaggtagacaaaggaatagcttggccagtccaaacttctttaacagtagaataaaattcagggtcctccagccaaacattttcaaatctaaaccttttatttacaaaattagggacagtataagaattattatctaaaactaacttaagagctctatgatccgagccaaaaaaacctagatgatgtaaagaattattagggtaaagatcacaccaagattccgagacaaccacccaatctaatctttctttaacactagaattataccaggtgaatttgttaccaacaaaaggaagaggaatgagagaaaatttggttagaaaatcagcaaaagaagaagaacaagaattagaactaatactacccccatatttgtcactactaaatagataactattaaaatctcccattataacccaaggaagacaaggagcattataaaaaagcttatccaaaagttcccaagtaaaacgcctatgactttccacaggagaaccgtaaaaacaagtaagatgccaaatatcattagtgttaaaagaaatattacaatctatatgattaagggagtagtt

SEQ ID NO: 353036 - DNA, 1685 bp, Cannabis indica
tttaggagttcttggttttcttcttgattataaaactctcgtctgtgagtcgatatgttgacttcaacaagtagcattgcttccgagtcaaatgctagcaagaagggagtgtgtcccgttgctgtcttctcggtaattcagtgagcccaaagtacttatggtagctcgtcgatccacctgcctttggcagcatctagcttctttttgatagtatccttcaaggttttattaatagcttccacttgtccattcgcctgaggtctggatactgacatctcttaattattttatttcttacacagaattcagtgaacaagttgctgtcaaactgggttccgttatcaaatactatcttcatgggaattccaaacctacagacaatgctcttgacaacgaagtcgaggactttcttacaggatatggaaacaagaggctcggcctcaatccatttaatgaagaaatcaactgctaccacagcgtacttggctcctcctcgccctgtgggtaatgccccaattaggccaatcccccattcagcaaatgggtaaggcaaggtcatcatcctaagttccgttggcggtacacgaggtaaatgtgaaaacctctgacacctatcacattttttaacaaactcatgcgtgtccttattgaccgttggccaataatatccttgtctaatgatctttttagctagtctctgccaaccatcatgatccccacaaaagccttcatgaatttctctgatgatctcgtttacttttgtaggaagaacacaccgaagtagaggcattgttgtttgatgcatcaaattgaaatctcaaagcataatgaaacttaaaaccttttggtgaaattaatattactcctgcacccgagccttgttcgttagatgctccatccacatataacctccaagtgtccgcgtctcagtgaacaagcgaattttcttctagagttattccttctattaagaattctgccaaggcttggcccttgatggatgttcgagggtgatatgttatgtccaactgccccagttcgattgaccattttatcaatcttccagaagcatctggttttgataaaatttgtctcaagggttgatctgttaacacttttatggtgtgtgcctggaagtatggccgtaacttgcgagacgcatggattaggcacaaagtgagtttttcaagagggggatacctcgactctgcccctagtaaccttttactgacatagtaaactggttgttggtgctttccctcttctcgcactatagccgcactaatcgcgtcttccgaaatagcctgatagaggagtaacatttctccagttattggtttcaccaaaactggaggcgtcactaaatgccttataatgttctggaaggcttcctcacactcttctgtccattcgaatttctcgttacctcgtaatacattgaagaatggcaaacacttatcagttgacttcaaaatgaatctgttaagtgcagccatccttcctgttagggcttgtacttctttaggctttgttggtgatggcatatctatcaaagccttaatttttttagggtttgcttcaatgcccctcgcgttgactatgaatcccaaaaattttcctgagaaaactccaaaagaacattttttcgggtttaacttcatattgtacttctttaatattttgaa

SEQ ID NO: 353037 - DNA, 527 bp, Cannabis indica
aatagtgctttagttaacatgtcagcaagttgctccttagttgaaacatgtgatgtcttgacaattccctcttgcactttctgtctaattaaatggcagtctatctctatgtgttttgttctctcgtgaaacacaggggtggctgcaatgtgtaatgctgctttgttatcacaaatcatcaatgctggtcctttgtgttcaactttaagctctttgagtaaggacaacaaccatgtcaattcactaacagtatttgccatagccctgtattctgcttctgcagatgatctcgagactgtcttttgcttcttacttttccaagaaatgatcgagcttccaaggaaaatgcagaaccctgtagtggacctcctggtgtccacacatgctgcccaatccgagtctgtataagctttgagcaacactggtgatgcagcaggaaacaaaattccctgtcctggacttgatttcacatactgtaatactctttgagctgcctgcaagtgtctagacctaggattagtgagaaa

SEQ ID NO: 353038 - DNA, 667 bp, Cannabis indica
tgatatggttaggtaaaatacaataaaaagtaaggatcataccgcagacctcgcggaatgcttgaagatattaaagaagtataacatgaagactaaaccgaaaaaatgttccttggagtttcctcaggaaagtttttgggattcatagttaacgcgaggggtattgaagcaaatcctgaaaaaatcaagtcattagtagacatgccatcaccaacaaagcctaaggaagtacaagccctgacaggaagaatggctgcacttaacagattcatttcgaagtcaactgataagtgtgtgtcgttcttcaatatattacgaggcaataaaaagtttgagtggacaaaagactacgaagaagcctttcaaaacataaaaaggcatctaacaacgcctccagttttggcgaaaccaataactgaagagacgttgtttctctatttagccatctttgaagatgcaatagtgctgctatagtgcgagaagagggcaagcactagcaacctatttactatgtaagtaaaaggttactatgggcagaatctagatatccccctctaaaaaaaactcgcattgggcctagtccatgcatctcgtaaactacagtcatacttctaggctcacccgataaaggtgttaaccgatcagcccttgagacaagttttatcaa

SEQ ID NO: 353039 - DNA, 1216 bp, Cannabis indica
attgggataagtgtcgttccattaaacccggtgagttaggaaccgcagggtgagaggtctccgtccgtcaggcctatcgcagtataggcctctttgaaaagtaaattcacggagcttccgttgtcgatcaggactctggccaccactttattggcgatgggggtctctatgaccaacgggtcatggtggggaaaacgcaccgtcttagcgtcttcctccgtgaatgtgatgggttgatccatcagccacggcctttgagctgggagttgagtaacttcccaaacctcatcatgtttcacgacccttgcataccgcttcagttctttgcgggtagttcctctgatatggggtcctcctgagatcatggccactctcccgttaggcctaggtggtagacaagggatatgctgggcatctccgggggagcaactggagccagtactcttgtcgcaccccctagtgttccctgtggcacaactccagcagcctggcccgggttgagatgaggcaactaatttttgatccactcgtagaggtgtcccaatcagattaggttttcgatctcgtccttgagattttttcattcattggtgctgtgcccaatgtcgttatggtactcgcatctcttgctggggtccctccgggaactatccttgtacagaggaggtggtctccggtagtgtgtattttgcctagtagcaaagtacacacgttcttgggagtccatcaactccgtgtactgggtatattggggaatgtacccccttttttgtcgctttacttctgtccgggtgctgcccttggaggagctcttactctttgaaccttgggaaggaccggccaagctggcagtcggagcggagtgcgagggggcttgtccatttatccccgagggatttccaaaatgggacgacgagggggccaaggcctggccctggctgtgtccgggagtagcggagtattgtataccgctcattggtagagttgctgtcgggacagtacccggcggctgggctccgggcacataccctgatatcccggtgggataatatcctccataggccactatttgggcctcttcaagattgatgtatttttggactctcttctggaagtcctgaaggtttgcagctccttcctgttgtaactcgttccaaaatggagtccctgtacggatgcctgcctggagaagggcaagctgttgtccgtcatcaac

SEQ ID NO: 353040 - DNA, 535 bp, Cannabis indica
aaaatgcgaaaaaccgaggtaacatgaaggttcaaggtggatggggatctaagaccatagtttcgaccattgtcagcggggtatgaaattttcaatatatgataaaaatatggttcaattggaaattttttaataatattgttctaaatccaattttataagaaaaaaatagactgatccgcagacgggagagcttcccaatgttgtggatacatttgcaaagtttcactgcaagaacaataagtgacgcgacgagcacacacaacaactgcatgtaagtaactttatatttttaataaattagttttataatttaaatttctttcactctaacagtttcattatgaaattttttgcaagccaaaatggttgagattcgtgacggtcaaccaacgctagctgatgccccccgccagtacaatgttgaccccaccaaatctcctgcagatacacatattatgacacgggtattgggtgagaggtcacgccacttgagaggagtcggcccgttgccaagacttaaggcggggcaaaa

SEQ ID NO: 353041 - DNA, 981 bp, Cannabis indica
tctcgctagcatttgactcagagtaatgctgcctgttgaagtgaacatatcgactcacagaagagagttttataattaagaagaaaaccaggaactttcataatgtccttgaatcacttgaggaaaaaccaactgagtcgcaaatcaccaacgcagcataccaacagcgagttacaaaatacttcaacaaaaaagtctagaaaagactattcaatgttggagacttagtgctaaggcgagtatttgcaaatacaagagatgcatctgcaggagtgttcaaccagaattggtagggtccatatgtcatcgaagtagtagttggagttggagattataaattggctcgactcaacgacttactaataaagaactactggaacgtgaaacatttgcgaccctactaccaataaataaaggatgtaactcgcaatactgatgtaaaatttaaacttcagttatgaataatgagaattatttgtattaagtaattacaaaattttattctttaaaaattacttaagaggcatttatgtatgattaactggaattcatctagaaatacatggtataatgcaaacccgccatttcaattttttttaaaaaatttaaaggttcttgactaaacctttttgacgaaagaggagtcgaaccgttataactccatgaccaaacttttttgacgagagaggggtcgaattgttataacatctggaccaaacctttttgacgaagaagggatcaaacaactataatttttgattaaaaacctatctgacgggaaaggaaaatcaaaagttataactcaggtataaaactgaatattaacggttcacgcaagctaggaaagtgctaaaagaggcgtcacgatgccttgataaaagtacttgaacctagaaagtggataggtaatctaactattcatacgagtaaattaaaaatatacgaagtgacaaaatcgttgaagtatatttaagtttgctt

SEQ ID NO: 353042 - DNA, 575 bp, Cannabis indica
ggcataaaacccaacagtttggtgttgggggtttggggttttacgatttggggtttggggttaagttgttttacattaggtgtttggtgtttgggtttggggttttgagtttggggttttgggtttttaggtttgggatttagggtttcggggtttgaggtttggggtttggggttaggggtttggggtttggggtttggtgtttagggtctttggattttggggttttttagtttgaagtttagggtttggggttttatgactagggcctagagtttaggatcttggacctagtatttggggtttgaggttttaagtctggggtttggtgtttgggttttaggttttggggtttgggggtttggggtttggtgtttttgtgtttggggtttttaggtttgctatttttgggattagggtttggggtttagggtttgatgtttggggttttggggtttgtggttttgaggttttatgatttaagggttttagggtttgggggttggggtttgggatttgggttttagggtttggggtttagggttttgcagttttggcgtttggggaatcgttat

SEQ ID NO: 353043 - DNA, 1573 bp, Cannabis indica
agaagtgcaagctgttgtccgtcatcaactttcttagtcttcgaggcttcttccttgaacctctttatgaaatttttcaatgtctctgtgggtagttgcttgatgttagtcagggccctgacttcgagattaatctttctcgcggtgaaaaactgtctccggaagctaacttgtaacttgttccagcagtccacggatcctaaatttttgaaccactcttccgcggaaccgcttaacgttagtggaaagcacaagcacttagcatcattactgactctcatgaccatcattactcggttaaaccgggacacatgatcgttggggtcctagtgcccgctgtaggctgccatttcaggcatcttaaaatttttggggagctctgcctctaaaatatgttcggcgcacggctcccaatcctcacagtcagagtctgagtcctcccccttttatctccgagagactcgagcaatgtcctggcgcagtatggctaactcagccataattccttcgtttagcgtccctgcagagatcgcccaagtgatcccgcaaatcaccgtgttttttgttgatctgatgtcttagatcaacaggagggtatctttggttccctcttccattttcctcaggttcctggtgcagagaaatgctctttcggtcctctcgatcctaaggccaaaaaccccctttttggagtttgcccctctgcggacctttcccttttgggaaatctgagtggacctttcgtggatcctgcatctttttctttttccctgggatggaagtagggtttttccgttggtttccttcagagggataccgtatgggactaggttccctggacttatgcttctgagtgcttggtgaggactcttctagcgtttcgttgagtcctgtagggatggctttaaggtgtatgtggatccctgctgtctccatagctttttgcatggcgaccatcacctcttgcatctttctgttttgttctttttgggctgcgatctcagcttcatgatcaacagccttttgccttaagagcagtagctctgtgtaacttccttcgtcgtaggcgtcgtattcgtcaaagttatcctcgtattcgtcatcagtggcctcctctcgctcctcagaatccacgttgactctagaagccacttcttcgtcttcaaggttttaagcatcttgaggaggacagggctgatgtgtgtttcgagtttccaccattgtggctttagcttataaggctattgtctgtttgaagacgcttcattcgcctctcaatgaaagcaccaaaatgttgactgaggttttcggcaaccaatttaataatatataagagagctgtagaaagtttaatgcatgggatttttacgtggttggggcattaacgagccttagtccacgagtctttgttatttataagaatcttacttctctacttgattttctactgtaaggctacagtgtcattctttcaatttcatagatgtgactcactcatcgataaacacttgttccacgacacttggaaataaacatgtaagctctttcaaaggtcttctatatataaatattt

SEQ ID NO: 353044 - DNA, 783 bp, Cannabis indica
aaaaaaaataaatgtgggtgcttgcttggttaatagtgcttatggtataatgtagcttaaatgacttgtcacctacccatgtacctaagccacgttgtgataaccgaaaaagacctattgattccaaagagaaatttgtcaacattagtggagagaggtatgtcattcaaacttattgatcatgtgttagtggaatgtcgggaagtttagaacggttgtgatatgaacggcaattgcgatgttttgtgtttgtatgaattgcttacttctaaattgtacatccaaattagttcttagagttggcaagttgaaattctggttattgatggcttgaagttgtgcaggtggtggtagcagttcaatcgtcggaaagtttggttatctattgtgttgtttgtttttagtttgagtcttagttttactcgggggcgagtaaagattcagtttgggggagtttgttaggctatttttagcctatattttggatctattttatgtgcgtttttcactgtgttgggacagaattacgcttgttttctatgttttcaggttctttggaataatagaggtctcgggatgaaaaagtccagtaaaagacgagctgagccaagaaaaacactttttgaggaaaaatgcatatctggccgcggctagacacagcttggccgcggctagattgtgaagcaggagtaggattttcgaggctacagtcgccgcggcgaggggtaatgccgccgcggccatttaagacttacagaatcgtggattttaggcatttatctg

SEQ ID NO: 353045 - DNA, 539 bp, Cannabis indica
gtgttcatatttttatttctatagcttttattttttctgtgtgaaatcactaccgtgaggttcaaatttagttaacgaaaatactgcgttaacaatttggtgctttcatttagagcctctgtgaaaaagacttagaaaaagacctcctaacataaaagtaaatggatgacgtcaaagataataatcctcaagaaggaatcagtcatcacgatggaaaagaaccattgagtcctcaatgatctattgagtcctcaaatgaacagactgcaagccgtaagaaaacctggaagtagggtccctggcttgatgaaccttgggtaaacaactaccggtcacttcttaaccaggttgatgaggatggcgcctacgacccaaccaggtacataccaatcgtggaattagaaattttctatcttagacgtcgattggaggaagtaaatcgcataatgccgagttagagtgtgaaatagccgcagtaagggctgttggaatttattttaccaggatcttagatctactcacaagtatgtttataaaca

SEQ ID NO: 353046 - DNA, 1266 bp, Cannabis indica
tacccggccatcatatgggacgcgatgactcccacaatgtctgtctaaggcggagtggtggagggaactctaaaaacaataatggtgatcgtggtagaaatagtggaaggacgccccagtgtagggaatggcaaccccgtgatcaaagtggccaaacacgagatggcaatgatcgcccaagaaatagtaggtccagagggagaagagaagacgttgaggtcaacagtgactaccatccaaactgccatgacggtcatggtgatgatgaagctgaaagtcgggctaacaaccaaccaaatcatgagctagggggttatcaagccagagggtcgtatgcccctaataggcaacatcaacctggaaatctaccccaaaagggtaggaatgaccaagtaccacccccggctaatggaagggctgacaatcaaaatcccggaggaaggccaacaatcgggtcagtttttgaacaggtaggcccccgaggggatagagacttgcgggacgccctcaatagaaatagagataatcgtggttccaacatagtgaacccgcctgagccggtccaaagagaccaagcaaatgttggtgtcaatattgctcaaccccaaacagtcacagatccggtgattcaagctcggttggacgagttaacccgattggtcaaggaccttattgcaccaaaacccactggtttggatctggaaaggaggagagggtccactttttcccaaataatcaatgacctccctattctagcaaagtttaagatgcccacttgcaagtacacgggtagtgaagacccactaactcatgtggagaacttcaaaatccaaatggaccttcaaggaatcagggatgaccttaggtgtcgaatcttccctgcaaccctcacgaatacggcgcaacaatggtttactaaactacccctagggagaatcacttcttgggatgaggttgaagggttattctatacccaattctcttcagcccgacaaataccagcggagttgggtgacttggtcgccatcaagtagaagcccgatgagccactaaaagactacattcaacgctttatataagaggcaaccaaagtaaaaaatttgagcgatgatggcaagcgggccgccatcatggggggcattctggtgggaagtcggctgtggaaggatacaaggaggaaaccaagccatactatgagagacttccttgacagagctgatgagttcattaaactagaagaggctgaatggaacgccaaaggcctca

SEQ ID NO: 353047 - DNA, 884 bp, Cannabis indica
cagggctcgtggtcggggtgatgctaacccaccacaggctgcccaagctactcaagaagcccggaattgggaaaataggtttgtagaaatgcaagccaaaattgaggaacaagataatgaaattcagcgattgagacaacagggtgctcctgcagtgcctgttccagaagttccagtggcacctgcccctattgtccaggccgaaccagtgttggcggtaaataggatggaacctctatatgaaaggtttcgcaagcaggcacctccggtttttctgggaggtccggacatcatgaaagtcgagcagtggctaactgtgatcaccaagatattgaatttcattggcatcaccgggaatgacagagtggtgtgtgccacatttcagtttcaagaggatgcattggtatggtgggacatggtgtctatgatacacgatgtcaccacgatgacttgggaaaagttccaggaacttttcaatgccaagtactacaatgaggtcgtcagaactgctaagagaaaggaatttactcacctgacccagaaagagtagatgagcatcactgactacacaacgcagtttgatcggttggcgaggttggcctcgaaaattgtgccaactgatttcagtaaaaaagaaaagtatctggatggacttagtgcaaagattcgtcatgacctgatgattactacggacgacaaaaccacctatgctgagatggtggaaaaaacactgcgagctgagggcgcagttgggtgcatgactgagtcagctaggacttcggtgggtggcggcgctcctacccctcctgcgtctggctttagcaggggaggtagtggctcggccatagatcagaaaaggatggcatccactacaaccggtggct

SEQ ID NO: 353048 - DNA, 530 bp, Cannabis indica
aacacagtcccaaacccaaaagtggacccgaatccgtaacctgtgacccgaaatttgaaccaaaactgcaagttgaccgggactggaactaggacttggacttggaatcataattgaaattggacttagatccagaaccgtaaccggaccaggacccggactccaaatcagacctacaccctaattgggagccggacccggatcccaacccaaacctgaactcgggacccacgcccgaacatgaactcaaaccaaaaaatggaaccagactagcgacacaaaaccaggtcgggaaatagaactgcaccaccgtctcgatcctaaacccaactcagaaatgggacctaggaccagaaccagaaccagaccgagacccgtgacagtgatccagatctttactcgggattcggttagcggggcctggaacagaccaatagtcggtgtctagatctggaacacagactaggaccagaaccaagacgaagaacaattcccaacccaaacctagacctgggacccaaaattagaac

SEQ ID NO: 353049 - DNA, 557 bp, Cannabis indica
ggattaggaactgaaaaaagaagaacccttaaaagaaatcttgactgttttccggccaaaacagtttggcgccgtctgtgggaaacttcttttttccagaaaaagaacattttcgtaagataatcaagaaaagatatggcaaatgaacaggaagatctcattctccaaaataacccagacaaccaccctggagcaccgcagaacactgtcgacacaggcgaagacgccacggacccaaccccgccatggcgagagatcctggagaggctgaaacaacaagaagggaaaatggcaacccagggaatggaaattgcccttcaaaaggagcatatacaaaggcttgagagcgaaaatggacagatgaaagttgtcctcgaaggataccaacgaccaccacatgcggaagaaactggtaatcgccagatgggaggagggattgagaaggaaaaccacactgataataacgatctctcaggcaaccataatacccgatgcatgcatgaagaaatgggggaaaaaagaaacttagcgactcaagaagccttagttccccacag

SEQ ID NO: 353050 - DNA, 526 bp, Cannabis indica
aattaatacctttaccactgctcgaatctgaatgccactaaaacttagccataagccgctctaactccttacaagtgtctaaaggcaagagaaatacattcatagcataattcggcaatgcttgagcaatagatttcaacaatagctcctttcctgcacgagacaaaatacgcccttcccaaccttgaattctctttcgaagcttatccttaagaaagccaaggatagcattcttattactcccaaccgaacaggtaatagccattttcatcagcctcataaatttcctgcatagcacagatagaatcccgcacctcactaccagtattattgctataaaacacaaaagacttagtgaaattaattctttgttccgaagccacctcataagtatgcaacaactccttcacattgtacgcttcctcctgagtggctttacaataaatatagctatcatcaacaaagagcatatgagagattaccggtgcacctcgagcaattttacatcccgtgagtaaaccacttt

SEQ ID NO: 353051 - DNA, 719 bp, Cannabis indica
ggaccgataagggggtatactgctaccaggtcatgccttttggactaaagaatgttggtgcaacttaccagagaatggtaaaccggatgtttaaaggccttctgggacgaaacatggaggtatatgtggacgatatgctggtcaaatcaaaggcatgcgcaggccacgcggatgacctagaagaatgttttgaagtggtccggagatacgaaatgaaacttaacccgaagaagtgcactttcggggtcaagtcaggaaagtttctaggcttcattgtcagtcagaggggatatacgcgaatccagagaaaatccaagatctcctaagcatgccttcccccaagaaacacaaagatgtgcagagcctgaccgaaaaagttgctgccctgagccattttatctcccgatccacagataaatgcattcccttcttcaatatcttgaagaaatttcagaaatttaaattgtctgacgagtacgaggaggcattcaaaaaactaaaggagcacatggccaagcttccaatcctatcgaagcccgttctcggagaggacttgttcctatacttagctgtatctgagaatgtggttagtgcggccttagtatgggaaaggaaaaaactcagcatcccgtgtactatgtcagcaagcgcatgatagaggcgaaaatgcggtacccggtgatcgagaaactagttttttacctcctaatggcctcgag

SEQ ID NO: 353052 - DNA, 676 bp, Cannabis indica
aaatattaatttattttttattagacgatcagcaaatcgagtatcacattatgttgctggacattctcggtatcaatctaatcgtagtatttctatttttggtgaactcttacatcttttgtattcagaatgctaatttattcaatgaagttgatatttcatctaaaaaaaaggtttaaatggtaataactataattaacttatgttttatttaggatggattgggatctaccaatttgtaaataggggaaagttttcgaaaattttattaatcaatttctaaggatatattttaaaaattaattaagtaaattgagtggcaataataattagaagggctttaatattagttatagtgttggtattccaatctatctatataaacagtaaataaggaaatattaagtcataatactcaaattcgactgcgatcatattaattagttcattttaattcaatttatgagaatttatattgataataaatatgagttttactatatataacataatattattttggtgtaaaaattataaatgtggagatttcataatcaatgggaggtgaggacattaatagtgaattgaggatatttttattttattctattactagggaatgaatccgcgcttcgcgcggttttcaacaattgttattttttaagttgattaattt

SEQ ID NO: 353053 - DNA, 939 bp, Cannabis indica
ttgaagggatgatggcgaagtttgggtggaaagcccaatcaaattcatctggcaagggtgtgagttgggttagtttgaagaagctttgtcaacataaaaattttggtggtcttggctttcgtgaccttcgggactataatctctcgtttttggggaaacaaggttggcgattgcttactatggaagacacacttgtggcgaaaatctataaggcaagatattactcgcatggttcgtttcttaaggccgagttgggacaaaatccaagctttatttggagaagtatttgggctgctcaagaacttgtaaaaaatggtgcaagaaggtccatttctagtggctcttcggttagtattttacatgatcattggcttccaaatgactctaatccttttgttttgtgaaataatcctggacttgttgatcaaaatgttttgagtttgatgataattggggaaagatctttggatgttgatcttctcaatgatatgtttgaagagagagatatccacttgattagaagcatacaacttagtcatactcgggctttagatggctggtattggaatatggagttttcaggattttactcggttaaaagtgcctacaagttccttcaatcatcaagagggaattggttgtttttgcaagatgagagttgttggaagaaactatggcacctgcccattcctcccaaagtccatcattttctttggagagcttgttctggttgtctcccaactaaggtacaacttcaatctaaacatgtaaatgttgatctcttgtgtcctttatgtaatatgcatgtggagactattgtacatgttttgttggactgtcctttttcccgatcctgctgggcactctactgctgcaaccagtcagctgctggtgcaaatgccgacttcagcagtctggttttttgagctgctagctgat

SEQ ID NO: 353054 - DNA, 692 bp, Cannabis indica
cttggtgaaagatcttggtccgtcaggcctcttactgtgaaggcttctttgaataataaattcacagaactcccgttgtcgattaggattctagccacaatcttattggcaatgggagtctctatgaccagggggtcatgatgaggaaaacgcactgtcttagcgtcctcttctgtgaatgtaatgggctgatccattagctggggcctttgagctgggagttgagtaacctcccaaatctcactgtgcttcacggcccctgcgtaatgtttcagctccttccgggtagttcccccgatgtgaggtcctcctgagatcatggctactctcccgttgggtcttggcggcagggcaggaatttgttgggcatctccggggggagccactggggccaacgctccggctacaccccctggtgctccttgaggcaaagctcctgctgcctgaatcggattgaggtgaggcaaccgcttcttaatccattcgtagagatgtcccaattggatcaagttttcgatctcgtccttgaggtttttgcattcattggtgatgtgcccaatgtcgttgtggtactcgcatcttttattgggatccctccaggagctttcgttgtacagaggaggcggtctccggtagtgtgtattttgcctggtagcgaaatacacacgctcttgggagtccgttagctccgt

SEQ ID NO: 353055 - DNA, 1348 bp, Cannabis indica
cgctcgagttattgggcagatcgaactgatcataggcatcttcctgcccctttatatatcgttgaaggtgcccttatgatatgagaccttctatctcatctttcaactgacaacactcttccgtggtatgaccaatatcaccatgatattcacactgcttatttgaatccctcttgcgcctcgcatgtttcataggtcttggctcaccaaaaacaacttcttgtacatgtgcgaggtagattttttcccgagtttcattgagctcggtgtattcggtataaagagggatatacttattgggtttcttatcattaggcaaccttttggaatcaacttttttctttgatcctgaggctttcgaatcaagttccccaacagtttcacgtcccgattgtcttccaattttcttgggttgatgcattctgaacttattctccaactcatccattcgcaaatggaatgaatccttttgttttggaccgagttgttgatgaaggttaggcttcttcaagttcagatactgtcgtagatcactcctgtcgtggctgcggttggaccttgcccttcctcttagagtttggttcaccttattctccctatatggggttgtgcaaatttcttcctgttaacctgaagagagggtttggtgattttcgtttcgttcaatgttccacgtatcccaggatgtacccccagactttcctaagtttcctcaggttgtatctcttgagagttttgagtatatctctgagtcatctcctaccccttggtttgtgagccgcgaggtttgcctcgtaaatctcttctcccaaggtcaagttaattttggataccatcctcctgcgttgccttcattgcagctatttcacgctctaactcggcattacgccggtttacttcctccattccacgcctaagatggtgattttctaattccacgattggtatgtatctggttgggtcgtaggcgccatcctcatcaacctggtttggaagtggccgattgttgtttatccaaggtccgtcaagccaggggccccaatactgggtcttcctggggcttgcagtctgttcatgcgatgactcaatagatccttgagtactcaatggttctttttggggatgatgattgattccttcttgaggattattatctttggtgtcatccatcacttttatgtcaggaggcttttttctgagcttttcacagaggctctcaatgaaagtaccaaactgttaacgcagattttcgttaactaaatttgagcctcacaatgataactcaacacagaaaaaaaaataaaggctatagaaaaataaaacatgaacacaagatttttttacgtgg

SEQ ID NO: 353056 - DNA, 962 bp, Cannabis indica
tctgcctcggagggactgctaggacggacatcgttctgttcctcaatctcttggacctcagcgtccccttcatgatcctcctcctcttagacagctggatctcgttcagtgcagggtaaggtggcgtgccgagccacttgagggtcagatgcgtcaaccctatgcattgtctttttggtatgagccatcattctatggctggacgaaaggtttaaggaagaatgcctttcactcgaacaaggtgggctagaacagagacgaggatggtcctcgtgcaagagtggaagcaagtcctggccgattcgatgtttgctctcacaaaactcacctgggttcatctataaaagacaacacacaagatgagtatttggtcggaatatcgaacgttaaaacaagcaaatatgtcgaccaggagtactcaacagattaaagaataagaatattcaacgaaaagtcgaaactcaggaagtttgaaattttctcgagtaagggcgaaaaatttcattaagcttagaataagcaagatgaaagacaggcattatgcagttcagaaaccaaacattacggaaagtgaaatcgaatgaaccatgacaaaggaaaatcgcagagtttctaaacttagggtttcctacatatcttctacaacaatgtcgaaggtacattcaaaaagtaaatatgcaaagtaaacataaaggaaatcgagaacttactcaaggattagatgtctggatttaagttacgccaaggcaaacaagcagttttgatgaaggcacttcagcaaacttgaagccaaaaacctctctttttgctctgaacttacttagcaaagaaggatggtgaaaatgagtttgtgtacacatgctcactggtatttataggcaaacagcgaaaaggggtaatcatttcaaaagaacctcagacgcctgagttccctccttaaaagcgaatatgggaaatgaaaa

SEQ ID NO: 353057 - DNA, 521 bp, Cannabis indica
gaatttagattcaatttattttctatgactgattttttagaaaataacactaacttgttgttgttttctgactctcactgtgtcattcaggacccctctcggaatttaacaattgggacagctaagaaagttgggaagctcttcttctttgagcaagaaatccgcttttttacttctgatgatttgatttcagtaaataatacttgtactaatgatgatccttggcatttccgccttggacatccttctatacacatttctcgttcaatgaataaaacattgcaattttcgttgaaaccgaatgactctcattattctatttgtcactttgctaagcaaaaacgtcttctttttcattctcaaaacaatatgactactgccccttttgattcaatacatattgatacttggggtcctttccatattgatagcattgaaggatatcgttatttttttaccattgtggatgatttttctcgtttcacttgggtttatacgctcactaacaaatctgatgtttc

SEQ ID NO: 353058 - DNA, 702 bp, Cannabis indica
tgaagcaaaatattttaatttttgttaaaccctcttttgacaaatgaaattatcatttcttcattaagttttgaaccctagcacatcaaagatttctccccttcacctcttcgatcatcgaaccatgagtagcaagccagcgacgcaccaaaccaccgccaccagcaacccgagacccattctcgctccccttcgccctctccactcgatctccctctctgttagatctctctccctctccactcaatctccctcccctttgccctcttatttcaaaaatcgtagcccactcgatcttcgttgcttaatctggtgtagtcgtcgccttcgcaccgccgatccatcgatgtcgtcgttgttaccacctctagtttttctcttcaccgtgaacgatactttgttactttttgttaattcatctcttcctcgcaatgtatatatatttctttctctctctttctctgtatgaatatataaatatatattcatagtaaaagtatgaattattaaaagcggacaatcgtagcttggtgttcttggtattgaatttcttttagtgcttaatttctgctattatggattaaaaataaagtgctcaggttggttcgaattcatattgttagagtttctttatcttctaatattatggattaagctattttgaagaaaaaagtggttcacatgggaatgattgcatttgat

SEQ ID NO: 353059 - DNA, 1016 bp, Cannabis indica
ctgcacagtcttaagcgagatcacaatgtacaaactatgattcacgtattgaggagaaactatttcgcattagaaggcataatcctgagggagacatagacaacgcatagcgaggcatctacctcgctgtatgtaaagaggtattaacgaggtgaattgattattagaacacttagcgtataatatacattataataactaagtgaaataacttgaaggactgattgtccagtctggaaggccttatggtcaaagagcagctcttaagttttctcagtacactggtgctcatgccattattggcaaacaagtaaactaagtcactcacttatgtactaggcgagatgcctcagcaaggtacatttggcagcatgtcctaatccacgttagcgttgacctccttaaaaatgatttaaatcacaattgtgtgattttttgatattaactgcacttatttacatggagcgtaattaaagcccacaattttggggaatattattatgggatttgtatataaatgtaattaactgccaacatatattactataaataggggcagattataaaaaaaatggggacgaaatatctcagagagagaaaggaatatactgattgtaaaaaaaaccctaattttgtatctagaaatatctgaataagatagactcgtgcactatgcagagttaacttcaaaaccacgtaaaaacctggtgtaattttgtttctatcattttgcttagagctcttataatttcagtgtcaaatctattacgaaaatatgcttataatcgttaacaaaaatgtgcattaacagtatctacgttaaatgcacacatgtgtattaatataaccaaactcatgtcgagtgggagccatctaagatgtaatcaaacaagcaacattgggagacaatcaagaaagaatctctgagagtgacctatatgttaggtggtaggggtgtatattagaatccttatgtctacaccaactcagaacttaattttagagatggtggttac

SEQ ID NO: 353060 - DNA, 469 bp, Cannabis indica
ttcgaatcagcataacttttctgcctgctttgagaagcaagcatccgagccttaatcttttcaatagctttattggtcttctgaaccaattccggacccgagtacttcctttctccagtctcgtcccaatgaataggggagcgaaattttctaccacatagcatctcatagggagccatccctattgtactctgatagctattattgtaggagaactcaattagaggcaagtacttactccatgaaccctcaaagtccataacacaggctcgcagtaggtcttccagaatctgaatcgttctttctgattgaccatcaatatgagggtgaaaggttgtataaaacttcaacttggtacccatagccttctgaagactcacccaaaacttcgatgtaaactttggatccctttctgacacattagatataggggctccatggagacgaactatctgttggaaattatttt

SEQ ID NO: 353061 - DNA, 609 bp, Cannabis indica
gtataaatttcacatctctctcagtagagataatgtccccatatcttcaaagtaaacactactgcggcaagttctaggtcatgagttaggtaccgctgttcataatctttcaactaacgggaggcataggcaataacccgatcggcctgcatgagtacacacccagaccttgtttggatgcatcacaatacaccacgaacttctccttatcagaaggtagggttaacattggagctgtgattaacctttgtttcagctcttgaaaaattacttcacacttatccatccatacaaaatgttgattctttttggaaagctcggttaaaggtgtagaaattttagaaaacgcttctacgaaccgacgataataaccagccagacccaagaagcttctattttctgtcactgttttcggtctcggccaatccttaacggattctatctttcttggatccaccttgatcccgtctttgctaaaaatgtgcctaaggaaagacacctgagatagccgaaattcgcacttcttgaatttggcatataacttatgttctcgaagtagttgcagaaccatctagagatgttgctcatgctcctcttctgattgagagt

SEQ ID NO: 353062 - DNA, 428 bp, Cannabis indica
aaaataatttccaacaccctcctggtgaattcccggacaaagttgttcgcctacctcttggctcacgagtggaactagtgaccgaggattagacggctgaccgttggttgtctgggaggcattcaccgtcgggtcatcctttgtttctcctaggggattgacgctcagcgtttgctggcctacagtctgataggctcttcatatcagcacagtggcttgccgactacgatcttcaatttctgcatggtgagcccttaatgcctccatctctttgtccctccactcggcgaacatacgcctctgttcgtcaaacgagaggtttactgcggcacgtaattcctcttgatcgtgttgcagggtattgctgtgaccctgtatgagttcgagcgcagcgcgaaggttttgcaattcgattgcgtctccgatgg

SEQ ID NO: 353063 - DNA, 1000 bp, Cannabis indica
ccaactcttggctcgctcccttagtgaaaatgggaacagccttaacctgaaggcgtcattgctaactccattcaccttgaatgtctggcaaagctcttcgaagttggcgaggtgcatgtttgggtcttctgatggcagacccccaaactggactgaagattggaccatctgcagtatggcttgattgatttcaaaattgttggcatcgatggtaggtggtcttatacaagatctagcccctgtcaagttaggaagcaaatagtccctcaggctacggtcattgttgttgtgaccattagccttgtcttctacatctcctccattattaccattattagcgttgtcaaccatgactacttcttgttcagtctctattgcagcgctttccaatttcttccttcttttgttctttttacaagtttactctatttcaggatcaacaggtaatctgacagttgcaccttgctttctcataaactatttgaacttgaaaaaagataagattttagaacaaacagaattagtactataattggaaaaaaaaaaccaaattagaacaaaatttaatttttaataatattaaccatcaatccccaacaacagcgcaaaaaatttgttgtgatattttacacacgcaagtgcacgtatcgtgacaagtagtaaactcaccaagagtgaggtcgatctcacaaggattgtagttaagttcgttaaaattaaacttctacttctatttggttgaataaaaattaagaaaggattaaaaatagaaaataaaaacagtgcaagaataagcagttaaactaataaagaaattaacgattaataaaaattagggtttcgacttcaattgtttcaattgattatggcctaatatgattatctccctattatcaatttctaagcaatagcaggtttactaaggtaatttatagtcttcacagatatataaatctcaatcacatgcaaactttctactctcgtgataaatttaacatgc

SEQ ID NO: 353064 - DNA, 1070 bp, Cannabis indica
tcacagtaccttgtcgtagtgggagggtttcaaggaactcaccctgttatgacttggaagacacttgtgataaaatccattgttagtttaaacatgtaatggattgtcagaataagaactaagaagcaaagccaagagaactatggttaaaaccattcatatggagtaaccaagagttttctattacaaggacaagaaaggaaatttttgaaaataagtctattcaatggacttaacaaaatttcttgttcctagtattgtaggtttgcatttatctaaacctattgcttgtggtatacctggtagtttacttactttagtgccatcaacttactttagtaagatgctggagcttttttctaatggcaatctatagaaacttatcgacttttagacatagattttatttatctaaggaaaatttttaactattccataaaagataaaggccaacgaaagaattccttaggatcaacagtgagaggtcttagatatgctttgctatgcattagaccagacatctgctgttgagtggaagtaatgagtaggtatcagattaatccaggaaaagaacttttgaagacaattaaatgaatcataagatcaagaagaggaactatatatattagtcgataagggtggtatttaatactcttagactacaccagatcaggtttctagactttccttgatgctagaaggtctactgatgagatggtgattactctggggtggagcagtgattttggaaaagtgtaaaaacctatatgaagtctctaactctatcgatgagactgaatgtaaagttacaggaaagatacttattcagtctatggaacattctatacaatttttggcattgtactaataatgtattaactactagtgttactttctgactaaacacataaaagtttgtattgaatacaacatgtcagatcccattactaaaagaatactacatactacactatgattcacatgatttatttcatgattatgtttaatgtataaattctattaagttcagaacatatataaacatatatatatattttcatgattatagt

SEQ ID NO: 353065 - DNA, 524 bp, Cannabis indica
tacaacaacaataacaacaattatcaacaatgtatcgagatactatcgacaagaaatcgatattccaaataagtgaccactcgagctaagcaatctacactatcgacataatgtcgacaacatgtcgacatactatcgacaagatcgacattaacaaatatttaaaaattcacatgctaccgtcgataacatgtccacatactgtcgacacataatcgacatttaagggcaaaaataaactcaaccctctatcgacatcctatcgacatacacacaaaatcctatcgacatacaaaaaatcaatacaatacaaacaaacaccaattctatcgacatcctatcgacatacaaacgacatcctatcgacatacaacaacaacaatacagtacaaacaccaaaaccatcgaaatcttatcgatattctatcgacatatcatcgataaccctgtaacaatcacatataccattgaaacaccaacatctacaacctaaagagcacaaaatctacataaattccactaat

SEQ ID NO: 353066 - DNA, 654 bp, Cannabis indica
aaaaagttgctggttaatacaaagaggaaaaggagggggctgtgaaatttggtgatggaaataagggaaatattgctggtaaaggtgatgtaaacctaaatggtgtggctcagttaacaggtgtcttgtatgtaaaagggcacaaggccaatctcatcagcattggtcaactgtgcgacaacaactcctttgtaagtttttctaaaactcagtgtttagtttcaactaatgggtgtgttgtcttgataggaaacatgattgtagattcgtgctatgcagtatgcaatatcatcatgtgcaatcgaaccttcctggataaaccggacttgtggcactacaggctggggcacctaaattacagaaacctctaaagactgatgaagtttcaagcagtaaaaggaattccagagatgaaagtatccagggatagaatttgtggaccatgtcagtaagggaaacaaattaaggtatctcaccctcctatcaacaaactattaacctcaagtgtgttggaactaaagcatgtggacttgatgggacccatgcaaaatgaaagtctcattggaaagagatatgtaatggtccttgttgatgattattcacggtcaatctgggttgagttttttagagaaaaaatctgagacctctggacta

SEQ ID NO: 353067 - DNA, 1203 bp, Cannabis indica
ctccagaattgagaaattataactctagtgcccacttttaataatgggacccacaattaaataaaatcataaataattctaaaaaatattaataattaacgctaactgtctttactaatccatatcctaaaatgcggtcattacagagcacctagtgcccaggttgaaaatctgtcaatttgggcgccttccaagtgtccgatcagagatctgacttatgcatcaaattctctttcataaaaaaatggggaaataggtccttctggaggataaaaaacaattccttggcataaataacaagtcccagtgcctaggttaacattttgtcaacctaggccatttaaaatggagtttttttaggaattatttcaagcatctcctccgtcttcagaaaatattgaggttcaactatttttggagaccaaacaaaattttgaatgggcaaaatgggtcctagcaccaaggttgacacttagggctgggcccagcgcccaggttgacattttgtcaacgtagactgtttctgatcaagttaagtaaaaagtgttctgagcatttttttgtcataaaaaataacaaagattcaactaagatcagggagaaaaccacaaacttgagtccttggaaatagggcccaacgcccaggttgactatcaacttgggacactaccttcaattgctcaaatgccaagtccgatgcaactactgaatccaacatggtaaaaaataggggaggaggcactatcctcaaatttagaagccttggaagtatcaaaatcagaatcctaggagctcgattgaaagagcccagcacccaagtcaataaatggcttggtgcgcttgattctgcttatccaaatctgatgttttttcgaccgtctgtctagtatttcataaatacaatgatctatgaagtcagaaaaatcaaatccattactttgcatttctcatttctagcacacttagaaataaagagttttgagtctctcattttcgaaaaatagcaacatctccgagaactagtgaccaatttccccaaaacatataaatgggataagtggtgtgaaactatcacttgggccttttaaaggacatccctttgacgtttctacacttaccctatatccaggttgacatcagatgtcaacttgggcgctgggatgccaacgtgggcattgggatagttggaaattattttaccag

SEQ ID NO: 353068 - DNA, 927 bp, Cannabis indica
aggttatgcaaatactctcgtttcacatagaacctcgattatccaattttagcattctcaattctcactttttcagatttttaatttagatcatagaacatgtaaaaggtgatcaagcttacacatggaattaaacacaaatatagataatttcacaaatcaagattgaaggaatggcaattaacattaactaggcaaaactttaaacaatattcatcatcctccctaaatgagaaattcattcataaaataaaataaacatccaagattaaatctaaaacaaaaatagacataaaggaaaataaagagtgaaagaaagaaactagatggtgatttcgctccgggtcttcaagatcgcttcctctcctccttcattcacttttcgggccgatttctgatgcctttggcaatctgagtcgagtcctttatataggaattaaggttgtgcctccaattggaaaaatatcagaattaggttaaagagctcattttttgtgcttggtcgcgacccacttaatggctagtcgcgaccacaagcaaaactcaaaaaatagggtatctaccaaaatcctcaagttgtgaccatagtcgcaaccagaaaaaaagggtcgcgactaggccttgtgctggtcgcgactgctgatccaattttggcagcttcaaccgatttttcaccagattgtcccgtcttttccccaattgactgattttgaactccaatgcaccgagaacctaaaacaaggaaaatcaagcgtaaaaccgctccaaaaaggcgagaatatttgagaaaattcttatcttaacaaaattggcctcaatggccaggagccccaatgtgaatggagggcggcagtatgatggcacctgctgcaagtgggtgtgaacggtgtccattccttggaaaaagtaatactcatccacgaagtt

SEQ ID NO: 353069 - DNA, 542 bp, Cannabis indica
ttgcactttaatggtggtcatccgacctgagtacttttttcatttttgctgaaccttcgggcctagtccgcccagcaggccactcactttaaagtaaatgttctttcagtacttaatatggccatccgacctggtactttattggtagtattttcttaaatgttccccattccaatactgcggtactagaacaagttccattttttcatcatacttacccaatttgtatgctcctgattcgagaactttgaccacctgatatggtccttcctaattaggtctgagtacacgtgccgtgctgtctttggtgtttataaatactcttcttaaaaccatatcacccacaaataaatccatatgccatggcaaatggagtctgtccggttgccgttttcttggttgttaggtacgaccataagacttcaggaagttctttcagccagtttcctgtagcatccttgagtcttttctttagtgtatctttcagggtcttgttgactgcttcaacttgaccattcgcttgaggatgtgctactacggag

SEQ ID NO: 353070 - DNA, 1259 bp, Cannabis indica
cttcacaaacacacaaatgagccaaagccaaacgtagaaaaaaattagtataacttaaatcttctcatcctattaatagaaaattaatgttgaaaacagtaaatcctatctatcttctccaatcaaaaataataatctaaagtaataaaaataaatcaaagataaaaaaactaaagacaataaaaacgaaaagcaaatgctagcctttaattaaacaattgcaatttttattagaagaaaacacaacaagacacatagattatttaacaatctgagtaattatttttaaataaattatgtactttttaaacacataaaaaaatcctaaagatcaaattaagtaagagacatatatgtatatatacagaaaacataagacaattgaaaaagtttgaagaataagagaaattacaactgtgataggtctgcttttattgggtcaatgtaaacatttattaaatacgttataaatcgtatcgttctgggacgtctcgctaggaacatagcaacaataaccctggtagcaagctggagcttttcccatgtctttttgagattgataatgtaagcctcgtcatttctgcacttgaagacataatgctctatctgaaaattgcagttcttgctgacaaggttaacttcagcagtcaacatcatttgtatgtcagcttttatctgagagagctgactcgatggagctgtgaacctcattgaaagatgtctggagctgattagtgaatgtaccatgagcgcgccttcctgtagcgagatgaatgcctcgctattagttgtttggatttactcgactgttatacttagtttgtaaaatgtgtactataaactaagtgtcttaccagcagtcatcatgtctcgtctacgtctgttaatgcgtagcgaggttgatgcctcgctttgcaaatttgaagtcgtatggtttctcattaatgcacgaggcaacagtttgtatatttttatctcgcgtaagaccttacagtcagcaagttgcaaatatactctgtcacttccgcatttaatgagttattccattttcaaatataattatcattacatttgttaattcgtattcttcccattttgacacgtgtcctcctctgaagcgctagccgaatttcaagtataacaatattgtttaaaagaacactgataacacgtacaattctattgtgtcatgtttttaaattctacactatttatttctggtttgtttatgaaaaactgtattctgcagtgacagaatt

SEQ ID NO: 353071 - DNA, 669 bp, Cannabis indica
cagtttcatattatattattaaatttatgaaaaggaaaaaaaatctaaaaagttaaacatataaacaatttttaagaatgtaaaaaaaattgaaaaaaaaataaacttatttaattttgattagttatgatgtcattttatctaatattttcattattaatttttataattcaaataggaaaatatgctttaactcttgacccaaaaaagataaaaaagaaatatatataatacaaattaaattaaaatttaaaaatacatttacataaaatttttaaattaatttaattttatttttattaatatttattgcctttattatgttgaactgttgatatcatatcttgtgaaaaagtatatattttaaaaaaaataaaaactaataaaatagaacttaactttacaatttttaagtgaaaataaatttgggaatattttaaaagcgtgtgtacacatttagatttcttgtggcactaaaaatattgatgatatgtaatagacatacaaatgatatgatcacactaaacatagtgtcgaaaacactatttggacacaattttttagtaagtgaaatgaagaatgcaattattaataaattaaaaattatacaatatttatgcaaatttggaattataacagtattacaacaatatatgtaagtattttttt

SEQ ID NO: 353072 - DNA, 1228 bp, Cannabis indica
tgtcattttagcttctcgagactaatattgtcttaaccttgatggttatactttttaaggttgagaagatcttcctcgcatgcaaaacatcttttagcgagataaacacctcactgtctgttatcttgacgcaccatactatctatactcagattgtatatcgcataatatacgctaagtaattttagtgttgtcgctttctctttcacgcaacgaggttgaggcctcgttatgagcgtatacactcacgtagtttctcgtcaatacataaattagcagttcgtatgtttctgtcttgcagaaggctattcagctagccgagttataaacctaccctgggaattatattccaacgagttgttccatgctaagcgtacttgttgtttcttcctcgcatgcaaaacatcttttagcaagataaacagctccctgtctgttatcttgactcgccatactatctgtacttagtttgtatatcgcataatatacgcttagtatttttagtgttgtcgctttctctttcacgcagcgaggttgagacctcgttatgagcgtatgcactcacatggttcctcgtcaatacataaattagcagttcgtatgtttctgtctcgcagaaggctattcagccagccgagttataaacctatcctgcgaattatatttccaacgagttgttccatgctaagcgtacttgtcgtttgtgtgtttgagttcttcccagctcgacacgtgtcctcctctgatgtgattaccgaatttcgagtataacatgtatattaattttcagtattacgatatatcaaatattgttgtatatatttaatgatctaatatatttatttgtttttgttacaatataataatatgaaatactaaaaaaaattaaataactttttttaattattatattttttaaaaaaaataatatataataaatatatttttataatttttatttactaatttattatatttagttattttcttaattttattaaaaaaatatttactaactcaatttttaaaattatggtcattttgtatcgtattcctttccataataagttttatttgggtctgtataaattttaataggtccagcccaatatatttttgtaaatttattggactattcgggtataaatgaaaatttcccttattaggtcattttagaaacgtttaagaaaagaaaaaaggccgtaggcagtcacgctcccccttatcc

SEQ ID NO: 353073 - DNA, 995 bp, Cannabis indica
atgataagtactaggcataggtaagggctcgtttgattagacgatacgatatattggtgtcaggttgtggcacgggctcacctgattaggtgatgcaattatgtatcgggcgtagatatgggtgcgtctgattacacgatgcgatatattagtgccaggttgtggcacaggctcacctggttaggtgatacaattatatgctatatgggtgtaggtttttggcacgggctcacctgattaggtgatgcaattatgtgatatgtgggtgccaggccatggcacgggcttgcctaattaggcaatgcaatagaagattatcaaattaaaacattgacttgcctgattaggcaatgtgatgtaatgaagatggttaccttatgaggtaacatatatataatttatattattaaatgaatatgattcctattattggtataatgattttgtactaccagatacttgtatattgatgcttattcaaagcagatgccagtagtaatttggatttcatcttatgaataatgcgtaatgctttgattacgattgcgtataaatgataatattcgaataataaattatatgattattagttttttttttcttattgagtccttgtgactcacgggtgctatgtggtgcaggtaagggcaaggagaagttagagctgccatgaggtgactaccttctccagcaatgtatatattgacatcaccggtctgcatgtcaagttgtcaagagtttttttaggctgtatctactgtgtgttttagttttatatttttgaggtgtcgttatacatagttcttttgtgaaactttttataacagggatccccggaacgcatttttaatgccgttatgaaggtcgtttttaaatgttttacattaatcaagtttttaatattatcacggtttttaataattaattaatctattagtattaaactagtttgtaaaatcacacatgtggcgtccctatatattagggcattacaa

SEQ ID NO: 353074 - DNA, 562 bp, Cannabis indica
aaaaattgaaaaagttatggtgtttttgaaaatttttgggatccaagggtgtgttaagatggtgcacaatcgcaccagcatcttggacaaggaggcatgatacgcgcgcatgacccaaacaatttttgtctgaagctgttgatgatccctcgctcaaacacgcatgccaggctatagctcgcccacggaaatcctacaaatgcccaaatttctcgacggaaggccctgtagcaagcttcatccacgtgcgcgtctcggctgcttgtagcctctctaggtatttttcccctaaattttgtattttttttttaattttaaaaccctaatttcaaaataaaatattatttttaatatatttaaacttaaatatcaattttgaattaataatatttaatttttaatggatgattaataatttttgatattttgaggtttaaatttaaaaattgattattttatttttttttaaattatggtcacatttaaattttttttaatttctttaatatttatatattatttaattataagatcagatattttaatattggacatattttaa

SEQ ID NO: 353075 - DNA, 486 bp, Cannabis indica
aacataacataccaataaaaaaaaccagttacattgttatcttaataaataccaaataaaaaacacatttgttcatgctaaattctggtaaaacaaatctacacaccaccgctctctaaatttcttcatattctcatcgtgcacattatcaaacgtagtctccagcatactatgctcgatgtgctctatcacgtacatcccgcagttaccgctgtatgagacaataaaaagtaaatgaataaaagtatgcaaattaaattcaagttaaataaaaaaaaaatcaattgtaattaagttaccttgtctttgtctgtggaacaacggcccgatccatgacttttgaagtgaaatttctgacctggctctctgaggcggtaagttgaggcacgaggatcatgtcatgactctcgaataggccagcctgcagcagcaaatttggtagtaatttttcccacattgccaggtgacggttcaattcgttcgggg

SEQ ID NO: 353076 - DNA, 511 bp, Cannabis indica
ggcagtcaactcctcaacaagtactactggtgtgggggcggttattagagatgctaatgggcatgtagtggctgcactgtcaatgtcaattgtaggtaactttgaatctcatgaaatggaggccaaaacactttttcacagtcttaattgggctattcaacaacaattgccaattatgcaaatcgagacggatgcactcatggtggcaaatgcattgaaagctccattcaattcaaattcctctttttcaaatttaatagttgatgttattagtcttttatcttttttccctaatataaatgtttcacatgtcaaacgttctgcaaataatgaagcggcccatggccttactaagtattaagggtggatgagacttgtttttgattggaggttatcccaccgtctatttactctgttattgtaaacgaaacactgtttgtttaataataacaagtaatttccctaaaaaaaaattataatgttgattgcgttgtaatgactgtgaatttgt

SEQ ID NO: 353077 - DNA, 798 bp, Cannabis indica
gcaactaggcaagtttttgagctctatccctaagagcaagagtaaggggaggacggtgatatgccaaaatctactgaaactgagtccaggtaatgctcggatccttcaccatgaagtactcatcaggaaaacgccctattttgttgatggccttcgcatccgtgttggtcaaccacttgaagcctggctgagagaaatagaagtaccccgacctgccttttctgggggtagacttcagatcaaagaaccaggcaacctcgtggggagaaggagcaccccatcctttggaagcgtagaggacaaagagggcggataaatacttaatgcccttaggagtgatctgggtcgggcaaagaccaaagaagtccgccacatccttgaagtacttgtacaagggcatcagcgcccctttctggccgtgggcccccgaccaggcgcacatccccttgtcagggtttatggcacgattatcgtgggcggcaatgtagcagtccagctcgcccaggtacccgtcctagtcaagagttcgaaggcgcgcctccgtaattttggacagaggatttaccaacctggcgcccaaggcaccctgcctcctatgaggaaccgccgcagcaagctcctcactgacgtagtccatgccctcaaccaggatgtctccgtcagcatcgactggctgcccagcctcgttctactccccaaaatttgggggttcaacctcttcctctccctccacctcggaaggactgcccagacgtgcatcgtccagctcctcaacttcctagacctcagcgtccccct

SEQ ID NO: 353078 - DNA, 815 bp, Cannabis indica
tctcggtggatgcgcaaggtaggagtggtggtttagctatgatgtggaaagagcaatctgaagctgaggttagtggtttctctcaaaaccatattgatttgattgttcatcacaatgatttgtttgattggcggcttacgggtatttatggggaaccaaaccgggctcttagaaggaacacttggaatcttatgcgaactttgaaagcagaatcgactcttccttggtgtattattggtgatctgaataatgttctgagtcaagttgataagcgtggtgggaatccgtatcctaattcgcttcttgaaggttttcaacaagcagttgccgattgtgatttagtggacttggagttatttggtcatccgttcacttgggagaagggtagggatactgataattttattgaggtccggttggatagagctcttgccagtttggggtggattgatttatttccaaattctcggttgattaatcttctgttcaccacgtctgatcactgccctttgcttcttgatccttcctttcgggttccttctcgttctagtaaagctttccgttttgagaatgcttggcttcgtgaagagaattgtttttccatcattcaggaacaatggggtggttgcacttctaacgacattgttgataagattgtggcagttcaggaacctctggcaacttggggacatgatttgacgggtaattttaaagagaggattcaaagctgcaaaagaagaattggtactttgaagaattgttcagatgatacgtccctggttgagtaccgtgctgcaaagaagcaacttgctgag

SEQ ID NO: 353079 - DNA, 857 bp, Cannabis indica
aaatcaattcagggtcctatttgtactattttaaaaaatacagaatccattttgtcatttaacaaaacacagggtctaattggtaacttttataaaacagaggtccaaaatattatttacccaaacatatataaatagatattaacacaaattattgttttttgtctgacatggcatttaaagcaacattaaatattagttaatgtctttctgtcaagtgcttgaaaattataacattttggtagtagctcgatggcatttattttgacaaaaatcgtacgggactgataaaaatcttatatcccaaattttcaataagcgtgtcctgtttatttccactatcatatttcctgtctaaggaacacttttgtacccaaaactttgctattatgataggaatgtaccccatgtgaaatggttagtgcggcataaagtagtatagcaaatagaaaatagaagagaataactggtattctgttgaagcattcaaacatgtatattatatatagaaagagagcattattagcagcagtggtactcactactatcatgaagtgacgttttgtaaataattagagatattatataatagttaaaataataaattacataaaatttaatatttaattacacaaataacaatataataatttaaaaatactaagccttactaatattttttaagcctatatctttatatattaaaattgcttatctaacggcaatacttggtttaacggagaattttttttttgtttttgttaacttttaatcattcactagatttttttttttttctgttaacttttaactattacgttaaatttgacatatatattaaaatatattaataaaaa

SEQ ID NO: 353080 - DNA, 642 bp, Cannabis indica
gccggaggaagacaggaatatcagctggttgacctccgatgataatcttgtgacgtatgggctttacgctgaggacttttctcctaagtccgttgcggggaagaagaggaagtctggtgttggccggcctgaacgagctcataaggaggatgagctcattcaacttaagcgtgaagctaagttgaagggaggtgtcagggccaagcagtatgctcaggagcctttggatcctgaggatgaggctgcggctgagcaggtgaccccattgaagaggaagaagaaacttccggccacggctaggcccgttgaacatgcaattcgcataagggagcccacttcacctattcggccgtctcaccccattgccgaaaaagggaaggctgtcatgtctgagacaagatcgatgtgaggtgatgatggacttctgaatctctgtgcgggcggtcaccttgcattttactcttttttgagcttgttaactttcatgccttgtgttttctgatggctgtttcctaaccatactatttttgttttgtgtagacatgtcttggcagatgatcgatgctctaaggaagagaatgggtggaagctctagcgcctctcctccggccaagaagtctaaggggcggtgagggggtcctc

SEQ ID NO: 353081 - DNA, 749 bp, Cannabis indica
tatttatttcttttttatctaggaaaatggccctaatatatctgtttgtttgcgttttcattcactatttaaactattatattttgatcaaatttaaaatactttaggcatttccattgctcgtattttcctttgatattatttaagtagttagtaatctactatgtgcgcgagcagttattattcgctatgcttttgatttgcgagcagttattaattctgcttcgcataaacagttataatctattttaagcaaacttaaatatacttttaattatttatcactttgtatatttttgattgcttatatgaatagttaggctgctcatccatacattaggtttaagtatttttcaagacatcttgttatctcgtttaatactctcccacaaaatacgagttgttagtattaaacttcgcatgtagcttacgagttatatctcttttacaacttttgatttttctttctcgtgagaatggttatttaatcacaaattctaaagtattgggtttgcaatttatcatgtagttctagataaatttcggttaatcatatagatatgcccctcaagtaattttaaagaatgacactttgtaattacttgaattgattcaactttattaataactgaattttcaaaatattacatcaaaaatatgagttacaacatcagtttatttgtagtagggttgcaaatgttctaccttgcagtagttctttatcagtgagccattcagccgagccaatt

SEQ ID NO: 353082 - DNA, 783 bp, Cannabis indica
gtagggaggttcgtcaagcaaatgttaaggaaatttggtttgattttcgtaattctaggactcagtttgggttaggtgaatttgctattatgagtggtttgttgtgtaagggtgacagtattatggaaaaatatataggaaggggagatacttttgtggacaagtattttagtgacatgactgttaactatgttgttgttaaacaacgattcttgaatagtattttcaaagatgatgtgtttgcttttagaatggttgtgctttattttgttatgaatttcttgctaagtaagcctggtcgcaagaaagtagatgatgggttacttcatttaataggatctggtgaatttaacaattttccatggggtaaggttgcgtatgatactactttgtatagtttgaggactgttttgaaggataaaaacaagaagaaagttgttaatgagacgaagggtacagttgcttccaaggcaagaaagaacaataagggtaaagaaaaggattacaatagtaagacgtacaagttgtgtgattttccttttgcgtttcaggtttggctctatgaggttattcctatttttaagaagcaaggtttatgtacatatgattcttctccagattataggatgtgtaggtggagtagtgtgggtaatcctttctcaggtgaagtggagaagaaaatatacatgtcaactaaggtatgtttttgtgatatataatttattatttttgtgttgtcttttgtttttttttttttgttatgttactaattttcgttatttt

SEQ ID NO: 353083 - DNA, 1094 bp, Cannabis indica
aataacatacttattagtaaatctagatcctggtaaaataattctaacagaaccgactccgcgtatctgctcgcaagatacagtccgaatcggatacctcgtatgcttgctcaagacgaagcaataagcaacccgcatagaacgacaaacacttagcaaatttagctttcgcatcaagagtcatcaagaaaatctctataacttagggatcagattctagagatatggcaagctgtccaaatcccaggatcagtgtattttgtatttactatgcaatttttctgcttatatgaattgtaacgagaagggcaatacttcctctttaaggtcatggccctataaatagtgacgcatattcactgggcaaagggtcgcaatcattttagttgagagatattgtctaagaattgatattcagagatattattgtaagagctataagaaaaggaacctttctccttgttcttgagttaatacaaatgacgaggattaggctattaccgaacttctcgggattaaacctttataaaattcctgtgtctttatattgctttactatattttaatcgttataaactacttgttgcttcgccaacaacattgtggctagaatactgatcgacaatgggagttctgtgaatttatttaaaaaagccttcacggcgataggcctcacggaccgggatctatcaccaagcagttcccagctcatgggattcaatggaaccacgcttatcccaatgggaaaagtgaggttgccagttaccctgtgtccgaacacaccccagagcactttttaatactgcacattcgtggtggtagactgcccaaattcttacaacgcaatcctcggccgactggccctactggactttggcgcagttatgtcaatcgggcacttgggtctgcaattccctactcaggaagctggagtagggaccgtgaggggtaatcaaggagaggccaggcaatgttacaatgttgcagcccacttaccaatattgatggtccgtgaagttatcgagctgggaacggcggaagaagatgagttggatccccatgtgggatccgaaaaaattgtagatcctatcgag

SEQ ID NO: 353084 - DNA, 563 bp, Cannabis indica
gaatgcattttatatgtcatatttagaatttcataattttgcatgttttgtgcccgaaaactttagaacgcggtgtttggctattaaaagcacatcatagtattgttagtatagcgggatagtatagttagacattgggaatgtcaagaatagtcgagattttagagtttacaaaaatacccctaagtgattttatgaaggttttgtgtgggcaagggcattttggtcttttagcccatattgtattttttccttttgtgtattttattaagtaatataataaggatttatttaattattttggctaagattgacttcaataaaaccatttattttactcactttttttttaaatatcaaaattagacaaaaaacactcatctctctctttcaagctctctctcatttgaacccctatacaagttaaggtttgatgttttctctgtaattcaagctagttcagcaagtgtttagtgatttccaacccaaggtaagcctcttgtagctttctcttaagtttcttgaattttaggaaaatggattttgcatgaattgagattttt

SEQ ID NO: 353085 - DNA, 1081 bp, Cannabis indica
atagggggagggggggggcgagtacatgtatattgtgtgttaattgtatttattatttaatttttaataaataattagataggaagttaaaaagtcagctggggcaattgccccttgaattgcgtgtaggttcgcctgtgggtgcgaggtgatgtaagatgtagaatatttcctactacacttgcagaagccaccaacagtggtacttcaagctggctctagaaaggtttaattcgtagaatgatttgttatcccattttttacactatgacgtggtagcacatgctggtgacacgtggaccttattccctacatctggctgaagggatgtttcgaacaaagctcaacatacacctgcatagataatgtcttctcaaccgagcagtagacaattcgaacagcgtatcaacacttagcgattccaagacttgcatcgtgaagcacaaaagcaatccctataagtttgggatcgtatcacagagacatggaaagttgcccaaatcccacaatctatgtattctaaatatataatatgtgttcttaccaactatagacattgtaagcaaaaggaaaaccttccctcaagcatttagccctataaatagtgatccattgtcactgatatgggggtcgaaagaattacttgcgagaaatctaagagaacatactcagagatttcattgtgagagcttcaagagaggaaacattgtattctttgttcttgagttaatacaatccaaggggactatgctattaccgaactgatggggtcgaacctctttaaaatcttgtgttcttactgcctattagttcatactttactttaattatattttctatcgcttactatttgactcattgtcgttggctaaaagcgaggtcaacataagatgagagtaataacccaagtttgctcttggctttaagtttaattagacacataagatggtggtgcaaactcgcaaaggcgtggtcgatcaggtggatccactagtggcagatcctacactgcagaccccatagagtgttgggttttatgccctatataaaactccatttcaatgtaatctattttattcaa

SEQ ID NO: 353086 - DNA, 560 bp, Cannabis indica
ctttatatggattgaaacaaagttctcgtgcttcgtttgaaaaatttagtcaggctgttgagaattttaatttgttgaaaattaagtcaaatcattctatggtctataaaagatcaactgcgggtgtcattttattagttgtgtatgtggatgacattgttattacaagaaatgatattagaggcatctcattccttcattcattcattcatacccagtttcaaacgaaggatttagaggtgctcaagtatttcttgggagttgaagttactcagagtaaacaaggtatttttctatcttaaataaagcatgtacttaatttgttaactgagacatgaaaattgagaggaaaaccttgtaatactctaatgaatttagctatgcatcttacatgtgatggagaaccatttgaagatctctagattggttggaaagttgaattatctaactatgacttgtccatgtattgcattttgagttaatgttgttagtttgtttatgtcttctctaacaattcatcattgaacataattaaaaaaaatttgtgttacttgaaagga

SEQ ID NO: 353087 - DNA, 917 bp, Cannabis indica
aaaaagataacaaaaatcaaaacaaaaagttaatctaaaacataaagaaaaaacacatttaccaataattgatgttgacctcgcttttagccaacgacaacgagtctgatttgtaagcgacaagtagtttaatatgaataaaatataataaaataaataaagacacaagaattttatagaggttcagccccgagcagttcggtaatagcctaatcctagttatttgtattgacttaagaataaggagaatgattccttttcttagagctcttacaattatatctctgaatacaaattcttagaaagaacttttgaccctttgcctagtgtgtataaatcactatttattgggctataaacttgggggggaagtctttcccatctggttacaattgatataagtagaacgattgcatagcatatacagaatacactaatcgtgggatttggatagcttgccatatctctgtaatctgatcccaaagttatagggatttccttgatgactcatgatacgaaagctgaatttgctaagtgtcagcatgttgtgcggattgctcactacccggttaagaggacttcgtccgagcaaatgtgcgtggtgtcttgtttggcatatttcttgcgagcaggtaccccagagttgaatccacgtgtcaccatcgtgtgatgccacatcagagtgtaaaaattgggataacatttgccccccaagtctgtacgggactttcgaagctgcgtgtagacttcatccgagctgtctttgcgtttggatgggtgacacatgtcaggtgtgtctgtttgcgattcgatgtgaggctgactaggtgtctcttaaattttcggctaataaatgctctgatgcaattaatgctttgaaatccaattttctctcaccacgtttgacggttacactt

SEQ ID NO: 353088 - DNA, 1215 bp, Cannabis indica
ccagtcatgtcttcttgacgccacgcgaaaacatccgtggcgcccctcagtgtctttattattttttctttttcctccggctctaggctctttcctagccgaaggactttggtggggtcgatgtcgcacactgacacttcctcgacgtccttcatgggttctacaattttttcggctcccacacggggatccaactcatcttcttccgccatttctggctcaataatttcacggaccattaggacgggtaggtgggcagcaacgttgtaacactgcctggcctccccttggttccctcttacggttcctatcccagcctcttgagtggggaatttcaggcacaagtgccttattgacgtgactgcaccaaaatccaccagggccggtcggccgaggattgcattataagctgttgggcagtccaccaccacaaatgtgcagtatttgaaagtgctttggggtgtgtccgggcacaaggtgactgggagcctcacttttcccatagggataagtgttgttccattaaaccccgtgagctgggaaccgcttggtgaaagatctcggtctgtcaggcctattgcagtgaaggcctctttgaataataaattcacagaactcccgttgtcgattaggactctggccacaatcttattggcaatgggagtctctatgaccaaggggtcatgatgaggaaaacgcactgtcttagcgtcctcttctgtgaatgtaatgggctggtccattagccggggcctttgagctgggagttgagtgacctcccaaacctcattgtgcttcacgacccctgcataacgtttcagctccttacgggtagttcccctgatgtgaggtcctcctgagatcatagccactctcccgttgggtcttggtggcaggccaggaatatgctgggcatctccggggggagcaactggggccaatgctccggctacaccccctggtgctccttgaggcaaagctcctgctgcctgaaccggattgaggtgaggcaaccggttcttgatccactcgtagagatgtcccaatcggatcaagttttcgatctcgtccttgagatttttgcattcattggtgctgtgcccaatgtcgttgtggtactcacatcttttattggggtccctccgggagctgtttcccgttaatctgatgtctcaggttgatgggaggacatttttggccccttcttcctctccc

SEQ ID NO: 353089 - DNA, 816 bp, Cannabis indica
cttaactttcttgaggccattaggaggtaaaaaactagtttttcgatcaccgggtatcatgtcttcgcccctatcatgcgtttgctaacatagtacacgggatgctgagttttttcctcttcccgtactaaggccgcgctaaccgcattctcggagacaaccaagtataggaacaagtcttctacgaggacaggttttgataggatcgggggtttagccatgtgttcttttagttttttgaatgcctcctcgcactcgttggaccattcgaatttttgacatttcttcaggacgttgaagaaaggaatgcacttgtctgtgggtcgggagataaatcggctaaaggcaacaaccttcccgatcaagctttgtacatctttgtactttttgggagaaggcatatttaggagagcttggattttttccaggtttgcctctatccctcgttggctgacaataaatcccagaaactttcctgatttgaccctaaaagtgcacttctttgggttaagtttcattctgtatctctgaaccacttcaaagcattcttcgaggtcatctgcatggcttgcacatgcctttgatttgaccaacatgtcgtccacgtacacttccatgttccatcccagaaggcctttaaacatccggttcaccattcgttgatatgttgcaccagcgttctttaatctgaaaggcatgaccaggtagcagtacacccccttatcggtcatgaagctagtgcattcttgatctaccacgtgcatcttgatctggttgtagccggcataggcgtccatgaaggacagtagcttgaat

SEQ ID NO: 353090 - DNA, 691 bp, Cannabis indica
agtaggaaggtagagaaccattttcaatatattcactgtctaatcctaggttggcctcgggaattgtaccaaccgattttagtaagaaagaaaagtaccttgatggattaaatctaaagataagacatgatcttatgattactattgacgacaacaccacctttgctgacatggtggggaaggcactctgagctgagggcacagtggagtgcactcaagtctcgagggactcaggttgttggtggctcccctactcctcctacctctggttatggtaggggtggtagtggctcaaccactgattagaaatgaaagccaccaactgcacccggtggctcaggtcagaataagaagtttcgtaggaaccagggtcgaggcaaccgtcagagtggttcttgaacccgatacacttactcggagtgtcccagttgtaaaaagcatcatctgggtgagtgtagagggcaaggatattttcagtgcgggttgtcagaacattacaaaagagactgcccacagcctaagaaagaagaacagaagactgttacaaaacccgctccagtaagggtgtttgctttaactcaggaaaatgcagaagccagcccctcagttgttacaggtcagctcttggtcaacaactcttacttctctgtattgtttgactctggggccactcactcttatgtggcagcca

SEQ ID NO: 353091 - DNA, 712 bp, Cannabis indica
aggccatttgtcaacctgggcgtcgggtgcttgttttggagcttctaggatgttgttttgatacttcttaaggttattgaacttgaggatgaggtctcttacctcatttttgataattctggattgaatggtagagtcaaatttggcatttgaatgatcaaaatcagtgcacagttgattgtcaacctgggcgctgggcccagcaccaggtcaacctgagcactaggctctgcttctaagacatcaggttagtggttttctctttgagttttcttgaaacttcattatgcttagaacactttttttgagaacttgattataaatagcccaggttgacaatatgtcaacatgggcactggccctgtgccaggtgtcaacctgggcgctggttgttacgaaaattatgaacaatacgtaagtgcacgtaatcaagtagtaaactcacacaagtgaggtcgaaccatagggaattgaactgaataccgctaaattagacttatgattctatttggtagataaataattttgatagattttgaaataaagaaaaaacaagaaaattaaagaaagcaataaaagtgtttaatcaaggatgagaaattagggaaaagaatcatgtcgatttaattacccagctgttaatgctaattactattctctttctcaacgtgaatgacagattataaaaataaacctaactcttttcagatct

SEQ ID NO: 353092 - DNA, 1106 bp, Cannabis indica
gtaatgggttttatttagggcacaaaacccaacagttgggtgctcaagctaaacaaggggcagtgctgcctttgcacccgtactttaggaaggtggcacaattcttgcgactctgtccgacccaattcactcccaagggcatcaagtatctatctcccttgttcattctctacgcctcccagaagtgggatatgccctctccccatgaggtcagttagttttttaatttgaagtctactcccagcaaggcaggtcgggatacttctaattctctcagcctcacttcaagtggttgacgtgcaccggggacgaggccattagcaaaattgggaattttgttgatgagtattacatggtggatggcatgggcaccacctacactcggttctagcagatccctatatatcaccgtccacccttcacactttctcccagggatagagctcaaaggcttgctcaactggcgggtgcttcccggaatatcactttgttgaccttagaagacaactttgtggagtacgtgctttacccgaaggatttcattcctgagcctgtgaaggagaaaaagaggaaatcctgtgctggccgggcttagggagctcatcaggagaatgaactcgttcaacttaagcgtgaggctaagttgaagggaggtgcgggggcaaaacagtatgctcaggagcattttgagcaggacgacgaggttgaggaggaagatgaggttgaccaggaagacgaggttgaggaagaagaaacttccaattgagcacatgcccgttgaacatgcaattcgaatcagggagcccagtccacctgctcggccatccactcctgtaataggaaagggaaaatctgtcctggaggagataagagacttgtcaggttatgataagccttcaagtcttgctcgggcgaacgcttctcccgaaacgcaagatactccgtcttgttttttaaccttcttgattaatatgctttcatagctccagtgcttttctctaatcatgttgctggtatttcgtgcagacatgtctcagaagatgatcgaagtgctgaagaagagagtgggaggaagctcgggctgatctcctccggccaagagatct

SEQ ID NO: 353093 - DNA, 863 bp, Cannabis indica
gcctcaaaaactaagaaagttgacgacggacaacaacttccacttcttcaagcaggtatccgtacagggactcgattctggaacgagttacaacaagaaggagcctccaaccttcaagatttcaaaaaagagtccaaaagtagatcaacttagaagaggcccaaatagtggcttacgaagggtactatccgaccggaatagcagggtatgtacccagagcccagctcccgggaaccctaccaacatctactccaccaatgaacgcatacaattttctgctaccccaggatataataagaatcaggcattggctcctgcatcttctcattatgggaatccccctggggtaagtggacaagtccagtctcactccgctcctactgcaaacctagcaggtccttctcaaggctctcggagcaagaggtccttgaaaggtagcaaccggacggacgacaagcagcagaaaagggggtacactccctaatacacgcagtttacggaactgacgaactcccaggagcgtgtgtacttcgccattaggcaaaatacacactaccggagattgccctctctgtacagagatagctcccaaagggatcccaactaaaggtgcgagtaccataatgacattggatacatcaccaatgaatgcaaaaaccttaaagatgagatcgaaaacttaattcgattgggtcatctttatgagtggattaagaactggctgcctcatctcaacccggttcaggcagcaggacctatgccccaaggagcgctagggggtgcatccggagcattggcaccagtcgctcccccggggaagcctcaacagattcctgggctgccaccgagacccaatggaagag

SEQ ID NO: 353094 - DNA, 827 bp, Cannabis indica
ctcctttttttttttgaagaaaaacaacctccttcatggctgaaaatccagaaaatgttaacaccccacatgaggaaaccaatcatcgttctgggaaacagcgcataggttctaaaagacctcccaatccacagtccagaaggaccactcattccaggagggttcaacccgagggtggccccagcgcacggaccacacgttcccagagaactcgacctgacgttggtcctagtacgcgggcaacacgctcgaggagaattcagcgtaggactggtcagaatctcgtgacgagggatatgaagagcctaatcatggaggtgcctaatctgtgggagaaagaacttatgaaacgaaaagctgccgcctgagacgtcgtttggaagaggcgcagcgttgaaacactgagttagaacgtgaggcagcctcagctagggcggcacaggggacgaatacccacaattaacctaaacttggagtgagaagaccacaaggaagacctcgtggctcacaaaccaagagagaggaaaaggcacgggaagaacaacccagggaaaatgagacacccctttaaaattaggacgaatagctgttgtgatattttgcacacgcaagtgtacgtatcgttacaagtagtaaactcaccagaagtgaggtcaatcccacagggattgtagttaagcacgttgaaattaaacttttacttctatttggttaaatgaaaattaagaaagaattttaaaaataaggaaactagtaagaagcaaatatttaagaaaattgacagttaataaaactagggcttcgatttcaattgtttctattgatta

SEQ ID NO: 353095 - DNA, 623 bp, Cannabis indica
tttttgggattagggtttggggtttagggtttgatgtatggggttttaagattttacggtttaggggttggggtttgggatttgggttttagggtttagggtttggggttttgtagttttggcatttggggttttggggtttggggaatcgttatgggaatgggaataggaatagaaattggaatgggaatgggcatgggtcgaggaatgggaatggggattgagaataggaataggaaagggaatgggccagggaaagggaatgggaatgggggacgagaatggaaatgggaaggggtcgaggaatgggaatgggaatcccaatgggaatgggaatgggctagggaatggaaatggtgatgggaatgggaatgggaatacgaatgggaatgggaacgggagtgcgaatgcaaataggaatgggaatgggaatgggaatgggtcagggaatgggaatgacaatgctaacgggaatggggatgggaatgggaattggaatgggaatcagaatgggactgggaatgcgaataggaatgagaatgggaatgggaatgggtgggaatgggtataaaaatgggaatgggaatgggaatgggaataggaatgggaataggaatgcgaat

SEQ ID NO: 353096 - DNA, 1025 bp, Cannabis indica
gctggacgatctgttgttttaacgggaggtacatcagaattttggccggaggtaaaagcagccacctcagtttcaccatgagccacttgtgaagcacagaactcgaggtacatgtccttaccatcacccaagtagtcgaattttgcctgaggattagccttccaaaagtcatagaagaactcaagaccggctgtctccagagcatgaactttctctttcaacttcgtcacctcggccgtaagctcctcctccttatacttcttctcctcctccacccatcgaagaaccgctcgaagagaagtcctctcatcttgaaagctgttcaattcggcagataaagtctcgatggtctcttcaagtcggtcgagatccttagtcagcccagctattttcttctgggcggtaaaaagcttcctgttggcttcaccaagctgcatccgaatagctccaagttccaccttggcgtcatcagcgtccttcctggacaagtccaccttcgccctcatggtgttggacaaagctgcgctcttcgaagcaggagacttagcccaggattatgtgcaggccaacttcagaccagcctgcgcagagaaaaaacttgagtatttgagccacgtaaagaggatcaaaggaaaatgtcaagaaagacttaccttggtgaattccttcaagactccacccatcagcagctccagagaagagtcattgtcagtgtcggccagttgctccctcctcgagactccttgcacttggaaacttttggagtagaggggtttgcaaccgttagctccttggaaagatcaatgacttccccaacatgcgccttttccttagtagaggacacctcaccgcctttagacttcttggctagaggagatgcgctggaacttctgctgattctcttcttcagagtgtcaatcatcttctgaggcatgtctgcacggaacaaaaataaaatggttagaaaaaacaaacatcagaaacataaagcataatagtcaagaagctcaaaaacaagacgaagt

SEQ ID NO: 353097 - DNA, 1759 bp, Cannabis indica
tcgggtctaggttcgggtctgggatgttcggtttgggtctgggttcgtgtcctggtctgggttcaggtccggggttggtcaccagatgcagacagcggctatgggttcgatccaagcactgggtccagatccgaatcacgatcttgggtcccagtttggttccatttcgggtgacgagtcacgagctgggtcctaggttcaagttcgagtcgtgggtcgggtactaggtccctatccttgttccggttcctaggtccctatcccaattctatgtcacagtcccagttctggtttgggtttttatcctagtctagtttcgggtttgagtcctagtcttggttcaggtttgggtctcggtctgggttttaatctgggttcgggtttgggtttaggtcctggtctttgccgagtcctagtcaattctaattcttgttgtgattcggagtctgagttcgagttcgagtttaggtcggggtttaatccctggtctaagtttgggttcgggtccagtattttggtctaggtttggatcaggctctgagtgtgggttcgggtccttggtgtgggtccaggtccatgttcaagtcccaagttttgagtcgaggtcctagtccggtttgggtccaggtctcggtcacagtcttagtctaggttcgggttctggtccctagtcaaggtccagaacctggtgtaggtcccggtgagtgtataggacaaggtcaggtctagatcgcggtacaagtttgggtcctaggtctcaggtcccagtcctagtcaaggtctcggtctcggtctcgtctgtgttcgggttatggttttgggttcggttctggtctcaggtctgggtcctagtcactgttttagttctaattctggaacaggtttggtttcgagtcagggtttaggtccaggttggggtcggggtccgagtcttaatttgagtttgggtacgagtttttcggatctcgggctgggtcaaggtttgagtttgggtcccaagttcgggtctgggtctacatttgggttcaagtctaggtcccgtgtttcgatcccagtctgggtctggttcggtattctgttctaagtctaagttcgtgtccatgtctaggctcaaatcccagtctcgatcaaggccttgctctgggtccgagatgaagtcccgagttaaagtttggcttcgggttcgagtctatgtcctagtctgggtttgggaccaggtcaacgattgggtctaagctcgagttttggggcttggttatggtctagtttgggtccgagtcctgagttccgatctaggtctgggttcgaaggcctaggtccaaagcccccagttttgattttgattcagtgtctcggttcgggtttggttctgagttttggtcggggtctaaggcctggtccgagtctgggattgggtttgggtccaagttcagatcccggtctgggtctggggtcatttcaggtcttagtttgggtcccgggtgcgggtcaaggtctgggtctaggtcaaggttcgtataaggatccctatctacgtctgagttagggtctgggattgggtcctaggtctaggttcgggtccaggttcgggttcgggtctcggtcctggtctgggtacacaaccgtttctgggcctgagtttcggtctcagttaaggtctggggctatgttcgagtttgttcctaggtctgggtctaggctcgagttccaaatcctgatctcgggtcttggtctggttcaagtctaggtcttgggtcgg

SEQ ID NO: 353098 - DNA, 509 bp, Cannabis indica
cccaagccaagatgaagaatttggagaagcacgactacttggggaatgtcgaatgcttctttcccctctccaaatcacagggcaaatagttcaaggcaggggtactgcgcctagttcgggcactcataccaagcaggctgcaatgctgcctttgctttccatacttttaaaatgattgcgaacaattaccacctctgcccgacgcagttcactcagaagggcatcaaatatctatctgccctattcatcatttacgccccgcaaggatggggcgagccatctccgttagaaatcaactagttttttgacctgaagttaactcccaagcacagcaggttggtgttggaaattatttttaccaggatcttagatctactcacaagtatgttgattaacaccctaaatatgaactttctaaaacgatgaaataaacacatataaagtttaggaaaccttacattgggtgcagcggaatataatgactccctctgttcagatatctagccctt

SEQ ID NO: 353099 - DNA, 617 bp, Cannabis indica
atttgttcaaggaatttatggcatgattcaaaaggatgtccaatggtaccacattcaaagcaaaattcaggtaatcgttcataacgaaattccaaccaaaattcatcaagtgagtccttgagtttcaccattttccctctgagtaatggcttggaaatgtcgagtatagcacgaaaacgcaagaaaggaccccatccttcgttcaatgagtcttcatgaacatcaacataagtgccaagaagattccctgcccattcagccatagcttttgttttacttaaaaaaggtagtcgatgaagttgtatccaaaaaggagtaagagacatagcttcaggggtaggcgattggagtgcagtaggtgaagagagcacaataaggtgattttgaaaatgccatggttccaacagcaacactttcttaagatcaccaaggcatccgaaagtaactagaaacaggcccgagtgatgatccgcaatggtgactgggtattgtcccttccaaaagccactcattttaatacgaaaagttttcctattgatatcccgagaggagatgactctagcgtacaaaacatgagttgaatgagaagtattccctgtgttcagtccagtaggaag

SEQ ID NO: 353100 - DNA, 758 bp, Cannabis indica
gattgtgtactaattttgagattatgtaagggtgtgactacctatgttagcaagaagtatcttgttttggtagctcaccatgagggaactccatggttgagtgtccttgacttggggtgatttcattcaagaaatttctccatgaagcgtgcgagttagagcacgttggaaacacttggattggttcatgggggcgagtcgtcagtgcgagaaccaactatagtgatgtactcgtctataagagccatcattctgtgggagtaagggcccaatggatgcttgaagtggggacgttaccggggtagcgtataaaagaacgtcaggaagagtagtggtatcactaaagtaaagaagattacctgaattacttaaggtgatacggtaatgatggagagtactttataatttactggatagtcagtatggtatataaggataccattgacatcctgggaaaatatcacttattatgcaattatggaaaggcatactgaccctggatgggaaaaaagcttatgaattgagatgcaatttaatagacacgtaattgaatgactggtggatgctggatcacaaagtaggttgtttattaaacaacgagctatataactgagtgtagaataagttttaaattggttaaccaagtatgataatagtgatgattacaaggaagcagtggtagcatatgaacgagggattgaaaccttagtggtaatgatggaaaaaaaaagaacacgagagtctcagatgttgatgaa

SEQ ID NO: 353101 - DNA, 801 bp, Cannabis indica
acctccgggtgttcctgagcaagtgccagtaatcttagtcacaattcttagaatttcacatatggggttaattccaaaattcacttcacataatcacataatttgcattccaattacagataagcacatagagctccaaacgagttttccaataatataaagaacgttccaaacgaagtcccaagtcaaaaattatggcaaaaacaaaaactcaaaaattccaaagaaaatagggcctcaccgcggcgagcaactacaggttacaggtcttttacgaattagaaagtacaattattcataccaataataataatttatttatttttgaaaatcaagaataataatctttatataaataaataattaaaaaaataatcacaagttacaggtcttttggtaatggcggagaagaaagagattattccacctcaatacgacgttaacgcgaaatgggatgcctgtttggatgtgactgttgagcgttttgggtactcttctttgggtggagccttcgcgggtcttcttctcttcaggagacctttatctcgttgggcatgtgtagcttttggtgctggaatcggcataggatctgcatacacccaatgttcccaattattcggttcatctcccgcaaagcagccttctcccaagttttctgagtctccagattctcatcaaggtcatgactaaacagaggagtgcatatgctattcaagatcttgggtaaatatatataaacttcataatttcatgattcttttgaattgtaatgatattattttgtatgaactgatgaattcc

SEQ ID NO: 353102 - DNA, 714 bp, Cannabis indica
tttttgtaaccaataaaaataaaataatcaataaataatagtaaatagtcgataaatttcattcaaaagacgacacatgaatctccacatagtcctctataatgcaataatgatgagcctataacacattttgtacacataaatgaacacaatcctaaagaatattatgtagaaaaaaaataatccacgtagatttggatattacatccttaatgcttcgaaatatactcacatttcaaagattttacacaaataataatataattgaacatgaatctacaaataattgagtacagagagtcaatatttaagcaacataaatttagaatttctaatatgggtgtaatgaaaaaaatgaataatattaaagcgtatagataatttatggagtaataaatatctgtgcatgtgaatctatattatgcataagcatgtgattcaaacaataccattcaaacaaatatagtaaatacagtaaaatatatgtatatcaaatgattcattgttggagggactgagaattctatacggagctacatttaaagaattgaatataaatttgtttagaagatgtttggagcagttcaaaaatatttacgtgatgatatttgtgaactttctgagatgaagattttttattatatttatcatcgcaagtggatgcgattctccacctaatctttaacttttttttacataaaaataaagaaggaa

SEQ ID NO: 353103 - DNA, 793 bp, Cannabis indica
tttcttttcattattttttttttctagttcttaatgttctattttcaggctttaatttcattggcaagtctctcaagtggatattttgcaccaaaactattaggtaaattttttcttactttaaaagattatgactgttgactggatttttagccaaccgacgcggagtcgtaataaatgagatttaaaccaaaatcacaataataaatgcaattaataacgccggaattcgtaataaatgtaaataaaagacaccggaatttaaagaggttcggccccggatgtcggtaatagcctactccccttgagttttattgatctgagttgcaatagtcaagaacaggctcttgattgcaaagaatgagaaatctttaattttctaagtgtttcagattgcggatccccctcccaggtcatgggtgaccccttatataggggaggggggtcggtgcttctcgcttcaggagacgcgactaacgcggagccatctcaaccgtctccttgattttcggaggcggttggagtctgatatttaggaaaatatcccgctattttcgtgggttgacaactgtctttgagcctttcgcgggattttaacatttgaaggagtcactgatgacaagggtcccttatgggtgtgacatggtcgtcaaccacctttgaggattaagcccatacttgggggtaacaccctcgagactctcgctgagggggggatgaccactatcatagttaggtgactcccccatgatccaacttgagagagagacgggggggtcccccccttaaaccc

SEQ ID NO: 353104 - DNA, 726 bp, Cannabis indica
ttcaaaatcaattaatgtgtctgttcgtactttgcaaagtgacaatgccaaagagtacacattagctcaatttcaatcttacatgacctctaattgcatgcttcatgaaacttcctgtgtttatacctcacctaaaaattgtgtagtagaacataaaaatagacatttacttgaaactgcacgtgccctcttattttaaatgaaagctcataaacctttttgggccgatgtaattttgacatcatgctttcttattaattgcatgccatcctctatacttaatggtaagatcccatttaaaattctttttcctaataagtcattatttccaattgctcctctggtatttggtaattttgttttactcgcgatgttcgtccacatgtcaccaaattagaccctaaggccttaaagtgtgtctttcttggttattcttgtctttagaaaaggtataggtgttattatcatgatctcaacaaatatcttatttcttttcatcttcaactactcctactcattagggagaatatgatgattttttggtatattctgtcaaatcctctgcgcatgatacatgttctaacgagtctcttgttccttcacttgcctcgatcataactcccacaatgcctacatctccaccacctccaccactacctcgacctcctatagtgtacaccacgcatccctctccttcacctcttgtttcatgtcctgcacttgcat

SEQ ID NO: 353105 - DNA, 914 bp, Cannabis indica
aatatgaacttctaaagcgatatgaaataaacacatataaagtataagaaaccttatagtggttgcaggggattataatgtctgcttccgctcagatctctaacccttgtatcctttctgtagcagagtatcacaaagatctaagcccgaatgtccttctcttgaatgtggattcttcatagcattacacactatgattgagataccacttgatgtgtgtgggcactcactcattcactataggctcgatttagaagagaggaagagagagagaaggtggttttggctagggtaggaagtggaggctcaaatttatctgaaggaatgatatgcatcatctcttccctaaagccatcactacctatttataggaaaccacctagggttaggttagatttatttggcattaaaaataataaaaaaaaaaaatagtaaattagctacataagtggccggccatgatatggattgggtccactttgcaactttaccattttgtcattttttccatcttattttctccaaaacgccatttttccaatttaacgacttaaatgccaattctaattatttaataactaaaaattaattgttaattaataatgtcatttaatatatttattaattagactaatcaaagtctctcaattaacaaataaaccctagaaacttttcttcacaattaagcctttacttagtgaaaattcataaactaggcatagtctaatattagaattataattgattaatcaaaatcaattgactgagtcttacaagtagtattgtctcaactagtatggggaccatgggcctatatatctgagcttccaataagcagacacaaaatttaccaagtaaatgcactgacttattaattccttgttgcatccactcattgaacttggaattgcact

SEQ ID NO: 353106 - DNA, 638 bp, Cannabis indica
ctcctccgacatggacaagctcgaagctgaattacgagctcatgaacggaatttgattgcaatgggacctcctggtattgcaaactttaatcagaggaagaggattaagcatgaaggctctaacaaagctgcttcttcaagtacaattatcagacatgatcttctatgttcgaattgtaatgaaaagggacatcaagaagaacgatgtccccggcttctaaacaattcaaacgaaggtaatgcttttgtctttgaatcatgtgttttagagaatgacaaatccacatggattgttgattctgggtctactaaccatgtatgttcttcattgcagctgcttgaaacttgggaaaatctgcttccagaagagttaaagcttaaagttggaaatggcgagttagtatcggtcgaagctagaggaacagcccgtatcaagtttcaacagaaatttttacttttagaaaatgttttatttattccaaactttagtagaaacttgattagtgtttcatgtttacaaacacaatcttatatattgaatttttcgagttcttatttcaatttctcgtaatggatttcaaatatgtgttgctcacatggaacaagtgttgggttttgtaccctaaataaaactcatt

SEQ ID NO: 353107 - DNA, 744 bp, Cannabis indica
tgtctgtctggttgccattttttcatttgtggtatgacaagaacttcaggaagttcttctggccagtttcctttgggatcttcaagttttttcttcagtgtatccttaaaggtttcgttgactgcttcaacttgaccgtttgcctgaggatgcgccactgcggagaaacttttgatgataccatggttcgtacaaaaattagtaaaggattggctgtcaaactgcttgccattatctgagactattttgtacggtggtgtgaactggcatattatgttcttcacaataaagtcttgaactttctttgatgtaatggttgcgagttgttcagcttcagtccacttagtaaagtagtcaaccgctacaactacatactgcactccacctttacctttgggtaattgtccgatcagctcaatcccctaaatggcaaagggccacagactttgcatctgtgttaactcgttgggtggagctcttggtatctttgaaatctctggcattttccacacttcttagcgtaggcttttgaatcttcaatcattgttggccaaaagtaaccttgccttagaattttcgaggataagctttgttcggcgacatgatttccacagaatccgtcgtgaacttcggataggagccgtgcagcttcttcttgagtgacacatctgagcaacggcatcgagaatcctcttctgtacatgactccctctactatgagataccgtgcaactttccttctca

SEQ ID NO: 353108 - DNA, 526 bp, Cannabis indica
aaaatcgaaatttatattgtaattacaaaactacattaaacgtcataaactcaataaaagtatttttagttcataaatagtaatattatgtacactacagactaaaaaaaactacaaatcaacagcagcattgtcgtcatcaccgggatgggcaaactgtgaggaggacccagcagcatggccaggagactaaaatggtggaatcggtagaatcggaggcatcttgggcatgttaaatcctgaaacgacgttggctaattggatcacttgttgttggaacgcactcatgattttatctttattcatcatcatctgttgttgccactcgttccgtgctttttgctcttccactctccgcttcagtgcctcatattcctcttgagtgacagtgggctgcccagagggacctgccctgggagtttctctttttgccctcgtcttaagtcttggcaattggccaagttctctcaggtggtgtgaccgctcacacaacacctgtgtcataacatgcatatatgtaggaaat

SEQ ID NO: 353109 - DNA, 709 bp, Cannabis indica
ggaaggagccattattatttcgctgcacccactgtaagatttctgaaactttatatgtgtttatttacattattttagatattcatatttaggatgttaattaacatacatggtagtaaatctagatcctggtaaaacatattccaacaactggcctaatgatttaatttcatgaaatatggatttaaaacgatgtttgtgttgatttggatagtttcatgatggtttatgtgcttatttgatgattttatggaaatcgcaatgtatgttgtaaaatatattttatttcgttcaagaaatatttttactgaaaagtagacaaaaaattaatgaatttaggcttttacaaaactcaatttgaattttttatgaattagttatgattttttgaatccggacgaaaatatttgaagttgatgcatacacacgagtgcgcaccaagggagacactcggcaccatcatgcgttttgagacagcctgaccggggaaactcggacacgggctgtctgaaatcgtgtcacgcagattaagccattgaggtgcgtgcagcctctgtctcggtcagacaccccacttccgcgcgcgcaggggtgtgctatcaccaaacttatttttgtcatattttttgattcaaaaatcatttttcattgaaacaaaattcaaattttggtagaattttgtgtagaatctaaattttcaattaaaaat

SEQ ID NO: 353110 - DNA, 615 bp, Cannabis indica
gaacactagggttttctacgtggttttgtagttaaaattctgcatagtccacaagtcaatctcattcagatttgtgagtattttttagggcctctttcatatgagttttttttttcgtcccccttcttgatcttgtctgccactatttataattacatagtgggcaatgatttacaaaagttgacaataattgttacaacaattattccctcaaatcatgggatttggttacaaatcaaaaggtaaatgaggcctttattatattcacacaggtatctcgcttttattgggccgagatgaacccgtaattaaagatatacggtaaaccttattccatagggatgtctccctgagaatggagccaagttaattttgatggggagcagttgcttgtcatcttacttcccaagactaatattgttttgactctgataactgtattttctggtgtcgagatgatcttccttgcatgcatgccatcttctagcgaaataaaaaacctcgctatctgttatcttgactcgccaaactatctacacttagtttgtatattgtataatatacgctaagtgtttttagtgtttattatttctcttccacgcagcgaggttgagg

SEQ ID NO: 353111 - DNA, 736 bp, Cannabis indica
gtactatgccaacaagtttcaaatattttttgggcctctctacaattgcacgtggtagttgtctttctagcattcttcctcacgcctacatcccctcaaggataggcaaaccaggttcacctctaactgagatgaacttggctctaataccgattgtcacgggctcacttttttaggcagtggaacgcccgtgcagcaccttgactcctctaagccaaggtcagccttccaaccatccgagtaacaatgggctcattttttgcacgactgtgtgcctcgtgcacactttcgtctctcgaacaactcccactgagtcatgctcgcaagcatccatgagtgcatccatgcatcgagactctctagccaagatactcacactgtccataggttttcactatgttaagacaaatcccaacaccgacgctcacatagtcactcatgaccaaggtagcatgtgtggcaagatgccaacactaagccaacgtgccaacgcttctatcatgccttattcagtactgttcgaacagtctccctcatcgtccaaggactcccatatgtcaatggaccaatactcaaggcgccatgcctccacgcatgttggcaggccctcgagacaagccgttaaactagcagcatacgttaaacctctgtctctttctagcatggtgcatccgtcccatgcgcgtatgcaaactagcccacgaatgactacttgtgtcatctcgtgttgagactc

SEQ ID NO: 353112 - DNA, 1900 bp, Cannabis indica
catgtgaaccatggaacataaatgatttctgatattttattaattagtaaatctgatcatattgaaatggattttatttagggtagacaacccaacagtaccttctttgactcccactaggagtaggagtttagaaacattgtgagtaccccatgttgaaccctgaaccttgtggcctaaaatgatattgatactgagactgttggcctgattggggtgtgaaacagtaggaggaagaccgagattggttggtcttgggctgtccatgaaaatgagtagaccctacatagctccctatgtgtccagtgtgaaatgcttgaaatctttattgtcattgtggacaatctttcttcttatgaccttgttgaccacaattgaaacacccgtatggtccactacgagcatttctagatgaaccactactagtgctacccccactaaattgttgtccttgggaccactgcccttgattcttcttggtcatctttcggtcatttcctttttctctgcttgtgttcttcttctcattcccgtctaaatgagcctcagtttgcaaggctgctgtcacacactcagttaggttgttaaaggtgaaaggggctattgaaccacgtatcgcaggccttaaacgacgcatgaactgttcaatcaccaagggttggccaacaacaccaggatatgcataagaggagataactctacaaacttcatgtgaaactcattcacagtcatatccccttgtcttaaatcatataatactttaattagagccctcatgtgagatagactaaaatattgctccctgaaaactttatcaaaatctcaccaagtcatcccatcaattttcattgtcctggacaaggtctcccaccaatctactacaccatcctctaacttggacacaacaaaaataacttggtattcctcaagtgttcctattgtgttgaaaattttctttatccgcctcaaccacctttcatctaccatgtaatcttgtccaccctcaaactcaggcacttggatccgatgaaagatctgaaaatgatgactctatcgagtggcaggatccatctgttgagcaggaactgctcttaaggcctcgagaagagcgttcctagggaattcagcttgtggaggttagacattagctggaggggcatcttctccaaccgttctccttgtcttccttccttttggaggcattttcttagatttgagaaccaaaggctaatcagttagtaagggttggatgctaataatataatatgtcttatacatatatatcaagatacttattactatcatcatttaaaataaatctaaactatttggtgacacacttcgaggtaattaaacccggtgctctgatactatatttctgtcacgacccgagccctaggccgtagcagatatgtaatatccataacttgggcggtcaaaagtcacactttgacccttgtaggaagatgacgcttataaatgatcttttaatttatatcacaaaatacttatttaaaaataatagatttaactcctatatcgataagaaaatattagtaataaaatcaggaccactcattcatataaaagaacaataatatccccacagttatgtagtcaccgaatagatagatttaataagtcaataaaataccaaaataatgtctagcatctatcactcctcatttctaactagaacaaagctaatttaagtcatccagaccattcattccagcttaaatacaaaataagtttcattggaagtttaataagtagaacaagactaaactaataacgatcgactttcttcctcaacggtatcatcttcatccactagtatcaaactgagttcctagaatgggagaaaataaggggtgagcttataaagcccaatagaaaa

SEQ ID NO: 353113 - DNA, 644 bp, Cannabis indica
ctttactttaaccaacactgaaagaacatatcacttatccaagctgtaagtaaactatgttctagattcacatatcagttaaaccctgtgtattgataaatctaggaatatatatttaatcacataatcttgattactttgcattgtgctgaccacacagtaaacaagaatataaatgtgatacgggtttggatgaatttataaatcaaataaagaagtaaatgataacatgaacaaaatgacacacaaagtgatgaaaaatacttattttctttattgatatttaaaagataaagattacattgaaatggagttttatttagcgcataaaacacaaaaaactcccacttgaactaatataaggcaatcagtacatttaaattaatcgtaagttctgacggtgcctttcaactatagttcctgctaagaccttggtgaatggatcagctaggtcgtcctctgtgtccactttttccaccagtacatcccctcttgccacatattctctgatgatgtgatatttcctttcgatatgcttacttctcgtatggcttcgaggctcgatactgttggctatggctcgagtgttatcacaaagcaaaaccagtggtttttccattacagggacgacaccgagtccagtg

SEQ ID NO: 353114 - DNA, 670 bp, Cannabis indica
agctcggttcacggttcagtaagcctgtacttgtttagtattttaaataattgtgaatgtgaaagcatgttaggaagcataatagattttaactaattaattattttaaagtgcattgccttaaaatccgtaagtgcggtagtaagtatgtaaataggtcgttgcctgaccaggctgacttactaactgacaggttagtcttatagaatggacacctggtgcattatggagagtcagaataaagtggccagggctagtaacggttggagagaatggagtccaagttgtccccgtaaccaaggtgaaagtccttggagggcttccgacgggagtgatggttatccgtcacaggctccgttggatttggagcaaaggtttgcaaaaatggaaggtgtgattcaacgacatgaagaagagattcagaggttgaaacacaaaggtctcctgtagtaactttaccacaaatgccaatcatttttgattcggtattaccagcgaagcatggaatggctggtaatcaagtggaaccattgcatggaaagatttggatccatgaatcttcagtctttcagggagattcatgttggaaattattttaccacgatcttagatctactcacaagtatgttgattaacaccctaaataggaactttctaaaacgatgaaata

SEQ ID NO: 353115 - DNA, 699 bp, Cannabis indica
tttacgattttaaaaacaaatttttctttttctcgcttctctctcgctctcccttaattttgctatttgaagctcatctacgatcttcaatggcttcagttcggttcaggtaatctcttcatctctccgtataaatacatacacacatatatatctcactcttactctttctctctctgaaagattttgagtttaatttctgaaatgaaatttagggtttgatctctaaaatgttattttggtatttttactctgaaatggattctgcattttttacctaatactattctcgccagattcgaagcttgccttggagtgtcgtttctaaagtattcaatagttgtttggaaaaccgaaacaggtatgattgatttcacatgatttatgtaaactttttttttttatgtttgtatttgtttattctattctgttgtgtatgtgtttgtagaaactcaaaaaaaaatcttaatgggtttgaataatgggatgagaatgctttgttgattaattggaatgctcgattcaaaggaaaaactttgataaaggacaatgcaggctcactcttatgcaattacatatcaatttttgactacatgaaaatgtgatttaatttacatatagccttaattctttgtgttaatgatgttgtgcatgtgtacccttttagaaactaataccagtttttgccttttgtaaaag

SEQ ID NO: 353116 - DNA, 608 bp, Cannabis indica
tcagtcacttctcttcgtttatccaattcttctctttgtttatccaattcaagcctctcttttgtaaggcggatgtattcttttctatattcttccttctcatcatcttttttctttctcttttcatccctttcgttcaccaaatcaataagattagtagtgttatcatctcaactagtgcggggaccatgcgcctatataatcaagctcccaataagtagttttagaatttacaaagcaaattctctatctattaattcctcctaactccactatagatttgaaatcgcactcctaattatatagaacactttatatgttctaaatatagattcactattaattatccattgtttcaattcaaataatcaatgattctctattgatgatctacatcaattaggaataattttactattctacccttcaatgtattttatccttaaaacacttagctccttgtaaatgatgtatttcagtgaactaatataattactgaaatgagtactccaccatttaatctcgtttggccaagctcaaaggaaattattgttggaatatgttttaccaagatctagatttactaacaagtatgtttcattaacatc

SEQ ID NO: 353117 - DNA, 827 bp, Cannabis indica
atacttgtgagtagatctaagttcccggtaaaataacttccaacataagattgctagcaataatgccaagcttggcccccaagatagagcaataatgggaggtcggacccgttgtaatagatggtttataaaaatatttgtcaactaatattagatattgagtttatgtaaaattaatcattctattatatatgaggtgaatcctaaataagactatagtacaatcgctctaagaaatggtaaagagctagaagagtctgccaagaagcttattcttgaactgaagattgaggtttgagaatgagggtttagtggaagaaaattaatgttacttaaaataatgataacaatcaactacaagtcgactatgagaattacgttaaaattctatatcctcaatggctcaaaaagaagaaacttgacaagtagttttcaatgtttcttgacattttacggaagcttgacattaatataccttttgcttacacacaagaacaaatgtacatttatgtaaactttgtaattatttgaaattcaactttattaataatttaagttcaaaattttacatcaaaaatagaagttacaacatcagtctactggtagtaggatcgcaaatgttccacattctagtggctctttattagcgagtcactaagccgagctaatttgtgaatcccggctcctactatttcttcgattacataaggacccttccagtttgggttaaatactcctgcagatgcgtctctcgtatttgcaaatactcgctttagcaccatgtctccaacgttgaagggcctcttcttcacttttttgttgaagta

SEQ ID NO: 353118 - DNA, 521 bp, Cannabis indica
tgtgtgaagttctcacagcgatgcggtaaaaattttcctcaaacaaacttttaaattcttcccaggtcattacactgacatcccgggtctaacccacaatgtctcagtagacgcgggcatggtcttgtaacataaaggctgcacaattcactttctcagttcccgttacccccatattatcgaggatacgggtaatagtgctcatccactgctcgacctttattttatcaatacctcccagaaaagtcggaggctacaacttcaggaaccgctcaaataccgagtctctatgcgacataacaaacccctggttacccaccactggcacaggtgctggtggtaacagttgatcaacagggacagccagtgctggttgcctcaatcatcacaactcttctgcttgagaaagtatgacacttcgcatttcttgaaacatctgctactagtcagcaggaggattagcattgccaacccccgcattatcccccatattctacagaggtggaagcggtgccggtgga

SEQ ID NO: 353119 - DNA, 621 bp, Cannabis indica
gtaaattggagaatctcaaaaacctacgtcccacctaaaccctaacatttaacgagattcaattaagtcctagaattgctaaaaccaaatgaagtaacaaaggttcttactaagaaattagtaatcaaactcagaaatacaacataaaaagcatgtaagaaaataaggagaaaagtcacttactgttaggattggtttttgggacgatgagcggctctggaatctataaaacaacgaacagcgtgaagatccctttgaatgcttgaagtggaaatcaaatcgaatgaaacttgcaggagaaatgttaatgacaaagatggcatgcaaggtttcgggcaaatcggggaatggtttttctgctattaaaacttgaaaaatttctagagtttctgaaatggcaaaagtagtgcaaaggtggttccttttctcattttatactcgtgggataatctccattagatcagagaaacaattgatccaacgggtagaatttgaaaaagaagttgaaaagatggtcattaaatgctgatgtacctcgaaaccacaaaactgctagaattagaggacatgcatttttttaaaagggattatgacaaaaatactccctgtaatcatttaaaa

SEQ ID NO: 353120 - DNA, 1538 bp, Cannabis indica
cgcctactgctaggctcttcaagtcaaatgaagttaatatattctttttgggctgcatcttttttgggccacctaaatgtcacttttgcatttcttttatttttcctcttgctaacatttggatcaattgatgaattaaaagcccaatattttaattgttagcccactataaataattatcaatcaatttaggccttagtgattttgatgacactttgatgaaattctagctccataatttgactcatgtgataagtccaaaatatgcatttaaacattttacaagaatacacaatattgagattaacacttataaatgagaaactaaataaaattgataaaatattacaatttaattaaaaattaatctaacagtactaaaattaatatttatgcaaaactaaataaaacaaaataaaagtcactaaaataaataaaaaatacttgagaacaaagctaatttaatactaaaaaagatataaataactctatttattacaccgtaaacttaaaactttgcttgtcctcaagcaaaaagaaaaataaacaaaataaaacaagaggcaatatgatactaaagttggtgatctccaaatttcccttaaatatcgattagtgaacatagcttagagaaaaataaaaagattgtacaatgattgtgaaaaattcaagaacaagtttcattccaattttgattactccaagtgtgtgtgtgaaaagccttttctcacaagtttgcttgcaatttagatcaatttatgcaaatatgaatgaagcacaaaatctcgaaaatgacaaagtctcataggtttatttttcatctctctctccactaatgtagacaaacacaaaactaaagatcaaatggactttttcaagcttgtaatgtagggcttaagtgaaggtggttaagagaacccagggaacataagggttccgccaactgtaaatcccagatagccatcaattgcaggtcacggtatgacgactcctgtggatgaaatcgcgcctggtgtgcaagagaataggaataccagttcagaagccaaccagggcattcataacatagccgttccgcccgccacaaatgttcaaactgttgggatttatgccctaaataaaactccatttcaatgtaatcttaatcttttaaatatcaatacagaaacagaagtattttcatcacttctcgtgtcattttgttcatgttatcatttatctgttcatttgattttgttgacctcgcttttagcaaccgacaatgagtctattttataagcgataaatgatttataataacagatatacgataaacaataaaaaggtgcaggaattttatagaggttgaaccccgagcattgaaacaaagttttatttagggcataaaacccaacaagtcttagctcaactgcttttcgactgatcccttgcctagtgaacatatatcactatttatagggctaggaggcttggggaggaagagtttcccctctcgttacattgtgtataaataaaagattgtgggatcaatgctgaat

SEQ ID NO: 353121 - DNA, 515 bp, Cannabis indica
ggagttttattctctcggaatttgttcgattttaaagtaatcgaatctttccaagttcttctgaacattctctaaatacctctcctttttaaagcctttggctttgtaatccctaaggacctggttcacagttagctgcaaatcactatgacagatgagatttttaactttcaatgcctctcctatctttaagccagctattaaggcttcatactcgacctcattattggatgcgtcagactggaacctcagaacatagtgaaacttaaagccttttggagatattaatattagccttgcaccctaaccctgttcattggatgcaccatccacgtataacttccaggtttccgcatctcgctgagctggtggaatttcttatggagttatacctggcccttgatggaagttcgaggatgatttgttatgttgaactgccccagtttaatggaccattttatcaatcttccagaagcatctggtttcgataaaacttgtctcaagggctgatcggt

SEQ ID NO: 353122 - DNA, 559 bp, Cannabis indica
tatagaagagtggcaaacctataaatgtcatatttttgtaacttttttacaaaatctcatattttcacttctacatcaatttattattaatatctctatttattcactccttaatctcttatttttttaacttttttaatctactaaatacatcaatttatttttccttaatttactcatttttatattgattaatcacacaaatatatcataattccatagctaactttatttttttaaaaaaaaaaaaatgattaaaattttcaaaattgttactaaaattggagctaatttttttttctcaaaataataataataataataataataataataataataaatctacatataagattcaattaaaataaataaaacaattaaacactgatttattttttaagggaaaaatatttatatacacttataaaatatatatatatatatataaaaaaaaaagttggtgtggaagatttttttctttttttgttctcggttgaggactccaaattttaaaaaatctcacctcccttatatgtttgagtgcctatgtttcaat

SEQ ID NO: 353123 - DNA, 855 bp, Cannabis indica
agcattgatgtatcttgctaactgtacaagacctgatatagctttctctatcaatttgttagcaagatttagttatgctccaacatatagacattagaaagggattaagcaaatacttcgctatctctagggtgctattcataaaggatcgttctattataataattgtgggtcacaacttattggctacgtagatgcaggatatttatctgatccatataaagccagatctcaagttgactatttgttcacttgcgatgacactgctatgtcttggctgttaataaagcaaactctggtggctacttcctcaaattattctgagatacttgcaattcatgatgcaactcgagaatgtgattggttaagatcaatgacacaacatatttgaggaatatgtggattaacatttaataaagaaataacaacaattctctatgaagataatgttgcttgcatcgctcaaattaaaggagggtacattaaaggagatagaactaaacacatttcaccaaaattcttctttacacacaatcttcaagagaatggtgatatcaatgtttaacaaattcaattaagtgataatcttccagacttattcacaaagtcattataatattaacttttgagaagatggttcacaagattgaaatgcatcaattaaaggatctccatgaatgccaaaatgagggggagtaatttcatactgcactctttcttcattgatcgagttttgtcccactgggtttttccgccaaggttttcaaggaggcagttattatggacatctaacgaggagtgttataaatattaataattatatggatgtccaaagctaaatccagatcatatgtt

SEQ ID NO: 353124 - DNA, 635 bp, Cannabis indica
agcctgttgtcccaaagatcgtacgctccaggcctaactaccccgacatgtacaatcttcgtctactcgatctaactgttgttcatctttagttttgcccttacctacacatgaaacaaatatataggaatcgacagacttagtaagaaaaacataatattaataatcataaatataatctggattacaattaagcacccataaacccaactgtaatcatatccacgcaccctagacggtacaaagtctagaacgttcatactacaataccacagattacaatatcagcctatactcacactagtcgtactgatgtgatagtgtcgatagtatctgagccaaacatacatctatcgatatccaatataactctacgtatattgataccgcaatcgatgaaatctaacaggcttaataaatatgtacgtgatgtcgcccaattagttacactgcggtcgcggtagtaaacgggctatatgtcgtatctacagggaggaaaagtacactcaaaaggacagttagtaattttacgagaataaaatatgaaccttgaatgtgatgggaatattgagaaaataatttttttaaaaattaaacaagtaattaatatgagaagtgatcagaaaatgattatg

SEQ ID NO: 353125 - DNA, 802 bp, Cannabis indica
ttgtagaaatgcaagccagaatcaataaagaagatgaagagattcggcgattaagacagcagggtgctcctgcaaaccctgctccagaaattccagtagcccctgcccctgctatgcaggccgaacctgttgttgcaatgaatcggatggaacccttgtatgaaaggttccgtaagcaggcacctctagttttcctgggaggtctcgatgtcatgaaagtcaagcaatggctaactgtgatcatcaggatcttgaactttatcggtgtcactagtaatgatagggtggcatgtgccactttccaatttcaagaagatgctttggtttggtgggacatggtgtccatgattcatgatgttaccacaatgacttgggagaaattccaggagctgttcaatgccaagtactataatgaggcggtcaaaagtgccaaaagaaaagaatttactctgctgactcagaaagaaaacatgagtgttactaaatacacgactcagtttgatcgcttcgcaaggttggcctcgagaatcgtgcaaaccgatttcagtaagaaagagaagtacctggacgggttaaatgcaaaaatcagacatgacctaatgattactaacgatgacaacaccacctacgctaatatggttgataaggcattgcgagctgagggtgtagtgaagtgcaccttagaatctcgagagactccggttgttggcggggctcctactcttcctacatcaagttttagtaggggaggtagtggctcggccactgatcagaaaagaaaggcacctactgcatccagtgg

SEQ ID NO: 353126 - DNA, 669 bp, Cannabis indica
ctctctctctttcggttttgcttggggctgctagggctgcgatttttctttgcgattcaagtaatttcagcaattcttagagtaattcaagttgttggtaagatcattgtagcttcctctttgttttcttgagtattaagaaaaagatgataattgcatgctttggatttctatttgctgcagctgttgtttgtgtttgttgttgtgttcatggatttatatatgattaatggagtggaatagaataagttgtgatgcatgttagttgttttgattcaagttttgaagtttaactcaaaacttaggatttttatggtgaaatgataaatcaattgctgtgcttgttgtagttgattgttgttgttttcagaggcttaattatgcatatttgtgtagattcaagcaggttttgatgcatgttagtggggtttaaccaagcttgagttttgaactcaaagcttggagctttaatggcaattttggtatctgtgtttactggattgttttattgctttgaaactgttatttggggtatttagagcaggtctggaaagtttaaattagtttggggttgatttggtcgagttatggaattttgaaaaattcctgcactgaaccaaaatttcggttcaggatggcctgtaggaaccggaattccggttggtgttc

SEQ ID NO: 353127 - DNA, 513 bp, Cannabis indica
tggaatttgacttagtaccctaaaagtagaaattcttagtagctaaaaaataataagataattattaataataaaaattttatttatattattattatattattaatattattattgttatattattataatattatttttttataaacttattagttattgtttatattatatatttatattacatgttataagtttttatacaataatatgaaatagaatgaaccctccttctcttttgacgaaaccttcttctccttctatttatttttttttcgatttttaatctgaaatctagcgatttaagtttcggtagtagcaggatagcgaatcattgaagaatgagtgtttaaggtaaggtttaatttcgttttaagttagaaataattggtttcgtgtaggggtttcgtaaattaaaataattataaaggttctgaccttataagattgttctcaggtaatcatgggactagttccgatgttttcttgctgaaattgaggttattttgagtt

SEQ ID NO: 353128 - DNA, 1212 bp, Cannabis indica
tcctgacgcaggggtagacatgtgtggttctgaaaaaagaaagaatccagtagttagaccccaaaccaaaccctaattttaaaaaagggaatgggggtcccctaaccgctggaaagatgccccctccggatgtctgccaaaaatggaaactcaaaggactttccttagcaaacatcgggtgcaaaaatcccaaaggcagcaaaagcagaagaaaagcgaaaaacgcagaatgtgggagccaaaatcgccccatgccctaaacagtcttttgacagaggggtcgattctaaagaaaaatggaggaaaataacaaagacacaaataaagaagattctacgcgttatacaacagactcagtcagagttatttcccagaaatccaacactcaacacagaagttctatcctaacatgcaaacaaacgatagaaggcacaaagtgtccagagaacttacatgaaagttgaaggctgggggtcggtgtcagtcgacggtataaggtggattgacaatgacggaggaagagcaacaagaaatctgtggtgtctgaaatcttttctctcaaaagagctctcttgcgaaaaaatggcaaagtagtgaaagtaaccaaatgaagggaaaaggcttgcttttataggccagaacgggtacaaaagcagctgtgatcaggcgtcatcgtgcggtgagaatcgcaatcgattcacattctgcagatctaacggttgggataagtgctcatcagggcagctagaaatgcttgagtatttgtctgacaccaattgaatgcgccggatcattaatggacaggaaacgaatcgttgcctgcaaaaagcaataaatattaatgttgactgtcataaatgcagcccacgcgcccgaagcacgtgccaggaaatcaatgagacagtcggaggcacctaagcaagcctcgtttacttcacaccaaacgaggcttggggggtaaatgatggccttaatttcgcccaaaatacgtggccaatatgacaacgacacgtgagtttgagaagcacaaccattagataaatcgactaagtaggtcggcatcaggagtgtcaacgagaatatgctatcctggtggagaggtgaaggctccacgtactcccggagatcaggggattgccaagggatctccgggaggaataggaccttatttgaacagccacctctcatttaatgccgcatgggagaaaacgt

SEQ ID NO: 353129 - DNA, 511 bp, Cannabis indica
tactatataaaagttttgggcctagttcgggtgtgccctagctacgagcttagttcgccttagcccaaggttgggcctgatcgagtcctataaattttgatttaataaataatataagaaattgttaaccacttacgccacatcaatatggtgctggacaacttaaggtgtttaagagcactcacaacaacttctctaaaatatttcataaaaaaaaaaataacaacttttctaaaatagaaaaattttaaatatttttttaaaaaaaaatcatactaaagataagtacaccaaatgctttaacctattttttcatgttaaagtatttttaaatttactattcatattctacatttatagaatagtattcattactctaaacattttttataaattattttgggtcttataattatttttatatggggatatgtgcatatattagtattatatatttaaaattaataaaatatattaaaattaaaaaaaaaaataagtgatgtatttaaaa

SEQ ID NO: 353130 - DNA, 629 bp, Cannabis indica
cggttggttctagtgtaccagaattggtggatcggttgctagcaggggaaatttttgggttttttcttcaggatttggttttggctcggggttgtatccagtatctattgtaggttaattatgtgtagtatgacatgttatggggtgttggagattaggtgttgtcgggatttaagaatttggattttcttagagattttttattaaaatatttatcgagagttgttatcgtgacataggacccgggattgccaagctttgattccttttagaagggatgcacactaaacttctggactgaggtaagaaaagtattaaatactgtataaggttaatgttatgattattacagtttcgattaagatcgaaatcttgttatacgttgttgggacttaatcctaatcgaggttaacgatatgtaatgggtgtgactcgattatgatcgagggaaataataggaaacgattattatcgtttgactcgattatgatcgagggaaataataggaaacgattattatcgtttgactcgattatgatcgagggagataataggaaacgattattatcgtttgactcgattatgatcgagggaaatattatgaaacgattattatcgtttgactcgat

SEQ ID NO: 353131 - DNA, 724 bp, Cannabis indica
tccagggcattagttaaagtaagcttgggttgcatgtatggagtatgcattgaaagggaccgatattgaacttggattagatatgataaacttactgtaatatctattcaatccaatatcacctagttgatcttagatcaaatgacctcaatcctgagatgtttaggttctagttcagttgtattatttgtgttcttcaatctattcattaaagttgaccaatggatcttctcgttacatatagattaaggaaattatagtttaattgagtgggagtgctaatcatagatacaaaatctatagcttctatctgaacatagaagtgaaacggtgatttcctttgagcttggctaaatagagataaatgatagagtgctcattttagtgattatattagttaactgaaatatcatttatatgctgctaagtgttttaaggataaaatatattgaagggtgtaaaggtaatttgtccctactcaatgtaaatcatctatagaggatcattgattattaggattataaaaatggataacttatagcgtatctatatcgtggaacatatagagcgttctatataattgggagtgcaatgccaaatctattgtggtgcaaagagggattaataagttagagaatttacttggtaaattttagatctgcttgcccacttcatggccgcccattaggtgtcctttttgctattattttatcattttctattc

SEQ ID NO: 353132 - DNA, 548 bp, Cannabis indica
ggtaaaataatttccaacatacgggattggatgcaagtgcactagcactaatgttatcacagcaagtgatggaaggcagtgacaatggaaatttaagctctttgagtagagattctatccaagaaatctcagctgcaacgtgagccaatgcccgatattctaattcagtgcttgatctagacacaaccgcttgctttttggaagaccaggacaccaatgtttcacccagatatacacaatagcctgctaccgatcgtctgtcatcagggcaagatgccgaatctgcatctgagaaaccagttatactgaggtgattgctgcagcttatgtgaagtcccagagttttggttcccttcaaataccttaacactctctttacggcattccaatggactgtagtggggctttgtaggaactgacttagcttatttacagagtaagctatgtcaggtctcgtgtggcataggtactgaagggatccaatgatgcttctgtaaatcgagggatcttgcataggctctccttcatttatgtgttgggttttatgc

SEQ ID NO: 353133 - DNA, 795 bp, Cannabis indica
gagctttaatgacacttttgatttaagggcatggttttgatttctgttacgttggaactgttatatggatgatatatatgtgtcatatgaagtttggaatgaattggttaggttttgagttagtttggagagtttaaagttgaagaaaatcgtgttcctggcagttcagaaccggaattccggatgtaccaaccggaattccgtttggttagttttcggaaaagtcgaatttcgtattttggccataacttttcactcgggtgtctgttttgtacgttctgtataccatttcgaagcttgcgacgagctctatgatatggtgtatattttagagccaaaatataagtttcattttagtgaatttttacctcaaggtttggtaagaaaccctaggtattcctttacagttattaagcagtgttttgggataaacacttattggtttatcatcgttatgacatagggcccgggatgatcgatcgttctccaagcaggtcggccaacatacctaaaccagaatttgaggtaagaaaagtattaaatactgtataaggttaatgttatgattgttacagtttcgattaagatcgaaatcttgttatacgttgttgtgacttaattctaatcgaagttaacgatatgtattggatgtgactcgattatgatcgagggaaataataggaaacgattatcatcgtttgactcgattatgatcgagggaaataataggaaacgattatcatcgtttgactcgattatgatcgagggaaataataggaaacgattatcatcgtt

SEQ ID NO: 353134 - DNA, 773 bp, Cannabis indica
gtaatgtgattaatcatatccaccatttattattatgatataattttgtaaatttacattaaaatgtaattaaaaaaaattataaattgatatattatatgtattatgtacataaatgctacataaataaaatctcattaatttttttttttttttgcttcaagactccaatattatttacttattatgaaatatacttgcaaaagattcatataggctaataactatataaatataactttaaagctaatacattcttgataattaaaatgtaaatgattgttgataatgctatgtgtgtaaaatgttttaatgtatatatcatcaatctttttatatctttattttagaggataaaagtaaaatataactaaacaaattgtatgacaaaaaataaataagcttctttaaaataaaataaaataaaagagcttatctgttaacaacaaaaaaatttatatgatattaataaaagtttgaaactaatagattccttatattaaaatataatttgtataaatattaagattttttttatttttactatttaaagccagtttttttgttttgtatttacacagaaatacacggagcaacctaaatagcaacacaaaccgtaaaaataaaaataaaaataaaaattaaaaatagtatatggagtgattcccctaaatattagatagttgtgagttatttgtattgttatttatgatatgttttaaaatattgttgcccctaatttttcccaatatacgtggaccaaccgaataagg

SEQ ID NO: 353135 - DNA, 591 bp, Cannabis indica
taggatgttaatcaacatatttgctagtaaatctaaattctggtaaaatattcaaaacaactggcctcagaaccatgataatgatttaattttatgtaatattcatttaaaacgatgaatattgtttgtatgttgatttggatgtgttcatgttggtttatatgttaattgatgaatatttgtgatttatgatatttttccatgaaaataatttattttcgttctgaaaataatttatttagattcctagtgaaaaattaagcaattttggtttttacaaaactccattccgatgaaaattgagaaagttatgaactttggaagttttaggttgagtttgtacatcgagtgcaccagaccctcggccaaggaggtgctcgcgcgcggatttctcagacatccctttgtctgaactcggcatgacactccttcttacacgcccaggaggctgcaaatcctcctccagcaggctgcaggtgccgagaaaccttggcaggacaccctcgtgcgcgcaagtgataggttgcgtgcagcttgttgcacgcccaatactcggcaacacccactgtaacaccctaactatcttaggcg

SEQ ID NO: 353136 - DNA, 567 bp, Cannabis indica
attgagctgtggggtttatattactatcaaaaactacaatctcccactatcgttttttttttttcttttggaagatagaagatttagttataaaaaggaaaagtcaataagcatacattgaaaagaaactcttgcatctctcaccttaaacataaataactatccccattgacatagcaacactggtcaagttaacgtaacaaactacctaatatcttcttaatatttttttacaccctgaaaaaaagaacttgtatagttgcttatctccaaagcccgccataggcttaggcggtttagacccgcgcttagggcccacttattttaagagcttaattaaaaaaatatcttttaaaatatatacatatttttttaataatttttaaaaataccatttatttttgggctatttataaaaatatgggaaaataaatatatattttgatatatatggcataaaaacttaattcccataaatatgatatttttttttttaaaaaaagacttacaaatatgagaaaaagtcaagaggaataccacaaaaaactttaaatttgtatttttttt

SEQ ID NO: 353137 - DNA, 551 bp, Cannabis indica
tttattgtgtttttaaatttttgtgcgagtttaatgtgatttatatgtgatatctgtctaacttgtttcttttgaatctttatatgtgatttttgtgcgacttatatgcaattttatgcgatttattcacttcttaattatgtattacttgtgcgacttaagtgcgatttatatgcgattttcgtgcgattaatgaaacatttttttaatttctcttgtgcaatttcctgcgataattgtgcgacatttgtacgatatctgtcttacttttttcttttggaacacaacaaattgatgccatggcgcacttaatgagaagaataaggaacctctatctagaagtctacactcgaaaaggtgtagttttggacacatctgctccacaaatattctccatgtattggaattactatgaaggtgacaagagcaagatgaaatgggatgaggccgttatgcattatgtgcacgggatggaacatagacacttgccatgttgggagaaccaggattacatctactttgtgttgaaccttcccaaagagcaccactgg

SEQ ID NO: 353138 - DNA, 574 bp, Cannabis indica
taagggcatacacaacattttctaaccaacaactcacagaacaaaccattaacactcaagttgccattaaagctcaaagttgcataaaacttacaacaaacctcaaaacaagctgctaggatcccaaaacaactcaaattaaacataaaattcgaactccaaacaaccctaaccctaacatctcctaaaacgcaaaatcaactcttgaaaccaaataaaacttgagaaaaaccataactagagagcaactagggtttaccttgattaattcctccttcaatccctgctgaaaacacaaaatccagcaatgaattccccttggttggctggtacgaaaagagagaagagaaagaaagggttttcttgatttttttgactttttcctattttttccaaaatgagaaaatgatttcctcattccaagccttggctgaaaacaagtggccacgtgccacactcctaggcagccacccaaccccaattaaaattaccaatttgccctttaagttaataacttaggtgtttcaaaagctaggggtaaaatggtcaaattccataaccccgctcaatcccg

SEQ ID NO: 353139 - DNA, 1329 bp, Cannabis indica
ttgttaaattttcatttactttttttttcaaattcgaacaaaagccatcgggaaatttcacatccttaataaatttacaaaattggatcctgtcatcaggtttaagcacgtaaggtgcatgaggtttcaacagcttccccctctcatcttcataaatccacaacgattctctgacgcctagcttctttaaatcgtgtcttgcattggtagtgtccttggatttctcattgtccaatattgtgcccaataaactatcacaaacattcttctcaacatgcatgacatcaatattgtgtttaagaatatttgaacaccaatagtcaagctcgtagaagatgctttttttccgccaattatgattttctgcaactcgcctacgcttcacaccaccaaagagctcatgatttccagggaggtggggtgggagtttgtttacttgttctaatacttcttcacaagtaaaacgtcttggaggaggtcttctctcaatttgtccgtcaaattgagtatcccttctcattcgatggttatttggcaaaaatcttctatgacccacgtaagatgtcttaccaattactcgaatagaagatgtatcttcattgcaagtaggacaagctttatatccctgaccactccaaccagacaaataactacgagcaggaaaatcattcactgtccacaaaagagctgcacgcaacttgaagacagtgttggttcgacaatctctcgtatctactccgttaacccacaactccttcaactcatccaccaagggtcttaaaaatacatctatgtccattcccggtgatttatctccaagaataagaatggtcaacataaaattattatctttcatacataaccaaggtgaaagattacagttcgccaaaactacagtccacatactgttagcttggctcatgttgccaaatggattaaatccatcgacaactaaaccgagatgaacattttgaggttcactagaaaaatcaggatgtttggcatcaaagtccttccatgttgcacgatccacagggtgtcgcatcacaccctcatcttttaatttaccactgtggtgcccgtatgccttgaagtatacagtatcttcagtcgcgaaattaacggaaagtaacacatcaccttatgagacaccttttttgctcctgaattttctgaagttatccatctactagtgccacaaactggacatgaatctttatttgcatgttcattgtaaaataaacaacaattgtgcttgcacacatgaattgactcataccccaaccctaattttttcaatcttttcttggcatcataatagtttgatgg

SEQ ID NO: 353140 - DNA, 526 bp, Cannabis indica
aacagctagaatggaacatggaactccgtcgactttactggatgaagccgttgggtccatcgccggctgtcttctactcctccacgactcagtagagaccaccgctgcttttctccttcatcacttcctcaagcgctctctctctcctcattcttcgaatgccgtcattttcgtctctttcgctcaccccttctctcactacgatcgcatcctcagaaaactcgtactctctctctctcacttgatatatatagctctatgtattgtgtttattcctggcatacattttcaataattgaagcgtgttctgtaaaatgctggaattttgttggttcggaaaatatgacactgctaactaaacagccatatgagttttatatactcgttttatttattgttgttgtttagttgaagtaactcgttcaagggttgaatcaggttagtatatttgataatatatccttaattttagggttttgttgatttgagtgtcttggggaaaaaggattatggattatttggggtg

SEQ ID NO: 353141 - DNA, 528 bp, Cannabis indica
cccacgcgcgcagaaccgagtgtccctcggtcaggtgcgtgttcggacatgtcatggtaagagcaacacgcccaggggtgtcttaaacccctcatccgcacgcagaaatcgtgccagaagaggcatgcgccgagatctcccggcagatcaccatccttgcgcacgcggacagtaccacttgcaaatttttttcgttttcttcgattttttatgctatctcatggaattaacgtccgattttttgtgtaattttatattttgattcttacctttcatatttcaaatctaattatcagaaataaattgatttgaatttttaaaattaattttagatattagtgtaatttgaatttgaaaataggtaaaaatctatcttttttgcttaattttttatcttatttttaattttgattattttatcttattttttgaatttaaggtcagatattaaatttttttaaattattctatttttaaataatttgaccttatttattttttaaactaagattactataatcatgatat

SEQ ID NO: 353142 - DNA, 620 bp, Cannabis indica
agacttttgtggtcggtatagatttcacacctttctccataaagctagtgtcgccagattttcaatgcaaaaactaccgcggcaaatttcatgtcatgagtcaggtatcgctgttcataatcctttaactgacaggaggcataagcgataacccgatcggcttgcatcagtacacaccccagaccctgtctggttgcatcgcaataaaccacaaacttttctttctcagaaggcaaagctagcactggaggtgtaatgaacctctgtttcagctcctgaaagctagccttacatttgtctaaccatacaaaccgctgattcttcttagtaagcttgttaagagtgttgagatcttagaaaacccttccacaaaccgacgataataaccggctaaacccaagaagcttctaatttctatcactgtcttcggtctaggcgaatccctgaaggattctattttccctagatccaccttgatcccatctttgctaacaatgtgccctaagaaagacacctgagatagccaaaattcacatttcttgaacttggcataaagcttatgttcccgaagccgttgcagtaccatctgaagatgtaactcatgctcctcttctgattga

SEQ ID NO: 353143 - DNA, 694 bp, Cannabis indica
attgctgaatgctaggatcgtgggattgaggctgtatacaccgatagtggaatcatgtgtatgccacatccacgcaagttgattcctgagttatagggattgagctggtgactcacgaagtgcttggttgaattcgctaagtgttgctcatatctgcacggctcgttaagtattccgtcatggatatgccagcgaggcatcctgcccgacatgctcatctgaccaggtgctctaagttgatgccacgtgtcaccattcttgtgatgccacgtcagagtgccaattttgggataacaaagttcaaatatattaaaaataatattttattttaatttagggtttgaaaatagcaaaaatctgaaattggaaaaaaaatccctaaaaaattgggtttttggggaaggcagcagctaggctgcacgtgagccccaggaggttgcaaatcaggcctagcgcgcggaagagagggagacaccgagaattcttggcatttgcaccctgcttgaccgagaaaccttggtcaggtgcagggtactggggtgtctctgtgtctgagcattagcgccttcagacaagaattgtctgaagatgcgcgcgcggattgggttgtccgagcggtgtctcgtgcgattgagcacccattcaaccctgatcttcaaacctttatatctttttcaatttttaactgaattga

SEQ ID NO: 353144 - DNA, 659 bp, Cannabis indica
tatgcaaatatgaattaagtacaaaatctctaaaatgacaaagtctcataggtttatttttcatctctctctccactaatgtagataaacacaaaactaaagagcaaaatgactttttcaagcttgtaatgtaaggcttaggtgaaggtggttaagagaagtcatttttggctcaaatcacctaaaagcaccttaatttttctaagaccaaaatgagaccccacacttacttactcaaagaatatcccacaaaaaatttgaatattaatattgtcattatttattgccccaaaattttccaaaatgacgtggtcccaagagttatagcaatgccttagcataacatttttttctgcatctctgctccagaatgctaaagcaatgctataacacttagaacttccaacttctaaaaaaaaaacccttttttttgcaaggggtggcacaccccaaacttaatttagacactcttttttttttaataactaacaatacaaatataataatggcaatgtacacaaaatatggtaactctcccccaacttaaaattcaacattatccccaatggtgagaataataaaatgacacaatgaaaacactttcccaattaccactcaacaaaaattcctctccttccatccccttcatgacacaacaa

SEQ ID NO: 353145 - DNA, 560 bp, Cannabis indica
tattgtgtaagttattcaaggaatagaagcatatgcggacgaggcacatagtttgtgaaaaatattttcacattattactcaaatagttagaagattgatatttgtctgtaaaagtcagaaagctaagggaatattttctcttacaaatttcttagaatattttaaaatattctaacatattctagatttgataatgactcttaacacacaagacatcttgattatcttattgcagcaagcacaagcctctttaacattcccatcttcaacaaaaacactcgattgcaataatatacgttgatgagtctggctaaacattcatatctttcatttcatccaaaagtgacagtgctttagtttccatcccaactctatggaaagcctccatcaggttattgtagattgcaaaacaatataataacctctgactttcaagtcctcaaacagttccattgccagaattcggcaagatcatccatgacagaagatcccaacttcttcatctgcacaagcaactcataaaactcatccatttttttcatctctgcataagacacca

SEQ ID NO: 353146 - DNA, 1261 bp, Cannabis indica
tgactctcaaacaatccgactccaccaccacattcgtccatctattgtctttaatccaactcagagcctcctttatgccaattgcttccaccacgtggggcttcaacacaccctctttgagtagactcttagcttgtaagacaaccccagccgctgtccttgctatcaaaccaataccaaaacgcctctcattagagaagattgcaccatcaacattaactttaatcataggaaattgaggggcggtccaatgctctagaacttcaacatccgaaccattaacatcatgagtaggaacggtgttcttatgagcattataccaatcaataaagttcaatttagctaatgtcacaacctcactaacctcgggtcttttggaattccaaactaactcatttcgatgcttccaaatggcccatactatcatagaagcctcaagcttctcggacgccgtccacacccgaaggccctcttcaaaccaggctgcaaatgtcatggcagcagtagccacggtaggaacatgagacaaactccaacaaccttgcgcaaaggagcatcgcacaaggacatggagagaggtttctggagccaagttacaaaaaggacactgagtatcgatgggcacatgtttggttgaaagctgaaatctcgttggaagacaattagagtttactcgccataggaaatctagcacctttggaggaagtttcagctgccataattcatattatttatttaattaaaatatgttggatctaatattaaattctatcaataaccatatgtcactacaaaaaactggtagatttagtgataaatttttagtcacaacataaattgtttgtgactaaatgtaacttttattcacaacaaaatattatttgtgactaaaacatagtctttagacacaagatgtcactaatttagttttagtcacaataaatattgtgactaaaaacatatttaatcacaataaattgtaatttttgtgacaaatacctcatgccccggacctttagtcacaatctaggaataataatttataattggtcacaatattttcacttttagtaacaagttttgttgtgactaaaagtaagattttttgcatagagaaagcccattctcttacatcatgactacaccctctagtattattgatatacgacaaacacctcataaacacatatggcaatctttgcagtggttcaggagttttaccaatttttgttaatgggctcatgtgagggactgagattca

SEQ ID NO: 353147 - DNA, 609 bp, Cannabis indica
aatgttcgggttcttgaagatccttggcttccgagaccggtcacttttaagatttatgataagccacttcttccggcgaatatggttgtggcagatatgaaacttggggatggtagatgggatgaaagctttatcaatgcggtgtttaatcgtgaagatgcgaagctcatactttctgtgcctagcatgggatgggaattagaagataaaatcatgtggcactatagtaagaatggggaatatacagttaaaagtggctataagatggcaagttccttggttgatgagcaatatcagtccaatgacaaggtgttggtagattggtggaaagcattatggaggtttaaaattccacccaaaatcaaacattttgtgtggaaacttgcttataattggatccctacaaatgttacattggccaaacgcggtgtggctgtgaataagaagtgtgaaaggtgtactggccatgtggaagaaactgctattcatgccttatgggagtgcaaaaggagcaaggaattcaaggctgttagtggtttaaaggatgaaatgaaacggctgaagggtgaaaatgtgctttcttttttgatgaggatggctcggcaatgg

SEQ ID NO: 353148 - DNA, 591 bp, Cannabis indica
taaataaagttaagtgattatgggtttctttttgtttttttttttttacatttatatgggtttttttatgccatatttttgtaaaaaaagatagaaatcctatatttgtaaacaataataagttttgccggagaagtcactgtcggagaagttgttggaaaagtcaccggcgttagagaagtcgccggaaaaattatcgacactagaaaagtcgtcggaaaaatcattgtcgtcggaaaagtcgccagaaaagtcaccggaaaagtcacagtcgccggaaaaagtcaccagaagtagatgtctcaaatataaagaaaaatagaaccggttataattgaaatataatcggttctgtaatacaatgaataaaaacaaataaaacaaaataactcaaactaattataattaaattataaccggttataactaaaatagaaccagttatataatataatgaatacaaacaagtaacacacaataattcaaaccgattacaattaaaaaataaaggggaaatcagttcctaaaacactgaaacataaattaaaaacaaaactagttatagaataaaaaacctcataacacataata

SEQ ID NO: 353149 - DNA, 800 bp, Cannabis indica
ttgaatattaaataagtaaaaattgaaaggaaaaataataaaaatataattaattatggatgaatatttaggaatataaatcctgttagctcagattctcaattgttaatgttaattattaattttctctcttttggtgataacagattatcaaattaactctaactcttcttagatcattaaggtcctaaatcatatattatctacttgcattaaattcagaatctaaaaatcacatataacttgaagtaaattcagaatctaaaaatcatatgttatctacttaaagtaaattaatatataacttgcattaaattcagaatctaaaaaacacataagctttgtaaatactcccattttacatcaaaacttatgtttgttttattagagcattcttaatattcacttctcagatttcatattaggatcataaatcacattcaagataggcagtctaaaatatgtaattaaaacaaataagaacaagtcacacaatatagagaagaaaaactaataatcacattaactgaattaaagaaacatcatctaacattcatcatatccctaaattgggaatttagttcaaaaagctcatgttcatatccataaaaattgaaacagaaattaacataaagacatgaaagggagaagaaagaactagttggtgatcttgctccgggtcgccacaattacttcctttgcctccttcagttttagggtttagtatctatctcctttgcctctaaaacacgtaacccttatatagaaaataatgcagatatctttgaatggtgaaatta

SEQ ID NO: 353150 - DNA, 607 bp, Cannabis indica
ttatttttacattatatgagttgcgattgttctatcaggtagaaaaaaataataataaaaatgaagtttttcggccaaaaaatgaaaaaaaaaaaaaatttgagtttgacttaaatattttttatataaatatatttttgatatagtgtaaaaaaaaacgtattttttaatattttttcctaattaagtaactaaattaagcataaaaatgcaaatttttcttttattatttgttatcggatcaaaatctaatgatttaatattagaaaattttaatttaaaaacattaaaagcaattaaatttcaaaaatattgtaattttatttaatacttaatatatactttcttctataactttttaaaataattgttttttttcaatatagcatctcaatctatgtttgcaatgatgacaatgacatcatcattgtctatgtccatcacattttaattgggaaatttgacaatatatgcttaaaaataaatggtacactaaaaatatgctagcatattttacattatgcaaaatatacttaaaccattttttccttacaattttacccctaaaaacaaataaaaaataaaattcataacactttctctctct

SEQ ID NO: 353151 - DNA, 525 bp, Cannabis indica
agaaagttatgatttttttttttagaaaaacaaaattggatttcatggtgttgagtgggtgctcgtgagcaccaggcactcagactgggaagcccgagcgagcgcgtgagcctcggtcacgcaccctgctgttcgcccacgatcaccctgctagcgccaagttttctcgcccagctcctcctactccgcgcacgtccgaggctgcatgcagccttcctcggctgcgcgtgcagcctcctgggcagccacgtttttgccaacccaaaaatccatttttgtgggatgttttcccaaaattagactttttccaattttaaatatttccaattatggtcagatttaaaaatttgttaatttctttaatatttatatattatttaattgtaagattagatattttgatatttaacatattttaaattaaaagataacttgatcttttatttaaaatataatattaaaattatcttatatgacaaattaaataattaatagatttgaaattaacctagatatttttataga

SEQ ID NO: 353152 - DNA, 597 bp, Cannabis indica
tcgttcaaataattatactattttaattattaattaaaataaaaaactaaaatattaaataaaactaatagtacgtggcttggcacgtaacgatcatctagttttacttatatggctttaaattacatatataattatagaacatgacgactatttaataactttaaattacttgaaattcaattattagtattaaatatattgtaagcattaactttaaaattatatatagttataacttattattaaatgggtaaatagcattttgtaaaagttatcgattggactctctgttttgttaaataacaaaatggaccatgtatttttcaaaatagtaaaaataggaccctgaactatttttaatcaaaataaaatttaataatccgatctaaaggtgttatgacaaaattatttacattttctgtatttgttcgtattttcaagttggttatattaaaaaaaaaagttgtcaaaaattaagcttaaggtcctatttgtaccattttgggatatacgtggtccattttgtcatttaacaaaacagagggtccaattagtaacttttgcaaaacagaaagtccaaaataatatttaccc

SEQ ID NO: 353153 - DNA, 652 bp, Cannabis indica
tatatgtatgccttttgtaattttgtgagttttattattgtaaattctttttcaatatacactatgaataacgtgtaataaaatattaattatggtttgcgcatatactatagaatttattatgagtatttattgtcaatgttagaaattttgaaaatgtgcaattggctttatttgataattatgagattaaatttttttattgaatgtgttatacttacctatcgtaagttttcacatgtcaattatcgaaaattgtgattcatgttgatattttatttttcccgtattaatcacaattaatactaagatccatacatgcaatttagtcatcctgtcgatgattttaattgttagttaggatgcttggtgaaggaaacacattagatatcatgaaccacacaatcttttctacccaatcggtagtggattaactgaatttggttatgatatttgaagtagctgtccttacttgcgtaagagtcatatgttttgtttgaacgactctaggatgacatgatcattttcgtttagtgttttattcggaccgattcgtttttcttaaatagaccaacttgttttttttatacggtttcaaattcgtgttctatgttattacatttttattacaattaatgagctaaatactaaa

SEQ ID NO: 353154 - DNA, 520 bp, Cannabis indica
tctagactatattcataactccaaagggtaacacttcggggtggaagaagctattgacatatgtagttcattttttttaactttgaactctagactatactcaatacaccacagtatctgtatggcacgcattctttgattagacatggatataatataatgaaaaaattagcaattattagaacttattcttgatctcgtaattgttccaatttaatgtagtaataaaaattaataccaatgaagttcttggacatagtatcacagtaccttatatctgagtgggagaatttttaaaattctagcccatcattatttggatgacactagtgatagcatactataaaactttaaataaaactgagaaagtaaatctaaccattcatatggatagaagtaaaatatcaaaattatgaggatacgataggaaattttattaagtttattcgaatgacttaggaaaaatacctaatccttatgaaaagttttatggtatctttaatgattacttatttttaag

SEQ ID NO: 353155 - DNA, 955 bp, Cannabis indica
tgagcctgactaggcgtcccttcggttttaagctaattaatgctctaacaattaatattacgaaatttgatttctctcaccacggtcgacggctgcacttgatcatttttgatttcccatattcgctttttagagggaaacgaggcgtctgaggtccttttgaaatgattacctctttttgtgacttgcctataaataccaaagagcattggcacataaactcattttcaccatcattctttgctaagtgagttcagagcgaaaagagaggttttttggcttcaagtttgctgaagtgccttcatcaaaactgctcgttggcttgacgttgcttgaatccagacatttgactcttgagtaagttcttgatttcctttatgcttatttttgcatgtttatttttcgaatgcaccttcgactttgccgtagaaaatacattggaaaccctaggtttaggaactctgcgattcttctttgtcatggtttcatgcaattttatagtccataatgcttgctttctaaactgcataatgcctgtctttcatcttgcttcttctaagattcatgaaatttttgccctaactcaagaaaattttaaatttcttgagttttaacttttctttgaccattcttattctttaatctattgagtactcctggtcggcatatttgcttgtttatcgctcgatatttcggccaaacactcatcttgtgcattgtcttttgtagatgaacccaggtgagttttgggagagcgagcatcaaatcgaccaggacttgcttcaacttttgcacgaggaccatcctcgtctctgttccagcccaccttcttccagtgaaggacattctccctcaaatcttttatccagccatagaatgatggctcgtaccaagaaaacaacgcgtatggccgacgcgtctgatcctcaagtggctcagcacgccactttgccca

SEQ ID NO: 353156 - DNA, 514 bp, Cannabis indica
ttgaaagcttcagccttttctttttcactcaactcttgatttcttataaaattttcaggttcaggagattctccacatactttatctgacttgttaactgaagattcaattacttctttctttggaattatgtcatgtgaaatcatacttgctttatcataactattgcgagtataagaaggttcaactttcacacaaggggttgtgttatttgcaactgaaaacaacacttatatatgtcaacaacattattataattctcacttagattgttattatagaataatcgagttcttgattaattacctggtaacacaggggaatttggtactccattcttataaaaagtaacaacttcaaataacattatcccaatgttctgtctcttaacaaagacacaaacatcacctactttcaaatcattgtctctagcaaaggccttccaaccccactcgaatctgaattgcgaacgccccgcatactttctataatagtacctaacaggccaaatccg

SEQ ID NO: 353157 - DNA, 1002 bp, Cannabis indica
aacacaaatatggataaaaatttttacaatcaagaaaggagaaatagcaattatcattaactaaagataaaaccaatcaacaatcatcatctccctaaataggagtttagtttataacatccataatcaaatccataattaaaattgaaacaaaaaatgacatagaaaaattaaagagaagagaaagaactaattgaagcaattgagttgggttgccacaagctgctcttcaagtctcctcctctgtttctaggactccaaatctaaataaatatcaattttcacgaactcccctctctttaaaccaagtctaatctttaaaatttgtgaaattacgaaactatccaaaaatcctgtcgctggtgctttgccgcagcgaagctttttccaaaattttccaaagctctctaccgattcccgttgcagcgaagctttttccccgtcgcgacgggactaggcagcaaagtgacttgtttgtttttcttctcaattctttcaccacttgtcctcaactcttgtaaatactttctttaaacatccgaggacctgaaacaaaagaatcaagcgtaaaatatccctaaaactagaaacaaatagtgaacactaaccgaaaatacgacccaaaactaagactaaaattagcctaacaaattcttccaaattagatctttactcaccctcaagtaaaactaaaaactaagacaaagaaacaacgacacgacagataactgagcctccaaataattaaactaccactaccacctgtgcaacttcaatcaattgaccaaaccagaatttcaattcaacaactctaggaattaactcggatgcacaagttagaaaaaaaaaactatgtatagatgcaaaacacttcaattggaaaaacatatcacaataattctactcttaccaacgttctgccaaccaatgtttaatatgcttgcatgacctacctctctccactaatgtcaacaatccctgctcgtaagcaaaaggtctttt

SEQ ID NO: 353158 - DNA, 559 bp, Cannabis indica
agagagagagagagagtttgagatttctagcttagagatggcttaggcaccttaagttttcagtcagaggttaaagcctttatataagaagccttaaaccctaggtttacaatttaaatcccttataaatcgtatagttagttagatatttataaaagaccaaaatgtccttgattctagatattattcaactattttgttgggctttaggggcccaattctcaacccatcttggttgtccacgtgcaggagtgtcttgtggggcctgtagtgcaatccttggtcggccaggcctttttgctggccaggctggctatccatgatgttgtccctgggctggtcaactcctaagagggagctggtccgtcacttgattcccgtttgagtgtcggggtctttgttggctcggatgctgacttggccttccttttagtgagttgtgctgccacgtggcacaggttccgtttacgtaagcatgccatgtcatgaggacaaaaattgaaataacaatatctttttgattaaataattatctaataattcatttaattaataatta

SEQ ID NO: 353159 - DNA, 582 bp, Cannabis indica
ttagtcaagttttaatatcctcatagtttttaataattaattaatatattaatattaaaatagtttataaaatcacacatgtgacgttcctatggattagggctttacaacttggtatcagagcagccatagttttaaaggtcctgaagactagtcgaatatgtacattttctgcaaagacaggtcgactcatggtatagcaagtgtttatgttatttgctattgccttacctgtttagataattataatgaatgatgagaagaagaagtgtgtgaatagcatatgcatattgatgttgatattgtttgaattctaaatggttgaaggttttgggttataggatattggatcatacagcggggatctggctgtttgaaccgcgagctggaactcagggtaggtggtggggaagagcatcctccaccccctcaaaattgggaacaactgtttgctgccatgcaagagacgattaggcagcaaggggagagaattcgagacctgagagagtaacaagctcgtcctgcacctatactggcacctcaggtagtgccaccgaatatgggggatcgtatggaaccaat

SEQ ID NO: 353160 - DNA, 816 bp, Cannabis indica
gaaaaacaatctctctcatctcatgcaacctttccatgcattattattattattattattattattattattattattattattattattattattattattattattacgtggatccagcccagcatgatgatataacttttattttttaacctttttctttaaggtactatttttcactttttaccttcgatcgtgtgagtttgagattctttatttctttttaacttttattattattattgtaataataatgtcctacataaaggtaatttcatatattataatattgaaaagttaattttgattgtttcccaataatagtcataaaataacacatatttataggtaatatatggatgaaaaataaaatgtttggaagattaaggatgaaatttttttggaatttaaagactgaaatgtggatagagttattcgaatattcaaagaatttgtgaaattggcccaaaaaaattaacttaaaagattcaaaatgattttttagcttttgtaaatttgtaaattttatatagagtacatatgaggtcttttaattgagaatgctctgtatttgtataaattggttttttagagtaacgaaaacactaactaattcatcaaaaaataaataaatacataaataaagagttaattgcagcataattctaaatgctttctgtaacgtccccgtttcaagcttctattgggtccttacacccacggaatatggctcttatacatgagtacgtcactctggctgtttcatggactgacgactgaccctacagaccaacacgagtgtttccagcatgcttt

SEQ ID NO: 353161 - DNA, 571 bp, Cannabis indica
cgagaggaagcctcgaagaccaagaaagttgatgacggacaagagcttgcccttctccaggcaggcatccgtacagggactcctttctggaacaaactacaacaagagggggctgctagccttcaggacttccagaagagagtccaaaaatatatcaaccttgaagaggcccaaatagtggcctatggaggatactatcccaccgggataacagggtacatgcccggagcaccgccctcgggtactgtcccgaccgcggccccaccgatgagcggcatacgattctctgctactcccgaatatagtcagggccaggccttggcacccacatcatcttattttggaaatccctcagggataaatggacaagctccctcgcactccgctccaaccgttagcttggcagacccttcccagggctcgaggagtaaaagatcctccaaaggcagcacccggatggaggaggaacgccaaaagagggggtacactccacaatacacccagtacacggagctgacggactcccaagagtgtgtgtactttgctactaggcaaaatacgcactaccgga

SEQ ID NO: 353162 - DNA, 674 bp, Cannabis indica
tcaattaataaagactctcaaaggcattattgtggctgtttctggccgaggatgtaggcaaggtaattcatcattatcttgttagaacctcgttaaattgtgtgtgttcttgattcttgttaatgcttgtgatttctgatttatattgctgcatttacactacttgagttaacttggtttcattgatcatttttgtgttctgtttcatgttcttgctgaggtgttgtttcacaacaattggcatcagagcacaggtttcttggtgcaagaacagaatcaagaaagtgatccatggcttccgcacgctttgaagtagataagttcaatggagccaatgattttgggctatggagaatcaagatgaaagcatttctggttcatcaaggagtgtatcaagccattgataaagaagaattgaaggaattgggaaatgacaagaagaagattaaagaaattgaaacaaaggctcatagtgcaatcttgttaagtttgggagatgaagtattgagagaagtgtcaaatgaagaaactgctttgggattatgggagaagctagcctcaatttatctgaagaaatcccttgccaacaagttatacttgaagaagaagttgtacactctcaagatggaagattcgaaagaactcagaaaacaccttgatgagttcaatcgaat

SEQ ID NO: 353163 - DNA, 617 bp, Cannabis indica
ttcaacctccttggacccggtagcaaaagccctcgagaacatggccataaactgcgaagctaactccgcggggcgaggcagtatctcctcagtaggagtcttgtcaatcttcgactggaactcgtcactgacaaatttctcctgaagggacaatacgtggcgagctcgaaccgctgggtcgatcacaactttcttccctttctcttgaatgcccttagctgacctctttgaagaatctgcgacaggagtaaccaccacattgcttttcctcttttgaggagcgacaggggaagttgctgctgttccagatttcagcttgcagttaagagtaggtccggacttcaagaaagtcatttctgcaattacagcaaaaaataaggactaatactaataagggtgaaattctaacgccctagtttatgtatgcgataaactacctgatgatggtcgagaagtttgcttagaaagacgtttatcaattcgctcttgttgcttttcagaaggttccttgtataccggctctctccagagacttgcgttctcagggatcagtttgtgttctcgcagcttggtagtcgtacacaataatcgccagtcgcgatcttgtacaggaaggc

SEQ ID NO: 353164 - DNA, 505 bp, Cannabis indica
aaagagttttatttagggcataaaacccaacaagtagcacaccaataaaaggtggctcgatacttcaacaagcaagtcaaggcaaggaaattatttgtgggagatatggtccttagaagagtattccttaacacaaaagacagcacggctagtgtgctcggacctaactgggaaggaccatatcaggtggtcaaagttctagaattaggggcatataagcttggacggtatgacaaaaatatagagcttgttctagtaccaaggtattagaatggggaacatttgagaaagtactaccagtaaatgtacaaggtcggatgaccactttaagtacacaaagcaagaacatttacttctaagtagatggccttcttggcggatcccgcccaaagtttttgatgaaataattaagtactcaggtgggatgaccacatttaaaagtacaactttttttttctttaagttgcaatttttatgttaaatttagctaaagatcatattagat

SEQ ID NO: 353165 - DNA, 699 bp, Cannabis indica
acgactctctaaaggcctaacgttgcttttcatcgcttccaaacacaatcaccagtaaacgagaaattcacatatagcataattaactctacattgaaattaaataaatcttctgcaatattataattaataatttaatttcataattaaaccctaattagatgataattcaacatatcaacataggcggtctacaattatccccatgttaaaaggattttgtcatcgaaatctaacctgaacagctctggatgttgagtccttatcagactccaattcccaagtggcctcctccactttactatttctccagagtactttaaccaatgctatggttttgttttgaaggactttctccttcttgtccaagatttgtactggttgctcatcaaaagacaaatcttgttacaactccaaagcctcataacttagaatatgcattggatcagatgcatactttctcaacattgagatatgaaatacgttgtgcactactgacaatgctggacgcaaggctaatctttaagcaacctgtccaaccttctcaagatttcaaaaggtcctataaacctaggacttagcttgcctttctttccaaagcgtctgattcctttcattggtgacacacgcaggaaaacatgatcccccgactgaaatgaaatgtcccggcacttgggatctgcataacttttctgcctg

SEQ ID NO: 353166 - DNA, 858 bp, Cannabis indica
gattaagcataatgagtttttatcacagcaacaaaaaagcatgagtttttttaatagtagaaatctctttcacctctctctctctctctctcaattcctagggctgctagggttgggaattcttctcaataattctagtaatttttagctatttgataaggatctcaagccaaggtataattctttaaactcctactcttgttttcttgaattttaaggaaatagtttggcatgaattagagttttagttactgttgttgctgttgttgtttgaaggttgtttttgaagttaaaatatgtatgtttcagttgatttgaggtggttttaggggctgttatgtagattgagcaagctttgagtttttgaagtcaagcttggctcattaatggtgtttttcaattctgagcatgggtagttgttctgttgcttggaaaatgtttattggggtgtattatgcaggtctgaaaggtttggttgggtttggaaacgatttgattagggtttgaagttttttgatttttcttggtaaaactggctaaccagttttacaaccggttactcgaattttgtagtagggtaacttgaaaattctgcttgtcgtttcgcgtcagtttaaggtttctagatcgttggttccctgctagtttagggtatttccatattaagttacagtagataggtttttggttgaaaacctaagtcgcgtttgtgatttagcgagtcacttatgcgtgttgttatcgatgttatttaggagcctataattcgctgaggagttgttccactgaggttgaccgacacacctgaatttggaattgaggtaagattagtataatatcatgcatatgttattacat

SEQ ID NO: 353167 - DNA, 686 bp, Cannabis indica
gctaaaatactgatcgatgttgtgacatcattatggctacagtatgactagcatattgagtataggctaacattatggtcgatagtattgtctcatgaacgttctagactcagtaccgtgtgggacacggggattacggttatgatcgggtgtatgggcaccaggtcataacccgagttatttgtatgtttatgttatgcttttcttactaagtctgtcgactcacagtgttatctttatgtgtaggtaagggcaaggctaaagttgaggagccgtgagtacgagcaggtgaagattgtacatgtcagggcggttaggcctggagcgtacgatctttgagacatcaaggcttttgctgtatcgtcgctaggcgacaaacttttgtttatgtgtatagcaaacttttaaaaagtattttgtaaacgggatcctagaattttatatacgtaatactttaagtttttaattaaataagtaaattttaattattcacgcactactacatattaggcttttagtgacactatatagcgacactcataaaagtgtgtgtcactaaaaaattaagagtggtttttagtgacacacaacattagactctaaatgttcggtatttattacggggaatgtgtgtcactaaaaatatggagtgtcactaaaaataaaacccaaaatatataatttta

SEQ ID NO: 353168 - DNA, 686 bp, Cannabis indica
aaaatggaaccctaaacacacaagaagaagcttggagtgaacatgcgcgatccatgaaaatcccgatgggattttatgccctaaataaaactcatttcaatatattctgatttgttatcaatagaagattagaaatattttatgtttacatatagttattcatatttatggtttaatatacaatttatgttaaatccagaatatatagttatttacaattacagtaatgtcaacacaaatggaaggtaattgtgatgatatgctttaaaagataatgtctcatgattcatcactgcactagatttacactgatgtgatagtcagcgataaagcttacttaaaccttggataaatgttatgttctttccgaaaaattggcaaagtattctagtattggatgtatggagtatacattgcactgggaccgatattgatcttggtaaagatattacaatcataacgttgtatctttctaagtcaatattactggttgatcttagatcaaaagatcttaatcctagcatggttaggttcgatctccagagtgttatttatgttcttagagttgttagttaaagcctaccatttggtttgggtaacacgtacatcttgggaacatgatagtatacttgagtgggagcgctatgttggaaattattttaccaggtatcttagatctactcaca

SEQ ID NO: 353169 - DNA, 585 bp, Cannabis indica
tcatgtgcttcaagagagcccataagttcaggtgatagagtttctaaatctttagttttctctatcgtataaaccattgaatcatatttttctgtacaagaaattagtatcttctgtactatattcttgtctgaaattatttctccataggctcccatttgatttactatttctttaattctagaatagtaatcttttgcagtctcattatccttcattttaagattctcaaaatctcttctaagcttttgtagtctaattgtgtgtaccttaactgttccttaaaactcctcctgcagcgtgtcccatgcttcttttgtcgttgctccgcccataattcgtgaaaaaagaatgtctactatattgctgcaagaagtataatgcatgcgaatctttttgttgattatcctttagtgccttcttttgatctttcgaaagagatgtaatatctttcggaatagtgattccttctttaataattttttatagactttgtgattgaaaataggtccttattttgatggaccaaaaatcatagttttcttcgtgaaaaattggaagaggtagagaagagtgattggactc

SEQ ID NO: 353170 - DNA, 614 bp, Cannabis indica
agagagggttgggtcgtggtcgtggtcgtgggtggatggccggcgtgggttgttgggtactcgtcgtgggcaacgacgaaggtcgaagagggaaagacagagagagagggaaagaaagagagaggaaaaattaaatgtgaggggtattttgggtagaattttaaaatagtagaattgttttgtacaaattagtaagggatctaaagtttgatatgtggtaatttattagggctgaatagtgaaattttccttttgaatggcatttacaactaggattaggattcaaatccaattaatcctaatgccatgacagaaataagaaattcaaattttcaaaaaaaaaaaggtaaaagataagttttcaactttttttctttgttaatttatttttgaattccaaggactaagcaagagaattagaagtcctactttaattgggaatgcttgaagaatagaaaaaattacctaatattgttaaaactttatttaataattattcccttttaatttttaaaaattgtaggtttctttctaattttgaaaacctttatactttgttttctttaacaataagacatagatctgttttttttttttcaaaaatatcaacaatt

SEQ ID NO: 353171 - DNA, 477 bp, Cannabis indica
tcttccaaccagaaagtgaagagccatttgtatttgttggttcagttcggggatctcggatccggtgatttcagccatttcagctagggagttactacatggcggtcgtttagggtttctggctgtggtgatggacaccactcggcgagataccaatcggccagaggacatcacggtggttcgggaatttttgatgtttttcctgaagaacttccaggtttaccacctcagcgggagattgatttcgttatagatttggcgcccagagtggaactggtttccagggctccgtatagaatggctccagatgagcttaaggaaataaagattcagattcaggagttacatcacatagggtttattcggcctagtgtgtcaccctggggagctccaattttattcgtcaagaagaaagatggaactatgaggatgtgcatcgattatcgggagttaaacaagctaacagtgaagaataaa

SEQ ID NO: 353172 - DNA, 722 bp, Cannabis indica
cgtgggtattttggcaaaatatcactataggggtgaacggtcaccctttagtctcctcaactatcccttaaatgtcagtgtcataatgataactttgctgggtttttgtgcgcaaactagaactcaatttcaatgtaatcttaattctattatttattaataaaaggtaagatttattggcctcagaaattggccaaacggcaatggaatcgtattaaattgattcttgccatgtgttacacatttataactagataataaaagaacacatggatttttatagaggttagaccctcttagttagtgggtaatgacctattccccttatttgtattgatatcgagagataatactattcagatcattataggtgggatttgatatagctctcttcagattacaatgtgtgaattagtaggcagatctctaatgagagaaagatatgtccttagaggcgtgagagagagaagtaaagagccctatgggcgtgtagtagagagagaagaggattagggtttcagacttagagctttatggcttaaatgagacttagcctattagggttaagttaaggctctttacataggagagcttaaacactatttgaaaataaaataagagatattacatattaaattaataaatacaaatgaccaaattgccccttgaaagtagatatttttgtagcatcttagtgcactgtcaaggcccaacttgtagct

SEQ ID NO: 353173 - DNA, 931 bp, Cannabis indica
tccaagtccaagtcctagttccagtcccagtcaacttctggtttatgttccaatttttggtcactaggtactggttcgggtcaacttttgggtttgggactgggttcaggtccgggtgtgggttcaggtccttgtcagtgttcgggtcaaggggtgggtccaaatccagacaccgactacgggttttttttcaagcgctgggtccaaatccggatcctattctcgggtcccaatttggttccatttcttgtgccgggttacgagctggatcttaggttcaagttaaggtcttggtccggtactaagtcccggtcctacttccgtttcataggtccctatcctaattctgggtccaagtctcgattattatgtgggtttaggttccggtcttggttcgggttcaagtcctagtctcggttcgggtttaggtctttgtcagggtgttgatctgggttagagtttgggtttaggccctggtcctggtcctagtcctagttgggttttagttccatgtgcgattctcagttcaagtttgggtttgagttcgggttggagttcgattcattgtctgagtttgggttcgggtccggatttcaatgtaggtccagatcagtatcttggtgttggttcgcgcaatgggccttggtttacgttcggtctgagtcccaagtaccaatcccgatctgagtcaagattaagttctgggtctaaattcttggttttgatccaggtctgtgttcgagtttggctccgggtctgggtctagctttaggtcggattctaggttttagtgtttgagttcggctcctagtttgtgtccgggtttgtgtccaggtctggaccccgatctgggtttaggttcgagtccaagtccaagtttgggtctcgagtgcaggtccaagttttgctctaggttaggatctccgtccag

SEQ ID NO: 353174 - DNA, 1055 bp, Cannabis indica
tagggcacaaaacccaacagctcgttcaacccgtccagcatcagatttcctcttcctccccttcactggtttaggaatgaagtccttgggatagagcctgtacttcacaaagttatcctcggaggttaacttgatgatatgttgatcttcccccagcagtcaagcaagcttttgagctctatcccagagagcaagagtgagaggagggcggtgatatgtcagaatctgctgaaaccgagtgcgagtgatgctcgtgccgtccaccatgaagtactcatcagcaaaatgcccaattttgctgatggtcgaatcatcggtgcccgtcaaccacttgaagtctggttgagagaaatagatagaagtacccaaacctgccttgcttaggggtggacttcaaatcaaaaaaccagctgacttcatgaggagaaggcataccccacttctgggaagcgtagaggacgaagagggcagacagatatttaatgcccttaggagtgaactgggtcgagcaaaagtcaaagaagtctgccacattcttgaagtattgatgcaaaggcatcaatgccccttgctcagcatgggcacccgaccaggtacacatccccctttcagggtttgtggcccaattgttgtgggcgggaatgtagcaatccaaggtgcctaggtatccgccttggtcgagagtccgaaggcgcacatcagtaaccctagatggaggggttacccacctggcacccaaggcaccttgccttctatgaggaactgcaggagtaagttcctcactgatgtagtccacgccctcaaccaggacgtctccgtcagcatcgactggctccccagcctcattgtactccccgtaattcgggggtacaacctctacctctactccacctcagaggaaactgctaggcgaaacatcatccggctctcgtatctgctggacttcacgctccccttccatgatcccacctccaccctggaccagccttgatccctattcggcgctgggcgagagtggcgtgccgagccacttgaggatcagatgcatcagccag

SEQ ID NO: 353175 - DNA, 595 bp, Cannabis indica
acaaaacccgtagtcggtgtctggatttgggacctagccttggacccgaaccctcacaaggacccggacctgaacccagtcccaaacccaaaattggacctgaacccgtaccctgtgacccaaaataagaaccaaaacgggcagttgacctgcaatggaactaggatttggtcttggaatcataactgaaattcgacctagatccagaaccgtaaccggacaaggacccggactccaaataacacctagacccaaattggtagccggacccggatcccaacccaaacctggacttgggactcgaacctgaacgtgaacttagacacacacatggaaccagactacggacacagaactacggtcgggacttagaaccgctccccagtctcgatcccaaacccaaactcagaaatgggacctgggacctgaacgtgaacaagaccgagacccgtgacagtgatctagatctggactcgggatttgggtaacggggattggaagagaccagtgttcggtgtatagatctacgactcagactaggaccaaaacccagacgaagaaaaaaacccgaccaaaccttgacctgggacccaaa

SEQ ID NO: 353176 - DNA, 993 bp, Cannabis indica
cgggagcatgtgagacttatatgtcttctccgggaggtatgcctaaggttaatcctgcgcctaaggagacttagctgatttattcaaacgctaaacccttttcctctacgtgtcatcatccggttggtccacgtattttgggcaaaatcaggggcaacatttaccccccaagccttgtttagtaatgaagtgaacaaggcttgcttagatgcttccggttgccttatcagcttcctggcacgtgcttcgggcgcgtggtggtgtattaatgaccatcattactgcagttattcgctttttgcaggcgtcgattcgtttcttgtccatttattgatacggcgcattaaatgggtgtcagacgggtactcaaacgttttctaccgccttgatgacgatttaatccaaccgttagatctgtagaattcgaatcgatcgtcatcctaaccgttcgatggtggctgatcacagctgtctcacgcaggttctggcctataaaagccagccttcttacttcatttggttactttcagcatttcaccaaatttcttcagagttttccagagagaaaagaaacatcaaacaccatagatttcgtgcttttattccttcgtcgctaccagtctaccttttaccggcgatcaacaccaacacccagttttcacacttcatgtaagttcttcatatctaatactcttgcttactgtttgtttatgtagcacattttatgatttctgggttggatgttcgaacttctgggaatatttttgtttgagtttctgtatgatgtgttagattcctcctcttttgtgtttagattacttcttttcactatgtttttgtcgaggaaccatcttcgtcccaagtaatgacactttagggtttagagcagacctcgtcttttcgattttacccttatttccttttctctctttacttttttgcaatgtcactatatacgagattcttgcacccgaatcttgtcaaggaaaatct

SEQ ID NO: 353177 - DNA, 610 bp, Cannabis indica
ccaagggaaccccgttgattgttattggtgatcttcacaagtgattctttagggtaagtattgtcccttgtgaatggtggtttgagtcggatcatacatattattattttttgtagctccattgacccctatttctttttatgtcttcgcaagaatagatgtagatcttgtgagcgatcttagaggtcctcctcaggctgacaaggaatctcagagagtagttggcatggtttcggataaatctgggagggaagttggcatggtttttatcagagaatccaaccaaccaaagacctaaacgtgcactagaagacctttataccaacctttctctggtgtcgaggaatttcctgtggttgggaataaggtctcggctgcaggaaataggatcttttgatgagcggaatgaggtatatgtagaggttgagaccttctacatgtaggcggtctttctcgagctgcgtgtagccggtctttctctaagctatgtgtagacggtctttctcgagtttaccgaccctccccttacattgttttttggaagataacttaatggtttgcccctagtggcatttttgtaaagcaagtttataacccaacttgggttttt

SEQ ID NO: 353178 - DNA, 583 bp, Cannabis indica
tctaaaacaggtctggaagttttagtgtgaattgtggttgatttgattgagatatgaaatttcgtttgttttctgtactgaacaggaattccagttcagggaagccatcagcaaccggtctaccggttggggcttccaggaatttccagaaccggaattccggttgtagaatcggtctcccggttggggaaaaattgagaaccctagttcttcccatttttatgttgtttagggtattgccatgctttttatcgatatggaaacttttagtttctagtttaagtccccgggaagtgatttagcgtgtcacttatcaatgttgtgattattatggtttaggagcctgtaaatcgccgtgcagtttgttccactcaggttgaccggcacacctgaattcggaatcgaggtaagattagtataacagtatgcatatgtatttacatgtttagcgtgcatgttaggaagcctgttagattacattagatatgtatgttggcttcgtaccatccgacagtatcacatcggtagggctagagtatgactagcagctggagtatgaccagtgtagcgagtataggctgat

SEQ ID NO: 353179 - DNA, 563 bp, Cannabis indica
taattaagggcccaaaaaaaaaatttctccctatggcccactttgtttcagggccggccctgattgcaccaatccagatcgaaaactaaattttggatttttatatagaaaaaaaccgactaaaccaactgatgttcagccctaggtaatttaggtacaatactcataaaaagaattatatttaaattaaattttatttggaggtaaatttgattaacgtataaaaaagtgggtacttttcatcttctcccaaaaatcaatagatcagtgaaaagcccacatgggtaaaatagagaaggcccatataaaataaacccattaagaatttaataaaaaaaaaactatttacaaaaatatgggaaataaaatgcaagttttgatatatacggcataaaaaattaagtgtacaaaatatggtattttcttaaaaaatattaaaaataagggaaaaatcattatacataaggaaatgccatgaaaaattttaaaattgtgtttctttttttttttttccttttttaaaaaataaaatattggaataaaaaataatgtcaactaaagta

SEQ ID NO: 353180 - DNA, 569 bp, Cannabis indica
aaatgcattaaaaaattgataaaaaaattctcatgttatattagaatggtctttctttccatttcaaaatgaaatagtcattctactaaaatggtgaaaaggccaagatggaatgtatctcaatattttaaaatgcaatcaaataaaagaatggaatgaaaaattattttctttccattccattttattacccaaccaaagcatgtggaaaaaaacttgtattttagtttgtttataaacattttcctattagtgacgtcctggattgcagtcaagtaaatttttgtgagctgaacatgatgttcaggactatacgaaataattcattaaagaaactgaatatttttttagcactcgattgagatttgccagttgaaaaggatttaagctctaatataataccttttttcccttcctttttcattaatcgttttcctttgagcgtcatcctaacttatattatatcttaattttcataaaaaagattataatacagcaaaaattgcttcagtattagacaataacaattgtttttttattgctttacacagatggagggcatccatttc

SEQ ID NO: 353181 - DNA, 557 bp, Cannabis indica
gcactctgacgtggcatcgcacgatggtgacacgtggaatcgacttggagtatcttctcggagaatatagcccgagcaggatgcctcactggcatacttgaagcaaaccgatcagcaatccgcgtagaggaatcaacacttagcgaattcagctttcgcattatgagtcatcaacgaaatcccaataactcggggatcagattacagggatatggcatacacacgatcccatgatcagtgtatactacgtcaattccacgatctttgtactcagcattaatcccacgatcttttctatttatatccattgtaacgagaagggaaacacttcctctccaagtttacagccctataaatagtgatacatgttcactgggcaaagggtcgcaaacagtttagtcgagaccttaccctaaatatattatctaagaattcttattcagagatattgttgtaagagttataagaaaagaaatatttctccttgttcttgaatcaatacaaataacgagaattatgctattaccgaactgctcggggctgaacctctataaaaa

SEQ ID NO: 353182 - DNA, 458 bp, Cannabis indica
acttgctgacaagttagacaccttgcaacatattcaagaatatcatttttcatacttggctagcagaacatggccttaagatcttgatacatctttgttgatcttggatgaattgagtaaggagtcgtatgagactcattcaagatatctcttttaatgtcatcattcataggcacacaaacatgattcataaatcgtagcattcccgtgccatccactgtaaagtcagtagtctttccatataaaaccctatctcgggatttcacttactctggatcttgcaattgtgcttttttgattcgctccaaaagagtagattgcagggtaatattagccaattgccccacaacaaactcaattttagctcgagtcatttcatctactaactgttgggagatttacttcactgtatttatttgacgctgaccttttctactcagtgttgggttttgtgccct

SEQ ID NO: 353183 - DNA, 856 bp, Cannabis indica
cacttaggcatcaaaaaatatatgctggcacgttttcccactcacccagcatctaggttaacgtcacatgtcaacctgggcgttgggcccaaaatagccttttataaaatggtcataactcactcaatattaatttaattgacacgattcaacttgtgttttgaagatatttcaatgctctatcaaactatgtcttacattaaatcataattatgaggttattgactccagatttcactttcaagagagttacaaatttaagctacagctctgcgaatgtgactcaaactctgaatattgagaccgacctctaaaatttcaccattagatcatcatctatggccaaaaataggctaaatgtatttttccatattttttggattattttattattatttcaataggacctctttccctataaaaggagatctgctccactaacccattttgaaagtttagaaaagtacatttaagttcagagcatctctctctagtttctttctctaaaaatttgagtttccagacttagtcatttttttgtaatctatttcgagagaataagaacttgaagtagacgtagctcaattaatgccgcgatacagggagtgaactattataaatcgttacatctctcttatttacatttaactcataatacattctcgtcaatatagtaagcgggtgtggccagatatctgtgtctagattcctacgtcaacaaaatccaaggatagacacactgctaaggttgagagggcttaagcccccactagaaaaaaaattgttttaaaactatataaatttaattattcattcaattatttgtaaatttaaataaaagtctccatacacattc

SEQ ID NO: 353184 - DNA, 584 bp, Cannabis indica
actaagcggtctttacattacaactcaaggcaataagctacacataaacacaatatataaataacatgtatatataagagatgtgagatcaatctcaacatcacatacaccagtagtgtataattaataggggaatcactaaacttgaacaaggtcttacacctttgtccaaaagcttattttcccctaccacaagcacgtacagaaaagaaaagaatggaaatagctttctagatttatcaagcctaaagtgtttctagtaatgtggtctcttgatagaaacttcttgtcttccaaaatgaacccaagatctctatttatagtattttgagtatcacatatgaaaatcaaagtctcttcaccacatggttgttaccagcactttaattggtatttaatggtataaaaacgttagacaagagagctagaaacatgctcaatcaattcatctatgtttatggacgttttcaaaaacttgttctaggtgttcgtaaaacaataccataaaacaattgtttccagaaaactcaaaatttagtttttgtaactcctcttcgaattaaatcttcctccaacgtcccaat

SEQ ID NO: 353185 - DNA, 692 bp, Cannabis indica
aacatccggttcaccattttttggtcagttgcaccagcattcttaagtccgaaaggcatgaccaggtagcagtatacgcccttatcggtcctgaagctagtgcactctttatctgcgatgtgcatcttaatctggttgtaaccggcgtacacgtccatgaaggacaatagcttgaatccagaggtggcgtccaccatctggtcgattcttggcaaggggaaacaatcttttgggcaggctttgtttaggtcggtaaagtctatacaaacccgccatgtcccgttgagctttggcaccagtaccggattagccagccattctaggtagtacacatctcgaatcgtgccactggttaccaatttgtccacctctctttctaaggcttcatccttcactgagtcggggggtgtcgtttctgttgaaccggtggcatgtccgggttgacattaaggacgtgggttatgacgtgggggcttatgccggtaatgtcttcgtgacaccacgcaaaaacatccgtggcgccccttattgtctttattattttttctttttcctctggctctaggctctttcctagccggaggactttggtggagtcgaggtcgcacactaacactttctcgacgtcctccacgggttctacaatttttttggatcccacacggggatccaactcatcttcttccgccatt

SEQ ID NO: 353186 - DNA, 289 bp, Cannabis indica
agtattatcaagatctgagcatggatctcttttctccttcgggtttggttaccaccgtcttactcactatgattgagtacttgacttgctatgggttggcatgacactctttcgctatagtccaaaataggaagaataatgaaggagggtttgtgtaacgtccccacttcaagcctctattgggcccttgcacccacggaataatggctcttatacacgagtatgtcactctggctacttcatggactgacgactgaccctacataccaacacgagtgtttccagcatg

SEQ ID NO: 353187 - DNA, 591 bp, Cannabis indica
ataatactatgttaaactttaatttatactaaaatattatatatttaggtattcataaaagttaataccacatatagttttacataaaaatattgtataaaatacaatttaatataatacaatacaatacaatctaatacggcgttccaaacgagtcctaagtgtcttttgagatgcaggactcgaacggattatacaaattaatttatctagtccaatgtttagatatgttggaagtctagataataatctcatacaggtgagattttttaaatttttattttgttaatatattttaaatttaataagaatttaaattatagaattgttacaaatttatttataatttttgatcaaaaatttattcattaatattattgaaaatttataattttaaattatcatataagtttttaaattttaaaataatattaattaaacaatagttactaaattgattctaagagaaatgatataacaataaaattatatattctttttaaattattagaaaattaacatttgtattaaattaggatttaacataaataattttatattgttcaaatatttttattttactattttaat

SEQ ID NO: 353188 - DNA, 1182 bp, Cannabis indica
atgttcttgacgacaaagtcgaggacttgcttgcaggttatggaaacaaggggctcggccttcgtccatttagtgaagaagtcgactgctactaccgcatacttagctcctcctcgcccagtgggtcatgccccaattaagttaattccccatatagaaaatgggtagggcaaggtcatcattcttagttctcttggcggcactcgaggtatatgtgaaatcctctgattcttatcacatttcttgacaaactcttgggtgtccttattgatcgttggccagtaatatccttgtctaatgatctttttagacagactttgccaacccgcatgatccccagaaaagccttcatgaatctctctaatgatttcattcgctttggcagggagaacacagcgaagtaggggcatcgagtaccctcttctatatagtgtgcctacaattattgtgtagtgaggcactaaatacaatagtttttgtgcctcatttttgtcatttggaagtttcccatcgagtaagtaactaataataggagtcatccatgtaggagcattttctaccatctcgacgtctttcgttttacatatgctcgactcgcttagtatctccaccggaactaagttcaattcatccaagtcattctgctagcccagttttgctaaagcatcagcgttggagtttttttctcttggaatctattcgtttttgaagtaatcgaatctttcaatgttcttccaaactttcccttaatacttcgccatttttaagcctttggccttttatttcccgaggacctggttcacaatcaactgcaaatcactatggcagatgaggtttttgactttcaacgccttactatctttaagccatcgatcaaggttttatactgagcctcattatttgatgcgtcaaattgaaacctcagagcatagtgaaacttaaagccttctgacgatattaatattaccactgcacccgaaccctgctcgttggatgcaccatcccctgcacaggtggaatttcttttggagttataccttttatcaagaaatcggccaaggcttggcccttggtggatgtttgaggatggtatattatgtcgaactgcccaagttcaattgaccatttcatcaatcttccagaagcatctggtttttataaaacttgtctcaagggctaatc

SEQ ID NO: 353189 - DNA, 708 bp, Cannabis indica
aattttcaaaacccatcttgaattccagatgcacaaccggaattctggttcctcgcaggcagaaaatcaaaaaaattcataactcaaccaaatcaaatccaaacaatcccaaaacttccagacctgttctaaacatcctatagaacaattctaaagcatcaacacagcccagaaagcacagaattgaaaatcaccatgtgagctccaagctttgagttcaaactcaaacttggctaaagctcacttacaagcctcaaaactagcttagaactacataaacaagcataaaaacactgcagaaaactaaccctaattcatgcaaacactacagccaccaaaacctcaattttcactttgaaaaccatagctttttaacaagaaaattaaccaactaaagcaagaacaactagcatgcatttcaacctaactaaacatatttaattcaacattttagacatagaaacaacaacaacaactagcagcagcaacatcatcaaaatcatccatgcattactcatctttttcatcaaaatttcaagaaaacaaaggaagaaaactagacaagaaatacctcttcaaggatcacactagacttgctgaaaatcactagaatcacaagagaaaatccccttttcttgctgctcaaaggggccgaaatggagaggaaaagagagagagcttttgagaaattttctaattttttctttc

SEQ ID NO: 353190 - DNA, 792 bp, Cannabis indica
gccaagacctccacgtacacagaaggccctcgatgtcggggagctggtcacaagagagcactgtcgaaaggccaagcagatcttggggcaccagtcggtggatgactacaatatttccaaagtcacctgtccgaatgtgatagccctggccgcagagaaggtgctccggggtgaaatcattgccatggtggaggacaagtaccagaagtacctcttcaggagggaataggagctggcttacattaaggcccaggcgaccgccggaagggcccttcgtattggagctccgttggagcggagaacccccagacccaagcctgtggtcccagtaccgaatacgggggctcacgatgccaacacttcgggttctggtaagtcccctttaataatacattatgttactctcgtccgtgagtatacccgccttaggcctatagggttcgatgaacgtctccgtaggtttaggatgccttccacccggtgggggaatcatgccaaggagtattatttctcccatttaggccattatttaggtcggtaccggaggggtttggtcctccggcgcccattccctttgaccattcagcccatttatcctctagttggttccttccctcggacagctttctcggggatgatgaagccagtgctatgattcgggactttgctagggccgaattggagagtcagggtaggactagctttattgctctttgttgaccgaggttttcggcaaccgataaaataataaaagtttaaagagctgtaagaaattaagagaaggatttttac

SEQ ID NO: 353191 - DNA, 544 bp, Cannabis indica
aaaaataaaaggaaacaagaataaccaatgtactttccaaaaataggccaatttaagaaaatcattcaagatcaatgacaaaatacaatgaatatgatatcaaactttaaaaggcaacttatcaaaataaatcaatatagattaaatgttgatacttaccaaacaaagcacaaatttcttagccaacaagtcaagtcacaaacgcctccctctctttttttattttttattatatttttttatttttatttttgaaaatccgaaacatataaaaataaataaaatatgtacaataatgaaaaaggtgttctagagtaagaaactaatcaaatttcataacaagtgaaaaatacacatgatatgctttcaaaagagaatagctaatgagaatctgaaaaaccaaccatacttaacagatgttgagaaaaaaatagaaatgttacaaataatgtgaatcaggataatattttttttagttgagtggaggagacttacacactttaattcacttgtcagacataagtgtgtgcagtgaaaataggat

SEQ ID NO: 353192 - DNA, 795 bp, Cannabis indica
tctaaatacactccttggctaaattagagagtgggcttttaacaaaataagcttaaaccatataatatatgactccttgtaatagagaatggatagtgagctctctattttttttgaaaattttttaaaattaatttatattttaacaaattcaaaattataaattattattaaaataatcatatactaactaaaattgagagcatgattggagtaaaaatatgactccctattttaacattttagctattttatctaaaatttggctgaaaaatagagagtatggtataatggtatcctttttttttagctaaaatagtttaaaaaaactaaaatagagagccatttttattattatgtgttgccctttattttgtccaaaatacgtggaccaaccagattgtgacacgtggattgaagaagcaagagtttgagatgattcgactaagtctccttaatcaaagggatcagcatttaacatgcctcccggagaaggcacgagggttccacatactcccggagagcaaggctataacgaaacacctccgggaggtatcaaatcctatctaaacagtcacctcgcatttaatgccgcatgggagaaggcgtattgaaactgccataagtattaaagtctgacggcgtaaccccccttctgcagctattacgctatgatgaatgagcctagtgacggctactttatgagaaatcacatcagtcaagaaaggataatggattatatccatctaacccctaaaaagcctagggattagaccatgcatttcctatgatata

SEQ ID NO: 353193 - DNA, 728 bp, Cannabis indica
aagtggaaagctctaaattatacagtttagcaagaggaaaaagatctaaccaatttttagtacatagagcttgatccaatctaacctcaatccattgatcagtacctcgccctttctcccaagtaaaaggatgcccaatgagcttgagatcatgaagctcacaatcgttaactgcttgttgaaatccccatagtaaccaatccggataatgtttgccacctctcttgtcttcatgagaaagaacattattcatgtcacccataaaacacccggcaaaaccgaatccaaagccaatcttctcatttgatcccaagtacgtctacgttgaccacagtttggttcaccataaagaccgctaaaacgccattttttcttcccttccatggtgatttccatatcgatatgggactgagaaaaccccaagaggcgagcttcgtcttcatttttccacagaaaagccaatcccccacttttaccgtgaggttcaacagcaatgacaccatcaaagcccaacaacaatctcactctttctaatttatcttttttgctaatagtttcacacaaaaagacaaaactgggtctcttttggataacaatatcctttaagaattgcaaggcccatgggttcccaagcccatggcaattccaacttatgaactcataatcctcggtgggcctggaaaccagcacccaccttgttcaagttttttggcccattaacaccatta

SEQ ID NO: 353194 - DNA, 628 bp, Cannabis indica
tagtattttcttaaatgttccccgttctaataccttgttaccagaataagttgcattttttcatcgtacaaacccagttttatgctcctgactttagaacttcaatcacttgatatggtccctcccagttttgtccgagcacacctgccgtgctgtctttggtgttcaagaatacccttctgatgaccatatctcccacaaagaatttttgtgctctcacttgcttgttaaagttccgagctaccttttgttgatgggctacaagtttcagttttgctgcgatttacttttcttcaatttcatcgagtgactctacaaagagtgcatggttaacctcttggtcgtatgtcaatcttctgtgggatggaggttctagttccatgggcagcatagcttccataaccatatgccatggaaaatggagtctgtccggtcgctgtttcttagttgtatggtaagaccataatacttcagggagttcttctggccagtttcctttagcatcttcaagttgtttcttaaaagtgtctttgtgtgtcttgttgactgctttgacttgaccgtttgcttggagatgtgccactgcagaaaaactttttatgatcccatggtttgcacaaaaatcagt

SEQ ID NO: 353195 - DNA, 726 bp, Cannabis indica
acatacatccaactgcgccatcaactcgcagtgctttttccaccatctcatcataggtggtcttgtcgtctgtagtgatcatcagattatgcttgatcttcacattcaatccatcaagatattttcctttttactgaaatcggttggcataaatcccgaggccaacctcgccaactgatcaaactgagttgcgtactcgatcacactcataaaattcaatattctcgtaatcactgatagccactgctcggctttcatgacatctagacctcccagaaacaccagaggtgcctgcttgcggaacctttcatacaggggttccattctattcgccgctactactagttcggcttggacaacaggagcagtgccactagaacttctggcacaggcactgcaggagcaccctgctgtcttaatctctgaatctcattatcttgctcctctattctggcttgcatttcagcaaacctgatttcccaattctggacttcctgattggcttaggcagcctgtgacaggttaacatcatcccgaccacgagccctgcccctgggacctctacctcggcccctaacatctgggggaaactaagctccttgaccttgatttgacccgaccgagttgccctgactcctggtatttggcctggctttcatcttgtctgaacagcctcgaagccaagagttggcacattgggtcatgatcaacgagagcttactaatg

SEQ ID NO: 353196 - DNA, 514 bp, Cannabis indica
tttcttgctttccaaagagaccaacaaaccatgaccacctgacagacacgatcagtatcaagtttgtgaaaaatgttatctaaccagcttgggaaggagtcatcaagagcaattccagcaggtagacccatagtattccagcagcaagaagcaaaatggcaagaaagaagagcatgagatatagtttctggagcagaaaggcaaactggacaagtggaggggaatccacgtgtttaattctgagattcaagcaagttggtaagaccccagatgcagcccgccagagaagattcttgacctttggtgggatcttgagttgccagagatttcgccaaaaccctgagttgttaacacctgaccttgagtccttatggtcttgaagcatacagtaggcacttttgacagagaaattcccagaatgttcaccagaccatgaccaaaaatcaccagaagccgaaaagctcaaaggaacgctaagaataagatcagcatcacggtggttgaacatatcctg

SEQ ID NO: 353197 - DNA, 936 bp, Cannabis indica
aagtgagtgaactcttttcttttggcgcttctaacggccccgttataatacatggcattgaaaagttcctgaaacttttcccaggtcattgttgtaacatcgtgtatcatggacaccatgtcccacaatactaacgcatcttcttgaaactgaaaagtggcacagaccactctatcattcccggtgacgcccatgaaattcaatatctttgtaatcactgttagccactgcttggctttcataacgtccagacctcgcagaaaaactggaggtgcttgcttgcagaacctttcatacaaaggttccatccgattcactgtaatcacaggttcgacctggacaacaggggcaggtgccactggaatttgtggaacaggcacggcaggagcacccagttgtcttaactgccgaattacttcctcttgttcattaattttagtctgcatttctgcaaacctattttctccattatgggcttcttgagtagcttgggcagcctgtggcaggttagcatcaccccgaccacgtgccctgcccctgggacctctacctcggccccaagaatttgggggaaactgagctccctgaccttcgtttgacccgaccgagttgctctaactcttggtatttctcctggcgtccatctaatatgaacagcttgcgtaaccaagagctaaaaaaaacatgcgcctattctactatcaggctactaacatgtttcctaacagacttttcttaaatcatactatttaaaataaaactactaaaacaataaaagcttactgaactgtagaacgagctaactgctaatgatgattgtacatgtcgtgacgatcttcggaaagacaacctggtcggctctgataccaaattgtaacaccctaactagcataggcgtattaacgtgattttgaaaagactgtgcagctcgttgct

SEQ ID NO: 353198 - DNA, 891 bp, Cannabis indica
  modified_base (21)..(21): a, c, t, g, unknown or other
  modified_base (75)..(75): a, c, t, g, unknown or other
  modified_base (164)..(164): a, c, t, g, unknown or other
gtgtgcttagtaatgacttanaaatttttttttttatatttaataattgtaaaattaatattagatatatgaatntaaaaatggacatatttaaaaaaatatttaatataaaagttttgaaatgaatataaaaaaaaattgttaatctctaaagtttaaattanaaaattttttgattgtagtctttaatggcaatgaaacggggaaaccacaaaaacaaaaggaaagaacgctttcatttaaaaaaaaatatttttaataaattttgaaaagttgttagattataaacattacttcagaaatggttggtgtcaataagacatgatagaaatataactacttctatataatcttgtttgcaagtttgatcaatatatccaagaacatttcatctctaaaattcttggtcgattcgagaagtgattttccaataaaagtagctagattaatcaatctttaaagaatcattttcatgaatgatgagacatcaactcggataacatattcttccaatttgatgctaaggatctctcttgaatttaaaatagtagattctttccatactttattcaccatctctaaccacctatacaccataacataaaaagatgattattctttttactagctaataaagaagtataatcataagtagtacactattagaaaaaatacattttgtaacagtttttttaactaaaaaaacttaaaaaacaacactagtaaaagtgttgcctcctacactgttgccaaaacgtagggtgctaaagcaacactaacaaaatgttgtctattgtaatgtttaatttttataaaaaaaaaataaataaatattatgtaacacttttattataagtgttaccattaataaaataatttatatatatattt

SEQ ID NO: 353199 - DNA, 1797 bp, Cannabis indica
tgcacttcgtccaagtcgacttgtgcgattttgatgccatcccgaattaacggttcagtgaacaatagtccctgatctcgactctgagttttccccttcgtgaatgtctcccagatttgtttagcagagcctggagattgctggctatccaatctcacattccgatcatcttcaacctccttcgcccaacttttggttcgactactcccagatctgtggatctccgtctcttgtgtttcctgagaacgagccatctctgcagtaacattcagcctatctgcttcaagtgaatcaacagcagtgacctcttcgacttcatccaggccttcgtttcctgcagcaatctcatcgtcaagtgatcgagcgactggtttccttccaacttttttcttcctcgccatggagggagaaagcagagagaacgaaacgacttattctctttcctcaaatatttctttactcagaaagatttgaatatgagacaaaggcgttggttagagttggttaaggattatgactgtgaaatcctataccatcctaggaaggccaatgtagtggctgatgccctgagtagaaagggtcacgggaaggtaactagtatgattaagatttcacctcagttagcagaagacatggtcaaatcaagcatcgagtttgttgtaggcaaacttcttaacttaacgctgcaatctaatttgttggaacgaattaaagatgctcagttagttgatccagagttagtgaagatttgagaagaggtttcatctcgtcaagccaaagaatttacggtatcagatagtgggatgctattattttagaccagggtttgtgttccaagtagtgcggaacttagaaatgagattcttgaggaggcccataccactccatattcattgcatcctggcactaccaagatgtacaggatcttaaaccctacttctagtggagcgagatgaagaagaatgtggtagaatttgtgttccggtgcttaactcgtcagcagattatggctgaacatcatagaccagtaggtttattgcaaccactgacacttcttgagtggaagtgggaggatattaccatgcactttgttcttgggttacctagaaccacgggtatgtacgattcattttgggctgtggtagatcaattcacaaagtcttctacggtaaaaacaacatttacagtggatcaatatgcagaattgtacgtgaaagagatagtaagattacatggtattccaaagtccattatatcggatagagatctgaagtttacttctaagttctggcagagtcttccgcgggctatgggtaccaaactgaaatttagtacaactttccatcctcagactgatggatggtccgaaaggactattcagatactgaaagacatgttacgagcctgtgtaatggattttgatggctcctgaagcaagtacctgccactaatagagttctcgtacaataaaagctaccagagtacaatagggatggctccttatgagctgttatatggcaggaagtgcagatctcccattcagtgggatgaaacgagagaaaagaaatatttgggtccaaaatcagtgcaaccgactaatgaggctatagagaagattaaggccagaatgcttgcctctcagagtaggcaaaagagttacgcaaatccgaagcgtagaaatgtaaagtttcaagtaggggatcatgtattcccacgggtgtcctaaatgaagggagtcaagcattttgggaaaagaggcaagttatgccctaggtttacaagaccttttgagattct

SEQ ID NO: 353200 - DNA, 1010 bp, Cannabis indica
tttgggtacttggcgaggattctctagttcctttccaagtccagcagggatggctttaggatgcacgtggattcctgatgcctccatggctttttgcatggccagcatcacctcttggatctttttgagctgcgagttcagcctcgtgatgggcaaccttttgtctcaagagtaccagctttgtgtagctgccttcgtcgtaggcgtcgtactcgtcgaagtttccttcatactcgtcatcgtgggttccttcttcttcctcagagcccacattcgctcttgaggccacgtcctcatcgtttgggtcttgagcatcttgaagagggcaaggttgacgtgtgttccaagtctccaccattttttttttgttactgtctactttcagacgcttccttcagctctcaatgaaagcaccaaaatgttgaccgaggttttcggcaaccaatataataataatgattaagaaagctataaggaattaatgagagagatttttacgtggttggggcattaatgagccttagtccacgagtctgtatatttatgatagtatttattggtggttttacctttctagttcttatgaaatccacaattctcgacccctgccttaatgagtttagggggtatttatagtatttttgtggggtgatccctagaattgaggtacatgtctttttgtaattctcagtaaaggcacacattcccaatggatacatcataggaaatgcatggtccaatccctaggctttgtaggggtttaatggatgtagtcctttatccttcttgactaatgtgattcctcataaagtagccgtcactaggcttactaatcatagcatagtagctgcagaaagggggttacgccgtcagactttaagacatatggcagtttcaatacgccttcccccatgcgacattatatgggaggtgactgttcagataggatctgacacctcccggagaggctttgtcgtaactttgctctccgggagcatgtgagactcaca

SEQ ID NO: 353201 - DNA, 537 bp, Cannabis indica
tttgtgtgtttcctgtactgaacaggtcgactagttcagggggacttgtaggaatcggttgatcggttggttcccaggaaaccccatgaaactggaattccagttggggaaccggtctactagttggggcattttagggaaccctagtttttctcttttttgcaataattagagtattatcatgttattcatcgatagagaaacttttagtttcaagtttaagtccccgaaaagtgatttagcgtaccactcaccaattttatgaataatgtgatttaggggcctttaaatcaccgagcaactgttccactcaggttggccgacacacctaaattcagtaatgaggtaagattagtataatgatatgcatatgtgtttgcatgtttagcgtacatgttatttatgcctgtttgattacatcaatagcggtattagtatatgtagagttatattggatattgatagatgtatgtttggctaagatactgatcgacgctttctataaaaccctaactagcataggcgtattacgtgatt

SEQ ID NO: 353202 - DNA, 692 bp, Cannabis indica
ttccaggttggttcgtctttgcttttgctcgcctgaggttcttgtacttgctccgggttgttttttgaagtgctctattctttacctgtacactcaactacaaaatcgtctaaggccttccctttaatcgctattcggtgctgaaacatgatttcatattggcccatctccactacccatttgagtaaccgtccagaggcgtcgggtttttgttgtacttggagtaatggttggtcagtgtacacccgaaaaggatgagcctgatagtaaggacatagttttcttgttactaagattaggtaataaatgagcttttctatcaatgggtatcgccctttcccttcaacgagtcttttgttgatgtagtagaccagatgctggatattgttctcttctctgatcagtgcggtacttacatcatgtttcgtgacagccaagtatatccctaattcttctccgtccagaggttttgagtgtacagggggttttgcgagttgcctttctagctcttgaaaggcgttttttcattcctctgtcaattcaaattttttgtttcctcgtaagatattgaagaatggaacacatttgtttgttcactttgaaacaaatctactgagtgcggcaatccgaccagtcaaactttgtacttctttggtttttgtaggccatttcatatccaagagggcttgaat

SEQ ID NO: 353203 - DNA, 599 bp, Cannabis indica
tcttttcttcccgatccttcgattctccagatacacgattttacccaccagctgtgaatccactacagatcttcaaatatcgttttggcctttcattttaccgagctagttttgaaccagcgatcaaaacttcatattcggcctcattattggatgccttaaatccaaaattgactgcagcatgcaagttttgctccccaggtgtgacaagggcgattctttcacaagatagctgatttgtagctgacccgtctacatgtagtttccaagtcggcttgtcttcattcttacttggctgaggtatttgttctggctcagggttgctttctgatacgctttcttccttgcccgcgcactctactacaaagtttgctaaggcttggcccttaattgctgtttggtgttggaagataatctcatattggcccaactccactaccccatttgagtaaccatttagaggcatccgatttttccaatatttagcgtaacggttagtcagtgtatacccgaacaggatgagcttaaaagtagggccttagctttcttgttactagaatcaggcagtaagtgagtttttttatcaatggatatcagcc

SEQ ID NO: 353204 - DNA, 638 bp, Cannabis indica
gttttctttagctcaaacacaaggggggatgtccgacatcacatatgttcggctttgggtatgattgaaggagatgaaaatagctcttacttgggtcttccaaacactatggggaggaataagaatgtcgtgttggggtttcttaagaaaaaggtgctaaagcgaatcaagagttgggacaccaaatttctttctcgtgcgggtaaggaagtgttgatcaaaacggttgtacaatcgttacctacttatgcaatgaatgtattccttctcccagttggagtgtgtaaggaaattgagagtctaatggcaagattttggtggaagtcctcttggaatcaaaataagggtattagttggatgagttggtctcggttggtgaagcataagtttgatggtggaatggattttagaagtcttcgtgagtttaatatcgctatgttgggtaagcaagggtggcgtcttatcactaatccttcttccttggtgagtcgtgtgtatcgagcgagatattttgctcaaggtgactttttgaccgctgaattaggctccaacccgagctttatttggagaagtttagtggaagctcaaggtgttctcaaggctggcttaagaatgagggttggggatggtttatctat

SEQ ID NO: 353205 - DNA, 1153 bp, Cannabis indica
tagttcttgttttagtgagattcattcctaatagatttttgttcattagcaatttaaggccgtagaatcttgaaaggtaagtactatggtaagtcttttattcttagtaatgaccaccccaatagtggctgttaagagtagggcttacaaagtatgaaacaatggtagaagctaatgaaaaaggaatgaccttgactctcgcctaaacgggacaatgtcagattccttttttgatcgaataaaaggttgctagaatggtgtctattttagatgagttgaatactctattcaatgaatgatatctttgactctcgcctaaacggaacattgtatcactttgttggaaaccatggaaaataattgaatatgttttaatttttagtatttttgcaaacatattttctttacttgttattttctgaatttgtgtatgaatttatttgaaccaagtaatttatttctgtttattgatatttgtagtttcaaaaatcaacaaccctcaccccaatcctcatctattatatgcctttgcaattgaactccatagtgcaaagatgtctcctagtcagagtgtcacttcaaacttacttttgatgaacttaaagttccagaatggaaacttgctgggaattgttttatcaaaagagcaatgggttaagtttattctcaatagcctttcacctgagtataacaaatttattgtatcttacatgatcaataaccttaactcgtccaacatggataagctagaagctgaaatgcatgcttatgagcagaattgtcacttgcaaggagggcttgcccagagttacagataagggcaaaagaaaagctgaagagattgtggatgatacctccaacaattttgcttcttcgagttcaattttaaacgctagaattaaaattgaaccagaaatagagacaattaaagaaaaacaaagcagacgtattcttctatgttctcactgcgaagagaagggacattttaaagcaagatgtcctagacttctaaaccataagaacgaaggtaacgcttttattttttaatcatgtgttttagagaatgaaaaatccatttggattaattattttggaatccactaaccatgtttgctcttcattgcagctgcttgaaacttgggattacttaaat

SEQ ID NO: 353206 - DNA, 502 bp, Cannabis indica
acttatcttgtgtgttgtcttttgtagatgaacccaggtgagttttgggaaagtgaacagcgaatcgaccaggacttgcttcaactcttgcacgaggatcatcattgtctctgttctagcccactttcttcgagtgaaatgcattcttcctaaaatctttcatccagccagagaatgatggctcgtaccaaaaagacaatgcgtagggttgacgcatctgactctcaagtggcttggcacaccaccttacccagcgctgaacaagatctagccatccaagaggaggaggatcatgaacgggacgctgaggtccaagagattgaggagcaggacgatgtccgtcctagcagtccctctgaggcggaggaagaggaggaggtgcacccccaaattatgggggatacaatgaggccggggagacagttgatgctgatggcgacgtcctggttgagggcgtagactacgccagtgaggaacttactgccgcggttcctcatagaag

SEQ ID NO: 353207 - DNA, 626 bp, Cannabis indica
tccaagaggaggaggatcatgaacgggacgctgaggtccaagagattgaggagcaggacgatgtccgtcctagcagtccctctgaggcggaggaagaggaggaggtgcacccccaaattatgggggatacaatgaggccggggagacagttgatgctgatggcgacgtcctggttgagggcgtagactacgccagtgaggaacttactgccgcggttcctcatagaaggcaaggtaccttgggtgccaggtgggtgagccttccgtccaaggttattgaggcgcgccttcgggatctcgaccaagatggctacctgagcgaattggactattacattctcgctcacaataaccgagccacaaaccttgagaggggaatgtgcgcttggtcgagtgctcatgcccagcaaggggcgttgttgcctttgcacccatattttaggaatgtggcagacttcttacgcctctgtcagacccaatttactcccaagggcattaaatatctgtctgccgtcttcatcctctatgcctcccagaagtgggatatgccttctccccacgaggttagctggtttttggatttgaagtccacccctagcaaggcaggtcggggtacttctatttttc

SEQ ID NO: 353208 - DNA, 659 bp, Cannabis indica
ttgaacgaatcctatccgaagtacacgacgaattctgtggaaatcatgccgccgaacaaagcttatccgagaaaattctaaggcaaggttacttctcgccgacaatgattgaagattcaaaagcctatgttaagaagtgtgacaaatgccagagattttaaaagataccaagagctccacccaacgagttaacacagatgcaaagtccgtggccctttgccatttggggaattgacatgatcggacaattacccaaaggtaaaggtggagtgcagtatgtagtggtagcggttcattactttactaagtggactgaagtcgaaccactcacaaccattacgtcaaagaaagttcaatactttattgtgaagaacataatatgccggttcggactactgtacaaaatagtctcagataatggcaagcagtttgatagccaatcctttactgatttctatgcgaaccatggtattatcaaaagtttctgcgcagtggcgcatcctcacgcaaacggtcaagttgaggaaatcaccacaaccttgaaggatacactgaagaaaaaacttgaagatgccaaaggaaaatggccagaagagcttcctgaagtcctatggtcataccgtacaactaaaaaatggcaaccggatagacaccattcg

SEQ ID NO: 353209 - DNA, 621 bp, Cannabis indica
aaggaaggctgcacggtatatcatagtggaaggaattatgtacagaagaggattatctatgccattgctcagatgtgttactcaagaagaagctgcacgacttttatctgaggtgcacgatggattttgtggaaatcatgctgcagggcagagcttatctaagaaaattttgaggtaagggtatttctggcctacaatgattgaagactcgaaggcctatgtcaaaaaatgcgacaaatgcaaaagattttctaagatacctcgagctccgcccaatgagttaactcagatgcaaagttcgtggccttttaccatttagggaattgacctgatcggactgttacccaaaggcaagggaggagtgtagtacacagtggttgttgttgattacttcactaagtggacagaagccgaaccactggcaaccattacatcttaaaaagttcaagactttgttgtgaagaacataatctgtcagtttggattgtcatataaaatagtttcggaccatggcaaatagtttgacagtcagtccttcactgatttttgtgcaaaccatggtatcatcaaaagtttctccgcagtggcagatcctcaggcgaatggtcaagttgaagcagt

SEQ ID NO: 353210 - DNA, 689 bp, Cannabis indica
tttgaggcaaggtgatccaatgtcccctttactttttgttttggggatggaatatctaagtcaaatcatgagcaagattggaaggaaaaaggagttcggataccatgagagaagtgctgaattgaagctaaatcaccttagttttgcggatgatgtactattgttttgtagaggtgactttaaaagcatctatttgttgatgcaagggctcaaattgttttcaactacctccggtttaacaccaaataaagcaaagtctgcagttttttgcagtggaatggaggaaagggagatcaaaagggtgctggatatgactgtttctcgagatagaaagcaccattcaagtacctgggagttctcatctgtgcaaggaagattgcagttgctgattgtgttacacttgctcaaaagatgactgggaaaataagggtctggtcaactaggaatttgtcatatgctgggaggttagtattggtaaattctgtccttattacaatacacatgtattggagtcagattatgattctccctaaaaaagttattaaagaaatagagggagtatgtagatgtttcttgtggacagggaagagcatgatggtaggggctggagctgtggcttgggaaaatttatgctacccgaaaaaagaaggtggccttggcttattgaacattgctcaatagaatgtagc

SEQ ID NO: 353211 - DNA, 701 bp, Cannabis indica
gttctatggtcataccaaacaactgtaaaaaatggcaaccagacagactccatttgccatggcatatggatgtgaagctatgctgcccatagagcttagccaccatcccatagaagattgacatacaaccaagaagcaaaccacgtactcttgccgaatcacttgatgaaatcgaagagaagcgaaccacaacaaacataaagttgatagcccatcaacaaaaagtagctcggtatttcaataaacaagtgaaggctcagaaattctttgtgggagacatgtcctaagaagagtatttctaaacaggaaagatagcacaacaggtgtactcagacctaattgggaaggaccatatcagatggtcgaacttctcaaatcaggagcattcgagttgggtaagtatgatgaaaaaatgcaacttgttctagtaccacggtattggaatggggaatatttaagagaatactaccaataaagtaccaggtcggatgaccatattaagtactgaaagaacatttacttttaagtgaatggcttgctgggcgaactacgcccaaaggttcggacaaaaattgaaaagtactcaggtcggatgaccaccatttaaagtactatttctaatttctgcaatttgttttatttcatgttaagctaaaagatcagattagatcaaatatctctgatgtaagttactacggtaa

SEQ ID NO: 353212 - DNA, 687 bp, Cannabis indica
cctagtctcggttcgggtttaggtctctgtttgggttttgatctgggttcgggtttggctttaggtcctggtccatgtcctagtcctagttcagttctagttccatttgtgattctgagtttgagtttcggtttgagttcgtctgagttcgagtcctggtctgagtttgggttcaggtccggagtacagtctaggtccagatcagggtccgggtgtgggtttgcgtcctgggtcttggactaggttgggtccgagtcctaaattccaatccctggttctggtcctggtctggtttgagtttgggtctgggtctgggtctagctttgggtctaatactaggtgtgggtttgagttcaggtccgagtctgtgtcataaccccgatttgggtcaaggttcgggtccatgtccaagttggggtcctgagtgcaggtcaagtttgggtctgggacaggatctcggtccaaatctaggtccagcattttgatcccattttggcaagctccgagtccaggttcgtatttggatccctatctaggtcctagtctgtgtttgggatcgtgtcccaaatttaggtccaggcctgagtttcagtctcagtttggctctgaggctaggtctgtgttctgttctaggtctgggtccgggtcttggtcacagtcctagtcttgttctagggtcctggttcg

SEQ ID NO: 353213 - DNA, 620 bp, Cannabis indica
ggtgcttcggacaaccccccatctgcgcgcgtacctcggtcgtgcaccctgcagacgccgaagtctgctgcacacgggaccctgcaaagtccctccttcgcgcgcgtaaggcccttttttgcagcctatggaggctgcacgtgcagcctcctgggcagccaaccccaaaattgcattttgtgggattttccccaaaaatccaattttttcatgggattgtttcccaaaattcatttttccaattttaaatatttctaaattgaaatatttccaattttaaatatttccaatttgaaatatttccaattttaaatatttcctattatggtcagatttaaaaatttgttaacttctttaatatttatttattatttaattataagattagatattttgatatttaagatattttaaattaaaagataactttgtctttttatttaaaatattatattaaaattatcttatatgacaaattaaataattaataaatttgaaattaacatagatatttttatagatatacttaccataatattttcaaattcaaaatttgttattttgttaaatatttaattatttataaattataagtttaaaaatgatatttttttttctat

SEQ ID NO: 353214 - DNA, 682 bp, Cannabis indica
caacgaggttattagaaaaacatgaataattaaaattttaccttttaattaaaacataacatattatacttataatattctggggtcccgtttacaaaatacgattacaaaagtttgctatccatttacaaaagatttgtcgcctagcgactaaacaacagaagccctgatgtcccgagaatcgtacgctccaggcctaactgcctcgacatgtacaatcttcacttgctcgctctcacggctcctctgctttagccttgcccttacctacacataaaaatagcactgtgagtcgacagactcagtaagaaaagcataacatgataaacaaactaaatcccaggttataatcaggtgcccatacacctaaccataaccctaactgaatcgagaacattcttcacaaagtatgattaaccgcgaatctagcctatactcagtactctaatcgcaccgatgtggtagcagttaatctatactatctgatagcctagcatacatctgatggcatcccggtgcaactctatgtacacctcattgttgccctgatatgctaatctgatggctatataaaatttgcctaacatctatctaatatgttattttgatggtaactaacatgtacgctaaacatgtataagcatatccatgacattatactaatcttacctcgattctgaat

SEQ ID NO: 353215 - DNA, 1002 bp, Cannabis indica
cttcattgtgaatctgctgctgagatttggaatgttttcgagagcctctttgccactcaatccaaagcaagacaactgcaacttcgtctctctatacagaccacaaagaaaggctccatgagcatcgatgagtacattttgaaaatgaagaatcttgctgattctcttgctgcagctggtcacaaactctcggatcaagaattggctatgtatattcttggaggagttggtcccgagtacgaaactgtggtggtgttaatgactgctagtgccgatgctcttaccttacaagaagttcaatacatgctgcagaaccaagaaatgcgcattgaacaactccattcgacgaatcttgatactatgcaagcaaattatgcccaatctaacaaaaatacctctggattcaatcgcagcaacaatcctggcaggggtcaatcacagggacgaagtactatgcccagtagaggctcaaactccaacaatcgtggtgcttcgaatggccgtggccgtggttcacgccctgtttgtcaaatttgtggcaagattagtcatcttgcctacaaatgctatcatcgttatgacaatgaaccgcagaccagtactccttcatctcaatctcaaggtcacaacccacaagcccttatttcagactcaaattgtccagctgaagacaatggctggtatgtggatagtggagccacccaccacatgactcccgatgctcaaactctcaataccacacaggattacaaaggcaaagccaaaatcactgttggtaatggctctaaactctcaatctctcaaataggaaaaactgaattttccactctttctcataccaaaaaattactactcaatgatgtgttgcttgcccccaatatcacaaagaatttattaagtatttccaaactcaccacaaataataatataatctttctctttgattctaatgcatgtattatcaaggacaagatttcgggccaagcacttctgcggggccat

SEQ ID NO: 353216 - DNA, 589 bp, Cannabis indica
gtggaggagatgacattctcctccacagggttttgcgaatacaccgataaactggagccagagtcttcaatgacaaaggaacctatcaacggattcttcataattccttcattgcagctcatagagtcagacgcttcttcggatggatcgtcataaatcaccttagattcccggtccatctctttagtatcccatgaaaagtctcgaaccacatcaggatgagtcctaatagtcttgtggggtctagtgcataaagaagcggagccttcaaattttcttttcttaaaaggagttgttcttccattagtttccgaggtagtcaacacacctatgtcacctcccaacctcttgatctcatacaaatctagctttccaaagtgtttcaagtcataaagtaactcctcttgagctttaaaaaattgggacaaagcttttccttcatcacaagagggtacggccaagcttccattaccactctcatgttgagcaacaacattaagcaaaccactttctttcccaaggcatgagtgttggtattatatttatccaggatcttagatctatttgcaagtatgttgatttaacaacc

SEQ ID NO: 353217 - DNA, 635 bp, Cannabis indica
gaaatgcaagccagaatcgaagaataagatagttaaatccagcgattgagacagcagggtgctcctgcagtgcctgttcctaaaattccagtggcacctgcccctgctgtccaggccgaaccagtggtcgcagtgaatcggattgaacctttgtatgaaaggttccgtaaacaggcacctccaatttttctgggaggtccggatgttatgaaagtcgagcagtggctaataatgtttaccaagatttttaatttcatgggcatcaccgggaatgatagagtggtctgtgccacttttcagtttcaagaagatgcgttagtgtggtcggacatggtgtccatgatacacgatgttacaacaatgacctggtaaaagttccaggaacttttcaatgccaagtactataatgaggccgtcagaagtgccaagagaaaagagttgacccacctgacccagaaagaaaatatgagtgttactgagtacacaacgcagtttgaccggttggcgaggttggactcgggaattgtgccaaccgatttcagtaagaaggagaagtatctggatggataaaatgcgaagattcgacatgatttgatgattaccaccgacgagaaaaccacctatactgaaatggt

SEQ ID NO: 353218 - DNA, 925 bp, Cannabis indica
gaggaaacaccccgtgatccccaaatggtcgatcaaggtgtaaacactcccaccaacccgcctaacgcaccggcagcgactaccggagtcaatatcccagcaaacctcaccgcagtagtcacaactcctgcagtcgcagtagtcccaactcctgtagccggaggaattgaccaaagcatgcttttgcaagctttgaaaatactcgagcagcagagaaagcccatatagaagctgcatgggacctctctttttactgcagaagtgcgacaatctcagcttcccaagggattccaattatccaaatccctaaaatataaaggtacctataatcccatagattatttagaaaagtttcacactatagtggaagtggatcaggtacctcagctcgcaaaatgtcgcattcttgcggcaacgttggaggaaaacgcccacgattggttcacccaattgcctgaggcctcaatatcgacatgggaaacctttgtcgacttattcctcacgcatttttcaggccacgatgacttataggccaccctatactactctggctaacatcaaacaagaacacggtgagtctttacaagactattttaaacgatttaatgctaaagtaacaaaagtcgagaaggctcccgagtcttcgcttgtttgtatgttaataacaagtgtcctgccaagaacccatttttggaagcacttacaagctcgaagaccagaatcactagtcaagttcttcgctatggccgaaccgcacaagagaattgagaattctctagcagaattggaaaaaggcaaggacaagcgtaagtcaccagtgccgcgatcgcaatctcgcagtccgcgagggaaaaattccaaaggtcgaagcccaagaagacgcagcccacggagatagcgaagcccgaagttggccaaatctcct

SEQ ID NO: 353219 - DNA, 526 bp, Cannabis indica
agaaggctcccgagtcttcgcttgtttgcatgctgataacaggtatcttgccgaggaccgacttctggaaggagttacaagctcgaaggctagaatccttagtcgaattcttcgccatggccgaaccccacaagagaatcgagaattcactggcagagttagagaagggcaaagacaaacgcaaatcaccaataccgcgttcacgatctcccagtccacgagggaagaactccaggggccgaagcccaaggagacgttgcccgcggagatagcgaagtccaaagttggccacgtctcctccaaagaaagaatcctcgccgaaaaggaagggtggacctcgcttcgtcaattgaccctatctacggaatcgaggaaagaaacagagtcttcaagaagccgccccccatcaggggaaatcgcgatagaagagatcccaaaaaattttgtaagtaccacaaagacattggtcatactaccttagaatgttatgtcttgcaggacgaaatcgaggagctgattcggagag

SEQ ID NO: 353220 - DNA, 474 bp, Cannabis indica
acataacataccatcctcgaacatccatcaaggccaagctttagtcgacttcttgatagaaggtataactccagaagaaattccacttgatcagtgagacacataaacctagaagttatacgtggatggtgcatccaacgaacagggtttgggtgtaggggtaatattaatatcactaggctttaagtttcattatactctgaggttccaatttgacgcatccaataacgaggctgagtatgaagccttgatcaccgacttaaagatagcagaggcattgaaagtcaaaaatctcatttgtcatagtgattcgcagctgattgtgaaccatgtcctcagggaataccaggccaaaggcttaaaaatggcaaagtaattagagaaagttcaaaagaacttggaaagattcgattactttaaaatcgaacaaattccaagagaacaaaactcaaacgccgacgccttagcaaaact

SEQ ID NO: 353221 - DNA, 1013 bp, Cannabis indica
atgatcatgtcaacccaagcctctgaaaagcccatcagtaacaaaatagcttgcaagaaagaccattccatcctatcgtatgccttactcatatcaagttttaaagttatacaaccattcttcctctgttgcttacgtctaaggtaatgtaaaatctcaaatgaaataagaacattatcaataatgagtctaccaggaataaacgcactctgaaactccgagatgatcttcgatagtaagcttttgagccgattagccatgacttttgatatgattttatatgaaacattgcacagagcaataggcctcaaatcgcccataatagaaggagacttcttcttcggaatgagaacaagattagtagcatttagaccccgaggcatgtacttagatcagaagaaatcctgaaccatcttaacaacatccttacccataatatgccaacacttctgatagaaagcaggcgtcaatccatcaggcccaggagacttgtttgggtgcatttggaagacagcattccttacctcctcctctaaaactggttgtaaaagagcaacattatcctcatatgttatggatggttgtattacatcaagaacccccacataattcgaccccttagaatgaaaaatatcagtatagtggtctaccataacttgagacaggcctgacccccactgaacccaggaaccagtctcatcttttaactcatgaatgaaattatttttccttcttgagctcccagcagcatgaaaatacctcgtgatttggtcaccctctcgaagccacaattgcttcaatctttaccgcgaaaagatttctttttgatgatagatttcagcaagttgttttctcgcctccttatattcagctagaaactccacatccaaccggcctttaaggagaccaattccggttttacaactttgaatcctctccttaaaattgtcagttaagctccttcccccacacaccaagaggaccctgaagagccgccactttgtcaataatgt

SEQ ID NO: 353222 - DNA, 1253 bp, Cannabis indica
atcatcttcatcctcctcaatgttccaaatttatcgatggcttacattctcgactattttccaatatctacctctaagcaaatcatcgagataaaatactttcttagcttgggtagcaagtataaatgggccatctttgtactattcaccactaatattgatactaatgatattattctcaatgattgttttcttcctctgtggattggtattgaaccatttacaccgaaataatgccactgaatacacactagtaaaagttaacaacatcacatgttccagcgttccataataattaaatccttctgttcccgccacagagacaccgttattttgcgtagtatgcttcttattacgttcaactaccatgtaacgaacaccgttcactacaaccccttcataatatgttactaagtgatctgacccgcatgctaaagctagcaactcttcaccaatctccaacgatccaagcttgtgtaaatcatatatctaaatgagcaaaattatcatagaatgactcataagtaatcatgataattttcaaatcttaactgagagtctcatatcaccttcttatgaaaccatcgcttgaaattctttttgtgtaagacgttatgatctccatctgggtattgaagctttatctcttctaagtgttcattttaagtcatataacatcactatgttaaatgttaaataagactatttagaataagaccaaatattgattaataaaggaaaatcaactccaaggtccttttgtgcttcctccatatctttaatatttatagttcttgaacatacttgcctaaaaaagttgcataattctgcaatagttgtcgatatattttttgggagaaacttgcggacaccaactgccaataatctttgtataattacatgacaatcgtgagatttcaatccaagaatatttgataaatcattgttcactttcttcttcaaatttgagcaaaatccattgggaaacttcacgtttttgataaattgataaaattttaatttttcatcaactttgagaacgtaaggggcgtgtggcttcatcaacttaccattgtcgtcttcataaatccacatccattccctttatcctaatttcttcaaatcttgtctcacgttagttgtgtcctttgatttatcgttgtccaagattgtgcccaacagactgtcacacacattcttctcaacatgcaccacatcaatattgtgtttcaaagtgtttgtacaccaataat

SEQ ID NO: 353223 - DNA, 504 bp, Cannabis indica
gaaaaaccattgccatgagttgttgttttttgaatccacaacagaaaaagctagggggaaaatgtgcccatttccatcttgtgtacaagcagagagcaatgtacatccatatgttgatttaaggaaagttccatcaataactattataggtttgcacttcttccatccttttattgaaacatctaatgccacaaacaagtacttgaagctgttgtcttcctctgtttgcatgtgtacgatagttccgggattatttttctgcagcagcatgtgcaaaaaacttggcagcagcttgtaagattcgtttgcttttcctcgtaattcttcttgctcgtgctctttgcttctccatgctttcatgtagttcattctcaccccatacttatgtttcatttctcctctgatgtcttgttgcgtttgagttgtttttgtgttggtgaaccatggcttgatgtagtttccaatcaacttcgttgtagcttgtcttttgtctgcaaatcttat

SEQ ID NO: 353224 - DNA, 1376 bp, Cannabis indica
aagatgttgaagtagatgaatgtagagttaagaaatgcaaaatgcatgatttgattcatgatcttgctgttcaagtagctggagaggaatgtactacttttgtcatttcaaatggccaaggaaatatcaaggaaacttctcatcatgtgtctttttatggtgatacttattcagcctatgaacttccagttctgttggttcatgccaaaaagtttcgaacagttctcggtagttccaaggaccaaacattttgtgatgcaataatatcaaattgtaagtttatacgttgtttggatttgaaaggttcaagtaggaagttagtatcgaattctattggcaagttgaaacacttgtgatatttagacctttcatcgaattcttatctcaagtcacttcccaattcagttacgaatttggtgaatttgcaaacgttgaagctcaatgattgctcagatctcaaagaactacctagagattttgagaaactcatcaacttaaggcatcttgaactttctttttgtgataaattaaatgctttgccaagtggactaggtaagttgacacaattgagatacttggatctttcttggaatgaaagtctattatcacttccagattcaatgaatgatttgttggatttgcaaacattgaatctcaatagatgctcaaaactcaaagagcttcctagagatattgggaaactcatcaaccttaggcatcttaaaatctctgattgtgataaattggagtatatgccaagtggactgggcaagctaactaatctccaaatattatcaatgtatgtgctgatgaaaagtgaaaaatctataccaaggcatggtggtgagctaaaggaattgatgggattgaacaatttgagaggcaaattggaagttataaatttgagttgtgaaaaaaatgtggcagtggagtatgagaaagccaaattaaaggataaacaatatcttcgatcattgacattggagtgggattctgaagctaaaatcgatgaaaccgaggctattgttggttatgagatgtcattagaaggtctccagccacaccaaaatattcagaatctaaggctaacaaattatgggggtgttaagctctccacctggctctcatcacttacaaacctagtgaagttaactttgaaagattgtgcaaaatgtgagtatctcgttccattgaatcaattcaagtgtctcaagcatttgacacttgtgaggttgatatgtttagagtacatatccaacactaataatgtcagtgaagacttggttggcaaaaacaacattactaccatctctagagacacttgagttgttggatttgcctaatctaaaaggatggtggagagagattgaagttga

SEQ ID NO: 353225 - DNA, 923 bp, Cannabis indica
tttgtatgtgatctcaaattagccaagtttgatgtcccacttaagtagtcgaccagatgctttaggtttttgtaagacgtacctcaatggttggtcagtgtacactcttatttggtgagcttggaagtacagccttagctatcttgatgcaaagagtaagttgtatgtcagcttttccatgagcaggtattaaattttagcttcgatcactctcttgcttatgtagtatacttgatgttgtatacaatcttcttctcttattaacgctgcactcacaacatgctctatgacaacaaggtagacacccaactcttcattgtgaagaggtttttgataggatagatggttgagccaaatgtttcttcagcttttggaatgcttttccacaacccctgtccactcaattttttttttgtttcttgtgagtatgatgaagaaggacgcgcatttttcgtgaactttgacacaactcttctaagtgcaacaatacatctcattaggcttagtacttctttgattgttatgggcgatgtcatatccaaaagagcttggatctattttgggtttgcttctattcccctagcattgactatgaaaccaaggaatttgcgagaacctatgccaaatgaacattttaggaggttgagtttcatgtgtgctctcaaaggatcctgaagcattcatctagatcttccacatgcccccacgcctttttggtacttatctagcatgtcgtccacgtacacctacatattccaaccaatgagatctttgaacattttgtttcacaagtctctagtaggtggcccccgcatttctttgctcaatgagcatgaccttgtagatgtataggcctaggtttgtcatgaagcatgtgtgttctaaatttggcaggtgcatctagatttgcttttaatgtgaat

SEQ ID NO: 353226 - DNA, 1062 bp, Cannabis indica
taggcaaagggtatttgtttttaatagttaaattgtttagctctcggtagtcaatacacattcaaagagttccatctttcttctttacaaacagaaccagagctctccaaggcgacatactggtcgggtgaaccctagatccagcatcccttggagttgtatctttagttctttcaattcagtaggtgacatgcggtaaggtgcttttgaaacaggttctaccccgggtatcagatcaataatgaaaatctatctcctgctgaggtggtagtcctggtaattaatcaggaaacatatccaggaattccttaaccactttgacctcctcaggtccaagcaacacatgtttaccaaaatcaattacaaccgctaggaatcctacacacgaatcctacacatacactgtgtagtaaatccctagcctttagtgctgaaattctagggacacgagaatcgtaaactgatcccactaaaacaaaaggttcctcattttctagttgaaaagttacctttttccatttgcaatcaatactggcagagtattaggacaaaaagtccattccgagtataatgtcatacttggctaatggtaactccccaagatcagcactcagttctctgccttcaattctgattagcacagatctaaccctttttcttgaaatagttagttccccattaggcaatagggttgcaaatcccatttcaaatacatcgctaggcctaccaagctgaataagaacccttgttgcaacatatgagcgtgtagctccagaatcaaataaaatagtataagtgaaaccattaataaaaagctgtcctgtaaccactgaagggctggcgacagcatctgcctgagtgatggcaaatacatgcactggtgcaggttagcttcaggcttaggttcctctttcttcaactgaggacaatcccttttgagatgcccaactgatccacaatgaaaataagccctccggttacaagtcccagggtgatgtttcttacagcgtgggcattcaggatatgagtaggtctaacgtccccctttactctggttctcac

SEQ ID NO: 353227 - DNA, 677 bp, Cannabis indica
aaagataaagctaaaaataaattcctaacatcttgaacaataagaccaaactgtgaggacataataacattgtccgagggatgagttgcaatccaaatcaaagcttctttgatgcctatgatctcaacaatttcaagttggacatgttggacatacccaacatttcccttcttgaaagtttctaccatggttccatgatgatcacgagctacacagcccactccataccgcccctcttgttcaaataaagctccatcaatattaaatttaatcttgtttaacacatgtgcaatccaacgctcacagtcccgtcccctatcattcaaaggagacaacgaaaggctcttccttccctgagcaaatttgtattgatcgcatgtttctagctgatgttacaatatttgaagcaagccaactcttcttttgccaaacaaagtcattccgcacacgctaaatagcccaactcaccatcgccacttcctccatttcaacttcgtgccccctggtgaaaattcccaacaaccagctgctgaatgttgcagccccagccccgacgtccactatgttgcgatgccatgcagcatttgcaaacgagcattccaccagcgcatgttgaatagtttttgtactagagttgcacgaagggcagttggcattgacaggaacatgacgctttt

SEQ ID NO: 353228 - DNA, 531 bp, Cannabis indica
tttttactaaaattaggaaaaaagtccttaaaatccaacaatctcaatagttcagggggcatttttaacgaccttaaacgtttaggggacataatttggtgcatgtcaaagttcagggagcaaaaatcataattagcctttaataaatattcactaagttgattgtaccacatgcgtcctgattgtattaatccacacaatgatctttataatttaattgagcacatttctcgattgcttgaattatatgcatcaggcatcttaaatccttcagggatcttcatgtaaatattactatctattgatccatataaataagctatgactacatctattaatcgcatatcgagttttttactcatagccaagctaaccaaatatcttaatgttattgcatccaccacaagagaatatgtctcctcataatcaatacctggtctttgagaaaaatcttttgctacaagtcttgctttgtatctcacaactttattttttcatttttttttacgtaaacatacccatttgtatcca

SEQ ID NO: 353229 - DNA, 649 bp, Cannabis indica
tatgcagtgggaatcgtgagcaggtatcagacaaatccaggtcaggaacattggaatgctgttaagtattgtaaagaccgcttagtttaatttggaaattagcagatatttaaggtttaattatgaaaattatttatagatatttaaataattataaatgttgttatatttgaattttgaatgcatttttatgtcatatagtgaaatttcataattttgcattttctgtgcctagcaacatggaacgcggtgtatggctcagtagaatcacaacttagtatttttagtatagtgggacggtttatttagacaccaggaaagtcggggttggtcgggaatttagaatttcccaaaataccgttagtatccattaaattagttttgtgtgggcaagggcattttggtctttttgcccttttagtgttttgtctttatgtggatcaattaaatgaattattaatgattttgattaattagttttgtctgaaataaatgaataaaattatttttatctttcatttttacaaaattggagaaaaaaagaaaagaaacaaaatccaaattttcctctcaagccctctctctctctctttcggcctctctttgagcagcaaagaagtggtgttttccttggtaattcaagctggtt

SEQ ID NO: 353230 - DNA, 552 bp, Cannabis indica
gcgattctttttcaggttcaaattttgggtccctcgtctaggtctaggtttgagtttggtacttcgtctgggttctggtcctagtctgaggcccagatcaggccaccgactagtggtctgtttcaggacccgttaccggaatcccgagtcaacatcaggatcactgtcacggttctcggtcttgttctagttcaggtcccatgtcccatttctgagtttgagttcggggtcgggactggggtgcgattctaggtcccgaccctagttcagtgtccctagtctggttccatgtttgggtctaagttcaggttcgggttcgggtccccagtcccggtttgggttgggatccaggttcgactcccaaatcgggtctaggtctgatttggagtccgagtcctagtcttgttacggtgctgggtctaggtccaatttctgttatgatttcatgtccatgtccttgatctagtcccggtcgactttcggttttggttccaattttgggacacacggtatgggttcgggaccaactttgggtttgggactgggttcagg

SEQ ID NO: 353231 - DNA, 673 bp, Cannabis indica
gaagaagaatttcaaaaataatagctctctttattttgtatttttttcacaaaaggagtgggatcattatatgaatatcaaatctatacttttctatttatagcttagcttttagggttaggtttagaattaaaatataataaagataaaaataatagctttattaaaccccttagtcagaccctatagtgggcctattaggtttcaatttttctattttatttagattcatctttcttttcacaaatgtcatattttaattctaactctataaatgtcaattctatctatttaataataataattaattatcaaataaaattacaatttgttttatttattaattaaaccttacaaagtctcttaattcataaataaactcgaaaatcacttttcttctcaaataagccctagcttagttaaaattcacaaacaagacacagtcttattcataattctaattgattaattaaaatcaattaattgagacgacaaaaaattattatcccagttagttcggggaccatggccctgttgttgaaggaatttttacaacaccaatataaattataataataatataatggagagcttatgcgagtactcaacctagaatgacgagtattcaagttaaggacacaaaatacttaataaaaactggaaatataaagaa

SEQ ID NO: 353232 - DNA, 845 bp, Cannabis indica
attacaaaagataatattcgaacttctattataccggaaatattgttggcaaaagttcatttggtcacattataggccgcaaaattaaagattttagtaataaaaaaaattacaactagtcataaaagtaaagagaagtttgcattttcttgtgtagttcttaatttttcaaaaaattttgacaccctttaagttcttgatcaccatctcagaatcactctccaccataacttaaaatacaataaaaaagatggttcaggtgacctaatcttattattgttgagtttttttttttgataaattattatatttaagttaacacagtggtgaaataattgtattgaagcttaacaaaatataataataaaaaattggataatattcagtgcatttttgaaggtaaatgatgatgatgtaatagcatacgaaattaattagctttgtccaccacacaaaagtatggatttgttcattctccaatttctagtactaacgacaactttccaaccacacaaatcaattttttatgtatatatttttagaaagaaaagtcaagtttttatcattactattaatattagtactattcataaactcatgtttgtattcgattcacttgtgaaaattttggagaggaataattcttactacttttattttgagaatttaataacatgaacagttagaaacatgatatatagtattaattgttagatttaaatttataagttatagatgttataaatattaataattatgtggatgtccaaatcttttatttattactattaattgtaatcaacattcatctttttcttagtttccctttttcttagtttcttaat

SEQ ID NO: 353233 - DNA, 690 bp, Cannabis indica
cccaacacaacttgcatagacattcatctctctttctgcatctgtttttggtgagtgagatgcaaatggtgttgcaactggtttgcacttgaccatgccaaacttgttcaatactttctgtaggtaggcagcttgagaatgtattatcaagccaggcttaggtctctttatggctatccaaagaattctctttgctttacccaaatctttcatctcaaactcgtcactgagtttcctttttagcttgtcaatctctgactttgctttgctaaataacaatatatcatcaacatagagtagcaaataagtttgattattgaaatacacacatgagtcatacttgcttttagtgtatccaatgttctgcatataagtgtcaaacctcaagttccattgcctacgtgactgcttaaggccataaagagacttcttgagtaagcatacctcatttgggttcccattgtcaaagccctcaggctattgcatatagatttcctcttctaactcaccatgcaagaaagttgtacttacatacatctgttcaatctctaggtccatgcttgctacctttgccatcatggctctaattgaatcttgcttaaccattggagagaaaatctcattatatgtaacaccctaactatcttaggcgtattacgtgatttttaaacgtgctgtgcagctcgttgc

SEQ ID NO: 353234 - DNA, 1009 bp, Cannabis indica
catttacgcgtattttactcacacaaccgtctaacacttggaaatgcaaagagttcagcacaatacacaatcacgacctcgcttcatcaagtgaggtacaatttttgagatcataccgagtagtgtccgatggcttgcttgcccaagttaggtcgatgaactcagttggaattaaaactgccaacataatgtctcatgttgctttgcaaagtggaggttacgagagaatgccatgtcaacttcgagatgtctacaacagggttgctggtgccaagcgagaagaaaagatagagacggactcggaaggagcgttgggatttcttgattgtctcgcagagagggatccaaatttcttcgttgtatatcaggtggacgaggagaatcgattggctaacttattttgggcagatggaaactcacgtgtcgactatgtggcttttggggatgtactagggtttgataccacctacatgacaaatgagtacaataagcctctcactgttctcattggcgtaaaccaccatttcaacacatgcatcttcgggttcgctctactcctccacgagaagcttccatcctatcgttggctacttcaaaaatttctcgaatgccatggagataagaagccaaatgttgtagttactgaccaagatgtggccatgaaacaggccatcatggaacacatgcctgatgttacacaccgtctatgtgcttggcatctcaatacaaatgcttccaaaaaggttaaagatccgatcttcttgaaaagatttaaagatctaatgtacaactactacgaggaggaggattttgaagcaagatggttagacgtcgtcgaaacccaacaactaacagataatgaatggtgccaaacaacattcgacacaagaaaacagtgggcagaaacttatttaaggggttcattcgttgcaggaatgagaaccacacaacgttgcgaatcgatcaactcagccctaaaaaaatttttagagaagaattattgcttgcg

SEQ ID NO: 353235 - DNA, 200 bp, Cannabis indica
cccatattagttgagaccatattgcttttaagtcagataattgattttaattaatcaattataattctaaaattagactatgtctagtttatgaattttcactaagcaagggctaaattgtgaagaaaagagattctaggtcttatttattaattgaaagactttattaagtctaattaataaatatattaaatgacaat

SEQ ID NO: 353236 - DNA, 837 bp, Cannabis indica
cggggttatggaatttgaccattttacccctaacttttgaaaaaccttagttttgggttaaagggcaattgagtcttttggtttatttgagtgttaggtggctgccctaagcaagtgacacctagcaagccttatttcagcaaaggaataagctaggaaattcctttttcattttaggaaaaatcaagaaaaaccaaaaattagagagttagcttatttttctctctctctctctctttcttgttcggccaccccgaaaaccagaggaaaccactcaaattcatctccaattctgtaatcaagttaaataaaaggtgttcttgaggttgaggtaatccctagtcctttaatctttgtttttttaagctttgaaatgggtttcatgtattaattttgtgaaagaggggctgctagggttagtattgcttagggttctgattttaggttgattttaagttgattttaagctctggttattagttttgagctgtggtgaggttattgagcaagcttgagctttgaagctcaaggttaggactttaatggcatcctttgatttagtgactttttctcggaatttctggttggactatattgtaaatgcattgtacaggtatactggaaaggtttgtagagtttggattgattttgaggtcatgggggcattttttaggttcccagcacaaaaccggaattctgattctgggggacctgtagcaaccggtgaaccggttggtgtcccagaaccagacttccggttgggaaccggtctgtcagttggagcaatttttggaacactagtttttcccatttttgagatatttagggtattgccat

SEQ ID NO: 353237 - DNA, 564 bp, Cannabis indica
attttaataaaaaatactattacttttttcattatttcaacaaattaatttatatttaataaatttaaattaaaatatgttactaaaataatcaaatattattaataataaaaagggtccaaaatggccttaaatctaacaattattcagaaaaaaaaattaataaatgtccatttttataaaaaattaacaaaatgtccattgtattaaaagtttgtgaaattttatttacaccccaaaaattgttaagtacaccctattttaataatttttattttctataaaatttatatatttaattgtattgagtattttttattttttttctttcaatttatattcttaaaaaatatacctatcaaacaaaattaaattatattttaaaaattatgacaaaaatattaaaataaaaaattatatgaaattttcttagaaaaaaataaaaaaatatatacatgagttagaaaaaataatgaaaatggaatcaaaataagtattaaaattaacataaaataatgtgaggaaatttttttaaaaaagtactaagagtaaattttaaaaatt

SEQ ID NO: 353238 - DNA, 643 bp, Cannabis indica
gaaccagagatctctctcgatctcttgatcgatctaacccagaaacccacccaaaaacaccacacaacacatacacaaagataaagcaacaaatagtagggttagagagaaataacaaaacaccagaaatatagaggttcgccctagaaattaggggtacatcctctgatgagctcgccttgaagatcgacctcagacctttgcactatgatgaatgaatattacaacaggtaagaaatccaagtcacagatcgactggtatttcttaggttttctctctttttgttttctgtgtttatttctctttttctttctgatttctctcactaactcacttctgtttcttgtgcatggacttgaaacatcatctggagctgaacaacttctctgatctggtaaactagggcttttgtgtctggtatctctgatctcttctcttctgttccttttatagttttagttttagggttgatcacagaactaggagttagttacaacttcggttgtaactaacagctagttcttgatccactagaggcaaagccacataggatcttttttttttcttcttttcctgttgtattctgtttgtgcttttatctgtatttttcacttcatcttgtaacacagtaataataaatat

SEQ ID NO: 353239 - DNA, 503 bp, Cannabis indica
atatacgatagtatctatacgaaaatgctattatgtaaataaaaaaattaaaatttgtttcaatatgccaaaataaactaatgtattagtataggcatagtatagtcatatatatgctaaataaacttatgagcaagacatttcatgtgaacaaggtatttcattatattcaaatctttgacaagtgcatatattgttatctaagtttactatgtaagacatgttacagtcatgtactttgtatacaactagatttgatgtctagacttgaaaaaaaaaaatagactaattagtttgttattttatagcacacattgtgtttgaaataaaaattgaattgtagttctaatatactaaaaatagactaataggtttattggcgcatatcattatgtttgattatagtttactctgtattgaaaaatataaaatattgttctaacaaacagaaactagtaggtttattgacatatataatattagtgggctatatgaaatgaaat

SEQ ID NO: 353240 - DNA, 567 bp, Cannabis indica
tccaacggtaccagaaccgctggaaaataataaatatcgagagagatatcgcacttttactgaagcaatactggaaagaaatttgaaaaactataattcgacacccagcatgaaaacatgaatttttttgacatcaaaataatcagaataaaggaagagtctcttcatgaaaaaaatagatcattaaattatcttcaaaaaggtacctagatcactaaaaacggacctatggagagagagatatggtagttttataaaagccaatttctctgaaaaacgaaaataaaaacacaactacgaattttacctgaagatttcgaagacacggaacgatgatcagataacagtggttgattgctgaccccgaagctcttaagattagaacaattgatttggtaaaatagagaggataattattttgagaggtgatgagaataaggtagataaatggctgctagggttctaaaactgttcatatgagtatatacgtatatatgagatatcgtataataggtttaaatttaaaataaaaatctaactaatcagataaaaattatgctaatataa

SEQ ID NO: 353241 - DNA, 841 bp, Cannabis indica
cgggtcgttgtgcagaaatctgatctggatagaatcttcatcgttgaaagttatggttggctctcatgctcgtggaactttcggcttcctctcttccacggccaggatgacttcttcttgctcgtactgagctattcgggcatatctctctcgagctttgcccgtatctccagtgatgtgtgggcctcgaataatgacttgcaagtatccatctatcggtggaggtaacagatcttggttgttttgaccttggttggccttgaaatacttttgtaagtgcggattgtttttcttaatcagatattctatttcccgctataggttgtattatttatttgtgtcgtggccgtagtctccgtggaaccgacaaaattttgtcatgtcccttttgttggtatctttcttcatgggcccgggcttcttgtacggaattaacgactgagtttggcatgatcacagggagtctgtccggattttttggtgagctttcctttcttcccattaccttgcttgtggttgttgcttgaacgcttgcaacttgaattgctgcaataattgggaagttgggcggatgttccagcggaaggaactttaattttgcctggcttttgctcaccttcgactcggtcaaggaaatcactcattgagtcgaccggcccgttcttccttatatccttccataggtcaccaacgactttaatgacttccagtatcgcggataactttccatcctcggttacccgcgacactttggtcgcttccgtcatgaatctgctgatgtatgcccggagtggctcgcctggtcgttgctttacttcgccaaatctcccagatgcaatgg

SEQ ID NO: 353242 - DNA, 814 bp, Cannabis indica
aacccaaactcaaaaatgggacctgtgatttgaaccagaataagaccgagactcgtgacagtgatcaagatcttgactcgcgattcgggtaacggggcctagaacagaccagtagtcggtgtcaagatctgggactcaggacccagacccaaaagctcaaaccgaacacagacctagccttagacccaaactgacactggaactcaggcttgggaacggccgtgtacccagaccggaactaagacccagacctggacctaaatctgggacccgatcccaaacacagacttggagctagatagggatctggatacgaactagcactcggacgaagacccagactgggatcgaaatactggacctatattagaagcgagatcctgaccaaaacgcaaattggacccacactcgggaccccaatttggaccaggacctgaacctagacccagattggggtccagacctagacaaaaacctggacacacactcggacccgaactcaaacccacacctagaatcagacccaaagtaagacccggacccggacccaaactcgaaccctgaccaggatcagaatcaatgacttagacccaaaactgaatccagaccaagacccaggatgcgaacccacacccagagccttatctggacctagactgaaatccggacccgaacccaaacttagaccaggactcgaacaccgacccgaactcaaacccaaactcgaactctgaatcgcaaatggaactaaaaccgaactaggactagaacaaggaccaagacctaaacccaaacccgaacccagatcaaaacc

SEQ ID NO: 353243 - DNA, 297 bp, Cannabis indica
ccattgtttgagactattttttaggcaacccatattaacataaaatgttctttgtgacaaattacaaggctttctttgcaatgatggtcttcatgggttcggcctctgtccccttcgtgtaataatccactgccactatggcatatttcaccccaccttttttggtgggtagggacccaatgagatctattccccacacctcgaaggcccactagctagtcattaaagaaattgttggatatattttaccaggatctagatttacgaaaatgtttcattaatatcctaatatgaatt

SEQ ID NO: 353244 - DNA, 1148 bp, Cannabis indica
agatgcaaaatactctcaacaacccggaataccagaatccgtgggattgaaatttggatcccttgtcggattggttcgatcgtttcctcgggcccacattagctccctttgctgcggagatgaccggcgagtttgcgtcccagcttacccggtgtgcacccaggcggttcgctgcttgtgcatccttgaactccatcttccaagtccaggatctcagccactccctcactgtggtaagtattttgtagtttacttttctccttattattttttcttggagattcttacttatacttgtatcctttcccagcttgctgctgaggccggccgcctttccaagaacataattaatcatggcttcgtcctgtccgattttggggacatggacgaagttaagaagatccttcaggaccttactgctgaaaggcggctttatcaggaggatgctgagcgccgggaggcccttgccaaggccagtgaggaagaggccaagcggagggaagcgcaagcggaggcaatgatccgggaggaggccttcggagagataggctggaggccaggcaccaagaggagctgagggcggagggcgaagccgctgctaaggccaggcgagagcttcgggaggccagggaagccttggatgaaatggctgccaaggtgaggtccttagaggaaactcaccgggcaaacttggagtccagggccaacctggccgcggagctgaaggagctcaaagacttcaaagaccaagccttaaagaaggcaaaaagagatgagcttctttctcctgtctcctgcagccggtgcgccaagcgttttgatgatggcgtcttcatggcctggtctacaaatgaccagaacatcaagcttaccttctaccccaaacccgaggagatgatcgcaaagttccgggagaagaagaaaaagcttgatgccatggtggaggcgcgcatcggtcctcgccttcctcctcgcattgattaggccgcttcgagttcaacccattacaaccaggatttcactctttttctctcttttttttatttacagccaattttcttgtatttaagacaatatttacatagctgtttcttttttatttaaaggggagacaatatttaaggactgtccccgggccatttgtatat

SEQ ID NO: 353245 - DNA, 513 bp, Cannabis indica
ggtttggtttgggcgggttattcgggttgggcggtttacgaaaattttttgtacacccgtagtttccagctctcttgtccaatattttttatcccattaaacacaaattaatgtgttggtaacagccatgtgatgaaagaatttaattttcaaatgtgatcctcaaaacaatataaatagaggtctttggttcacttgtagacaacaacaattttctatcttctaaacactaagttagaaagtattgagaggcttgtttattcccaaaagtatttcaattctattccctaagggcccgtttgattggaagtaatgaaaacaatggaataggaataggaataagaataggaatggtaatggaatggaataagaataggaataagattaggttgtttggttagatttatggaatcaataattgaatacatattcttatgtttggttaactatatacactataaaaaactgctacttttagtgataactttttagtcacaatataaattttttgtg

SEQ ID NO: 353246 - DNA, 533 bp, Cannabis indica
aggatgcgtttttccaagaaagatcttaacgaaaatgccctctgtaattattaaaaatctctttttaactaaaaaaaaagaactttttaaggggcaattgtcatacccgaaattcagctggaggacacgtgtcaaagggaatgttaatcggtgcattaatttttattggaataactcattaattacgtaagtatcagagtatatttatagcccgctgactctaaggtcttaggcgaggaatcgatgtacaaattggcacttagtgtattagcgagaaaccatatgtcgctaaatatgaatagtgaggcactggagaaagtgacacgtatcaaccatgaaagtccttagcatacaatgaacaaactaagtataaaagttaaatcggctcgagagaaagtaagcgaggtgaccgtctcgctatgggaagactacccatagctttatcacactaacggtaacacggcttacaaccctagcgagtcagaagaagtctttgcaagtaagaaccacgatcgacgccagacctacatcgt

SEQ ID NO: 353247 - DNA, 384 bp, Cannabis indica
gtcaggcatccgaccaaaatgttgtagatgctgaaattaccgtggaacaccatatcaaaaaaagagtgttcattccaaggatacccttcttgcaaaatgtggatgaaaatcatggttttccattcaaatgaacgcaatatccaatcaagtttgagttttgcaatgctataaataagtcatagggacaaacattggattacgttgggatctattaccacaacctgttttttcacacggtcagttatatgtagcaattgttggaaattgttttacgaggatcttagatctactcacaagtatgttgattaacaccctaaatataaactttctaaaacgatgaaataaacacacataaaatttagtaaaacttacattgggtgcagc

SEQ ID NO: 353248 - DNA, 650 bp, Cannabis indica
agaaatagtgttcaacagattcctcccccactccacacaaagaacagcttgtatcctctatttggaatctcctcccgatcactgttctgacagggaacgcctctgagagaatgcaccaccaaaggatcttatgccgctcaagtactttgctattccataacttgttccacaacattggggccaccacacaatggttggctctttcctacgcttgatttaggtaagctgatttacttgtgaatctcccgtaagactctaaggtccaaccccatttatcctcctcctgccccgaaggatttccccctttcaagatagcagagacagtgtctttgccaaacagattatttagtttagaaatgtactaagagccaaaattcgtgagaagatcagccacacagttcaaaccaggcgcaatttctctcattggtttcagaatgaaaccttttaaatgaggaattcaaggatccctccaaatgcaagtgtctctaccatgacccacgaacttacaagccccttttctcaggattgccttagctttgaccacattcttccagaaccatgagtcagaatctttatatttttagtttagaaaatcttttcctcgaagatatttggcctctagtaatctgcaacataaagattgacaacca

SEQ ID NO: 353249 - DNA, 674 bp, Cannabis indica
ttttttatattataaagacgaagaaataaattctattttctctcctatttactaaggcgacgaagaatcaaattatcgctatatttatttctttttctacttcttctaccaagtgcaggataaccctaagggattgagggtcttttctaccaattgggcccctcccttcaccacccccatgggaatggtctatagggttcataactactcctcttactacaggacgcttacctagccaacatttagatccggctctacccaaacttttctggttcaccccaacattccccacttatccaactattgctgagtagtttttgggtatcaaacgggcctccccaaaaggtagctttaatgtggctgatttcccctcttttgcaatcagttttgctacagcacctactgctctagctaattgaccacttttccaagtgcgatttctatgttatgtatggccttgcctaagggacgagaccataaatcctcttcaggttgggtttgaggaactgttccctgtgcagccttggccgccgcagcttctcgctccaactcagcgtagcctcaatactagaacaaaaaaaaaaattgaaagtgtaaattccgcaatcgtagcctcaataggttttcttataatttgggtatgttattttggggttaatttattaggaataggg

SEQ ID NO: 353250 - DNA, 565 bp, Cannabis indica
tttgaagtaccattgttgagttgattccaacaatgtcgttaggaatatgtgacatcgcacatcaccactaaccttctgaagatcgagctcatctcgaaatatttgatgtgcattgactggtcttctcaactggtatatatctttcataccggcatcttgaatttggacaagggctaggcatttatgtatgccgagaatggtgatccccttgaccggtctagtttaagatctaaagggttgggactagctatgccctaaatcatgtcccttcgttggtctaagtgtgctttcacagaaggatattttgctgtagggacttgactaactggccctccttggacgggttgcagattctagtatgacagggtctagcaggccatactctgagagagtgtatggtggaggtcggccagacctgcgttgtaattccctaatcaatagggacgacacgtttgtgattttatcaactagtttattactaatagattaattaatcattaaaatctgtgataatattaaaaactttactataataaaactgtaacaccctaactaatttaggcgt

SEQ ID NO: 353251 - DNA, 581 bp, Cannabis indica
gggtttcgagactttagagatttcaaccttgcgttattggctaagcaagggtggagactcctcacttgtggtgatactttgatggggaaaatttttaaagctcgctacttctctacgggttcttttctgtcggctacacttggttctaatccaagttacatttggaggagtgttcttgaagcccaggacttggttcgggctggggttaggaagatggtgggtgatggatcaacaacgaaaattttgatggatccgtggctagctgatgagttgaatccgttcattgaatctcggcacccagctctagttggtaactcagtaaagtctctaatgaagcccgatgaaattgaatgggatgatgaggtgattttggatgtgttaaccgagcgagatcaagctctagtcttcaaaattccactctcacaacactatgtcaacgacacctggtattggatgaaggaggaccgtggtttattcacggtcaagagtgcttacggcctgcaacaagagattaaaggtaacagtggtatggctgccaactctggtttttggaagcaactttggcagctgaaactcccccc

SEQ ID NO: 353252 - DNA, 585 bp, Cannabis indica
agttagatgtctgggttcgagcatcgtcaattcaacaagcagctttgatgaaggcacttccgcaaacttaaagccaagaacctctcttttcgctctgaagcttacttagcaaagaagggtggtgaaaatgagtttatgtgccaatgctggttgatatttataggcaagtcacaaaaagaggtaatcatttcaaaggaacctcagacgcttcgatttccctccataaaagctaatatgtgaaatcaaaaataatcaagtgcttccgccagccgtgtagagagagaatcggatttcaaaatattaattgttagagaatttactagccaaaaactgaagggacgcccagtcagcctcacatcgagtctcggaaggtcgcgcttaacacgtgtccccatccaaaggcagaagcagctcggatgaagtctacacgtaacttcgaaagtcctgtacagacttggggggcaaatgttattcaaatttttgtactctgacgtggcatcacatgaatggtgacacgtggaatccacttggagcatctgctcgggaagcatagtccgagcaggatgtctcgctagcatgcccaga

SEQ ID NO: 353253 - DNA, 646 bp, Cannabis indica
attagtaagctttgagacactaataagattcttggtaatggatggaacatgtaaaaatgaattgagatctagagatgaggaattcttagcaggtaagaaagctttaccaatatgagagatgataagtttcttaccatctcctacagcaaccgtttcttggccagagtaaggaatggaattgtcaagaggactgtcactgtaggaaatatgatgggtggctccggtgtcaacaaaccatccttgatcatctccaaagtcagggacagtattagcaacaaaagcagcagggtcatagtcaagggtgtgttctgtgagatgtgcttgcggttggaaaggggcagtaggggctttgggtgtaacccaatttttatcaaatctatagtgacaagtaggagcagtatgcccatacctcatacagacctgacacaaaggtcgattggagttggtagacctcgagttgtagggtggctgatttccacgagcaaaaaatcttgaagaatgaccattgttatctgcaccagatcctcttcctgcataattgttaaccctaaaattaccatttcttgaaccaaaagtgaggttcgcagccattttagttgataggtccatcattgtagaatgcctttcaagtcttgtttcatgagcc

SEQ ID NO: 353254 - DNA, 1134 bp, Cannabis indica
tagaaccgaacacagacctagcctcaaacccaaactgagactggaactcgggcccggacacggttgtgtacccagaccggaactgagactcggacctggaccaaaatctgggaccagacctcaaacgcagacttggaccatgatagggatccggatacgaacccaagcacccacacctagaatcacacccaaggctagacccgtacctagacctgaactggaaccaagactaggatcagaaccaaggacttagacctagaactgaatccagactcagatcggtattggaacttgggactcgaatccaacctagaccaagaccccggacgcgaacccacactcaaagcctgatctgaacctagactgaaatccggaccccaaccaaaacgtagaccaggactcgaactccgacctgaattcaaacccaaactaaaactcagaatcgcaaatggatctataaccgaactaggactaggaccaggactaggacctaaacccaaacccgaacctagatcaaaacccgaacagagacctaaacccaaactgagataaggacttgaactcgaacctagaccgggacccaaacccacacaataacccggacctggacccagaatcacgataaggacctgggaagctaaactaggtccgggacatagtacccgacaaagaccggaacttgaacataggtaacagctcgtgacccgacacccaaaatggaaccagactgggacccgagattgggatctggatctcgaccctgggattggaaaaaacccgtagtcgatgtcagggtttgggacccagccctggacccgcaccgtgacaaggaccccaacccacacccggacctaaacccagtcccaaacccaaaagtggaaccgaacccgtaccctgtgacccaaaatttgaaccaaaacaagaagttgaccgggaatggaactaggacttggacttggaatcataactaaaattggacctagatcagaaccgtaaccggaccaggaccgagctccaaatcagacctagaccggaattgggagctggacccggatcccaacccaaacctagactcggtatccgaacacaaacctgaactcagacctaaacatggaaccagactatggacacaga

SEQ ID NO: 353255 - DNA, 728 bp, Cannabis indica
gaatgaaattagaaaagcagtaacaacatattaatgtatattaaaaggactatttttacatgaaattactattctctgtgttgtgtactccagtaagctgtgttgatacttggcttcattatattgggctataaaagaataataataataataataataataataataataataataatgaagtgttattattcaaaatattttatgttgaaattttgtgggatatgacctttttaatacagttattctataatatatattaagttaaatttttttttaaaaaaaaatacaagaacagcaaaaagaaaaaccctgaagaatttaagatgtctaaatgcatataattcaaacaatctaaaaatgtgctcaattaaattataaaaattattgtatggattaaaacaatcaagataaatgtacaatcgacttaatgaatatttattaaatgaaggacataaaaaataatcctatttatccatgtgtttttataaaaagtttaaattctgagtttgttatcattattgtttgtgttgatgatttgaatattattggaactcttgaaaaactttcagaagctatgaaatatctaaagaaagaaatgaaagatttaggaaaaataaaattttgtcttggtctacaaattgagcatttaaaatgtttttcattcatcaatcaacttataatgaaaagattttgagacggttttatatggataaatcacacccatt

SEQ ID NO: 353256 - DNA, 561 bp, Cannabis indica
cggattaaagaataagaacattcgacgaaaagttaaaactcaaaagtttgaaattttcgtgagttagggcaaaaaattcatgaagcttagaataagcaagatgaaagacagacattatgcagttcaaaaagcaagcattatgaacgatgaaatagcacggatcgttacaaaggaaaattgctgagtttctaaacttagggtttcttacatatcttcaacagcgaagtcaaagtttcatttagaaaataaatgtgcaaagtaaacataaaagaaattgaagacttactcaaagatcaaacgtcttgatttaggttacgccaagccaaacgagcagttttggtaaaaaaacttcagtaaactcgaagctaaaaacctctcttttcgctctgaacttacttagcaaagaaggttggtgaaaattagtttgtggacaaatgctcactggtatttataggcaaacagcgaaaaggggtaatcatttcaaaagaacctcagacgcctcggttccccccaaaagcgaatatgggaaatcaaaagcaatcaagtgcagccatcaaccgt

SEQ ID NO: 353257 - DNA, 803 bp, Cannabis indica
ttattacaatggaagaaaattaagacattacaacactattgtaatataatacaaggaccaacaaagagattaaataaatattacaacaacatatatatacaatatatattccatatatatatatgaatggtaaaagaagaagattacaacacatgtaatataatacatatataatatatatacactcactcacaaccttgagtgtatattagtggggatcaccatgaattgaacaaggtattacatttgtccaaaaacttatttctcctatctctatgcactaagggaactctctaggaaatagcttaattatcaagacttacggttttctagcaaagtactttttgataattcccaaagctatttcctagagagttcccttagtgcatagagataggggacttttttgatagaaaatttgatcctctaatatgatcaccttagacctctttatataatgtttaagatatcaccacttaaaattcgaattcataagtcataacctgcatggatgttatagactcaataaagagatgtaactcatgcacacactcatgtacaccataacttctatagagatgtaactcatgcacataccataactcatatagcattaagaatttcaaattaagatgtgtaataccttttacactcttaatcttagtgataatggtggaggttactcatagtaacaagtaacttccccaaatgttacaaaaagataataactaatatatattacatattattagtttattatacatatttaatctatatattatattattataaataatataaaa

SEQ ID NO: 353258 - DNA, 717 bp, Cannabis indica
acgtggaatcaactccgggtatctgctcggaggatacaagccgaacaggatacctcatatgcatgctcttgacgaagtagtaagcaacccgctcagaacgacaaacacttaggaaatttggcttccgcatcgtgagtcatcaagaaaatccctataacttggggatcagattacagagatatggcaagctgtccaaatcccacgatcagtgtattctgtatttaatatgcaatctttctgcttatagaaattgtaacgagaagggaaatacttcctctccaagctcatagccctatatatagtgatgcatattcactgggcaaagggtcgaaaaacgttctaattgacagattttgtctaagaatttgtattcagagatactatttgaagagatataagaaaaggaacctttctccttgttcttaagtcaatacaattaacgaggattaggctattaccgaactgctcggggctgaacctctataaaattcatgtgtctttatattgctttattatatttcaatcgttataaactacttgtcgcttactaaattaaactcactgtcgttggctaaaagcgaggtcaacatcatttgatacttattttaatctatttattttaacatatatttatttaattaaaattactaatttagataactctaaatataaattttaatttaatatttataacattataccctaggaagatctgaa

SEQ ID NO: 353259 - DNA, 735 bp, Cannabis indica
atttctactgagccaaacgccgggttccaaaataccgggcaccggaaatgcaaaatatgaaaattactgaatgacataaaatgcatcactgaattcaataaataacactataataaattatttaaataactataaataattttcataattaatcataattaactgctaatttccaaattaaactaagcgggctttacaaacttcaaaatagaagatccaatcgatcatcaattgatggtggtcataaccgaagaaggtgagaagaaagaagatgatctagaccctagaatccaagacgagaataaccagataaaaccaattgaagagctggaagaggttgttttagatccaaacaatcccactaaatgtgtgtttattaggaagaatttggatgaaaaactaaaatagcagttaattaactttctgaaggcaaaccaagatcaaaatgcctggagctattcagacatgatagggattgaccctaaggtgatcttgttggaatatgttttaccaagatctagatttactaacaagtatgtttttaacatcctaaatatgaatttctaaaacgatgaaaataaacacataaaatgtatgagaaaccttacattggttgcagcggaattaaatgactccttctacttagatctctaacccttgtatcctttctgtcgcagagtatcaccaaaatctgagcctgaaactcctttagttgtttggattcttcacagtctt

SEQ ID NO: 353260 - DNA, 557 bp, Cannabis indica
tacttaaatattattgatatttttaaatttagtagtttaactttaaattaaaataaaaagaaaaattatatagatattttatataaagaaatttaaatttaaaatattataaatatttttaactttattattatttattttatattttaaattgaaatggttgtaataaagaatatattgatcgttttctgttttagttatggtaaaccgaatcacacactatatttttcgtaaagtttgcgaataaaaaaagatttatatgaaatttatgaattcaacatatatagtgtaacgtccccgcttcaagcctccattaggtccttacacccacggaatgaatgactcttatacacgagtacgtcactctggctgcttcatggactgacaactgaccctacagaccaacacgagtgtttccagcatgctttgtcctcactcacacgcttcctaggaaaacttcccaggaggtcacccatccttaaattaccccaggtcaagcacgcttaactgtggagttctttcgagatgggctaccgaaaaataagatgcaccttgtt

SEQ ID NO: 353261 - DNA, 1142 bp, Cannabis indica
tttttaatttttttttaccgatggaacaatctcaacccatatgatataaaaatgagatatttttttaattagatagaaaaaaataagtataaaaactcaaaattttctaattttacccactcatgggtaatacccattaagagtgcaccaacatatatatatatatatcaaaaaaactaagcttaaaattgcatgagttatgaaaaatctagtttttacaaatgccaataattaatataaaaatatattgtatgtaaaactgtatacgtctgtagcagcaaaaagtaattatgatactacagaaactaatttttcagagacaaaacagactggcagaatataaaaataattgcaaaaaattaaatcacttgacacaagagatttgtacgtggtatcagtgttctttcaaacactactagtccacggggccacgcccagagaatgaaatcaattagtaaagtatcaaagattacaaaagaaattgacttaaacaaatttagactccctctagtgatttgccgcaaccctttgtaatccaccttgctaatctgatctctgaaacacaccaagtagtgaactcccttcagctattgatgtgtgcttacttcccgaagtaaggcttaaacaaatcttctcccgaagatatatgctcacttcctcccgaaatgagacttggaaaagtcttctcccgaagacccacgcttgttcaaagcttctcttcaacctattctatgaatagtatgagatcataataagaaaaccaaaacctagttgaacactctaggtttttacaaatgaaacactcttctcacaaagaaagatatgaaaatatgagactagaagagatgaaatcgtttggctgctctctaggtcctatttatagaacatagcaaccctagagacagccacaaaacgatttcccagctgtacaaaactttcctaaaaaattcctgatttgcagcatcagaatcgggttttgcagtagcagatcaggaccagaaaggaaactttccaaattgaaccaagatcacgaatttggacttcaaacctgccaaataaagataatttgatttgttctaataaaggcaaaatcaaaatcatcaattagaaaagggaaagtcaagtttcccaaaattagacaa

SEQ ID NO: 353262 - DNA, 921 bp, Cannabis indica
ttctcgaagtttagacctcgcccaggataaaaccagcgagatactgcgagtgcgacctaagtcgcaccacgtaaccgtaattctcatcatgcagggtagatccaactcgcatgtgtcagaacatgtgcgagtgtcccctctatatttccgcgacaagtatagagaccaactccctatgatgcagtttggtcccaacgacccaatagccctgacagaccgatataaattcgcatgtccagattttactagctccaacatgcgatgtctacaaggggcgattacctaaggacgcagacgttccaaacgtactggcgatcctgcgagctcaacaaacggaacatgaacagtcaactcgcagatgcggaagacgcatacgttgatgaacttagtaactgtcacacatttattaatgttaacgttgtttgagtttaattattgcaattcaatgtgtaaataatggattaacaatgaatgtgatccttatgtaaccgattggacacctactttgtatataaaggggtgatccaccatgaaaatgcacctacgaatcctttgctacagtggactaagcagatcgaaatctgactgaaccactataattctttgtcttgtttacattttccagccttgttgtttgttcttgcattcccagtcgagtactcgccattctaggttgaatactcgcacttgtcatttccctaaaaattctcttttatatcaattaaataatactttttggtgttgcgaaattcactcgacaacagctgaaacgcaagtcgcagcaaatttaacctcacaaaggtagtgaaatctgatttagaaaccttcgaaatcagatcttcacacgagaagggctcgttcagctgactgtcgtcaaccgagtccgtcccgctccctgccgcctcctcttcatcctcgcct

SEQ ID NO: 353263 - DNA, 703 bp, Cannabis indica
tcgttgttgtatggctagttccgctacaataatctctgcttcctttgctttaaaatcttcaaaatcctttgtcttgttagtgacagatatggacaaatgatctatagctgccaaattatccttatcacgacgaagaagatccatgataagagattcatcaagactaagggcattctcaacaacttgagcagaagcgagagacttttcttgggccttgagcaagtcattggcagagtcagtgaaccatgcaacctctgctaaaccacatttgtaatgcccacaaagggtactcaacacgtcgagttgcatactcacatcagcatgatgttttgaaatgtctgatgtggtcaaaggagaagatgacaaatgaagaatgtctttcatgcattcaatcacaaactttttggtatgctcattcaagtttgagttggtgatctctaaagctgacactgtcaacactgggtccggtcgaggaataagcgaatctgagggaacaaatgatgatggaatacctgtctttgctaagcaatcggttctggtggaatggttagctctgcaggaaatgcctcactgtcgaatcctttgttaacataatcatcagacccatcaaagtcgataagtgttcatccctagagctagaagctccaaaagcaagtatcagatggtggcatttctgaactctgagtaagtgggaagaagacat

SEQ ID NO: 353264 - DNA, 607 bp, Cannabis indica
atatatatatattcattttatttcttaagtttaacaattagattacaatgaacaaacaactagacaataatttaattgtaaaataaaaataaagtattaacatattatatcaactcaaaacaaattgaaaaacaacacacaaagggttcatttggtataccgtataagagtcgtattatattaaataataaataactctatatttggataaaacaatgtattgtattaattattacgatcaaattttttaatacaatgtatgttgtattatttaatacacaacaaattatccgcattagcttgtattataatatttaaaaaggatttagggtcaacaccaatctctgacccgaacccgaacccaaacccaggacccagacccgggacccaggacccgcacccgggacccgggacctgggacccgcacccggactgggatcgagattgggacccggatcaggacccgaacccggactcggacttggacccaacccaaccgagactcgagacctgcccccggacacggaccaggactgggattgggacctggacccaagacccagacccaagacccagacctgagacccgggacccgaacccaaacctg

SEQ ID NO: 353265 - DNA, 587 bp, Cannabis indica
cggattcaacgtcgttgtctcgccattggggtgtgctgcgaggattatgtcgttctggatcctcctccatctggacctccttattaaggtttctcgtagactcgtccctcgatgtgggttggttcaaatcaagttcctcctgattggccctacgttccctgcgagtatgattattacgacgtctagagttagttcctgggggttttctgtgcgagtagtaggtactcggggaggacgtcaagtcatgttttgtccgtcaacctcggcctccagagcgcatagctggtctctcacagtgccccgacctactccgtcgttgatcacgtctacgggaggcactctgcctcctgacagtgggacgttcataatcccaatattgatggattcgttgttaagacctccgtttacttggtttccagccattatgattctccttctaaatcagcaataaagtatttctcgttcgcacagacggcgccaaatgttgttgatggaattttacaacaccaaaataaaaaataacaataataataaagtaaggaacaagtgcgagtattcaacctagaatggcgagtactcgaacaggg

SEQ ID NO: 353266 - DNA, 831 bp, Cannabis indica
tttctttaaagcattatttcttttttaataatattgattttttttaaaaaaaaattaataatattgatttgctttgcaagatatcacttcaattttttttccgtgccacttcaaatattttaattatgtataaagtgataactcttattcttacacttctagaattaccaaaaaatgatctttttcagatatgaatatagtaaaaactacacttgccaacaagataaaagtgaatatttaagtagttgtttgccagtattgtatattgaaaatgagaaatcgtacaaaaaaaaaaaaattagtattccttatcaataactttctagatatgtaagaaagaggttctgcgtattaattttaattatgaagatttttttttgaaagaaattttaattataaagttaataaagcgtttttgaaatattttatcacctaaatttataatatagttcggcccccccctaacttctcattctggctccgcccctggttggtcttaattgggctcatatgtgtggtcttccaattcatgcagcttattcagattcgttagctttagtgacggccatcaacaacgggaagatgtacttcaacaagttaggagtgttgtttgaagatgttataactttattgtctaaattttcgggggtagtattgtcccatgtggctcgctatgagaatttagcgacccatggcttggcaaagcatgctccgtgattagacgataagctatcttggttcgaagagattccagcaccgtcgtaaattcatgagtgattctaatccctttgtcaaaaaaaaatgtatattaaatcaattaatatatatttt

SEQ ID NO: 353267 - DNA, 897 bp, Cannabis indica
ccccgagcctccgtaattatggttagggatctccgcatctcgggtcggcctgtggtacgtcccggacgtcgagggcttgataccagccacctccacgatgttctccagttggtgagggcaagtcagcgtggagtgaagctcagccgcctcccatcccgtggcacggggtctatacccctcctgggcaacgggacccaccatgacctcttccaaggtgaccaggcgctttccgctcttcttggaagattttgaaccagatgcagacatttttggttctgaaaaagagttaaaattccagcaattaggccccataccaaaccctaaatcaaaaaagggaatgggggtcccctaaccgctggaaagaggccccctccggacatttgtcaaacaagaaaacctttgaaagatttcctggacaatattcgggtgcaaacgtctcacagatagtgacagtgcgcataaaagaaaaggaaaaaaggaagggcacaaaactgagaaagacaaagtcttcgttatgcccttgaaggccatcacacacaaagaatgagtgagccttcacaaagaataacaataatgtgtaaaaagagtgaccctaacaccagagaagggaaatctaaacgtattacgtaaaaactcagggtgaaacattcccagaaacttcaaacactaaacctaaaaaaataagtaaatagtaaagcatgccatgaacacaacagtaaagtaacagatgcgagaagcttacatgaagtgttggaactgggggttgctgtcgatcaaacaaagagatgtagactgacagtaacgaacgaaggttagcaaagaaatttgtaaagtgtttgaaggttttctggtctgagaattttctctctggaaaactcgaagaaagttggcgaaaaa

SEQ ID NO: 353268 - DNA, 614 bp, Cannabis indica
gtttgacaatgattagacccgatgtagcattccctattaataaattgagtcagcttcttcaggctcctacttcagaacattgtagtgcttgcaagagaacactaaggtatttagcagggagattggactctggtttagtcttcacaccagcttccaaaatggagttgcagactgatgctgattgggtaggttgtcatgatgataagaagtccatatcaggatactgtattttccttggaggtaacttggtcagttggtgctcctagaaacaaacattggttgcccgatcaagcactgaatctgaatatagggcccttgctctggccacctttgaactggtttggattcaatctctgttcattgaactcaaaataccaattcttcagtgtccaatcttgtggtgtgataatttgggagctgattctttggtttccaatccaatatttcatgcaagaaccaagcatattgacatagatctttattttgttcgagataaagttctttccaaccaactagatgtaagatatctggacgctatgaatcaaatagctgatatatttacttgtatcttcattccacttcctcaaagacaagttagcacgtggtctagacca

SEQ ID NO: 353269 - DNA, 1166 bp, Cannabis indica
ttacttttagtaaacatgccattagggtttggggaacgggaatgggaacgaactgggaatggaatgagaatacgaatgggcatgggttggggaataggaatgggcatggattgggaatggaaatgggctggggaatgggaatggaaatgggttggggaattggaatgggccaatgagccggggaatgcgaatgggaatgggaatgagtacgggaatgggaatagaaatgggaatgggaatgagtacgggaatgggaatagaaatgggaatgggtgagagaatgggaatgagaatggctaagggaatgggaatgggaatgggaatgagaatgggaatgggaatggtcgagagaatgggaatgggaatgggagtgggaatgagaattggaatggctcaggcaatgggaattggaatgtgaatgagaatgggaatgggaatgggccagggaatgggaatgggaattgggatggaaatgggaatgggaatgagaatgagaattggaattggaatgggaatgggaatgggaatgggaatggggataggaatgggaatgggaatgggaatggcaataggaatagcaatgggctggtgaatgggaatgagaataggaatgtgaatgcaaatgggaatgggaatgggccgtggaatgggaatggaaatggggacaggaatgggaatgagaattggttgggatttcggttttgaggtttggggtttgaggtttagggtttagggttggggtttaggggttagatgttagggttagagggtaggggtatgggtagggctttggagtaaagggtcaggcttaagggtttatggcatgtttactaataagtaatgggaatcaatagtaagataattattttcttacatttgtttacttacatcattacaattagaaaatggagaacttgattaaataagggagaaaagattgggagaactttccccactaatttagtaaggaataccattaaaggtaatggattttaatatataatatataatgacaattttgtcttttaaaatatatcttacaaaataactatcatataatatagtttaactgaaaagggcaatttagtcaattgaagcattatgattacgtttcctaataaagtaaacaagataaatcactactattatatttccaaaaaaattta

SEQ ID NO: 353270 - DNA, 619 bp, Cannabis indica
tttatgtgtatgtgtctatgtgaataaaaattatttttcttgtgttttttattacaaaataaataaaatgcactaactcaatatattactaaaaaagattaagaaattaaaagtttgtattttttttaattaatatatattatatattataattttttaaaattatatataattaagtgtggattggattggatcggtgtctttttgaggtcaaacaacatccaatccgcacaagtgcggattttagatttttcaatccaatccaatccgcacaagtgcggatatccgcattttgcggattggattggattggatcgtacagattggattggatcgaatactttatgaacacccgtaggcataatattaaaacaacttaagattactttcttttttttttttcggttgttagagaaaaaaagtatgaaaataataagaagctatttactttagagtggatgagacgagcatatggatcatatcatactcatagtcccagaagcccattttataaataaatgagggcccgtttggcacagcttttggaaaagctaaaagctgcttttcaaaaaagctgtgacaaaaaggtgtttggtaaacagttaaaaaacagcttatt

SEQ ID NO: 353271 - DNA, 1158 bp, Cannabis indica
ccccccacacatcaagtagtactcaatcataatgtgtaaggctgtgaagaatccagttacaagagaaggaaattctgactcagatcttggtgatactctgctacagaatggatacaagggttagagatttgagtggaaagagacattatattctgctgcaactactgtaaggtttcttacactttatatgtgtttatttcatatcgttttagaagttcatatttaggatgttaataacatacttgttagtaaatctaagatcctggtaaaataattccaacactagatttactaacatgtatgtttgattataattctataatctaacatcctaaatatgaatttcctaaaacaataaaataaacacataagagattaagaaatccttcaattgatggtagtagaataataatgactccttccattcatatctctatcccttgattcctatctgtactagagcattatcaagatctaatcctggatcttctctccttcaatatgattagacacaatcttcctcaccatgctaggtattgctttaacttgagtggacatactctcaatcaccacagaccataaaattctatgaagaaatctcaagaggaattaaaaaataataatagaaaataataggtttgcttttaattcagtttgtcagacaagagagagtcttgagtcttctattgaatcaaaacccttaattttctatttatacggattcattaggtttagggttagagctaaatgagctaattagaaagatccaatggcttagaatgcacctcatggccgaatccctttatgtagcctatgagttagaatttcgcattattttgttcttaatgaaaaacttgtctttcttcagtaatgccatttttctagttatttgaatactaattctatttatttaataattataaataattatcatataaaataactatttaaatatatttattaattagaccttccaaggtctcttacttaataaataaaccttgaattctcttttcttctcaattgtgccttcctttgtgataattcataaacaagacatagtcttatttagaattctaattgattaatcaaaaccaattaattgagactacaaaacaaaattatcctagttagtgtggggaccatgaccctatgtaa

SEQ ID NO: 353272 - DNA, 499 bp, Cannabis indica
tattattccttaaaccccaaccaaaattcgattagttagttagtttttaactaacttaactgtcaaaaaggacagcaagtattattaggtcatttagcctatataaagaaaactactcctctcatttcataagagaatagaaacaaaaaaataagtgcaagaacaagaaagacacaacacaatagagagagaagtttgagtgagaaatggagagagatatctgagagagagggctgggattgggaaattgtattgagcaacattgaagattatgttcgctcgagttagtaagttaatgagtattgagagattacaccataaatgatatttccttataaaaatgaccttacaattaaaaaaaacaaaattaattcaaagcaatccaatcaaccgcccaaacaaaatccaacgacccatattaatcctactcctaatagaatgtaaatttcaattattttaaatagatgtttgagtcattgagtccttaatatcgtttttt

SEQ ID NO: 353273 - DNA, 540 bp, Cannabis indica
gaattaaagctgctcagttagctgatccagagttagtgaaaatcagggaagaggttttagctggtcaagtcagagactttacagtgtcagatagtgggatgctgttgttcaaggccagggtttgtgttccaaatagtgtggaacttagaaatgaaattctttaagaggctcataccactccatattccttgcatcccagcaccaccaagatgtatcaagatcttaaaccctacttctggtggagcggaatgaagaagaaggtggtagaattcgtaccgcgatactttacctgtcagcaaatcaaggctgaacatcagagaccgtaagattgttgcagcctttaacactacctgagtggaagtgggaagatatcacgatggactttgtggttggattacctagaaccacgattttgtttgattcaatttaggttgtggtagatcgattcacaaagtctgtacattttctaccagttaagacaacttgttcaatggatcaatatgtggacttgtacgttaaagaaatagtaagattacatgg

SEQ ID NO: 353274 - DNA, 1287 bp, Cannabis indica
aacctcagtagccgattttggtgttggccaatcccgaacagctttaattttggtcggatccaccatgatcccatctttatctactatgtgcaccaagaaagagacacgagataaccaaaattcacacttttgaatttagcatacaacttatggtcccgtagtcgttgcaaaaccgatccgagttgcaactcatgttctttatatgattcagattacaccaagatgtcattgataaacacgatcacacatctatccaggtaatcctggaacgtccaattcaaataatccatatcaaatatactacgtagccttggcccatcattaaccttgatggtgattcttgcattttagacatgatatgacttgaaagaggatccgtgaccatgacggccgcctcaatttcccggatgctttctattaccccttgatacttcgaaagcctcagccttccgtttgtgatcagggttgccactgtcggtccccttactgacgttaccactagcaggcagattcgatgcagtgacagcatgctttgcggtctgctcttgtactacatattgctcagcctcctcagcaattaaggctagctctatcactttcttatacaaagtgtcatatgaagtggtaaccttcaagtcccaacttattgtggcattcagtcctctcttcatccactgttcggcctttaatatgtcaatacctcctagaaaagtcggaggttgcagcttcacgaaccgctcaaacaccgagtctctatgcggcataacaaacccctagttacccaccactggcagaggtgctggtggtaacacttcatcaacaggggcagctggttgccttaatcgtcgtaactcttcttcttgacgaagtatgacacttcccatttcttgaaacatctgctgcccgtcagcaggaggattagcattgccaaccctcgaattctgcggaggtggaggcagtgccgatggattggtttggtctacaccaggctctactaactcgtcgtatggtctggatgattaaaaagggtccattactagtacccgtgtaatcaacaaccccagcgagttaagcaccaataccaaacttatgcacgtattaccctaaaccctaactcatccatttacccccatataaataaacacttaatcatatagcattttaaagcatggcatcacataacatatacacactctagatgcttgcatactgcctaacacggaaagcggtaaacagatgatcacacaatcagtagagtatttactctcaatacttactgcaccatga

SEQ ID NO: 353275 - DNA, 731 bp, Cannabis indica
acaagacctccttagccagccaggacttgtactgatctgaacatgtgtttcttcaagaactcaaacacgttcttcgtgttcttcgtgactcaaagagccatgtaatcacaacaaaggttagattcagatcttttttgtctagaaattacacattatgtatcctaaggctatcatgtggatcaaaatcctgaaaggacaacaatctaacataggaatcaaaagatattcaaagcgaagaacaatgttcatgcattcatggcaaaatcaactaaatcaagtgaaatagcaggaatagaaagcttacccattgcaagaaactgttgaggaagaaggtgggaagctttaattgtagaaactgtgcaaaaatcccgagagaatgatgctttgtgggttcggccctctagagagaagaaggatcttcttcaaatgttaatttctagtgagggagtaaaaagtaagaagtgaagagggtttccccccaaaagcacttatatagtacatgtgggacccttccttcacttccttcacatacacaacaaagagacatataaagcagttagtttactacaacaaatgagatcagacagtcaaggcaaaacatttcaaaaggctaaaaatgcagtaacttctattcagcaaaggctacattagttccaatcgcaccaacctaactggtaagtctctatcccactactacaaaagtgagtttttccaacggtttataactgtct

SEQ ID NO: 353276 - DNA, 510 bp, Cannabis indica
tctcacaatcgtaatccttcactaactacaaccaacgtctctgtctcatattcaaatctttctgagtaaagaagtatttgagacagacttttgtggtcggtataaatttcacacctttctccataaaggtaatgccgtcagatcttcaaagcaaaaactaccgcggccatttctaaatcatgtgtcggtatcgctgttcataatctttcaactgtcgagaggcataagcgataacccggtcggcttgcatcaatacacacccaagaccctgcctggatgcatcacaatacaccacgaatttctctttgtcagaaggcaaagctagcactggagctgtaatcaatctctgtttcagctcctgaaaactagcttccaatttatccgaccatacaaaccgctgattctttttagtaagctcggttaatggtgttgagatcttagaaaacccttccacaaaccgacgataatacccagcaagacccaagaagcttctaatttctgtcactgttt

SEQ ID NO: 353277 - DNA, 519 bp, Cannabis indica
gtacacgcgttgcaacaaattattattttataaatatatattttttccttaaaaatgaacacagggtaatgatgttgaacctaataactagtatatatatatatatgtaaataaatctgagaaatataataaaattatttaaaaatgattggtaaatattgactacaaattaaaaatttataaattaataatcataaacttttaaaaataaatatatttttgcaaaaattattaattaaatcatctgttttattaaatgataatttaaaagagaaaattacactcaaacacgtaaaatatattttatttataaggatacccatattaatttaaatagataaaagtaacgaaagctatttacatatattcggcattctctctcgtcactggtgcattattcaccatttctttttttttttttttgataaaattcatcattctttttttctttcataattttttattattatttaaaaataactctcatttttttattcaactatcaatcatttattttat

SEQ ID NO: 353278 - DNA, 651 bp, Cannabis indica
cattttctcagttgttcggtatgaccatagaacttaagggagttcctccaacaatttttctttagcatcctcaagtcttttctttagtgtatccttcaatgtcttgttgactgcttcaacttgcccatttgcttggggatgtgccactacggaggaacttttaataccgtggttcgcacagaaatcagtaaaggactggctatcaaactttttaccatagtccgaaactattttgtatggcaatacgaaccggtagattatgttcttcacaacaaagtcttccacttttttggacgtaatggttgataatggttcgacttctgtccactatgtgaagtaatcaactacgaccactgcatactgtacgccacctttgcccttgggtaattgtctgatcaggtcgattccccaaatgacaaaaggccaaggactttgcatctgagttaactcattcagcggtgctcgaggtatcttcgaaaatctctggcatttatcacattttttaacataggccttggaatcttcaatcatcgttggctagaaatatccttgccttagaattttcttagatcaactctgcccgacagcatggtttccacaaaatccatcatgtacctcagacaaaagtcgtgcagcttcttcttgggtaac

SEQ ID NO: 353279 - DNA, 732 bp, Cannabis indica
attatactaatcttacctcatttatgaattcagatgtgctagccaaccttagtggaacagttcctcaacgaattacaggcccctaaatcacattattcgtaacacgggtgagtgacacgctaaatcactttccctatcaaaagctaacatggaaataccctaataataagggaatcaaccaaccaaagctctaaaactaacacaaatcgacagcacgaaaaatttaggaacccagctggtgatccggttaaccgattttataggacctgtaaaaccggttaaccgatttacaccaggtaaccctaaaaaattcaaaacctagcccaattcgtttccaaaccttccagacctacttaatataccccgaaaaacatatttcaagccacaaaacaacctaacatgctcaaatcaaaatctaccattaaagagcaaagcttgagttcttaaactcaaagcttgctcaaacaccacaacagcccctaaatcccctttaaatcaacatattacaccataatttaacttcaaaaaacaacaacaaacaccaacaacaactacaaaaccctaatactcaattttgtgcgtaattcttaacttaaagccttcgaaaactaaatagagagatgctagaaacttaccttgagttggatacactagaaaattgctagaaatccctgagttgtgctgaaaaattctcaaaccctaggtggttctagggagctcgagaaagagaga

SEQ ID NO: 353280 - DNA, 581 bp, Cannabis indica
aaaaaatgtaataatatttatgtgatatatatacataaaaaaaggaatataataaaataaaattaggtttatttttttttctaaacaattgattggacaaattatcagatcttctccatttattttatttttattttattttgctaaaatttttttaggtcgtattacaaaaacataaatataatatgtatttataggtgaaagtaaaaagaaatgattatctcttagtctatattagttggacatgatttttctaataaataaaataataatcacgtatatttgttgtgactattcattttgctaaataattgtaaagttgtgttctaaatttattttaaagaaatttttttctaatatatattcaaggttcttctacacaatacaaaataaattgtcgtacgctgatggtgataatgacaataaaagtgatgattttgatggaatgttactatttgcaacgatgcaatgttgtcgaacacgaaagaaatcgaaagggtttgaataataaggtatgagatcggtattagaatattttatttatggaaattattttactaattaaggaaatgattttctat

SEQ ID NO: 353281 - DNA, 647 bp, Cannabis indica
ttaataaaaaatgtattttttcattattttttctcaattatgccataaatactatttattatttttaaacaaagataaaattaatcttaaataaaatattttcaatataaaatatataactttaatttcatgaaaatattatttaaaatttaattaactttgtctttatactatgaaatatgtaatattttggcatttaatacattttaaccctcgattcccattctgtacagagtattgccaagtgatgaaccttgataactaattaattagagcttaaggaaaatatgaaacgataaataatataccagtagttttttacgtagttcggacgttaacgatccctagtccacgagtctattgtattagctttgtcggtgagtgtttaagtattacgaatgattactgtatgaatattaactctgcattccttttgtttctcttagagaagaagaaagcttttagaaatttcagcataggttctataagtaaaaattgttcaccctttgcataggaaaaaatacgggtatttacaagcatatgtgtgggtgagggcatacccttcacccacttaggatttcgtactcagcacgtttcaatagcttatgtttacaacatgacaatctgaccgttggtaggtagggagc

SEQ ID NO: 353282 - DNA, 761 bp, Cannabis indica
aattttttgaataaaagggtaattaaaatggttttactagcttaaggaataaatgaaaatcaaattaaatgagttaattaaaactcacaaaaagagaaccgaacttttagggcaaaaagaccattttgccccccacactaactaaaagtcactaaaccatcaatgtgtaatttggtcaattctaaagtctcgactattcccgaaatttccaatggctaaaattgccccgctatactaaaaaaaattctaaaattttattctaatggccaaactctgcgttccaatgttgccaggcacaaaacatgcaaaaatataaaatttcatatatggcatataaaaggctttttgaattcaaataaatctccgtaaaataataattcataacttatatgcaagtttcataattaaaccctatttatcttcaaatttctaaattaaagttaagcggtctttacaattatccccccattaaatggattttgttgtcgaccttgctatttctccagagtaccttgaccaaagctatggtcttattccgaagaactttatcttttctatctaggatctgaatttgtcgttcttcgtattataggtctgattgtagctcaattttcataactcagcacatgagtaggatgtgaaatgtacttttgtaacatggaaacatggaacacattgtgaactgcatatagagttggaggcaaagctagccgatatgccactagtctaaccttctcgagaatctcaaatggtcctgtaaa

SEQ ID NO: 353283 - DNA, 962 bp, Cannabis indica
ctaactctccgccaggtaatagggttccaaaccctgattcatatctatcatgcggtctatccaatttactaaagattctggctgccacataagaatgtgtggccctagaatcaaacaatacagagtaaaaagagttgttaactgagagctgacctgtcaccactgaaggggtggcttctgcatcaggctgagtaatggcgaacaccctagcaggagtgggtctcggcggagcttttggtgctttggttctaagttgagggcaatccctcttgtagcacccttgccctctacactcacccaggttatgccttttacaactggggaactctaggtacgtataacgggtctcagaattaccctgatgactgcctcgactctggttaccccagaaactcttgttctgacctgaaccaccagttgcagtggatgccttcctttttttatccatggccgaaccactacctcccctgctaaagccttatgtaggaggggtaggagccccgccaaccactggagtcctagcagacttagtcatacatccaattgcgccgtcagcacgtagtgctttttccagcatttcagcataggtggttttgtcatccgtagtaatcatcaggtaagacgaatcttcccattaactccatcgaaatactttcccttttactaaaatcagctggccgaattcccgaggccaacctccctaactgattaaactgcgctttgtactcagtaacgctcatattttctttctaggtcaggttgctgaactctttcctcttggcacttctaggtcaggttagcattaccccgaccacgtgccctgcccctgggacctctacctcggccccgatcatttaggggaaactgatctccttgaccttcatttgacccgactgaattgccctgactcctggtctttcgcctggcgtccatctagtctgaacagcctacgtaaccaagag

SEQ ID NO: 353284 - DNA, 574 bp, Cannabis indica
ttgagactctgttttgccgcttaggccggctgaaagaaaaaggacttgtaataatattttgtaaatgtttttgggatcccaatttctgtaacttttagatcgtaaaggttaaattattacaagttttatttttattccgtttatgattaaagtttaaattccgcgctaatttcattagtaatcccgtttaggggatcagggcttcataagtatcttgggtagcgtgcctaattatttagggcgttacacaaaccaaaaaatgtttcaacaagtactgttttcacgaggattaataactcgggggcttctggttcgaagagaaaaaattgtaccaaaccgtcaaaagataaaaagaaacagaagaagcatgataagtacgtgccagtgtatactatttataccgagcttaatgaaactcaggagaatatttacctcgcgcaggagcagaaggttacctttggcaagcccaaacccatgaggaatttgaggagcaaaagagatcctaacaattattgtaaattccatacagatattcggcatacgaccgacgaatgtcaccaattgaaagatgaga

SEQ ID NO: 353285 - DNA, 803 bp, Cannabis indica
taaggtaaaatctagagtgatcgttttaagaatttaacgaaaactcatatctacccttgaatatacatccatatataatatagatgatcttacttcaagtggatattgacatatttactctttttagagaacgatcttgtcaaaaccactacgaacaagatgcaaatgccatagatataaagaatgtggtgggggtcttttgatgacttaggtctatttacaataaagagttcttagaatagtccaagtggatcctggtcacagaatactaaaactcatattccatacattaacatacagttttaatccattgatagattctggatattaaaacttgtgaaagttgaactgtattgtattttggaaattgaaatttaaaatgtcaatttggaatctaaaatttcaagtcaaagacttaaatttataccaaatatacaatgggtgatattctctcttggaccaccactactaatctaactttaagtctaatttgcctaaagtaagcatagataagtaggagattctataagattgaggattaatattattttaggatagaatgtaaggaatatagtactatgcgtcattcaattttataagagaaattagagtgacatcataagcagatgatttataaaccattcatctaatgatatactatgtaagcaaattcgaaatgaataagctaataggaaaaattaggataatttcgattaaaataagaatccaacaatgtctcggtaggcgagagtcaaagttattcttattttacacgaaatttacaactacaattaataacagaa

SEQ ID NO: 353286 - DNA, 521 bp, Cannabis indica
acctgatcacgaactgcatgatatgattcattgagtcctttgagaaactgaaggacttgatcatgattttggtggtgttgtgcttgtgcagcagcagcacaagtgcatgggaatcttggccttaactggttgatttcatcccaaattgcagtgagtttggtgaagtaagtgctgacagaatcatcaccttgatgaaggtatgtgagattttcattgagctcaaagattcttggaccatttccttggttgaatcggttatttagaacattccacatttcagcagcagtatcaagatacatgatgctgctcttgatttctggggaaactgaatggagaatccaggacataaccatttgattgcaacgaacccaagaaccgtgtaattgatcatgagcaggaggctgaggaagtgatccatcgaggaagggagttttgttcctggcaccgattgagagtcgaaaatcgcgtttccatggctgaaaattcttgtcagtgaggattggagttgcaagtgcaagacc

SEQ ID NO: 353287 - DNA, 641 bp, Cannabis indica
gttacctagtgcaaaccggttaattggctctacaggtcctgtagaaccagttaactagatcaggggcaggattcctaaaaaatccattttgttggtttgtgttatttttagagccttagtttgttgtttcctcgataattagaatatttccatgctagttattgatagaaaaacttataattgtgagtttaggtccccaattcgagttttagcatgttatttacccatctgtgtaaatgtgacatagggcatccatccagcatgttacttttgttcaggttggccaacacacatgaattcggaaacaaggtaagactagcatagaatgtattttatatgagtatgtgtattaattaatgcatgttatttttaatttgcacactaccaacattagtacggtagtggtactcagtgtgttggtacaatgtacgatgtttaaagagtccagtatgttgttaccaacactagtacagacatgtacgcagtgtatgtggtataacacttaggggtgcttgaggtacggggaaaaccctaccaacacttgtacagtagtacagtggtcgtatgatagtaaagaatgttcttacttatctgataagtcttatggataggtgtacgggcgcctagatgcaagttggtat

SEQ ID NO: 353288 - DNA, 648 bp, Cannabis indica
ggatgaccacctaaagtataatttctaatttctgcaaatttttttatttcatgttaggctaaaagatcagattagatcaaatagctctaatgtaagttactacggtaacaaacacattttcgatcaataaatgaataaagatgtttatttcaaaattcaaattgagtcgaaattactaacatgttgctaatttaccatccagtgcgtacaaaaggtctagtcgaacccaaaacccgaatagatgaaaaagtatacttgtaaaaaaagtgaccaagagtcataagtctgctcggtcacttggagggcacctatacctatacaaagcacttggtaaagataaaacaaacacaattgcacgatgattataaacagagaatgaaattcattaaagataacaaaaccacgtaatactgggattaaaagctgcccggccagcctgttgtctgtaaaatgaaaaataattccaagtttaaagaccgcttggccggtcacgatgtcttagaaaaaggacttatggccgaataagatatatataaaaaaaaaagttagataaaaagagaagtttttaaactgctggagtctcaggctctcgattcaaggatctgttgtctaagcgaaaggaacatcaacattctggccagaggtaga

SEQ ID NO: 353289 - DNA, 781 bp, Cannabis indica
aaaaatggctaaaaatcgacagattgaagtggtgagcaacatcaaatcaataaaagtggaaatcgatcaagagaatccagtccaggaccgaaaaggtaagagaaaattggaagacaactcacaagaggaagacgcaaatggccaaaaagaaatacttacgcctgatgataatggtcataccatcttcttgaataaggtaattgatttagtacgggacgacacatctcgtaaggatgaagaaatatctataactataaagttctccaaaaagaggcaagaaattaatcaacgcttaagtgacttacgagttagaaagattaagcttaaccaactttttgaatcgcgatgaatcccaaagctaaatttgaaagaagcgatcgacattcaaaagcaacaacatgtcaccattcaaaagcttctccatgcagtcgagaagcaggagcactactaatttgtaacacttattaagcttgttgatgaggagaaagaagagagaaaatcttcgctaaatcaaccattgaaggatactattttgctataataaatatgtcctacaagcattaagcaaaaaaaatgtcagttgagctcgtttataattaagcaaaaaaaatgtcatttgagctcgtttatacgatcattttatttctttatgaaccacatcatttttattattgttctaaccattctatatttaattttatttgatagataaagataacttgatcttaccatattattattttgtacttatatacgatttacaaacctttatgaaggatta

SEQ ID NO: 353290 - DNA, 373 bp, Cannabis indica
gggtctgaggccagatctaaggtcaggaccggggcaagtctaagtctgatcgggtcctaattcgatttccaaggtctaagttagatcaaatcagtccaaattattggtaagaaaaactgtttaaaaaaattttaaaagtgattttttttttatttttaaattttagattcttaataaaaaaaattgaaaaagtaaaaacaattttataaaacatgattttaaaaaatattttcacttttttaattttttaaaaacaaaaaactgattaaaaaagtgttaccaaacacacccaataatttttcaatgaaaaatcataaactatccaaagctactaacactccagatacaaatcttggagttatttaatctcaaa

SEQ ID NO: 353291 - DNA, 481 bp, Cannabis indica
aaaacccaaaagtggaccggaacccgtaccctgtgacccaaaattggaacccaaaccggaagttgaccgggactggaactaggacttggacttggaatcataactgaaatggacctagatccagaaccgtatccggatcaagacccggactccaaatcagacatagacccgaattgggagccagacccggatcccaaacaaaaccacgaatggggagcggaacccgaacctgaactaagacccaaacatggaaccagactagggacacaaaaccagggtcgggaccttgaaccgcaccccgatctcgatcccgtaccaaaagtcagaattgggacctgggacttgaaccagaaccagaccgagacccgtgacattgatccagatcttgactcgggattcaggtaatggggcctggaacagagcagtagtcggtgtctagatttgggactcatactatgaccagaacccagacgaagaacca

SEQ ID NO: 353292 - DNA, 687 bp, Cannabis indica
ggatggcttcatgtggtttatgtgttatttaatgaatgtatgtgttgtacaaatttttccatgaaaaatattattttctattctagaaatatttatttggattcctgtgaaaattaagcagtttgtttttacgaaactcgatttcgataaaaattgaaaaagctatgaaggtttgaaaaattggatgcatatggtggagatgggctcaatcgcacgcacagagcactgggacaaggtgcctctgcgcgtgcggacaggggacaaaatgctgtctgaactcgctgaccttcagacaccagcgtgcctcgcccatgctgcagcctgcccgtgtttgccgcccatctgatgctgcaagttccctctcccgcgtgcagaatgggctgcttgcagcctgttttgtgggcagctgggagatttgcacaaaaaatgcgatttttgtggatttttttctacaaatttcgaattttctaatttttaatacatttgaacttaaatatcatattttaaattaataatatttatttttcaatagattattattaattttgatattttgaggtttaaatttaaaaattgattattttattttttaaattaaggtcagatttaaaattttttaatttctttaatatttatacattatttaattataagatcagatattttgatatttaacatattttaaat

SEQ ID NO: 353293 - DNA, 405 bp, Cannabis indica
acttaggctcaaatcgtggcgttttcctcttgaattcacgctccataactgcgtctcgtttttgctcatactcccacatcgcatgcaatcggccacacgtttgctgctgcacttgctcaaagtgagcaaagcgatctgcgggaggctctgtggctgaggtcgacgcggaagcaggagttgttttcggagctcgtggtggaccaaaactgataggccctcggggattcaatgctccttcttcattccacattggtacactcgcctcgcgacaaagagcagtgatagtagctggcataaaaagtttccctttccctcggtgcgcacaatcagcaatttcttgggctaggacagcccctacatcaacatcccaacccatctttgttggatattattttaccaggatct

SEQ ID NO: 353294 - DNA, 541 bp, Cannabis indica
tttcgccattaccaactttaagtttcaactctccagatttcaaataattccacttttcaagcaattgcaatgaacaacttacatggtttgtagatccagaatcaagaatccagatggatttatcattctctaaaacacatgattcaaaaactaaagcatcactgcttaatcgtttttgaattgttgttattgctggttcaatctgttgtgaagtataatctgaggaagtggaatcactttctctaatcttctcaactgagcttgaagcagtaggattgttggagttatgaactctttgctcttcagattgaacattcctagcttagctgctttgtggaatttcatgttcatcatgagcaagtgtgaagtattactctgaccaggagtcttattcacactttcaagttcattcctaaaggcaatttctagatgagtgttgggatgtgggttgtacattggcactacaaatatcaataaaacagaaataagcttttggttcaataaattcatacacaagttcagaaaataacaagtaatcaaa

SEQ ID NO: 353295 - DNA, 642 bp, Cannabis indica
tctttgtagttaactagcaatttcttatttccagtcacgtgacgagagcatccactgtcgaagtaccactgtccttcaacaaaggcaaacagggatagctttgcaaccaaacctacaccaggatttggtttggaatttattttccattcttgatgaggtttgcgtccatgcgacttattcggttgagggaaactatttggacgattgatcattgctttcaagtagttctgcaatttgtagcacttgggacgaatgtgacctctcctattacagaaatgacatgtaggaatgaaattgtcattctgtagcagattttctgcatcagtcctccttccttcaaacttgagtttagttggtccagttggaacctatctcttctcaaatgagtcagattcattaatggtggttgagatgtcaggtaactcatcttccttctttgttgaatcaacattagagggcagagaattctcaacagacaggtcattcccttgtttatacaacatcttatatcctaatgaggttcgatcaccatagggcttctagagttgtagggtttgattgatagatgcactgcttgggggaatgaattataaagcgtgcttggttctaattagatcagctgtgagtttatagatctcattc

SEQ ID NO: 353296 - DNA, 579 bp, Cannabis indica
aggtactaacaacgagtccatcaacatcggaatgatgaacgtgccgttatctggagttaggacaccacctctggatgtcgttaatggcgggagggagaggtaacattagacctctcaatctattccctgaaacagctggtcctcaagtcggggaaacgtcaacaccacgagcaacaatgcactttccacctgtcactctggcggtggtatctgagggaatcgtccaactcaccaccgcccaatatactgcgatccaggatcaactgcgtgcactacaggccaaagtggatggacagaacaaggcccgacgcccctctcgagcccctactactcgcacagacaaccctcaagtaacgaactctagacgtcgtaataattgtgttcgcagggaacgaagaacccttcctgagggtttggacctaaaccagccaacctcgagagaccaatctgcgagatatcctaaccaggaaacacaggttaatgaagaccctgagtgacgtaatcttcacagccgaccatcaagagacaatgacacagaatctgcctcttcatcctcgcatggtcgtacacctagcagat

SEQ ID NO: 353297 - DNA, 631 bp, Cannabis indica
gttttccttgatcatggactgacgaaactagctattggttgtgcatgctgttctaaattagtatgggcgtcaagcgatcaggagccagggtaactcggttagatccagtggtggtcagggagctcaggtttccctcaatatccgtggccgaggttgaggtcccaggggtagggcacgtggccggggtgatgttaacccgccacaggctgcaagccagcattaatgaacaagatgatgagattcaatggttaagacaatagggtgctcctgcagtgcctgctccaaaaattctggtggcacctgcccctgctgttctggctgaaccagtggtggcagtgaattggatggaacccttgtatgaaaggttccgcaagcaagcacctctagtttttctgggaggtcctgatgtcatgaaagccgagcaatggctaatagtgattactagaatctagaattttatgggcgtcactggtaatgataggttggtctgtgccatcttccaatttcaagaagacgcactggttttggtggacatggtgtccatgattcatgatgtgacaactatgacctggtaaaagttccaggaactattcaatgctaagtattacaatgaagccgtcagaagtgctaa

SEQ ID NO: 353298 - DNA, 703 bp, Cannabis indica
ttcttcttcttctatcctcacgcacaaccatcttcatccttgaaaccctagccgccaccacttcctccaatggctgcctcaacttttcaaaccctccgactcaacgctctaagaaacgttcccctttctctctcatccaagctccctctctcctctgctttctccgtctcgctcaacccccagtggcgtcagcagtctcgtcgcctagtattgattgtctccgctggtcttgatgccaagcctacgatccttgtcgctaagaagctcggtgcggctgggcttgatctgctcaaagactttgctaacgttgattgctcgtataatcttacccctaaggagatcggtgttggctgtgcgtggagctgggaatggggagtcgagtcggctagggtttctagggtttctcttattaccaatcttcttccgcttcgtaccgcgacgatagacagaggtaatgctgggtgtagctaaggcagtggccaacaaggagggcatgagatcactctcgctggttcgaggtgatggagccggaaggtcttctgggtcatcaacttcgccttcgttttgattgagatcaaaagggttttggcgatttcttgggtcttggtgggtctgatggtgatctgggtttgggggattcagggattctagggttatggtggatcagggttttttgaatgcaaagagaaagaaaagaaataga

SEQ ID NO: 353299 - DNA, 589 bp, Cannabis indica
taaagatgtcctgtgacaattcagctgctgttttcatggctacgaacaacaaaagtggaagtcgaagcaagcacatcgacattaagtacttagctattagagaatgtgttaaagaaaataaaatgttcattcaacatattagcactaaattgatgattgtcgatcctatgacaaaaggctttccacctcataaatttaaggattatgtagagaacatgggacttggtttccttatgtaaattgtacaaataaagttattattaataaaattcttattttgttattttctcatatttatgcgcatcttaattgtacatttgagaaaattctaaagtacctgaataaacataaggtttaggatttatttgcttaagtacattgccacataaagtatatttttatatagtacatggaaggtaactataattgtaatacatggaaggtaatacttgactcataatgaggacatatcgctatgattcatgtgtttattatataacgaggaacgttgggtttgaatagtttagtctaaatgttgaccaagtgggaaaatattagaatatttttatttaaggaataaaataaagaa

SEQ ID NO: 353300 - DNA, 867 bp, Cannabis indica
aatgtacttgtcaaaaacagataaaaaaaaaaaccctaacttcacatttttctataaaaaataatgtcagtgtttgtaaggttggccaataaataaattttgaatgaaaaataaagaatttataactaaaaaaattgaaaaaaatatttcggagaccataatgatacgcagggccggctcaagcggtttgggagtcttgggcaaaaaacttaataaattgggtcttttattaaaaataattatcaattaaatacttcatagattcaattttcaaaaaaaaaaaaaaaaacttcataaactctaaaataggcaaaattatttagaatcatgtttatttttgagaccacaagattttataatttgctttttttgtaagtatagtgcatatttacttttataaatatttatataaaaaatatttattatattatataaataaagggatagtaaaaaagggagtgatgataaaaggcagagacttttagctagattctgttatagcctattatcttatttaacttggcttaagattttagttaataaatattatagttatagcaaataatttattatttaattttgaaaaattttacagtgtgaaaaatagagttcatccaatattttatatgcatgcagttaattataaattttaaatttcgggtaataaaaaatgccactctttgataaaaataaaaagtaatataattgctctcaaaatatatttactatatcaatattgattgaccaatagttataaattagactaggatttcaaaataataataataagaacaaaattatatagatatatggttgaatagctttaattagtttattaaaatctcatacaatatattaattaatttt

SEQ ID NO: 353301 - DNA, 626 bp, Cannabis indica
agaacagtaccaaaaaatatacagtattaagtttttaattttcaaacaattttgtaaatcataaaaattagaatatgtctaatgttatacaacgcatataaaaatcaagtccaaaaatcaagttgagtccctacctctcccgagtcgttaaactttttccaaaagacgatcttaagctctcaagtcccgagctccaattgtttagtccaaacttacatattactttcacctataccaccaaatggttaaataattatcattatcgcatcctacgttcaaaaccgagtccaacgacatataatatgactatatttaaaatttagagtcccgaagcctcacctaagcggtgcacattaacaatcggtggcggtaaaaattggtgtaccgaaaatgtcaccgaaaataggagtagtatatatcaaaacgaccacctcgacgagtagatcacactcatgccaaccgtttgtcaaaacggtacacgaggtcaccggaaagtcgccggaaaggggcggagctacaaaaatgtcaccggaaaaagttgcaaaccgggaaaaatggtttagtgtaggttgttctcctcgacgagctgagtgtagtggtgaaaacctctcgtcaaacggacgccg

SEQ ID NO: 353302 - DNA, 796 bp, Cannabis indica
cagacccactaacgaaaggcttacccatatgtgtatttttggagcatgttgctcgaatgggattgttaggagcctagcttgttgagctcagtgggagtttttcttttatgtattgaacatgctagtatattgtatggaatgcttatgatttgtgttttgaacatgcataatgatattgtagttacttctagttattgttgacatatgtatgcatatatgtgttgtttattaaagtgacaggtacaaaaggagataaatgtgcatagtctcaattttattgtacctcatgcatgtttagtttgattgttaatggataaatgtcttcaaggtcaattcatacatagtatatgtatcctgtcggtaggatattatgtacgtcttaattggttaccttatgtgtgatagacaatgttatggtggttgattatattatccaagtggagaatgttagaattattattgtgaactaatataatcatgagcttaatactataaatacaattattaactatgtgcccaatatttgttcactaccataatgggatggttaataatcatatattatgttagaggcacatgagagcatccttaaaaactataattggcccattaaattatagtataccattattggaccacttaagccaattagtaaataaccctctagggttagagggtcatgatatatatatgtgtgtatgtcttaagtgaagtggtagtaggttaatggtaataaggtgaagagggggtagctccacattgtgctcctctccaatcttgagtttgcattgcattg

SEQ ID NO: 353303 - DNA, 650 bp, Cannabis indica
atttctttctttgattctgcctgattaattagcgatgagagtccttatgcgcatattaagaaaagatagggagaaagtggatccccttatcttaatcctctagttggcatgacttcaccatgaatagaatcattgatttgaaaagaatcacaaacagatgaaacacatttcaatattgtattcacccattcagacttgaaacccatttttatcatcatcttctcaataaacttccattccactctatcataggtttttctcatatctaacttcattgctacatagcatcaccttctgacttttcttgcttttaaattatgaaggcactcataggcaataagaacactatctgttatgagtcttcctaaaacaaaagcactttagttctcacttattagtagtggtagcaggtttttgagtctatttattagaactttagaaattattttataacatattacataaactaatcggtctgaattcactaatcaattcaggttgttggactttaggaataagcgtaattagcgaatcattaatactatgcatatccgttacccctgataaacaatctaacactgctttagaaactaaagggccaacaatatcccagtgttcttgataaaacaaggcactcattccatctggac

SEQ ID NO: 353304 - DNA, 796 bp, Cannabis indica
cttaaattcaagaactaaggcaaagagatgctagggcttaccttagcttgctttccccttgaattccttgctgagaaaactaagaatcagcaaccaagtccccttgctatggctggttcgaagagagagagagaggaaggaaagagaggtttctttgattttgtattttctttaattttctctaaatgaagatgaaggttagggaaaatcactttcccttgctgaattcttttcgctaggtgtcaccctaatagacagccacccaatacaccatttaaccaaagaaaactagcaactaaaaaaaacaagaatgagaagcctctaatctggctccaactcagaagctggaagcacacgcccctcaaactcttcgaagattatctaaaagccttgatctcagctgtgtgatgctagtagagcttgaactgtccttttggagtcagattgaaagatgatctctaagcacaacaaccatattatatttatattgttaaagtcaatagctgaagtttgaaaagataaatatctttgttagtaaatgtctaacaaagtataatacctctcacttgtgctaagaaaatcaaacattctatgatatattataatatgcccaaaaaaaattaaagtggaaatacaatatgcccaaaaataatttaaagattctgatataattgttaaggcactcacatacaaaggtcgtgaagcaatactacacagctcctcgagggaaggtgttgaagagctcttccaccaagaacatatcatcattttcagttgtcactacaaataaaaacaa

SEQ ID NO: 353305 - DNA, 622 bp, Cannabis indica
gtttggaacaagttggaagaactatacttaaagccataaattattagcaagattaattttctataaaggttatacagttttagaatgatctcttttctttctttagatgataatatttatgagattattaggattggctaatataaatcacaaggttgatgaagaaagccagaccatcattttgctgagatctctcccaatcccatatcaagaattaaaggctgttatcaagtatagcaaagacgtgattgcattggagaatattcttaccgcacttaagttgaaagatttaaaattgcaaatggaaaaagaatcttagaaagaggaatatcaccaaagaaagtaagttcaaagagtaacaccatcattctcaatcaagattgaagtccaaaaagaaggaaactcgaaagtgttacttctgtgaaatgtcaggacacttgcaaagattttgcaaaaagtataaggagtagcaaggcttcaacaaatctcataatggagataggaaggacaaccgacatcatcaccacgggaaggattctactgcaattacagaggatagtgatgttgggttttgtgccctaaataaaactcatttcaatacaatcagatttacttattaata

SEQ ID NO: 353306 - DNA, 407 bp, Cannabis indica
atatatatattgggcaatgaacccttctttttaagaaactttacaaatggactagaagtttatccatccttacaaattttaatatagtattctccatctatatttgatcttactgtcttaatatgaaaaaaattatttctttacttaagattaaaatgttttgaaacacataaatctttgcttttgtaaatatataatttatctgaataattattaataaattagattattttctttttgtgaaatacgagttcatatctacaagtgttaattgacttgtatgatttctaataagacagaattccaaggtgtaccattttagcttgttggtatacttttccttaaagcaattcacacaagccctaaataaagttagcaaaatcaagtgtaatgtgttggaaattatt

SEQ ID NO: 353307 - DNA, 644 bp, Cannabis indica
ttgtattttttttttctattttttttctcaattcattttttttcttttcttttggcaccgccaacttacaaacatcaagcatcctccaaggagaatgaagtcttttctcgattgacctcttctccctaataatgtttcaatcgttatccattgaccttgaattctcttccggacttttcatttttcaccacaacagcttagaaaggatacacttccatcaccgtaaatggacccgaccaacgggacttaagctttcccggaaatagcttcaatcttgagttaaacaacaacacttgctgatttttcacaaaaactctctttgatcctactatcatgtcacttcttcatcttttccttgtacaacttggtatttttataggcaaacaagcgcaactcatctaactcatttaattgcaatttttgggcctttcccgcagctgaaagatcaaaattcaggttctttaatgcccaaaatgccttgagttccaactccatgggaagatgacatgccttcccataaactaggcgataaggagacatgcctagaggagtttttaatgcggtacggtaggcccaaagtgagtcatctaatctctgggaccaatcttttctgctaggattcaccactttttcaagaattccct

SEQ ID NO: 353308 - DNA, 683 bp, Cannabis indica
ttagattttcttgaatcaagtaggtaaagccataacgagaaaaatcattgataaaagttataaaatacttatttttgcacaacgtggtggaataaggtctactgatgtcaatgtggataatctcttataaagagtgactacagttagcagtctgctttcttattttagtcaattttccacaagtacaataagcacaagtatcacaattagaaacatcaacatgaggaagaattttagctagaagtaatcgatcaactttttctttagaaatatgacccactctatcgtgccataataataaggatgttatcttaatataagaggggaagttaagggagccaatgataatttaaaagaccatcaaaataataaaaaaattcactaatctagagtcaaacataatgtcaacattatgaattgcaaaaggaaaagaatatcattatttaaccaaaagcggaagcgaaattgaattcctcttgaaagtaggaataaagaaagtattgttcaaaacaatctgaacactacactgtaattcaagaataaatgtgccaacatagataacgtcaactccaatataagtgtccactttaagctttgactccctctcacttggctttctgagatcccttagcccctggttgtggttgcttcttttcatattttctttatcctttgttgggctt

SEQ ID NO: 353309 - DNA, 921 bp, Cannabis indica
tttttcgcgagttagggaaaaaaaattcatgaagcttagaataagcaagatgaaagacaggcattatgcagttcaaaaagcaagcattacggatgatgaaatcgcatgaaccgtaacaaaggaaaaatcacagagtttcatatcttctacagtaaaatcgaaagtgcattcaaaaagcaaatgtgcaaagtaaacataaaggaaaccgagaacttactcaaggaatcaaatgtttgggttcaggttacgtcaagccaaatgagtagttttgatgaaagcacttcagcaaacttgaagccaaaaacctctcttttcgctctgaacttacttagtaaggaaggttggtgaaaatgagtttgtggacaaatgctcactggtatttataggcaaacaacaaaaagggataatcatttcaaaagaaccgtagacacctcggttcccccataaaagcgaatatgggaaatcaaaagtaatcaagtgtagttgtcaaccgtggtgagagaaaattggatttcgaaatattaattgtcagagcatttattagccgaaaaccaaagggacgcgcagtcagcctcacatcgagttgcgaacaggcgcacctgacatgtgtcacccaaacgcaaagatagcttggatgaagtctacacgcaacttcagaagtctcgtacagacttggagggcaaatgttatcccaatttttgcactttgacgtagcatcgcatgatggtgacacgtggggtcgactctgagtatctactcggaggatatagtctgaacaggatacctcatatgcatgctcaaagccaagcagtcagcaatccgcaccgagtgactaacacttagcgaattcagcgttcgcatcatgagtcatcaaggaaatccctataactgttggaatttattttaccatgatcttagatc

SEQ ID NO: 353310 - DNA, 636 bp, Cannabis indica
ggtttctaacatcaagaaactagtttcttggtgatttttccagcgacaatgctaattctgatgactttttcggcgccggcagcaactccggcgacttttccggcaccgacggctactccggcgactttccggtgtcggcagtaaactccgatgacttttccagcacaagtgacaacttcggcaatcactatagtattatttgttttatttttttaaaaaaataaatatgaagagaattttaatattttttatggtaatttaattaagtttttattttttatgaattttaaattcagatttctttttaatgtcttatatggttttttttagaaaaaaacccatatttttagtttgattggttagataatgccatatttagtggcatttactttttatgccatatttatcataaccttaataatttttcccatatttttgaaaatagcccatatatatttgtgtacgtgtaactatataaatggagcaaacctagaacatttctaaacattatttcatttttcattttcaattatttgttgttaagaagagaattggtgtgagaaatgaagagaccgcgagaagatgatcatcatcatcatcgtgatgataataccaaaaatgatactttgctgcctc

SEQ ID NO: 353311 - DNA, 1010 bp, Cannabis indica
aaacgacttaggtaagccttaagcgactcgcctggttgctgctttacgttagtaagagaggatgcttcaggtcgtctatctcttgctgcctgaaatcgtttcttgaaatccttagacagttgttctcaagaagtgattgaatgatgcgtaaacttattgaaccagctacttgctaccccagtcagcgaggtggggaataaaatttagcgtaagttattcgagacattgctggctcgcattatggtattgaaattgttaaggtgagcgactgggttcgaagtcccatcgtacggcgagacatgagggtttataaattcctagggaaatttagagttcataatgtgtggatggaaagtcttgggtcttcgtctgagtcataaccagccagtttcccatattccccatcttggtatctcctgaatttatcttccaactcaatgattcgcaattggattggatcctcttactttcaattcattgagttgttggcgtaaatcaggtgcattctaatttaagcgctcgcgtaaatcaagttgtctttgattcagatgttcacgaagatctggctgtcttcgttcacggttgctcacagaccttgtatccgagtaactctcagattgacagctcctcgtattactcctactttctcgatcattattacggtgaggtttatctcctcctcacgtatgcctttatgatcgactatgctatcgggatcttaaatgtcccgagctagaactttcctcgtcctgcacaagccttctccttcgagaagggttagatacacgtccccgtcggggtatgtgtatgcctcctccctatcagctcgagaaggacgttgggggtgtctcggcgataacccacttgtcctaggttgagtcctaggatttctctctttattacgatggatctcctgttccctagttctgggctacctaatgttctcgtttctacgagaagattatggcacgtcattgttttcattcccctaattcgtaaatccctagggt

SEQ ID NO: 353312 - DNA, 705 bp, Cannabis indica
ctaattcatcatcaacatctaagaccgtcgtatacttttcccgtcattaccactaaggttttgctccctagttcatacgccaccagtgctgccttgcaatcatcactatcttcatacttggttaactaccctaaaatttattttatactcaatcatatagttcattgtttaataaacaacctactttgtgatcaaatatttaccaatcactcaaatacatgtccaataaattgcatctcaatttttaagcttttctccattctgggtaagtatgtctttctataattgcttaataaagtaatttcttcccaaaatttcaatggtctctttatatactatgttgactatctagtcaattatgaagtactctccatcattaccgtatcaccttaagtaatttaggtaatcttctttaccttagtgataccactactcttcttgacgttcttttatacgttaccctagcaatgtctccacttcaagcctccattgggcccttactcccacagaaatgatggctcttatacacgagtgcatcactctagctgcttcctgaattgacgattggcccctacgaaccaatccaagtgtttccaaggtgctttgcttcgactcgcacggctcatggggaaatttcctgaatgaagtcaccccaagtcaaggacactcaaccatggagttccctcatggtgagctaccaaaaca

SEQ ID NO: 353313 - DNA, 627 bp, Cannabis indica
ctacataatctcaaaattactacacaatcgccgccttcaattcacctaggatttcagacaatactcataaattgtccaacctttgctaatgctagatcactcctaaacataatattttgttatctgaatcaattagattaatacctccattgactactcatgtcgtacattccacttgggaatatcaacaatttaactcattttgttatttctctaatttgtccattcggtcaaatgggttaccactaaataacatacatgcacagtccattcagatttcttgatgtctctaactgaatgtacagtatttaaaataattatcaattgaaacaacaattgtaatatttcccataaaattctaatttgagttggctgaaggactgatacccgagttcccttgagtcaataccagcacttctaatttgagctggccgaaggaccgatacccgagtcctcttgtgcaatgccctaatgctaaggcacggtacagtgctttttcaattacagtgttgtctttgctaatcaaagaattttcttgaaaaatgtgtcaaattaaaacttttatattaattattaaacttaataaattacaaactatttacatgtaccgggatcccgtttaaaagc

SEQ ID NO: 353314 - DNA, 748 bp, Cannabis indica
ttttctgatgcttccaactttaaaggctaaaaagtatcactccaagaaaacagtcttcatgtcatttcatgtctccatagttacaggtggtagatagtacaaccactccttagcagcatctttcaaggagaaaggaaaagccaacaacttgatttgttcttcggttactgatgtaggtttcatacaagagcaaacaatgtgaaactcctttagatgcttgttgggatcttcaccagacaatccatgaaaagttggtagcaagtggatgaggccggattgttgagatttaaaggtggataattgatgcacagtggttgttggtcaagatttggcgtggtcaactccttcaacgtcctattttgagccatcgtcttgtgagaagtaacagagtcctcagaatctgactcaagatcagttgatagtggctgtttgacaggatcaagagattaaaagagtgggctatcggtgataatctttaacgatcgagaagcaaacgatgactcaagatattgttttacccttaaaagtctctcttgagttttgtctgcactagacatgtacacctgagattgttacaataaaaataagttagtaaagcaaaaattaaatatgaataataaaataaaataatagtcatcggcaacgagccaaaaatttaatgtgtgtcgtaagccacaacaaatttacttttaattccaatacctctaattattttagtataattgtaagtaagagtcgatcccacgag

SEQ ID NO: 353315 - DNA, 651 bp, Cannabis indica
cctggtaaattaatttccaacattgtgttgtccaaaggctggccagccatatggccagctaggatggacgtcaagcttctttgaggaacccgtttgagtgctaagatccccattggctaaggtgttgacttgaccttcttgtaggtgagttgtattaccacatggcactgatttttccacgtaagcatgccacgttaggtgggaaaaaattgggataacattttcccctaaagtccttttgtagacgtttgtacggataggaacttactagttaggttggaactaatgtagcctttgctgaatagaagttgctccatttttagccttttgaaattcttgttcttgactgtctgatctcatttgttgcagcgaactaactacttttatatgtctctttgttgagtgtgtgtggcaagtgaaggagtggtcccacagatgttattaagtgcttttagggagaaactctttgcacttttcactctctcactagaaagtaacttttgaagaagctcctccttctctctagagggtcgaacccacatagcattattctcttggggtttttgtgttgtttcaacgatccaagcttcccatcctcttcactaacaatttcttgttgtgggtaagctttctatgttggaaattatttta

SEQ ID NO: 353316 - DNA, 951 bp, Cannabis indica
atagttacagtttctagaaataatacaagaaaaattacaattagtcataaaagtagagaggagcttgcaatgtcgcacatagttctcaatcccccaagtagagtcatcccattttaggttcttgataacaatctctgaatcactctccaccaacataaaggatgatgcaaagagactgccgtctccatggctaaaaggcaggccgcaacttctctagtgagtgggtcagtgaagtgtagcctttttgccgccacccacaaaactgattcgttatggtctctcgcaatcgccacatcacacatagtttcacctccgactttgacatcgcagttgattttaacccaatcttccggcggcggagaccaagcctgagtcccaacagactgtggaggggaaagaaggcaggagccatagtctgtgtaacaagaagaaatagagtcaatatagtgtttaatgttacccattgatttattatgtaccttgtcgttgcgggccctccaaatcgtatctaccacaatcgaggcatagaggaacagctcatcagtatcaactcctctagatttaagattccatagaaaagtaacccagtcccacattcgggctcctgaatccagaacaggcataaccccccaaggagaagattgccaaaggtggaaggcaaagttgcaatacaggaacaagtgctctgtggtctcctcagcctccccacaaatagggcaggaaacctcctcaaaacccattctcttagcaagaggggctcttaagggtagagcattggaaaggatactccaccaatggaccttgtgtcgctccaaaatctttgagttccaaagtttgttccatagtgccggagcaatgttgcacaaaggagcccgatcaagggcttgaataagataggcagacttggttgaaaacaggccatttgattcttttgtccagacccatctatcc

SEQ ID NO: 353317 - DNA, 811 bp, Cannabis indica
gtcctacatcaagtaataagttcccctacaagggtgaggtaagggagatccgaggagatcagctgggggcccgcaaatgctactcctcatccttgaggaacaaaaacaagttatagcaattaatcaactcctcgaccccggcgaaagaacgatcatcagcggtagaggagttgctagaagtacccatacacccaacagacccagaaaaacaacctacattggcacgggacttaccggagaccgaaagaatcgagttatagaattattgaaggaatatgtccaagtatttgcatgggatcactcaaacatgcccggaatagatccgaccgtcattactcatagattgaatgtaaacccgaactacatcctggtcaaacagaagaggcgaaaaatggggacggatcgaaacaaggcaataaatgacgaagttgcaaaaatgctcaaaaacaataccatcaaagaggtacaatatccaacttggctcgccaaccccttggtagttcccaagaaaaatggaaagtggagagtgtgtgtagatttcactgacttaaataaggcttgtccaaaagacaattttccgctgccgcacattgatatgataattgacgccaccgcggggcacgagctaatgagcttcatggacgctttctcagggtataatcaaataatgatgcatcctccggaccgggataaaacatcattcatcactgagcgggggacatattgctacaaggtgatgccctttgggcttaaaaatgtcggggcaacgtatcagcgaatggtgaacaagatgtttgcccaacaattggga

SEQ ID NO: 353318 - DNA, 528 bp, Cannabis indica
actgggtcggtcctaagctaagacgggctaggtccgcacttaattagggcccacccattttaaggacccaaataaaaaaaaactttttttaaaaaaggtaaatattggtataagtactcaaattttgagtttgtaagtagcataaacccaatgattttttttagtggtataagtacccaatgtttataaaactataattttcctccagtttcatgaatatagactctgttattgtcttaaatagggcacatataagacccatattctaaattatttggtccggacagaattatgttttatcagttacttctaaatcttcttttcataaatttaaaacggaatttgtactaatgaaaatagagaaaaattacagttaaacattaggtagttatgccactaaaaaaattattggatttatgccgattacaaactcaaaactttaggtacttatgctgctatttatcctttaaaaaatatatatttctttaataatttttaaaaataccatttatctttatatagtaaggg

SEQ ID NO: 353319 - DNA, 502 bp, Cannabis indica
taagcatccatgaagcttaatatttcgtgcccggctgttgcatcgacgagctgatctattcttggaagtgggaaacagtctttagggcacgctttgttgaggtctgtgaagtcaatatagactcgccatttcttgttcagcttaggcacgagtacggggttcgcgacccaagccaggtagaaagcttcaatgataaagttgttgttgcgcagcttttcaacttcgtctttcagggctactgctcgttctttatccagcaatcttcgtttttgctgaactgaccggatgttaggatcgatattcaggacgtgtgaaataatagagggatcgattccgaccatatccgcatgtgaccaggcaaaaacatctaggtttgctcttcaaaattttatcaatttcgattttacttcgagcaacaaaccctttccaatttccttatatggccgcccactatgcaaagcctttaccatttattttttttcattattttaatgccataaaa

SEQ ID NO: 353320 - DNA, 535 bp, Cannabis indica
tctcacccaacacatctcgaaaatagtgaaatatcatagggacgaagccaagagcattgtgcatcacttttacccctttgtgaaatgtggctcggacccatctcgaaatatttttcccctcttgtcacaataatctaagcgtgaatatgaagattatttttgtgttaaattttattaaaattaccccctaattaaaaaattcaaaatgttctagttttcagagtaaattttgacaaattttaccttattcttacactcattagtgctttcttaaaatctcttcctacacatctcaaaaaatcgtcaaatttcacagggatgaaaccaagagcattgtgaatcacttttctattggaaacattgagagaaaaagtagttttcaagcactaaaatcatcttaatcgaaatagtgaaaatctcacattttttatagtggcaccccttggtgaaatgtggcgtggacgcacctcaaaatatttttcccctctcgtcacaatgatttcatactactaagacgtgaatatgaagattgttt

SEQ ID NO: 353321 - DNA, 874 bp, Cannabis indica
tcgcctatacgactgtcgtaaaatggcaaaatatgcgacggattttcgtcgctaatgtggacttcccgacagtttaaaactgtcgcctataacaaggtatatgcgacagttttaaaccatgccctatactataggcgacagtttatagtataggatacggcttaaaaccgtcgcctataccttgttataggcgacggttttaaaccgtcgggaatgtaaaaataaaaagaaaaaaaaacagatttttctgccattaaattttcctctattttttttcctgcattagttttataattttacttaaattaaaataaaacaactaattaattttattacaataacaactaactttaaaacacattaaatttatacaataacaaaataaatatatataataaataaaaaaagtaaataaataaatgtatttatagcgagctcggagagagagaaagagagagaggaagacggacgggaggttgtggtggtccgacgtatgagacggagatgagagggacaccgacgaaaggtggtggtggtccgacatatgcgacggagaggagagggagaccaacgggaggaggggtgggtggagatcgatggacgagagagacaagaagaaagagagatcgagagagggaggaatatggcgagagaggagggcgatggtgcggaggcgtgggtggggttttggagagttaagatttttattttagggtgtggaaaatggagaagaaatatgtgggcatgtgggacatagaaaagaagtaggtgggcatgtgagaaatgtggtgagaagtaggtaacgattttttattgggtccttatacccggcagtttaaaactgtcgcctatactataggcgatggttttaaac

SEQ ID NO: 353322 - DNA, 544 bp, Cannabis indica
gctcccccacccccatactcgcttcttaaattcacccccatacccaccttaatacccgtttaaattcactcccataatccgttttgaaagaagtcaacgctgacgtggattaagacacgctgccaagggtacctcgcagaggtgtcccgcccagtacataaacaactcaatttattcataagtcttctagcaatggtgtaataccctggaattaagtaatggattagcaaaactctaattagataattatgaataaatgaggaattataatagtatatagttcgatatatgtgaatgaatatgatttattacatgataagaccccgttggtgagctaggggcattttagtaattatgacccaagaagggtaaatcgatgaatttaatttaattacgtgcttaatggagctatattattatatagtattcctgtgttgtcttttcaggtgtgttctgacaggttagcgcggtatagtcacaaccgggaattttgggctgaactgggttcgggcccgaaatacaattgcattgatttaattggcat

SEQ ID NO: 353323 - DNA, 936 bp, Cannabis indica
gagtacagtaccagtagttttatggtacttgatgggatcataggaacccaatttactttccccattcgagactctgaattttttttccatcaatttgtagagagctaccctgaatccccccaaaacaaatagtatttacaaataattttaagatagatatttcactatgaaaatagacaatatagtgagaacatatagaaattatttatactatatttattaacgtacctggggtccagactgttttctcaaatttaccatggctagacctgaagttgaataccctcttgcacagctaagatgaaatgaaattacaaaataaaaaatcttaaaagtttggtacagaaaattaaatagaattttagatataattgatagtatctttttttttttttttttcattgagttgtagactttgcacattttgtctccaccagtgaaaagcaaacatttttatttttatttttgaaactaagcaaagttataaaaaaattatttaaataaataaaatattaaaaacttttaattagtaaaaatcattaattagtaaaaaatgagtggagattcattttttaaaaagggtaaaatatagcattataatatttttatagtcctcaattaaaaatgttagcataaggggcatgtaatcttatttataactatattacatatgaagtttaaactttatttttaagtaacacaaattgaaattaaaaaaaaaatgatatattgggataattaacatcaacttcaaaaattgacaatgcttaccattaggtgttcgatgatcgagatatcttgatagtccacttgatatcaccccaaagagaacatcatttatggtctgaataataatatcttagctcaccagctccataataaatatattttaaaaaaataaaaaataaaactctgaatatatatatatatattgtt

SEQ ID NO: 353324 - DNA, 979 bp, Cannabis indica
aagactttggtcttttcactcacttcaaaattaaatgatgtgtcccactatttattagtgattgggatcttaataattccattctcacagtcgcatccatatctgtaagtccactcacatagttgcacttgaaaatgaactaaaaaaaattagcattaaatttagatttaacaccaaaaggaaaaaaaaaaagaaaagagtaaaggcattctattctattgatatcaaaaaactatatataaagatgttaagttattttttttatataatttagttgttaaaatattatttaatttattttgtaaattaaatgatatttttttgtgtaaattttgcagtgctttttttatttttaagaaatttttatttacagcttatattttctttcaggaaatttgtcgtataagagaaataattctatttatagaaatttgcttaaatttgaaaattttaattttcctttttactagttgcttttttttttatttttgctatgaatacagaagataatatatataatctttatatagcaggaattaaagacaaaattatgatcttggacttattaattaataagtttctcgatttgttattgcagagtgtgattctaacgctgtaaatcaaggcttattttaagaaaattttgtacaactgtaaaaacgtgttatgactctctttaaggtttctatatgttatatgttatattatttttaatataataatatgtagattaaaatgtggtaatatatattattattatgtgaataatatatattaagtgtatggtaaataaatgtgtaacctataattttaacctacacttttgtaacctacatagtaacttggagaggagttacaatttgttattacttgtaactcatgtgttgatcacacattattagtgtaataaaagggttgttacacaatttgatgataggattcaaatggtttgaaaaatagttgttacaaactatattaa

SEQ ID NO: 353325 - DNA, 577 bp, Cannabis indica
tataactcagctgtgcatgagtagattgcatcaccgaatcaatgggcccaagcagttgtgggggctcttcctcctcttcttcaacactaggctctctttgccgcctttggccttgttgtgcatcaattgggggctgtccataaggatgaggctcttttagcctgttgaccatggtgatgtccatttttcgtagcggcaccacagtattgtcatattcaagttgtggcacatcatacgccctgtagagttcagtgatgacacccgccaaaccaaggccaccacccgtggctccttgaacaatttgctcgatgcttcctcggatgacttgtccaatattaatattgtaccccttcatgatggcgtacacatatttgagtctatccatttggacatcggagacatgtttactcggtaccaaccgagcactcacaaagtacagctaagtttttgccaccggttttatttaacatctgtgacgaatattgggtgacccgtcttgcccatcattgtcatggaatctcaaccccggaaatcccacagtttccgccacatctaccatatcgaattgttcttcctc

SEQ ID NO: 353326 - DNA, 523 bp, Cannabis indica
tactctctaatctttcaatgaaacagatttcatatttaagctaaaatagatggtctgaatgacttaaattagctatgtactagttagaaatgataaatgatggatgctagatattattttggtattttattgacttattaatctatctattcggtgataactgtggggatattattgtttatttatattgatgagtggtcctgattttgttactaatattttcttattaatataagagttaatcaattacttttaaattagtatttggtaatataataataggatcatttataacctttatcttcctacaagggtcaaagtgtgacctttgaccacccaagttatggatattacatatctgccacggcctagagctcaggtcgtgacattagtagaacgaaatgagttgcattcattaaaagtgtaaaagaaaatatttaaaattcattcaagaaggttgaagctacggtgcatgaattaatgatttagaaatgtgtttgattttagtttgtgcgctgaagag

SEQ ID NO: 353327 - DNA, 829 bp, Cannabis indica
tgatccctagacctccacctgccttaggttgacaaatgaaatgccaagcaacagaccctgcaccttgaaacatagcttgccctttccaaagaaaggccgacagatggcttcaatagatctcaatactttctttggaagaatcatgatttgactccagtatgcctgtatagcaatgagaacagagttgattagagtgattctcccagcaaaagagagattcctggagctccaacttctgattctagcagtcattctctcagctaatatatcacattctttccctgaaatctttttcccacagattggtatacctagataagtgaatggcatttcctgtctgctgaaacctgaaatctgcataatgtgattgacttcattaggctgcatgttactacagtataaggcagttttgctggcattaggatataatccagatgtgagtgagaaggttttgagagcctacaacatgtataagatactcataaaatccccatgacaaaataataacacatcatcagcaaatgcaagatgattcagtctcaaactagcacatctgtcatgaaattgaaatccctctttttcccctactttcttcatcaatctcgataagtattccattccaagtacaaaaagcaaaggagaaatcggatcaccttgtctaattcccctttgagtttcaaaaaaaccatgaagagttccattgaacatcaaagagaatctaggagttgtgatacagttcataattagttgatgaattttagaggaaaattcaagccaactaacatctcttcaagaaaaactccactacaattgtagtcatacgcctttt

SEQ ID NO: 353328 - DNA, 508 bp, Cannabis indica
tgtaataccaaaaagctcaaaggaattacactttaactacacttaaatttgactgattaataataaaaataaatataatgtaagttataaaagtgagaagacatatttatcatttaataatacagtatctattaaaattcttcttttttattaattagttgttgttattgataaatgttaaatgaaaaaaacaaaacaaaaaacaaaaaattagaaattagaaaaaaaaaatagaacattaaaagaacagaaaatcacaccatctcttcaaaaccgtccttcatatatatatatataaatattgatattgattgttaattcataattacacaaaacaacaacttaacatatatattaatttacaactaaaactttaatacaaatatcttatggtcttcaatttatgtatgattttctctacaaaggtttaagaaaaataagtttacatttatataaacatatatattttttgatagtatatatacatagtttatgattttaaaataat

SEQ ID NO: 353329 - DNA, 613 bp, Cannabis indica
aaggatggagataaatgctccaaattcttcttctctctgctgctattagaggaagaaggaattccattgattgcatcttgaacaaacataatgtttggataaatgagcgagaactaattggtcaggaatttttggagttctttaagaatattttttctggatctaacaatgctaggccgctggattgtggtcacctatttagggagaggatttctcatgaggaccaggctagggtggttgagtgcccctcctgggaagaaattagaagtactctgttcgccatgagcaatcataaagcccctggacctgatggcatgtctgttttattcttcaaacactattgggagtctgttggagatgatttctgtgatgctgtcgctgatttctttgacaaaggtagaatgcacaagggtgtgaattccacgaatgttgtactgatacctaaggtgcaaaacccgaaaagacctaatcagtttaggcccatctctctttgcaatgtgatgtataaggtcatccccaaaatcattgcaaatagaattaagcctatcctcccctcgctcatctgtccaactcaagctgcttttgtcccaggtaggaatattcaagataataa

SEQ ID NO: 353330 - DNA, 453 bp, Cannabis indica
agggcataaaatccaacagtgtataactaccagctcattttctttctcactaaatggtgaagttgtagggcaagtgcatccttctcggggtttacgtcaaggtgatccactctctccatacttatttctcatatgttcagaggggctttcaagacttttgcaatcggaagaacatgctggtttgttgacaggttttagattgacaaggaactctccttctgtttcacacttgctatttgcagatgatagtttactattttgtcaatcgaatgagcaatctgccaggtccatcaagagaacacttgacacatatcacccaatggaggcttgaagcggggacgatacactgaataagtacctttcctgaaactttaacattcagtccctttctggtagacctagagacttcaatcagcagactttctaacacaaaggcaagtcttgaaatctgat

SEQ ID NO: 353331 - DNA, 595 bp, Cannabis indica
aactatttaaattgatttacttacaaaaaaagatgttgaaaaaagtacctaataataaaaattagagcctttttataaggtatagtggtgtcaaatactttttataggtggtgcactatagttggttagtaatattccttaaaaattattttttaagttatgtgaaatctaatatttaattacactaataacagtataatactaatgagattgttacgcaccagtgatgccttttagtatttctctaaaaattaatgcttcaaactgacaggctaacagtttttgtaattttaattgggaaatttacataaatactgttttttgaccaaaagttttcaaatatactgggacacggcaaatataacttttttactgtccaagtccgttttcttttcctttatactgcccaagcctaactttactttcatactgtaaacagtaaaaaaacacaaaaaacaggacctccttcctggttggggacgggccggaatcggagataactaggaaaaaaccattaaatccgacgaagagtaacccctgctaaatctaagaacaatcgaagaacgaacaacaagatttacagaagatttttttt

SEQ ID NO: 353332 - DNA, 639 bp, Cannabis indica
tctcacaaaagaagtatacagagacaccaattgaagaaattcaaaatggagggatccaagactgtatcaactccattagacaacaacaaagctctcaagaaggaagatggctcaccgaaagctgatgaatcaaaattttgaagtctaattggcagcctatactatatctaactgctacaagatcagacataatgtacgcagttagtctcctatcaagattcatgcatgatccaagtcaagttcactacggagcagccaagcgaatcctctgatacttacaaggaacaaaattctacggaatatggtacggaattacaagtaactcaaaacttgttggctacacagatagtgactggacaagatccatagacgacatgaagagcacatcaggatatgctttcacacttggatcaggaatattttcttgggcatcaaagaagcaagaaactgttgcacaatccactacaacattcaggagcaatagcggcgggcccctcggccgctattgctccacaatgtggccgctaaagggcaatagcggcggacctcggccgctattggtccgccgctattgcttggccgctactaatagtattagcggccaaaaactggttccgccgctaatactgttaatagcgg

SEQ ID NO: 353333 - DNA, 718 bp, Cannabis indica
ctattcaagattagactaacttgagttgtctgatccatttgagctccatgattctgagcttcttggaaataacttgccatttggagaaggtgatcacgcacattctgatgaggactcatccgtgcattgataaacttccttgtcgcttcaaagcgagattggattgatgccattccgaatagattagttaactccgtcatgattcctgcagccgtgtcagtgtttgcaaaccttgttttcaaggtgtctaccacgctggaaagtatgaagtatcgagctttgttgttggcattctgccaacgctcgtacttctcctttacagctttggttgcattgtcacccagctgctcaggagacggctcagttaacacaaacaaggcactttcacctatgagagcaatgttaatgttctctttccattttgggaagttagatccattcagcttattatcagtcaatagtgacaacatgggattggtcattgtcatgtgggatactacaaataacaataaatagaaatcaagtaaggtttaaaacaaaatctcattcagaaattattagcacatagcaaataggaatgataagcgaaaatactaaagcatacagacctaaataatttccaaggttttcaacaaactgatatagtgtcccgtttaggcgagagtcaaagctaccattcattgaatagagttgtcagctcatctaaaatgataaacat

SEQ ID NO: 353334 - DNA, 871 bp, Cannabis indica
tctgtttccctaaaactttctattacctctcggtgttccagaagcttcaaccttccgtttgtgatccgggttaccactattgctccccttattgacactaccacccacactagggtttgatgccgtgatggcatccttagcagcttgctctttaatgacatgttgctctgcctcttcagcaatcaaggctaactcaaccactttcttgtataatgtgtcatgaccaatggtaattttcaagtcccgattgatagtagcattcagtcctcttacatacttttgtttctaggtgaagtccgttggtaccaggtcaccagcaaacttagacaaaggatcaaactccagggtatacttgaccactgtcttcttcccttgagtcaacttcacaaagtcttccatatgagaagttttgatggcgatgttataaaatttttcttcaaacagggtcttaaactcttcccaagacatggtactaacatctcgggtctaacccacaatatcccaccagacgtgggcgtgatcttgtaacatgaatgcatcacaattaacttgttctgtccccgtcacccccatgttatctaggatgcgggtaatagtgctcatccactgttcaaccttgataataccagtactttatcaagacaacctacaacacttataataaaaattgagtgtcagcgacccaatttcttagtgtgtagctgagaaagcaagttgaaaaagaagaagaatgaatcttctcgttatgtttatcaactcaagcccaacaaaagatagagaaaatatgaaaagaagcaagcacaaccaggcgctaaagaatttcaggaagtccagtgagagggagttaaagcttaaagtgggcaatgatgtt

SEQ ID NO: 353335 - DNA, 520 bp, Cannabis indica
attaattctgaagataaattttaaagacgaataataatattttttagttaccatttacaaagtataatagtaatttttgtttttatttaaatcactagtatgctttcaaatttcaatgattatcactacattgaatattattaattttaaaattataatattaaaaaaaaaacaaaaaactaaaataaaattaacatacgtaatttggcacgtaagatctatctagtatataaataagtgtgtatacatatttttttttatctacattttatttagtactttgagatgatgtaaagatatgcataaagtatgttctatgtacccattgattgtaaaatattgaaaataaattaattttgtgttaatattattgtaataaatacgggattaagacgcgcgaatcactccattttctgtacaatttatagtgatggtataagtttattatcattatcataactattaattattattataattaaagtcaaaaatgaacatatatatagggatatgatttgtc

SEQ ID NO: 353336 - DNA, 800 bp, Cannabis indica
attatattgaaattagttttatttagggcataaaacccaacagcgccatccacgaataatctccaagtatttgcgtctcactaaacaagcagattttcctcagtatcgcggttaatttcccttcttcggttaatcatgcaacttttgtcgcctccatcatgaatctgctgatgtaagctcagagaggttctcttggcctttgctttacttcgagcaggtcctctaaatgcaataggagttggcgagaagaagagaattgtgcatggaattccgaggagaaagccttccaagagttgaaccttccaggtgtaaacttgaaataccattgctggacagaatctgagagtgtggcaggaaaaacgctgcaacatacatctcctcgtactccttgtaggtccatttgcatttcaaaatatttaagacgtgacaagggattttccttcccagtatacatcttccaggtcggcatcttgaacttgtggggcaattttagaacattgatctctagagcaaaaggggatccacgtgctcggtccaactcgaggccattgttcttctatccgacaagaccttggaacatgttttttagttcatccaactgtgcttgcgcggatggattaacttgttcggtctcttggtcgaccagagtcacgtcaggatctctttgagctggattttgagcacgggccccaggcttagtgactggcgagacgtactgttcgtctaaccctctccttttgttgagatcatctctcagatcatgagccattcccaatctattaaatatagatgcattaggt

SEQ ID NO: 353337 - DNA, 559 bp, Cannabis indica
tggagtcaaaaatccctatcatatttggaagaccttcctcgctacatctaatgcccttattaactgtaggaatggtctaatgaaaacatcttttggcaatatgactcttgaggtcaatattttccatgttgcaaagcaacaacatgacgatgatgagtgttattagacatttttgattgacacactcatttatgaggagattcaattgcaaaaaaattctgatgatcttgatgaactcttctcagtttctgaaagttctggttttaatgagtcaattaatgaaatttcttgttataaagactcacaaaacggaagagcaaagttttggcagcctcgatttgaagagctacctggtgaaagggaaaagccaaaaccttctactgaagaggttcccactgttaagctagcccaactacctgagggtttaaaacatgttttctgggagatggtgatactttcctgttatcatctcgtccaaacttgatccttcacaggaaatgcaattagtcaagctactaaagaagcataaacctgcaataggttggacgtttgctgatat

SEQ ID NO: 353338 - DNA, 1047 bp, Cannabis indica
tccaatgagtaaagctcagttgagatcattttctttgaaatttatggacaaaggagaaggtgtaggtggtattgaccgagagttggaggaggatgctgctggggaagtggggaagaaggcggagtgcagccaggccgtggaggagtccccgttgaagtcccatgtccgttcgaagactaatgttgttggtcaatccgaggaaaatgtggtggaatcagtaactacgccttcactatctgctacaaaatctgttgaagatgaaggttatgcacataagacctttgaggatgacgactttgatatagtcgaagtggcgtctttctggaataaaggcaaagccctcgtcaaatcaaagaagacacagtcggagaatgtgcatttaattgaggatgactttaacgataaggcctacgagcaatttattgagtcgggcagaactgttgtcgggccgttcaagacgaaggaagcgatctcccgtaaccaatatgggttttacaagtttgtttttagcaacacattagatccggggtaagtaaatgttattttggtatttctcattatcatatacttatagaaatttttaataacagttacattgattacaattgaatcagatatgtgcttgcaaaatttcaaaagtttgaagtggataggaggtgcatggcatcgttgcgacccttgcgagaagttgagggatccgtaagtgtgaaagtagttactaaatatgtatcatttatttacatgtctaaatcatatttcattttgttgcagatcattgactgtttttctatactaatgaacaagtaccaacgtgatagccgattacctgaccaacctcgtctttggtacatgcccactcgcatctcggtaattgctttgctgtacaacttatcttaaattttgtacttcttgagtttggttgtaatttctgttacttgacaagatgaacaatcttttgcagcaaaaaactctcggttcgtttaatgtgaagaggattgcgaaagaacgagaatggtcaacactattttacgaagacaacttcaaaaa

SEQ ID NO: 353339 - DNA, 2006 bp, Cannabis indica
ctagaaccggaactcgggctcagacccagtcctagacctagactaggactaagactcgaaccagaacctgaacacgaactcgggactcgatcccagaccaagaccaagcccctgacctaaagtggaattcggacatagacatggacacgaacccatacccagacccaaataccgacacaaacctagacagggattgaaacacgggacctagacccagacgcagacgtagacccagccagacacgaacttgggaccagaaccaagacctgaacctgaaccttgactcagacctggatccagaccgagatccgaaaaacccgtacccagactcaaactaagacttggaccctgacccaaaccttgacccagacccagacccagaactaaactgggacctgagacctaagacttgaacctagactaggaccgacatcgggacctggacctgaccttgtcctaaaccctcactggatcctgacactcgcaaccgagaccaggatctagacccttacaaggacccgaacctaaacccagacaaagagagggatcgaacccaggacctgaacccgaacttggaaccagactaggacataggaaccggacttggatggggcacctaaacaaaggacctaggccccgaaacccagaccttgatctaaattcgggacttcaacttgaactaggacttgacctggaccggggaatatgatgtcggaccaagacgtggatatgaaatctgccccggacccgaactaggacaggaacctggatacgaacacataccaggaccaaacccgaaaccgagccaaaactcagacacagacccaaaatcagacccaaacatagaactcgaacccattccaggatcagaacccaggacttagactaagaactaaactcaaactcagatcgagatcaaaacctgggactcggaccagaacctttacccagaccaaggaccctaacccactcccggagcatgattcagacatagaccgagatttggacccaaacacaaactcaaactaggactcgaacactgacccaaactcgaacccaaactcaaactcagaatcgcaactggaactggaactggacaaggactaggactagaaccaagattaagacacagaccagagcccaaacccgaccgagacttaagccagaacctcgactaggacccaaacccgaacatagaatgggatcaaaatcgggacctagaaccagaatcgagatacggacttgggcaacggaactaggaccgggacccaaggcccgaacccaaacccggacttaattctaggacccaactcgtgactcgacatacgaaatcgaactagaccgagacccgagatcgggatcaagatctggacatggggcttggactgaacccgtagtcggtgtttggatctgggacccaaccccgaactcgaacctagaccaggacccgaaactagacccagacttgaacccagtcccaaatcacaacctggacccggatccaaacccagacatagactcgatgccgaacttggacccgaactcagacccaaacatggaagcagaatcaggacacaccattggggccgggacctagaacggaaccccaatctcggtccggaactagattttggactcagaccaggacccaaacccgacccctgacccaaaactagaacatgaacaagaaccgcaacactgggaccctcgaacaagactaggaccgtgagtaggtcgtggacccaccctagaaccgaactcgaacatatccccagacccaaaccgtgacctgaagtcaggccctgcacgtcgtgtacctagaccaagactgagacctggaccaaaacccggatccagaccaggatcgaaacttggaacctagatctggaacgagaccctaacctagacccagacctggacccgcacccgggacccgaacttgaaccatgacctaaacccagacccagattgggatccggacctggacccagactcagactcagact

SEQ ID NO: 353340 - DNA, 710 bp, Cannabis indica
tttaattttgtatgagtattattaaatacaatattatgtttggtattgacatgtattaatagatagtgtaaagataatatatttttaataaactctacccaacaccaacaacgggtcgggttcgggtccaagtttgggtccgggttcgagtttcggtctgagttaaggtcttcgctccgagtccgggtcttggtccgagtttgggttcaggttcaagttttggttcggatccgagtctgggtctgggttagggtcttgggtctggttctagttctcagtccgagatcaggtccgggtccggatcagggtccgggtcttgggtctgggtcagggtccaagtccgggtccgggtcccgatccgggtcccaggtcccgatccgggtaaaactcccgggtttgggtcccaggtctaggtccgcatctgggtctcggttcgggccgggtcccagttagggtctcgggtctgggttcgagtttgggtctgggttcaggtctgggtccgagtctgggtctgggtccgagtcccgggtctcggatccgggtcccgtgtccaggtccgggtcctacgtccgggtcccgtgtccgggtccgggtttgggtcccggtcccgaactcgggacccaagggatcctagtctagggtccgagtcttgaattagttttttttaaaaaaaaaataaattgaaatcgggttggattagatctgatcta

SEQ ID NO: 353341 - DNA, 544 bp, Cannabis indica
ttttagtagctaatgtttaatatggaaagtttttagtaattacacagtgtaattacattcaattctcacggggaccatgagaattggagagtgtaattggaacccttcaattacttccaattacacagttagagtataattacatggtcagacaaacatgtcaaattgtgtaattacctccaattacacacaaattcaattacattatggctttccaaacgcacccttaagatttggtcaaattgggatttaatttagggtaagggagtaagggatttattattatttttttttaaatatattgaaaagtaaaaatgtttttttaaaaaaatatatattcaaaacggatcgggtcagatccgattcataaaaaaattaagcggggcggaacggatctgatccaagatccgataagtatcagaatattttgaatcagtaatgacccgtcggatcggatcactaaaccaacccgaataaatggatcttttgccatgcctacacaccgcaccgcaaaaaaaaatgcagtttgaaattctttgcagtg

SEQ ID NO: 353342 - DNA, 558 bp, Cannabis indica
taatataggcccatggtccccatactagttaagaccatactgcttgtaagactcagttaagtgaagaaaagagattctaagttctatttgttaattaagagactttttatgtcgaattaataaatatattaaattacaatattaattaataactattttttagttattaaatcattggaattggcatttaattggttgaatttgaaaattggcgttttgagaaaatgagatgcagaaatgataaaatagcaaaattgcataagtggggcccaaatccaaagcccaggccggccactagtgtcggtttttatcatttaatttttcattattttaatgccaaataattctaacctaaacctagttggttacctataaatagatagtgatgactcacattcacacttaactctgtcagatgaaagttgagcctcctattctctactatagccatcaccctcttcttgtcttttcttctctttaatttcgaaccttgagtgaatgagtgagtgcaaacacacatcaagtggtatctcaatcatagtgtggaagattgtgtag

SEQ ID NO: 353343 - DNA, 984 bp, Cannabis indica
tggatttaaaacgatgaatattatttgtgtgttgatctggatgtgttcatgttggtttatgtgttatttgatgaatgtatgtgaattatgaaatttttcatgaaaataattttattttcattctaaaaatatttatttggattccttgtgaaaaattaagtaattttggtttttacggaactcaattctaataaaaattgagaaagttatggtgttttgatttttcgagttcaagaggtgtcgagtgggtgctcgtgtgcaccaggcactcggactcgaagctgcatctgcccacgccttggggaaaaaatcgtgtctgagacacgtgcattcagacaggatcatgcgcgcgaataccctgctagcagggtcatcctcgcacggatatgcttccagcccccctttcccacgcgcgtaatggctgcttgcagcctattttggttgcacgtgcagccttgctggcagccactcctcttgtgcgatttttgtgggatttttccccaaattttgaattttcccaattcaaaccctaaaaatcaaaataaaatattatttttaatatatttaaacttaaatattaattttaaattaataatatttaaataatatttaatttttaatagattattattaattttgaatttttttgaggtttaaatttaaaaattgattattttattttttaattatggtcaaattttaaaaatttgttaatttctttaatatttatatattatttaattataggatcagatatttaaatattagccatattttaaattaaaagataactttatccttttaatttgaaatattatattaaaattatctgttgaccgagattttcggcaactactaaaataatgattataatattaagctgtaagaaagtgagagaaggatttttacgtggttggggcgttaatgagccttagtccacgagtctttgttattaatggatgtatttaatacagattctacact

SEQ ID NO: 353344 - DNA, 780 bp, Cannabis indica
tcatgaaccagagctcattactgatgcatttctgaatttttacaaaggattacttggaactaaactggtgaacagaaagagagttcagaatagtgtcatctccaaaggaccaagggtatcagcagagcaatctaaactactacttaggggatttactacagaggaagtaaaagcagcaattttcagtattccgagtggcaaagctccaggtcctgatggattctctagtagttttttccaagacaattggggaactattggtgatgacataagtgaagcagtcatatcatttttggattcaggtaatattctcaaagaaatcaattcaactattattaccttggttccaaaaataaaatgtcctaacactgtcaaagattttagaccaattgcgtgttgtaatgttatttacaagattgcaacaaagcttttgagttctagaattcgagacattcttcctgaaataatttctccttcccaaggaggatttattaaaggaagattcatagggcataatattatgatttgtcaggacctggtgagacactatagtaggaaagccaataaaccaagttgcatgatcaagctcgatcttcaaaaggcttatgatactattgagtggggattcttggaagagatgctagatggcttacactttcctaaggaattcattaagctgataatgaattgtattaaaactccgaggttctctcttatgttcaatggatccttacatgggttctttgaagctaaaaggggacttaggcaaggggatcccat

SEQ ID NO: 353345 - DNA, 645 bp, Cannabis indica
gggttcgcgtcctgggtcttggtctaggttgggtccgagtccagagttccaatcccgatctgagtctggattcagttctgggtctaactcctttgttatgatccttgtatgggttcgagtttgggtccggatccgggtctagctttcggtctgattctaggtgtgggtttgagttcgggtccgagtctgtgtccgagtttgtgcccaagtctagtccccgatctaggtcttggttcgggtccaggtccaagttggggtcttgagtgcgggtctaagtttgggtctgtgttcggatctcagtcaaaatctaggtccggcatttcgatccaagttttggtcttggtctgagtcctggttcgtattcaaatccctatctaggttcaagtgtttgggatatggtcccagatttaggtcctggtccgagtctctaatcttgtatgggtacacgacattgtacgggcccgagttccagtctcagttagggtcagaggctaggtctgtgttgggttcttggtctgggtccgggtcctggtcacagtcctagtcttgttctcgggtcttcgttcggcgattcttgtttaggttctaattttctgtcccaggtctaggtcaaggttcgggtttggttcttcgtctgggttctgg

SEQ ID NO: 353346 - DNA, 748 bp, Cannabis indica
catccaaggatctaatatctcacgtccctcaggtacctttttcaactatcaaatttgtgtcttaatttggtgttaacctgaaagggtagagcttgcttggaaacacttttaagtgttttactaaactcttgctcagttaaatcttcatattttagcaataaagcagtaaatatcttgaatttgagttcttatttttctgtagtgaattagactaaaaccttaattaattttatgccagttttttggaggttcaatgcttttattttgttgaaatacattaaagatgcgagttataaacttttacttttcctgtaaagtgacttaagatcgaaagccctttatatcggcatagaaccaatcagccaaaaaaagtaacaaaaacttgaattgtatgtttttttggattatggtaacttagcctttaattgtttgatctcattgcagaatctaatgcatcaatgtcgtacgggatgagtgggctgaatttgtgaagcctttgattatagattaagtagttaaggttattacacttttgtttataacaaaagtaacaagttttatgattattgttatcttttgcatatgttattagtttatctttagtttacgatatacatggaatttaagttttagaatcgattttattaacaattttggtattgtgtgattagttaatagaatcgattactaattttatataagttttaaaaatgttattttaattatttttgtattatgtatttactat

SEQ ID NO: 353347 - DNA, 539 bp, Cannabis indica
gttacgagaagtggacttaccacggggaagctgaatctagagccactaatgtaatgaatgaccatgatggcgctaatgatgaccctgaaattgatgagatgattccgatagtggatgacttccttcaaccgtcatttgaaatggatgataatcctgatacaaatcaatggcacagcaaattatttgaagagattgaggccgagttgtatcccggttgtgattagatatcttctcttaactttttggcaaagttattgcatttaaaagttaggggaaagattcctaacaacatatttgaggaattactgaagttattaacaacatattgtatgatattgatggccatcccgagcctgaaagagttatgagaactctttatcatgagatgaagagaagatattctgagagaaagaatatcaggcacacgtggtttcaggaacattattgtggggatccaaatgatttggcaagtgttattgaagctgtacctaatcactgtactacagagagctggaagcaaatcattgacttatttttga

SEQ ID NO: 353348 - DNA, 548 bp, Cannabis indica
tttcgagggagactggtgactcgacgaagagcgagtgactcgtttggacacagatggggaaggagatgacagtgtaggacgaacctttttagagataggaggagccttacctagaaacgtgcgaggtttcggactgacctgaggtgaggggggagacggggtcgactctgaacttggggaatgtgcggaaccaccaaccgccgactggtagaggacaatgtcacgacagggattaggcattgcagactcgactgtaggagccactgtaggatcaccagtcgacgccacagatggaacaaccatagcaacaggggttacggtaatgggggtgatattctccatgatagagagggaaaaaaactttgaatgatgcagagcttagggtttctgaggggaaagtgaagaagtgagactgatcactttccgtatgccttaagtataggcaccctgacacaactgaccaggcaaaaaaaaaatgatgatgatttttttaaaatttgatttttgccaaggaaaacgtacgcacccaaattgaatatttgctacca

SEQ ID NO: 353349 - DNA, 545 bp, Cannabis indica
ttttcagtgtcagacagtgggatgttattatttaaagccagggtttgtgttccaaatagtgtggaacttagaaacgaaattctcaaggaggctcataccactccatattccctacatcccggcaccaccaagatgtatcaggatcttgaacctcacttctggtggagcgaaatgaagaagaatttggtaggattcgtatcgaaatgcctaacctgtcaacaaataaaggctgagcatcagaggccggcagggttgttacatcctttaaccctagctgaatggaagtgggaggacatcacgatggactttgtggttgggttacctagaaccacaggattgttcgattctatctgggttgttgtagatcgattcacgaagtctgctcatttttcgcaagttaaaataacctattcagtggatcatttgccacagttgtatgttaaagaaatagtaagacttcatggggtaccaaagtctatagtttcagatagagatccgaagttcacttccaagttttggcagagtttgcagcgagccatgggtac

SEQ ID NO: 353350 - DNA, 779 bp, Cannabis indica
aagaaaaccaaatccaattttaacataaagaaagaaaaaagttaatatttcttttgttgatgaaacatttggcatataatctgatatagggaaccgctataaaggggaccatccacccaatctaaacactacaattaacatatagacttgcatttatttagatgataattctgtgtataatattataaaggattttataagcggaaagtacaggtttattatttagttataagaattagaaagagagatagataataaatattcaagaaaagtctaatagcaaaaaagaaaagtctcaccagacaacaacagcgagtggagtcgagcctttctccgacgactgaaagcgaagcgaacagcgacctgaaactgaaagaaatcaaattaaaagaaatccaaaagaaagaaagaaaaaggttagtaaaaatccaaagaactggctactaatcgggtggaaagctttagatgagtacagattgaaagcaaaatgtgcagagattcggaaaaaaaaagatcaattatcaaattgatacgttcgtacacccatgtagactaacagcaaagaatctcaccagacaacagtggagtcaagcatttctccaacgactgaaagcgaagcgaacaacgacctgaaacttgaaagaaatcaaattaaagaaaaaaaaaggttagtagaaatccaaagaactggctactaatcgggtggaaagtacagatcgaaagcaaaatccccatagattcggaaaaaaaaagatcaattatcaaattgatacgttcgt

SEQ ID NO: 353351 - DNA, 985 bp, Cannabis indica
tgaaaatataattggaggttctttcgtttttaccttctttgaaggttctggagcaaatactgactgctcattttttacttccttcacgtacctcttttgggcattgttactctctcctgcaatatgggcccccccgagataaccaggatatcctctccttcaacaggaggaggttataatccctggtttcttgggttgttgggcggattgggttggttatgtccattgccctgcctcttcacatattgcttgaagtggcctcgcgcgatgagactttctatctcatctttcaactgaagacactcatctgttgtgtgcccaatgtttttatggtacttgcagtacctggtcgaatttcttttatggttcgcatctctcatgggctcaggtttactaaaggcaaccttgtgctcatgcgcgagataaatgctttcccgagtttcattaagcttagtatatatagtgtaaactggcacatacttgtcgtgcttcttttgtatcttcttgtctttggacgaccccttatagtcgtctttcctctttgagccagaggcccctgagttatcagctttagtcgagatagtacttgttgaaacaatatgggtttgcttcccgagccaatttttaagaagttcatctcttttcgagcttcttcctttcgaacaaacacctgagccctctcgttgaactcagtgatgttcttcactggacgaccctgtaagtcatcccacaattttcccccagcgatggagagatcagtagtgatccccgcctgaagggcagtaagttgtgtactatcatccaaatttcttattcttgcagtagccatgctaaaatgacctaagtacgtctcgccaggttattgctttatgttggtgagtgaggacgctttgggtcacctatcccttgcggcctggaactactttttgaagtccttggacagttgttcccaagaagtaatggaatgatgagtaaatttattgaa

SEQ ID NO: 353352 - DNA, 537 bp, Cannabis indica
ccatgtaaacactttctatatcctcagtcaagatggtaaatgcagtgtatttggcttgattttcttggggagcttgcttggtttttccagtaaactttcccttcttcccattcccttgtctattgttgttgctagaacgtttaccgtttgagcttgaattacttgggaatgggggaattgggtggacgttccagtggaaggagcttttgacttgccaggtttttgctcaccttttgcttgctgaatagcctcttcaagtttaatgaagccttcagcacggttaagaaaatcgctcattgagtcgaccggaccgttcttccttatgtctttctagagctcattgaagacttcaataccgcccagtatcgcggacaactttccatcttcagttacccgtgaaaccttaatcgccttcgtcatgaatctgttgatgtaggctcggagaggctcgcctggcctttgcttgacttcaaccaggtctcctaggtgcaacggaaattggcgagaggaggagaattgtgcatggaactctgagga

SEQ ID NO: 353353 - DNA, 1662 bp, Cannabis indica
ttaataaatagtgataatagtaacaaatgattttgtgattttaatttgataataaatattaaaaagaagtaaataaaggtgtaattaatagtaaaagaaagaaaagcttcaagtatcatccatatgcttagtgcgagaagagggtaagcaccaacaacctatttactacgtaagtaaaaggttactaggggaagaatctagatatccccctctagaaaaactcgctttgtgtgtaattcacgcgcctcataagctacggccgtacttccaggcacaccctataaaaatgttaaccgatcaacccttaagacaagttttatcaaaaccagatgcttctagaagattgataaaatggtcaatcgaactggggcagttcgacatagcataccaccctcgaacattcatcaagggctaagccttggccaacttcttaatagaaggtataactccagaagaaattctgcatgtacactgagaagcggaaacttggaagttatacgtggatggtgcatccaacgagcaaggttcgggtgcaggggtaatattaatatcattagaatgctttaagtttcactatgctttgagatttcaatttgatgaaaataacgaggctgagtatgaagccttgattgctggcttaaagatagccgaagcgttgaaggtcaaaagtctcatctgcaatagtgtttcgcaactgattgtgaaccaggtcctcggggaataccaggctaaaggcttaaaaatggcaaagtatttagagaagtttcagaagaacttgggaagatttgtttagtttaaaatcgagaaaattttgagagaacaaaactccaacatcgatgccttagcaaaattggaacacatatgtgaaacggaagagatagagatgatagacagctctcctacatggatgactcctattatcaattacttactcgacgaacaacttccaaatgaaaaaaatgaggcgcaaaaactattgtattcagtgcctcgatacacaataattgaaggtaaacaatatagaagagggtattcgatgcccctagtttggtgtgctctccctacagaagtgaaggaaatcatcagagaaattcatgaaggcttttgtggggatcatgcaggctggcaaagtctatctaaaaagatcattagataaggatattattggacaacgatcaataaggactcccatgagtttgtcaggaaatgtgataagtgtcaaagatttacacatatacctcgtgtgccgccaacagaatgagaatgatgacctcgccctacccatttgctatatggggaattaacctaattggggcattacccactgggcgaggtggagctaagtatgttgtagtagcactcgacttcttcaccaaatggactgaggccgagcctctcgtttccataacctgcaagaaagtcctcgactttgtcgtcaagaacattatctataggtttggaattcccatgaagatagtatccgataatggaacccagtttgatggcgacttgttcactgagttccgcgagaggaacaaaattatcaagagcttctcatcagtatccaggcctcacgcgaatggacaagtggaagttgttaacaatgttaactcaaacttttcaatctccttgttttgatgattagcaaatatttgattatta

SEQ ID NO: 353354 - DNA, 887 bp, Cannabis indica
cgttttatctcccgatccacaaacaaatgcattcccttcaacatcctgaagaagtgtcagaaatttgaatggtccgacgagtgcgaggaggcattcacaaaactaaaagagcacatggctaagccaccaatcctatcgaagaccgttctcagagaggactttttcctatacttagctgtctttgagaatgctgttagcgcggccgtaatacaggaagagaaaaaaactcagcatcccgtgtactcggtcagcaagtgcatgataggagcggacacgcgatacccggtgatcaaaaagctagttttttgtctcctaatggcctctagaaagctgagaccttacttccaagctcacccaatcaaggtattgaccaaccacccactccagcaagtcctacagaaaccagaggcatccggaaggctcctcaaatgggcaatgtagttaagccaatttgacctacactacattccacgcatttccataaaaggtcaggcgttagcagacttcatcacggagtgcaatgaagttgaagctaccgcaaacattcccacaccaccagtcccggcgtggaaggtatttgtggatggtgcctctaacgagaacgggtccggagtaggggttgcaatgatatccccgaacagacttcgactccaggcagccctacgttttgaattctcagtttctaacaacgaggccgaatacgaagccctgatagcagggctgagattagcaaaaaccatgcgggccaagagagaagaagtctacagcgattcgcaactggtagtaaaccaggtgtggcgagaatatcaaacgcgtggagaaaggatggctgcatatgtggccatagtccgggagctgctccacgagttcatggactacaaagtaga

SEQ ID NO: 353355 - DNA, 756 bp, Cannabis indica
ggtcttgggtcgggtccagggttccaggttctgtgtcgcaggtcctggcgcaagtgtcgattcgggttcgagttggggtcttggtatcgatcctagtttgggtccgggttcatgttcggttctgcatctagatctgattttgggtccaggtccaattctagttccaaggtccttattctgattcttgttccgatttcgggtcccgagtccgagtgtggatttgggtcctggtttagaaatggttccagctttgggtcttggtacgattccaagatcgagaaactatcgggttgggtccaagccccgggtggtgggtcaagattcggatcccaatcttcggtcccggtctcgtcccaattcagatactgggtcctagtccgggtcgaggactaaaaccggggtcaggtcttgggtcccaatcccactcctgggtcccaatttttgttctaatttcaagtttggttccccaatctaggtcttggacttgggtccaagtctgagtctccaatcccggtccaggttgtgcatctgggtttgggtccaagtccgtgtctgggttcgggttagtgtcctgagtcccgatctgagtcttggttcgtgtcccggttcgggtctgggtcttggtcctagtcagattctagttccaggaatgagactaggtcttagtccctcggtcttgctcccaggtcccggtacgcttacagttccgcatccagtttcgggtcacggggtacgggtttaggtctgagtccgggt

SEQ ID NO: 353356 - DNA, 554 bp, Cannabis indica
aagtggacggaagccaaaccactctcaactattacatcaaagaaagttcaagactttattgtgaagaacataatctgccacggattgccgtacaaaatagtttcagataatggcaagcagtttgacaaccaatccttcactgatttttgtgcgaaccatggtatcatcaaaagtttctccgcagtggaacatcctcaagcgaatggtcaagttgaagcagtcaacaagaccttgaaggatacactaaagaaaagactcaaagatgccaaaggaaattggctagaagaacttcctgaagttttatggtcatatcgaacaactgaggaaacggcaaccgggaagactccatttgccatggcatatgggtatgaagctatggtgcctgtagaactcgagccaccatcccacaggagattggcgtacaaccaagataccaatcacgtactcctggccgaattactcgttgaaatcgaagagagcgaaccatagcaaacttaaagttgatagcgcatcaaaaaaaagtagctcggtatttcaataaacaagtgaagact

SEQ ID NO: 353357 - DNA, 672 bp, Cannabis indica
gcatttttgcttggtaattaactattgcaatataaattttatttttacagtccttgtggagacgatactcattacttatcactgtattacttgtttgtgactgcgtacacttgcgtatatcaaattttagcacaatagtggttgaataataggagctgaagcaatgattcttttaaaaagttaaaagccaccaagcagttctcattaaaatcaaacttgacatccttttgaagaagatggcataatggtgtatatattcttgagaattttttcatgaatatcctattttctgcatgcccaagaaacgatctgacttcttcttttgttgttggttgtggtagggagccaatcaaatcgatctttgccttgcccacttctattcctttctctgaactcacatgtcgagatactatgccttgattcaccataaaatggcatttttcccaattaagcacaaggttggcctcaatacaccgtttaagaatcaaagtgaggttgtgcaggcacttatcgaatgaatcaccataaaaactaaaatgatccatgaagacttcgattatgttctctatgtagtttgaaaagatgctcatcatacagcacttaaaagtaacaggagcattacataactgttggaaattattttaccaggaacttagatctactcacaagtat

SEQ ID NO: 353358 - DNA, 766 bp, Cannabis indica
gatgttatggactcaaatgtaactcctacatacatcatactcctttggcattaagaattttaaattaagatgtgtaacatattcttacactcttaatattggtgataatggtggaggttactcatagtaacaagtaactccccaaatattacaaaaatatgacaactaatatacattgtcatatgctacatactattagtttattacacatatttaatctatatgttatattattataaataatataacgtatacattttgtgtactaaggcttaacattcagcaaaataaaatataataaaatttggattgtataaaaatatattcaaatcttaacattaatatactattgtaaaaataaataatatactagtataagtaaaaaaataatatatgtatatatgtacaatcttaaacatagaaataatataccctaatcaaatatatcaatatctcaaacttaaactaatattccacgttttttttatttcactcgatatatactatatcacataaaaagtgatataccttacaacaataagaatataccacaaaatatcctctaccgaggattgatgaattatttgatcaacttggtggttcaaagttcttttcaaagattaatttgaggtcaggttaccatcaattgaggattagggaagaagatatccctaagaatgctttcaggacatggtatggacactttgagtttttggtaatgccatttgggttaacgaatgcacctgttgcatttatggatcttatg

SEQ ID NO: 353359 - DNA, 620 bp, Cannabis indica
ttaaataaaaatgcgacattataattttcctcatttaacgcttgtaaataaaattagtatttttataaaagtacgggcgttacagaagactaccttgaagaaaaagcttcaagcttgcaaagcacactggctggatgaacttccaagagttctttgggcctacaggaccattaaaagaacttctacatgccacactccataatcaatgacatatggatatgaggcagtaatcccaattgaatccatattgcctacacacaggagggacacctacgacccaactcaaagccatgctctacttcaggaatcctttgacttagttgaggagctttgagagcagtcacaggtcaaactccagatgtaccaatacaaaattgccaagaatttcaactttaaaggtaagagcaagagatcaaaatcagtgaccctattttgagaacggtatttccagcctctcaagagcccgaagtggaggtcttaggaccaaactgggaaggtccatatgaagttttagacaaaattggtgatggaacataccatttaaaaagactagatggaagaagaatcccaagagcatggaacgctgaccacctgcaacgatactatcagtaaactggagg

SEQ ID NO: 353360 - DNA, 1213 bp, Cannabis indica
aaacaatttctatactatacctagctaccttcctatgttttcctatattgatattttacactatatataataaggtgaggtccaattctaatgaatatgtatttatagtacatgcctcacaattaaaagttgttgttgggttgggactcatttattaatagtgtgaactaatttatcaaataaaatttgagttgagttgcggactaagtcgttctctttaatgtgtaacgagacaatcagtccgaaaaataagatgcacaattgcacgctacaccagcttagctgtacgacgacgcgtagtgttcagccagaaaagtagcaagtacccctgaaggtcactccaattgctcatatctaccctatgtatacatttttttttttaataatttataaaaaagattattccaacaattattattattattattagggtaaatcttattttggaccttatgttttacaaaattatcaatttgactcttcgttatgttaaacgacaaaatggatcctgtattttctaaaattgtacaataatatgactctgaattatttttatcaaattaaacttaataataatctgatctagagatgttatgacaaaactagttacattttctgtatctattagtgttaaaaaaaatttaagttggttatattaaaaaataaaattgttaaaaattgagctcaggggcctatttttacaatttttgaaaatatagggtctaatttgtcatttaataaaacagatggtctaattaataacttttgcaaaacacatggtcccaaatggtatttacgctaaaacaaacaatacccatgtaacaaatgtgaaataagatatttattacttatataattaaattattatttaaataaccaactaatttcaaaaatttaaggttgttaaaacaacctaaaatatctcttcaaactttaaaaattcaaactaattttaaaatatctagatttatttaaattattttatcaaattaaattaaatatctaataagataaatgaattgaaaataatcaaatagatattttcaatatctattgactggatttttagctaaccgacgcagagtcataataaatgagatttaaaccacaatcacagtaataaatgtagttaataacactggaatttgcaataaatgtaaataaaagacacccgaatttaaagaggttcggccctgggtgttggtaatagcct

SEQ ID NO: 353361 - DNA, 567 bp, Cannabis indica
aaataatcagtcgtctaattctcatatcgatcgtttgacaaaaaaattaaaataaaattagataaaaaatgttgtagcatcacaattaactttaagaactcctatattttgtttcatctaccactcagaagacacaacagtagaaactgttgcaataggttcaaccttgtagcttgaacactcatattatgtaaagtacgtaactgcactactaataactcattcaatcgcaaaaaacttgttattttcaatcactttataacaacgatataatggtgagtcattaaaacataaagaagaaccaataacgaaacaatgcaaaataaaactatgtcacacatagacaagactaaaacactcaaaaccatatcacacagacaaaactaaaatactcaaaagcatgtcacagagacaaaactaattgcagtagaaaaatcaaatggcagtagcaaaatgtaatctcgaccaagccgcacctaagctcaataaatcatccaatccaatgacaaccgatcgctaaacattggatatccaattgtgatcagatctgattggatgttatttttg

SEQ ID NO: 353362 - DNA, 521 bp, Cannabis indica
atttcataacatttattttttgttataatatgcagacagactcaaaaattatttgtgcttcgtgaatcgtgacatttttttaatgttataacaaatgttattatggccatttttttttgtgaatttttagttatagttgtaaaattatgagaaaaatacaattttataataaataaattcatatgatttttttttttattattataaatttaataatatattttttagaaaaaattgtgttattttatatttattattataaatttaataatatatttatatttatattgataacaatatataataataaaaaaaataatttgcgttataaatatttaagtttaatttttgacagtaataatatttaagttataattctaaaatttctgtaagtacctagatgttaagtgttaagtaagtttccacgtgacgatttttaattggtccaagtcatcaaattttattttttaaaaaaagtttaaatataccaataagaaaatgacacgtgaataataacttaa

SEQ ID NO: 353363 - DNA, 776 bp, Cannabis indica
caggtttaaataaaaagttatgatggtttgatccccttctcgtcaaaaatgtttgaccaaaaactcataaaaaaaatttaaaagttaatgggtttgcattatatcatgcatttctagatgaatcccggttaatcatacacaaatgcccatttggtaattttaaagagtgaagctttgtaattacttaaataaaagaaatgattctctttattcataactgaagataaaatattacatcaacaatgtgagttacatcactaatttatttgtagtagggtcgcaaatgttccacgtttcagtagttctttattagcgagccatttagccgagccaatttgtaaacttcaactcctactactgcttcgattacatatggaccctcccagtttgggttcaacactcctgcatatgcatctctcgtgtttgtaaatactcgcctaagtaccaagtcttcgacattgaatagtgttttcttgactcttttgttgatgtatcttgtaactcatagttgatacactgcattagtgatttgcgactcagttcatttttcatcaagcaaatccaaggacaattttaggagttcttggttttcttcttgatcataaactcttgcctatgagtcgagatgttcacttctacatgtaacattgcctccgagccaaatgttagcgagaagggagtgtgtcctgttactgtccttttcggtagttctatgagcccaaagtacttgtggtagctttcgaccacctgcctttggcagcatctagcttcttctt

SEQ ID NO: 353364 - DNA, 985 bp, Cannabis indica
ccaacaaatagtcatttgtagctcaggatatacggtgcaggataattctttggaactcttgcaactgctccatagtggctggattggaagtgaataaatgttgaaaatagtcacacgccacccgacccatgtttcgatttcccgtgatccattgaaatcggtcatctatcaatctgtgaatggtattctttgctttcctattactcgccttcctgtggaaaaactttgtgttcttgtccccttctttcagccataacgctctactccgttgcttccaaaacttctcctctttatcaagccaaacattttatttcctttccaattcctgcatttgttgccaatcctgtacattagtgcttcgggttagcaaggagattttatcttcatattcctttagatgccttgtcatctctagcttcttggttttattccattgttgaagggcctgcccacattttcccagccgattctgtagctcccttgtgttcgaaattttcttatcttgttgccaaaccgattgcacaatattagaacactcttcatcttcagcccaagcactctcgaagtggaatctagttcgccatctagtcgtattgtgcctctttacatggggatcatattccataagaagtaagggacaatgatctgagtttgtacgatccaaatgacgaactttcattgaagggaacatgtcaaaccattctaaattaccacaaacccgatcgagtctttcaaagatgagatcatttttcctcccattgcaccaagtataatcacttccctcataaccaacatctcgtaattgacaactatccaaagccttccggaaattgttaatgaggtacctcagcttagggaggcctcccattttttcgctttggctcacaatttcattgaagtcccctcctacagcccaaggtccggaatacattcgacttattcttttcaatagcttccaagattgacatcgttgactaggatccgg

SEQ ID NO: 353365 - DNA, 832 bp, Cannabis indica
ggtttgtgatgatgcaatctttttattttttatttttaatttttttatcaaataatttgagaattaagtggttgattatttggttcatttttttattctaatcccaattgtgtctctagtggaagaaatattctaattggattgcggactattattttaattaactgctattaataaaattgaatgctattaataaaattgaatgatgtattaaaagaaaagaaaaaaaattaaacaagatatatatttcgcaacaaacttatttcaataataaagtaaatctcacaaacctcacaaatacatcaatattttgtcataggaaaatgacatatttcaatgataataaaacaataagtacatgttgaactaaaatatccacccaatattatacaatacctttcaaaccagatttagaaaacgtgcataagttgattaagcatatatcattactcaaaaataagaaacaataatactaatcatatggttacagtctccatgaactgtttatctactgacatggattttagtgtctgagctcgaagacaaacctcaaagtcaatgcttccctgttcagacccaggaaaaacagtcaacttcccatcatacttgctccctggaccacttctcacagtaattggtcttccccaaccaaaatcattcccataaacattgaaccgtggtgaactaccggtcaacagttcacaccctaactctttcttcatttttatttcgtttgggctttcggcccaattcttcaagtactcttgggccttctccgaggtatgcgaaacgaccatcttattcatttccaatgcagcccagcccaatccat

SEQ ID NO: 353366 - DNA, 1230 bp, Cannabis indica
ataaacgcttaaataaaaaaaacaaaaaaacccaaaccagtttcatcagacaatcaaatgaaaaataaaaaaaaaataaaaacacacacgaaaacataataatttgaaaaaatactaacaaacataatcaaaaacaacacataacaataatttaagaacataatataaatgtgaaaaccagtttgaaatttagaagaaaaaaaaaaataatataaagaaacttaaattaaaaaaatcataaaatgaggcaatctcattacaaaaccctcaaaacctgtcagcatctaacttcttcttaatagtgtcttttaaagttttattaacaacttctacttgtccattttcctgaagcctcgatactgatgagaagttcttaataattttattcatttcacagaattcagtgaatagttcaccatcaaactgagttccattgtcagatactatttcaattgggatgccaaacctacaaaagatgttcttgataacaaaatcaagaacatttttgcaagttatggaaactagaggttcaacctctgtccactttgtgaagaagtcgactgccacaactgcatactttgctcctcctcgccctgtggataatgccccaatcagatcaattccccatattgcaaaaaggtatggcgaggtcatcattctcaactcggttggtggtatgtggggtatatgtgaaaacctttggcatttgttgcatttcttaacaaattcatatgtgtctttgttgattattggctagtaatatacttgacggataatcttcttcgatagactctgccaacctacatgatccccacagaagccttcatggatttctttgataatttcatttacttttgtttttaacacacatcgtaagagaggcattgaataacctcttctgtataattttccctcaaccatcgtatagtgaggtattgagtataaaagtttgcgtgcctcgattttatctgtaggaagttctccactgactagatacttgacaataggtgtcatccatgttggtgaagtatctatcatcttgatttcttcctcttcatatatgcttaggttgtttaagacttccacaggtacgaacttcaacttatcaagatcgaattgagatgctagcttcgctagtgcatctgcattagataattgttctcttggtatttgttcgattttaaaataattaaacttctccaagtttttccaaactttctctaaatattt

SEQ ID NO: 353367 - DNA, 525 bp, Cannabis indica
catgctaaactcggacatattaagtataaaaatctgaaaaaattatcaaatgcaggtattgttcgaggtccacccaagctgggtaaagaaagcattggtaagtgtgaaccctgtcaacttggtaagcaattaaaaatgactcacaaacatgtttctgatatgaatacctcaaaattactggagttgcttcacatggatcttatgggtccaattcaagttgaaagtatgaatggtaagggatatatttttgtgtgtgttgatgatttttctcgtttcagttgggtagatttttaaagagaaaagtctgacacttttgatgcttttaaaactctttgtttgagattaagagttgaaaaatgatgtaatattgggaaaattgttcgaattcggagtgatcatggtaaggagtttgagaactcagtttatgatgacttttgtaagtctacaggtgtaactcatgaattctctgctcccaaaactcctcaacaaaatggagtttttgagaggaagaatcgaacattgcag

SEQ ID NO: 353368 - DNA, 1085 bp, Cannabis indica
gcacaaatagagcaccatacttcaatggagtagatttttcttattggaaaattagaatggaaacttaccttcaatctaggaattataatttgtggcatatagtgtctaatggtccttacattcccaaacatgttatatgaaatttcgtttttataattactaagtaaaattataaaataatttaaataatgcagaactgtagtaaaattgtttgaacataatttatctctatcagacacaaaatccaatagaacagaaatatactgcagaaagtaaaattgtagaaaataaaatgacacacaatattttatacatggtatcatcaactctttcgaattgctcctagtctataaggccacgcccagagaatgaaatttattagatgaatctcaagtgcttacaaaactaaattgacttatataaataaagactccctctttgaatttgctgcaactgttgaaatttattcttctaatcaaatttataaagtgccaagaccttgaactaccttcaaatcatagcacttgcacacttcttctgaagagtgactcacatgcaatcttcttccgaaagagtgtctaacttgcaatcttcctcccaaagagtgactcatttacaatcttcctctcgaagagtgactaacttgcaatctttctcctaaagagtggataacttgcacttttcctcctgaaaagtgactcgtaaacaagacttctcccgaagtttgatgaacgatattcaagatgttcaacctgcacctttttaacaagaaataatacagaataataatacaataataaatgttatacccgaaatttgatttcactttagaagttgacacgtgtcctgtagtggaatatgaaccacctgatataataaagttacatcattaaatgcaagataaaataactcgttataaaattttaatagaaaatattcacaactcactgactacataagtcttaagcgagataaggataaaaaactattaaaactgatattgacgagacacgcgcctgcctcggagtacatagtcaaagaggatattcatttattcgaagtagaataaatacaatcacacatgg

SEQ ID NO: 353369 - DNA, 554 bp, Cannabis indica
gtgtacacgtggacattccaccacggcagttaacagccaaaaatggacggaaagggctaactgctaacagaacttgagtttagggatttttaccgcaaaaattttaaaattggagattagttgcaaaaacctccctactttagggggttttgccgcaaataaccctaaaaataattaatgaggtttctttggacctattcaaaaaaaaagtacttggatgcttttctctaaaataagtacacttggatgtttcattgatatataatttttattttttggtatgatgaaatgagagaagaggaacataattgggatgaaagtcatgaagacgaaataggggtgaagtgatcagccaaagaaggtcagctttaatcacttattatatttatatttaattgtataaattcacatttacatatatatatatatactagtaaaaagttacgtgcgaggcacgtatattaaattttatgctagatattttttattatattaaaaggtaatacacttaaaaatgtttatctcatcttagttcaactcaattttatgttgtt

SEQ ID NO: 353370 - DNA, 915 bp, Cannabis indica
gttactttatgaggtaacatatatctattatttatatgattaaacgaatctgaattctattattggtataattgttttgtattacctgatatctgtctactaatgcttattcatggaaaatacgagtatgatttggattttatcttatgaacaatgcgtaagatttgatttggtttgtgtataaaagataacattcgaataataaactatataattattattattactttacttgctaagtccttgtgactcacgggtgttatgtgatgctgataaaggcaaggaaaaactgacagtcttctccagcagtgtacatattgacatcaccggcctacgtgctgggttacagttattttgggttgtatctattgtgtattttcgttttatatttttgaggcattggtgtatatagattttttgtagaactttttataacaggaatcctcggaacacgctttttaggtcgttataatgtttgtttttagtgttttattttaatcaagtttttgatattatcacgatttttaataattaattattctattagtattaaactagtttataaaatcacacatgtggcatccctatagattagggtgttacaatttttgtccaatataaaaagaacatgatactctcatctcatctaacttaactattgcattcaaccaaaacatatctagttttcatactctgacaactagtagatgagagagttccttctatagtgattttgcctcctttattgttcttcacctattcggcctatagtgataaggtgccatccgaaggagagaacgagatccaggctcagatcttgataatattttgtgaccaaaaggaacaagggttagagttctaagcggaatgagtcattatatttcactgcaattaatgtaaggttttctaaactct

SEQ ID NO: 353371 - DNA, 594 bp, Cannabis indica
tgatcttaggtgagaaaggagttctgcgtgctcgttctagctcaagatcactatttctttgtccaacaatgtcgtgaaacatatttttcagttcgtctagctgggcctgtacggctgggctgacctgcttcggattctggccaatttgaattacgtcagcatctttttgagcgagtacgggcttcgggctgcacgattgtcgtaagattctgattgtctattcccctcattctgtttagatcatttcttaggtcatgggttgtccctaacctttcgaacaaagaagcgcttggctaccttagcggttaattcgcttggttgacaggtggaatggcaccactgatctggttggaaccatcaggtatgacttctcccgacaaattaccagataaggtctgctcgcctaccgctgggcccacgagtggaactcgtgatcggggattgggcggctgaccatttgcagtctgagaagtattcatcgttggatcctcgtccgtttctcccaggggaataacattcggcgattgtcgacctacaatttggtaggctcttcgtatcagcacggtagcttaccgactgcgatcttcgatctct

SEQ ID NO: 353372 - DNA, 662 bp, Cannabis indica
ttgagatatgtctttcatggattagaaaattgaagtcaggacattagttttatgtaaattaaactggattttcggtagaattttagttttgtagtagtttttctacactttttttatgaattcgaaacaacccctgttttgattgattctagtcgtcttctcaggtgaagttgctgaaattaatggtggttctctttcttttttgtttcggttgcgttggcttgcgcaatgattgcgcgatagttgcccaaaaagcatggatcctgggttgaaggtgtgtgtaagtggtatttgtgtaatttttttttatttgagttgtatttatttatttggccagctggaagtatttttgtaatattgttacttttttctttttggttaaaattgaaaaaagcccttatttttttatcttattttaaatgtggctttatattttttaaagaattactattgtacgtctcattgtaattactaaaaaatatttttctattattaatttttgaaaaaaaaaatagaaaaagtataaaatatttctaaaaaaagataaaagtattataaaattaaagtagtatcattaaactaaatttataattaacaaaagttttttttttttttgtaatattattatgttttttttattatataaatagtacttaaattaa

SEQ ID NO: 353373 - DNA, 1035 bp, Cannabis indica
aaaaaaaaacactatatatatattagtaaattaatttttagttttactaataataaattattaataactacacaatttcaataaataatcaagtagttaattttaattaatttttaaaataatttattaattttttttcaaactattagttgtaattattatttctaattttataaaaataaatattaattttttttaaaaataattgttagaaacttgccataaaaggttattagattgttaccttattaattttttttagttcccatcaatgggtattacccattaagaagtgttccatatatatatatatatatatatatataaactatttatattgctttttatatttatatgtatgttcatgtgttatatttctagtcttctatcttttcttttctatttacttgtattgtagttatagaattgtaacacttattttcaaatccttgtattagaattgtaattttttggttttattattcatcttttatttcttctattattatatcatatattttctaacatctattaatcaaaaataattaacaacatctcagccaaaaaaacacttaatataatgaattcaacagaggatatcacacagcagatatatatacccgaaaagcaaattcagaagaactaattcaagcatcaaagcagaggatcatcagaaggaacaacaataacatcaacaactatataaaacaaacaaacaccaacaagaaactaaaacaaaaataaaggaacaggatatatatatatatagcatagcaggaatgtcaaaggattgattccagctcatgagaaagcgggtttgtgtttgataaaaatagaatgtatattaatatatatatgtcaatgaaaccctcagtttcattggttttccctcattaagccaagaatatgtgtgtgcagtaaattacagtagttgactcaaacaatctacagccttgttgaactagcaagcagctggttcctgtaaattagtcaccacatggtagaagtagaagaaatgtcgctgttctttaatta

SEQ ID NO: 353374 - DNA, 605 bp, Cannabis indica
tagtgttatctacacagtggaaatgatgattatataattcaaatattttaatctcatgatttctcagtgcagtgaatttacattgacgtgataattagcgatgaggtttacttacacttgtaaaagtggattgtctttttcagagcattagtaatataagcttgtatcaaatgtattggctatacatcaaactagactaatactgacagtgaaaaagatattatatacatatcgttgtatcttttctaagtcaatatcacttagtggattattggtcagttgatctcaatcttgagatgattaagttttagcttaattatactatataggttcttaaattgtttgttaccagcttacccaaagtgttggaatatattttaacaggacctagatttactaacacgcatgtttttaacatcctaaatatggatttctaaaacgataaaatttaaacacatataaagtatgagaaaccttacattggttgtagcggaattaaatgactcattccgcttagatctctaacccctgtttctttctgtcgtagagtataatcaagatgtgagcacgacactccttcagttgtttggattcttcacagtctt

SEQ ID NO: 353375 - DNA, 544 bp, Cannabis indica
gcccaacttcccaactactcaaataattcaagctcaagtggcaagcgttccagcaacaaccacgaggaagtaaatgggaagaaatgaaagttcactgataaattcggacagactccctgggagaatcatgccaaatacactgcattcactattctgactgaagatatagaaagtgtatacatggagactcaattgttgatcacgtacaagaagatcgggcccatgaagaaagataccaacaaaaaggacatgacaaaattttgtcggttccacggagactacgaccgtgacactaacgaatgctacaacttgaagcgagaaattaaattcctaataaggaaaaacaattcacacctgcagaagtatgtcaagaacgaccaaggtcaaaacaacatagatttgctacctccaccagtacatggacacttacaagtcataagtggaggcccgcacattgctggagattcaggcaaagctcgggagaggtatgcgcggaccgcacagcacgaacaagaagaagtcatcctggccatggaagaaagga

SEQ ID NO: 353376 - DNA, 509 bp, Cannabis indica
cttggtcatctctctcttgctgacatccttcttcattggcgcgggcttcttatacagggctagcgacttggtggccatgtaaacactttctatatcctcagtcaagatggtaaaaacagtgtacttagcttgattttcccggggagcttgctcggtttttccagtgaactttcctttctttccattcacttgtctattgttgttgctagaacgtttactgtttgaccttgaattatttgggtaatgggggagttcggcggacgttccagtggaaggagcttttgacttgccaggcttttgctcgccttctgcccgctgaatggcctcttcaagtttgatgaagccttcagcgcggtctagaaaatcactcattaagtctaccggaccgttcttccttatttccttttaaagttcaccgaggacttcaatgccccccagtatcgcagacaaatttccatcttcagttacccgtgaaaccttcatcgcttccgtcatgaatctgctgatgt

SEQ ID NO: 353377 - DNA, 1319 bp, Cannabis indica
ttgtccgttgaggcgattttttttttttgaacttgagtatttttttgcgttttatctatcttaaatttcagctcataaaagcctaatgaaaacactaaaaattctactatccaaactcagtatttaacttagggaaaaagacccaaatagaatttttcttccttaattaacataaatatgtaggggtaaaatgaccaaaaatcgttaccccgcacaaacctagcattttaaatgctcaataatttttcctcgttaaatctaagatactcaaccgtatctatgtggctcaaattggccaaatcgtcgcattcctctgttattgagcataaactatgaaaaacatgaaatctcatataacataattaataaacttagaattcaaagatatctctataattgcaaaaataataatttaaagcctatttttgacaataagccctaattatatactaatttttgaaataaagttaaggggtcattacaattatttcttcattataaaagaatttcgtcctcgaaatctaacctgaacaactatggatgctgagccctcatagcgtactctaatttccaggtgactttttccaccttactgtttttccagagtactttaactaaattaagctatggtcttgtttcgaagaactttatccttcctattaaaaatctgcaccggttgctcttcataagacaaatttgttggagctctagggtttcatagcgggtctcgatggctctaaaaaatagccattactactaagagctaatttttaccgttatatcatcatttacggtcagaaatatttaatttgtatttttcactatttttgtgggcctccttcacctaaaaaaggagatctctttaaactcattttttcttatagaaaactacccataaggtcaaagcttctctctctagaaattactaaattagagcttctgacacttactcttttcctataataccatcttataaaatataaaaactcgaagtagacagcttcattaatcttttatacacatagtacttcaacaaacagtgcaatttatttactcttgatcattggcgtaacgctcaagataacacttccttatcttctttattctttgataatagaggagatggagctgaccgttggattaaacctgatatgaataaaatcaagataaatgttgatgctgtactttccacaggataactcttatgggctcgggatcgttgctcgagacagctctgataagctcattgaggccaaatcgtgttattatggtggtgcctatgatgcggaagttgttgaagcaatgggggtcaaagaagc

SEQ ID NO: 353378 - DNA, 600 bp, Cannabis indica
tctcaccactctcccatgtactcgcacagacgtctcactactcccccatatactcgcacacacgtctcaccactctcccatgtacttgcacacacgtctcaacactccccatgtactcgcacacgtctcaccactcccctatatacgcgcacacacgtctcactactctcccatatactcgcacacacgtctcaccactcccccatatactcggacacacgtctcaccactcccccatacactcgcgcgcgcacacacacacacacacactccaaacttgattcgcattggagcctccacgtgggctcgcacgctggtctccctataaggcatgcacacatgcatccttgtagggttcacggggttagtcttgggattgtatggacgtatcccgacatccgagaatattgtctttgagaaatatgcataaggtgaataggctgattgagtgtgctctcgctcgtctctttgtccttaggcgaataatctcgaagattagcggtgctaatttttagggttaacaacactatactaaccaaattatatattacaattaaaatatatataccatgacaacaaaattatataccaccattgtat

SEQ ID NO: 353379 - DNA, 684 bp, Cannabis indica
gttattgatctttctgaggagctgacttctacaaacccctctacccacaaagctgccaagtccaaggagtctggaccaccaacggttgggtctgaattggtcaggagtgatcctgaacaggtgcaggcaccaactccacctttgccagtgctttcagaggccaaaaagggcaaggagatgctggcccactacatgagccggctggttcctgaggtcagtgagcaactggctagtgctgacaatgactcgtctttggatgtgctggtgggcggagtcttgaaggagttcacgagggtaagtcttttttgatacttccctttaattttctacacttagctcaatatgctaaagtttttcctctgtgcaggtcggtctgaagttggcatacacttactcccgaactaagtccgctgcttccaagaaggcggctctgttcgacaccttgaaggcagaggtggacttgggcaagaaggaagctgaagaacccagggcagaagcgggagctgctcggttggagttgggcgaagccaacaagaagctgtttgctgctgagaagaaaatcaccgtgctaactaaggatctcgaggttgctgaccgttttgaggagaccatcaagatcttatctgctgaggtaaacagtcttcaagatgagaggacttctctgcgagcagttcttcatcagat

SEQ ID NO: 353380 - DNA, 384 bp, Cannabis indica
tcttctcttccagtgtacatcttcaaggttgcagttttaaactgtggggcaacgccaagagattaatctcggagagaagggattcacgtgctcggtctgactcgagatcattgtttctctgtccggccatgccttggaacatattttttagtttcatcccattgtgcttgcacagctgcactaacctgtttggcatttttgaccgattggagtcatgttaatatctttctgagcagttaatttgagcacaggttccgagctgcacgatcagtgtgccaagctgatcatctgctcctctcattctattcagattgtttctgagatcatgagtcattatcaaactttcaaatacagatacgcctgattatctcagtgattgattgg

SEQ ID NO: 353381 - DNA, 1126 bp, Cannabis indica
attcataaaaatagattactctcaaatggggttatgctattttgtgattttgttgagtaggttcaataataattagctcaaatggaaactacttctcctagctttcctagtcacaaccatatctactttttttgattaacctagtcacaatgtcttcattatgaaagccctgcagccctagctagctacctagctttactcagaaattattattattattattattattattattattattattattattatgtttcttttgggctggaatctgtctggaactggtggtgatttcagttaaataatgtgttgttgtgtgtgctgtgatttagtagtttctttgagcatattaattaattattggataatattattttatactgctacacgtttaaaatgataataaagaatatgtctctgtggattgtacttgttatggtttatgttataaccaaaaaactattttaatgagcttctgcaatgtgccaagagaattgaaatacaactcactattaaagcatatcaccatctttcatttaaagatataaaaagatcctaattttcttgtgcagtgattactcgcgattatttttatttagtactagtagtgtccaatattttctataagtaatataataccaaaaaaattaaaaagaattcttctagcaaactaattttattttcaaattaatttcatttactatttctcattacataagagtataaatattgtcatacacaagacatgtaacaatcatatttttttaatttattttaaaaaatatcacagttttttttaaataagtgtctaattttttttccaactaaatctataagggaacaactttataagaggaaaaaagtgagtcctaacaaaagaaaccaaattgcaaatatgaatatgagctaaaaactggtttatcaacacaccaaatcaaacatcctcctcaccaatttggtgagcaataaagcgattaattacatcaataaataactaagagcaatcatcctttagggtactctattaacattgcaaactaataagccaaaaaattaattaaatattaatatattgtaaagtactaataaaatcccacgaaatgatttttttttttttttgtttacg

SEQ ID NO: 353382 - DNA, 798 bp, Cannabis indica
aaaggaagtcgtctccaaatgtttctggataatactcgaattcctcctaaatttctcaatgccacagatgaagctaacaagaacattaatccagccttcgaagactgggaataacaggacaacttactggtttcttggcttctttcttcaatgtcagagataacaacaaatcggatgattgggtgcgaaaccacagctcaaatatgggagactctgaatgagtactacacagctctcaactctgcaaatatagggctatacaagactcaactcagaaatacaaaaatgacaggttctctcaatgattatctattgaagatcaaagtaataattgatctgcttgctactattggacacaaacaatcggctcaagaccacattgaagccatcttcaatggactaccaccagaatatgatgtatttgttacttctgttactacaagaaaagactcctattctgttgcagaaatggaggctctattaatggcacaatcggttcggattgaaaagaatgccaaatcacttgacatcagtaaaagtgaggctaacttagctcacaccaggcccttttatggaaataataccgataaatgtatttctccaaatctcaaacacctggtggatacaatcgtggtcatccccttcgatctactgagaatcaatctcaaatgcaacatctgtctcgaggtgtttccaataccagtcgaggtcctaatcctcacaacagcggcagaggttatgcatctataggtcgaggagcctctcagtcttggacacaaaaacctcaatgtcagctat

SEQ ID NO: 353383 - DNA, 556 bp, Cannabis indica
ttggctcttttcctacgagtttcatccgatttaattttcgacttcaagcattcggacagatcttcaagatgtccaaggatttgcagattgcagagccgttcatcgtcccaaactccaactttaaacagtaagtggattttctccttattatttcacatgcttattatgttgtatttttgggttcaattactatcttcttggtcagcatcgctgttatctcatttgtttttagtaatttttagggtcgaactgtatctggataaatattagggtttagacagtacataggttttctagaatctccaatttaccaacttctggtttgataaatttcttccaggaatcgggattgctttctccttgcagcaatgtcccaatctggttcagaagtttaccgtctagaagatttagtaattgagtaccctactgagatttccatcccttacaaacccaaaatttatgaatcccaatccaaattagaggtaaatgatgaaagtattagagaacacttagtgaaaattcatcaggaagacatttctagtcgccacagacgctt

SEQ ID NO: 353384 - DNA, 740 bp, Cannabis indica
agggacacagaaccagggtcgggacctagaaccgcaccccagtcttgatcctgaaccaaaactcataactggaacctaggaactaaaccagataaaaaccgagaactgtgacagtgatccagatcttgactcgtgattcgggtaacctggcctagaacagaccagtagtcggtgtctagatctgggattcagactaggaccagaacccagacgaagaaccaaacccgaacccagacctagacctgggacccaaaattagaacctaaacaagaatcgccgaaccaagacccgagaacaagactaggaccgtgaccaggacccggacccagacctacaaccgaatacagacctcccctaactgagactagaaactcggcccgtacatggtcgtgtacccagaccggaactgagactcggacctagacaaatctgggacccgatcccaaacacagtcttggacctagatagggatccgaacaagaacctggactcagaccaggacccagacttggatcgaaatgctggacatagatttggaccgagatccggacacaggcccaaacttggacccgcactcaagaccccaacttggacctggacccgaaccaagacctagatcggggaccagacctggacacaaactcggacacagacttagacccgaactcaaacccacacctagaatcagaccgaaagctagacccgaatccagacccaaactcgaacccatacaaggatca

SEQ ID NO: 353385 - DNA, 683 bp, Cannabis indica
tttctacttatacaccaagctgtaattaaagtcgcagatatatatatagaaaacgcgagtacccgtgtactgcgaaaatgttaaaggataattatccccgcgaggatataaatttgtccaaagtaaaaagcaaatttgtctaagtacaaagcgcgagtacccctgtaccgcataaaaactaaaaaagtaaaattaaaaagcataacagttttaacatagaggaaagtcaagcatctggaacaacaggagcagtctcatccgcgactttgctgacgacctcgttctcggcttcctcagcatccgcaccctcgacctcttcaggaaggttccctccaccaccttgggtttgagtgggcgacatagcgcgaaaagcctcggccatctcagcggcttctgctccgaggatcgagaagtcgaagtctgggactttggaaagagtggtgtaaatataatcagaaactgcctgatcatattgtttcttcccattctctttctcggcctccaagtcgcgagtcatctcctcgatcttcgcccgcgagttcttggcctcgagctcagcctgctccttagccttgcaaagttcttcaagctctttatcctttctagccgcctcttgcttcagcctcttcatgttctcctgaagctgggcattgtgcctcttcagcgagtcagcttccttcgaa

SEQ ID NO: 353386 - DNA, 639 bp, Cannabis indica
attttgaagcattcatagttccacatgcccccagcctttttggacttgacaagcatgtcgtccacatacacctccatgttgcagccgataagatctttgaacatttctttcacaagcctttaatatgtggcctctacatttttagcctgaagtgcataactttgtagcaatacaagcctaagtttgtcatgaagcttgtgtgctcctgatctgatagatgcatctttatctggttgtaacctgaatacgcgtccatgaaacttaagatttcatggccagttgtgccgtctacaagctggtcaattctgtgaagcagaaagtagtcctttggacatgctttgttcaggttggtgaagtcgatgcacactctttactttttgttgggtttgggtaccagcactgggttaaatacccaaaatgaataaaaatgcctccattatgaaatcatgggctcgtagcctctcgacttcatctttgagtgcttgggcgtgttctctgtacaacaatctcttattttgttgaacaagtcaaatgtttggatcaatgttgagggcatgagccatcacgaaggggtcaattttgaccatgtctccatgtgaccatacaaaaggtacaggtttgcccttagaaatcttatca

SEQ ID NO: 353387 - DNA, 514 bp, Cannabis indica
ccacattgtagtggccatgtaccctcttttatattaacaaaaatgtagtgagaccattttataataaatcctcacagatacggcattttcaaaattttccaccttagaaaaatcctatatatataaacgtcaaatgaaaaaattggaatatgatttttttaggtgtcgaaaataaaaaacactcctagtgcagtaaaaacaaaaataatgttctgaggtaaaaactaacctgtgtatataaatcgaactatcgatcaactttctaaaaatctgtggaaaaaaaagggataccttagagtttttagactaaaaatatggtctaaattttggcttaaagctcaatatatattaggagtgacaaaaagtgttatcatattatgtcaatatcatgtcgtgttcatattaacacactttgacatgtttttctattactgattgatgctagagttgtaaagacgataaatttagaattctattagaaaatttatatattttatttatatatataataaaa

SEQ ID NO: 353388 - DNA, 469 bp, Cannabis indica
aacaaccgatccgattgaattttcaaaatttacatccgatctgattcaattatgattcgatatccaattctattagattggttgggattgaaaaatacttttttatttatatattaattaaatttacctccaaataaaattatataacaaacatacctccttttatgagtattgtactcaaattatcctcacaccctcacataaccaagatacaattttaaacataatagattgtgttatttggaaatagatgtgtaaatttgtgagaaagtttgagcaaaattttaattaaagaatggatactatcgtgaaatgatagggataaaattagtagaataattgaaaaagaggtaaacataataaattttgaaagaaggggtaaaaattaaaaacatcaatttaaatttaaaagaaatatgtattagtaattttttaaattttataattatagcttcaatgtactagaagt

SEQ ID NO: 353389 - DNA, 737 bp, Cannabis indica
acccatttaatgtaccctgagacccatctaatgtaccacagaatacattccgtgaaagtatatcacaggacaaaatcttatccctaaataaatatatgagaataaaaataatttattttatagaataaatatgaaaatatgtgtaaaaatgaaaactataatttttaaagatgttgaccttagatttggccaaccgacagtaaagtcgtatttaatactgatgcttgtcacatgttacataatatgaatagaaaagtaaatgagacatatgatttaatagatgtttggtccccttaggtagtaggtaatgacttatttcccttttggttgtattaatactagagataatactactcaaatcacaagtgttgtggaatctgcagtagctctcttaagattacaatgtatgaatcaataggcaattctctagtgagaaggatgcttgggtgtgtgagagagaagagaagagagaagtgagttttagactaaaaattttagagctaggactgagagcttagaggcttaatgacttagggttttagagttaggttaatgctctttacatagtagagcctacatccctaatatcccttagaaataagtaagataaagctattatttacataattaattaataaataataaatgactaaattatcctttgtagatggggaagttactgatatttttccttatttttgtggttgtaaaggcccaactcgcaacttgacttgttt

SEQ ID NO: 353390 - DNA, 631 bp, Cannabis indica
ctttgcttttcactcgagatgtaagagcttcaaacttaaccatttaagttttgcagatgacttgcttctcttttggaaggatgatttcaagtctgctctcttactacttagaggcttttagttatttttgaacacatttgggcttgaagctaatgatatgtctggttttaaaaaaagctatataccttttaaatatcttggaatggcaattagctcaacaagaatttctaaagtagattgtgaaggtatagtggagaaaatgacaaccagaatcaaaacttggagtacgaggaacctttcctatgcaggaagaatggtcctcatcaactctgtcttgttgtctattaacacttattggttccaaattgttattttacgaaaagctataattcaaaagattacacaaatttatcgtgcttatcattggaagggagtggacatgagcaatggtaatgggaatgttgcctgggatgatctttgtaaacctaagaaagatagtttcaaagatatagctttataaaatctttatgctattggtaaacatgtgtgggttattactaccaagaaggaaaacttttgggtaaaaaaggttaacgaggtgtatctcaaaaatcaagattggtgggactac

SEQ ID NO: 353391 - DNA, 547 bp, Cannabis indica
catatgctgactttttcctttatgcaggccagtttgaagttggcttacacctactctcgggctaaatctgctacttctaagagtgcaactctgtctgacaccttgagggcggaggcggacttggccaagaaggaagctgaggaggccagggcggagactgcagctattcgtcatgagttgggtgaggccaacaagaagctgtttgccgccgagaagaagatcacggacctcgaggttgctgattgctttgaggaaaccatcgagaccttatctcctgaagttgatcgtgttcgtgatgagaggagttctctgcggcaggtccttcttcggcaaaaggaagataaggacactcaggtggccgaggcggatcgtttgaaggagaaggtcaatgctttggagaatgccggcctcgagctcttctttgatttttggaaggctaatccccaggccaacttcgactacttgggcgacgctaaggacatgtacctcgagtactgtgcggcccaagttgcttatggtgggaaagaggtggctgcttcaacttccg

SEQ ID NO: 353392 - DNA, 494 bp, Cannabis indica
gataggggtgcatcaatatatccattttaagtgggtgcattgtagaattttccaataataataataataatattattatcagaaccctcatattattattattattattattattattattattattattattattattattttgtaacccaaaattattatattttgcattttagtccttgatgaggttttataaataggaattcattgttagtttgtaagagtgtaatttaagtgtgtaatttttagtgtataaaacctatagcaaaattctctcaacttttcttctcatcctttctctttagaaattttatgagaatgattagcataatggtctaatcttccttggaaggttagggttgattctatatgcaaagtgagattattttgtatctttgattcactttttgttgtaatatttatttgagtaatgcaagtttatattctacttttatttttatgttcttcttccatctatactatctatgctatta

SEQ ID NO: 353393 - DNA, 656 bp, Cannabis indica
taagtgacataatgaaacatatataagaaagaatgatcacgtgatcaaatcgtaaaataatcttcattagtggtttataatctttatataataagtaaaatatgcgagatttaatattaaattacgtacacaattaataatattacacattacaagggtgctaagccctttatcatttcttatatatataatatgtgaattttcatgtctatggatccctaataataagagtattgttattagatactaatgggcttaacactttctaaacgtgtacgtcttgtgattgattaacgatataacataaaaattattatataaaattatatgagacctgatacttactaatactaataacgatatttacacgtaataaaatattagacactaatacctttaaacatttctctaacactaacgagaacacaacagatatataagataagatatgataatcttttttataataaatattaatatgtcttgtttagataaaacagacaaaataaattcaccaccatcacctcatttattatgagtgttatatacctaattaaagaacctagttgtagtagtgttattataaatagaatgcttgcagaactcatcatacacatataagaatttacacaataagttagtgagattatatatac

SEQ ID NO: 353394 - DNA, 742 bp, Cannabis indica
tactcttagccacagctgcagagtcttttctttgatttccatgatcattagattttgagtactggttatggtttctgttgcatcttttatcatcgtagtttgatctaaaaccagattgtgtcttcaattgattgcagaatcttttaatgtggccaatctttccacattgataacatggtcgattgtctttgatctttaacttcgatttggatggtgactggttgttccttgatgatcctctctttggacttcttcctcttgcaagataggcttcatctttcctagtcttcttcttgagttgcaattcaaagtcctttgattttaatgtcgtatgaacaccctctaactgttgggttttatgccctaaataaaactacatttcaatgtaatccatattattcaatattgttgcccctgattttgcccaatatacgtggaccaaccggacagggacacgtggatcaaaacgtcttaatgcttgaattatttgctaagtctttgtgatataaggcagcatccgagacatgcctcccggataaggcatgctgagccccatacgctcccggatgcccaagtaatactaaggcatctccgcaaggtgtcagacttcccctgagcagtcaattcacatttaatgcagcatgggaggaaacgtgttgggactgctacacgcaataaagtctgacggcacaacccccaatctgtagctgcgaagtaatgatcatttaagtctattgacggc

SEQ ID NO: 353395 - DNA, 503 bp, Cannabis indica
ctatcgtttgttgctgtaaatgttcaatgtttttctttcttttttatttcacaagtctttttcattcttttttcaatatttttcttttttgttataggtttgttttatattgattttgttcaattttgcgccattatttatggctttggtttggcgccttacaaggctttagcacctattatatggttggacccctaattatttagggtatgtttaaatttttacgtttttcggtattgaatgtataagaaaattttgacacattaatattttaaagttaataagttatgcactatacagatttattagtcggaatataaagattattttggttaaggtatgatttaaagaatattttaaattgaaataatgtttaagaggatttactttaaacgctaattactattagctatgttttggtttatatttttttaggaattttcagcataaaaggaaagtgtttagaattttagtattcagattctaatattataattaattaa

SEQ ID NO: 353396 - DNA, 713 bp, Cannabis indica
gaagataggatagcattatatattaccaattgaatgtggagttgtcgagtagaggtgaagagtagtggtccgctgctgggtgggggctgagaaagtgagagaagctgtcgatataggatgatagaactgacattggaactcatattaactccatagctaaaattaaattaaattaacgttttcattggagcactttaacgttcaatctccgtctctcccgttgactgcttcacccaaatttgatttgatttatttatttatttattcagtttacataggtcaaggtcatcaggagactaacgagatgtaattttcaagtttccaatggcttttttcccacattagtccccattctattaacttcttcgcatattagttcctatgctttattgtcttgtaaatcgatccctactccttttttttttttattatcgagagaggggtattcgaacttggtatctcttctttgagaagtgtgaaatcactaggctatgtatatgaccaactctatttttttatgtttataattaaagggttgttcatccgatccaatccgtacttttttggtcaaacaacattcaatccgcactaagtgcggatttcattttttggatccaatccaatccgcacaatagttcaaatcagtggcggacccagaatttaaagtgagggggggcgtaaataaatttaaaaagaaaatataaagtgtagtt

SEQ ID NO: 353397 - DNA, 573 bp, Cannabis indica
cagggttcgggtccagggttgggacccaaatccaaacaccgactacaggttttgtccaagccctgggtcagaatctggatcccaatctcgagtcccagtctagttccatttcttgtgccgggtcacgagctgggtcctaggttcaagttcgggtttgggtcgcgtactatgtcccggttctagttctatttctcaggtccctatcctgattctagatcaaggtcccggttattgtgtgggtttgggtctaggttcgagttcgagtcttagtctcggttcgagtttaggtctctgtttgggttttgatttgagttcgggtttaagtttcggtcctagtcctagtttggttctagttccatttgccattcttagttcgagtttggggctgagttcggatcggagtttgagtcctggtataaatttgtgttcgtctccgaatttctgtctaggtcaaaatcgggctccgggtgtgggttcgcgtcctgggtctttgtgtaggtttggtctcagtcccaagttccaatcccaatctgagtctggattctgttctgggtctaagtccttggttctgat

SEQ ID NO: 353398 - DNA, 918 bp, Cannabis indica
aaatagagagagagagaaggaataaaccctagtttgagtcttcagctccaagatccaaccatgagaacccagatctcatggtgagaagctcgaagaagaagtacatgcacaaagaagacaaagcagagagttagatcgagaacaaatagaaagaaaacaacaaaaacacaaagtgtaaagaaagaaatcgagcttacctggtcgatttctgtgacaggaagctccaaagtttgtaaaccaaccttgtgatagtggatatcaagcttctatctctgagaagagcttgacagagacgtagcccagatttgggtgaactctgaaacaaattctggtgttttctctccttgtttttcatttttctctcatctaatctaagctatggttgtgtgtgggtgtgaatctgggtttcagatctagattcgagcaagttctcaaagagaacttgctctgctagggtttcgagtttgtgagtgtgtgtgtgaattgtgtctgagtgctttgggattctagactcttctattgagtctttgaatcaaaggtttcatacgacatcaagattggtgtcgtggggttaatacggggtcgtattggtctaagttttacttagacaaggaaaggtcaattctgaccttaatactgatattattacctttgttggtgtagggttaaaacagcaaattcctacactttctttatattttgttgaatctgattgtttagcggttgtaaatgcattttctaaacgctcttctttcctcaatgaacttggttccttgtttgaggatttagctagtttgatgtccagttttcctggagcatccctagtccatgttcgtcggtgagccaatgatgttgcacatggattagctcggcatgctctttgggtggatagagaactagtttggtttgatgagtatt

SEQ ID NO: 353399 - DNA, 704 bp, Cannabis indica
acaagaacatcctcaacgataccccgaggctttttgatagagcggtcagcaagctgcagcacaacagatgttggcttcatttctccaagaccaagttgcgagtacacagagtaaggcatgagattcacactcgcgccaaggtcaagcaaagcttggctgacttcatgagtcccaatttggcatgaaatggtgggacaaccaggatctttgtattttggcggtgtcttttgttcgatcaccgcactcacttgttcagtcaagaaagcagtcttcttgacatggtgctttctcttagcagtgcacaagtccttgatgattttggcataagctggcacttgttttatgatgtgaagcaaaggaagattaatcttcacttgtgtcaagtgctcaaggagttcagctcggttttcaggaattttcccaacaggtctaagagcctggggaaatggtacttttgcttgagcatttatcggtgcactgtcaggggcaacttttgaatttgaagtagtggttttgatggatggatcttccaaagctttaccacttcttgttgtgatggcgttaacccctttaacgatgggatcattagaggtggaggtttcagccatatgttgcccttgtgcattgaattgaggttgggaaggaagtctgcctttctcagaaatagctaaggatgtgttcaattttgaaaattgactttttat

SEQ ID NO: 353400 - DNA, 917 bp, Cannabis indica
gtgaaataacaccgaggagaatgtcaggggtacggcattccaaaagttgtcgaaacgactttccttcgccgtgttattcaagttgtactcctcaaaccgagactttatttttgcaaaacttctggtgcctctgtaagtaacgcgtccagtaaaatgctcgtgtgttggaattatgagtctgggagccatctgaaaaaacaaataacaaatcaatattactgctaaaaattaaaaaatggtcgacaacatatcgacatcctgtcgatattatgtcgacattatgaaacagagaacaacaacatgattttatcgacaacctatcgacatattgtcgacaacctatcgatattaacacacttatgacacacaacagcaataacaacaaattatcgacaatgtgtcaatatactatcgacaagaggccgatattccaaataagtggtcactcaaaataagcaatccacactgtcgacaacatgtcgacatactatcgacaagatcgatattaacaaacatttaaaaattcacatcctactgtcgataacatgtcgacatactgtcgacacatcatcgacattatggctcaaacattttttttagtcatgtcgacatcctatcgacatacctacgacaacctatcgatatacattaccatcacagacaattcaacaagttatactgcattcaattttggtcgacattatatcgataacctatcgatatcttatcgataacttagtttgaacaaacagacaatactgatgaacatgcagaacaatctaaaacaacatctaaattcacatacacaatctaaaacaatgttatctgaagaacatacacaaattcgcatccaaatctatgaaatttataaattttaaaaagaaaaaacttacggttggattggattggatcagtgg

SEQ ID NO: 353401 - DNA, 826 bp, Cannabis indica
cctttctacatttaaatctgttcaaatatgcaattactgagctgcgaagtgacgaaaccaaggtcggaaacagcggaagcattggtctttagagaaactctaatggatgatgatgagtccacttttgggaagaaaattcgagtggaagtgtttccagaaaagactccgagagtggtggaagcagcccttgttgaggttggtaatgagaagagagtggttgttgttattggttatctctcaattctaaggcccattttaaatcacatttattacataaataaacaataaattcgaagtttacaaaattaaattatgatagtttaaaataattaattttattgaataagaaaaatcatttgaaaatgatgtcggtgaaatatctatctttttttaaataaaaataaattaaaagttaaatataaatcctaatttgagtataattatattaatgatattctttatatagataaagcgtaggtgtaagtgttatttagagaaaagaaaaaaattattaatatttgagtgtgcgttgaagttgaagtagtaattaagtatggaaacaaaaaaggcatccttcagagaaatcttgatggtgagtaaaatgttcttcttctattcttcttcttttattctttaattcattcattcacgatttcttcatctataattagtgaaagagaattaattaactttaagagagtgaagtgatgatgagtgagatatattaagtttaacatatataccccaaaaacaattaaaccaaagtaataattgttttctgtataagaaggaagaagacgaagaagaactgtatcaatatgggctc

SEQ ID NO: 353402 - DNA, 1252 bp, Cannabis indica
attacgaaacaacaccttagtatatgacagactacagtaattaaacacccattgttcatcaaaagccaaacaattcttaccacaaaaaaaaaatacctttgagtgaagccgagttcgacaactctggaattcttctgctccgatcaattagtgaaaaaggttaaagcttttctttgatgatttagtgactaaagaaagcaaagaaaaaagggtaaatggcggcaaaacccccaatactttcgttttggtttcattaaacccccacaacccaaatttctgcgggtaaacccccaaaaccactattctgttagcaatttaccctttccgtccaaatttagctgttaagtgccaggttagcttgtccacgtggacacaatatacatgtggcacaattttattggtccacgtaaataattatattaaaaaaattaaaaaattaaaaataaaattaatttaaaattaaaaaaaattataaataaaaaataaataattttctttttttttctttctttttttcctttctttttctttcttttctttttttttgttgtgagcaattaataagtgtaagtcctttttaaaaattattattgttattattttaattgtttttctatcaaggaaaaattatatgcattcagtgcattgctgacgtgtttttcccgtgtattacttactagttttgtttgtttgtttgttttttttttcaatcaccataaatcttttttaattgggtaattgatccacaattttaggaagatttgattgaatcttcatttacgtgaaaatgcaatcatatatggtagttttatttttgtggtcagtcaccataaagacactgaacaaaaacacaatccaaaagggtggagtagtgtgagttgtaatattgtaatttttcaaattgtaactccaccgagatatttataaatttgcaaaaattataccgtaaaaatataatgtggtacagtataatttgattggtttaaactatcattattatcaaacattataattaaaatttaaaattaatctaataaaattttaacaatataaaaataaatcttattaaaactttaatattataacatatatatatatgagtgcactcttaatgagtattacccatgaataggtaaaattagaaaattttgaattttgatacttaatttttctatctaatttaaaaaatctctcatttttatatcatatgggctgagattgttccatcggtaaaaaaacatttaaaaaaaaa

SEQ ID NO: 353403 - DNA, 510 bp, Cannabis indica
attattaaattttattttgataaaaaatcagttcagggtcctatttgtaccattttggaaaatacatagtctattttatcatttaacaaaatagagggtccaattggtaactttttgcaaaacacagggtccaaaatagtcacttctacaaatttcagaattcgcgacggccctaaaaataattttttttaaggaccatcactaaaaaaattaagtaactatttacaactatcgggaaaaatttagtattctcgacagtttaaaatcgtagtaaacaaaataagtgacgttttttaataaaatgcgattttttaatggacccttataggcgacggtttttaaaccgtcacctatagtaaactgtcgcctgtaacggtccattaaaaaattgtcatctacttctcgccacatttctcatgtgcccccctactttttttctatttcccacatgcccacctatttcttctccatttctcacaccctaaaacgaaaatcttaactctccaaaac

SEQ ID NO: 353404 - DNA, 1133 bp, Cannabis indica
ctgagaaaatcactcaagaaattatctaacttaaagagaaaatcactcaagaaattatctaacttaaagtcctttcattctgagaatcactgagaaaatctaacatgcaatacaaattccaaatgggaagtgagtacctcatcaacatggcgttttccaggcacccaagaggcttgcgaatccaaaaccccctcaccatcattattcctcaaatcctttatctcatcatttccaacttcatcaatctcaacctcaccactactcgcaccactacttcctctttcaccagcatacccactactactagggcctcccggcgcatccacctcaatctccgaaacagttctcccccaaacaacaccaccacgtacaaaaccctcaccaaccgccacacctccttcatcctcatcattctcagcgtcctcatcttctccctcgctcgccgaagcaaaaccgataccgtcttgactttccagattaggaggcggcgaggaaaattcctcaacggtgtccgccaatgctacggtcgccaatcgatcctcgactgaattcgagtcgacgaagtcatcatcgccggaggttgaagaagcggaatttgatgacattgaaaaaaacaaaacaaaaaacagcgtttggcggagaagtcttgaaagaggtaattagggtttgaaaattcgagaagaagaagaagaatattgtggtatggtggctctgccagtctgtggatctgagtcggtgaggtctgaccagtaggtgagaatgggttgattccgataccggttccgtaaactgttgtgggtttcgttatggactttacataataacaattttttgttgggtaatttttcatttttacggtttttaaactataaatttgcaaaaatatcactttttcttagggagtgggtaaaaaagtcatataatccaacgaccgatccaatcctaactgatccaatagaatcggagatgtaaattttaaaaatctaatcggatgttgttggatgggacatccgatcgaatggatgaccgatcaaaccgatctaattatcatctaatggtcttctaattatatttatatatttttaaaatacatttataattttatatattttatttaaaaatatatattaatt

SEQ ID NO: 353405 - DNA, 1016 bp, Cannabis indica
tgttgtaatcttctcttctacctttcatatatatatatatataatttatagtgtatatatatgtattgtaacatatatttcatcaaatctcttttattgtccttgtattatttttacaattgagttgtatatatcttggtttatcttccattgtaataatatctctaacattttatatgtcatatatggaaatttcataattttgcatatttagtgtccgacaacattgaaacgcggtgtttgactattagaatcacatcatagtattttttagtataggggagcgatatagtttatacattgggaatgtcgggttttgttgggattttagaatttttcaaaatacccctaagtggtttaaagatagtttagtgtaggcaagggcattttggtctttttgcccattttgtattttgtctttattggagctaattaattaaatacaagcagatttttaaatgtatttggctgagtttgatttaataaaacctatgcgattcctttaattttaaaaaaattagaaaaagtaagcaaaaatcacattttctctcaaagctctctctctctttcgaaccctcttagaacccaactaggttttgatttttctttagcaattcaaggtgattttcagcaagtttctagtgaatccaagctaaggtatagtctttattaacctcctctttgatttcttgggttttaagttatggaattatgcatgctttgtggtttatgttgttgtagctgcagttagtgtatggttttgttttctgaagcttatttatgtttagatatgtggattcaaacaggttataatggttgttagttagaattaaccaagttttgagtttagaactcaaacttggagctttaatggtagtttgtgtttctgagcatgttagttggttttgttgcttgggatatgttcttcatagtcttaataacaggtctggaaggtttggtttgaattggggttgatttgagggagttatgaatttttgagcctttcctgcactgaa

SEQ ID NO: 353406 - DNA, 563 bp, Cannabis indica
tggttcttgttcaggtcccatgtccatttctgagtttgggttcgggatagagactggggtgcgattctaagtcctgaccctggttctgtgtccctagtctggttccatgtttgggtttgagttcaggtttaggttcgggtcccaactccaagtttgggttgggattagggtccggctcccaattcgggtcgaggtcagattttgagtccgggtcctggtccagttacggttctggatctaggtccaatttctgttatgattccaagtccaagtcctagttctagtcccgatccacttccggttttggttccaattttgggtcatagggtacgggtttgggtccacttttgggtttgggactgggttcaggtccgggtgtgggttcggaccttgtcggggtttgggtccaaggctgggtccctaatccaagcactgactacgggttttgtccaagccctgggtccagatctggatcccaatctcgggtccctgtctggttccatttctggtgccgggtcctgacctgggtcctaggttcatgttcgggtgtgggtcgggtacta

SEQ ID NO: 353407 - DNA, 555 bp, Cannabis indica
tctctagccgaattagagaaaagcaaggataaacgcaagtcgccagtgccacggtcacgatcccgcagtcctagaggaaaaagttttagggaaggagtcccagaagatgcagtccacaaagaaaaagaagtacgaagttggccaaatcccctccaaagaaggagtcgtctccgaagaggaaggatggtccacgctttgtgaattagacagagttggcagtccctcgggaccatgtctatgccattgaagagaagaacggggtcttcaaaaagcctcacccaatcaggggaaaccgcgacaagagagacctgaaaaaattctgtaagtaccacgaggacattggtcacactactctggaatgttggtttttgcaggacgaaattgaagaattaatcagggggaaagttcaaaaaatataagaagaatgaggaaagtcatccccgagcggatgacaaagaagagaatcacaatgcgagtgattcaagaactcctcgcaatatactgaccattattggcggaccccacatcgcaggagattctaggaaatcgcaggag

SEQ ID NO: 353408 - DNA, 430 bp, Cannabis indica
acttttagtcacaataaaatgttacttgtaattaaaaaaagtattgaaatacaagttatgactaatttagctttagtcacaacaaatattgtgattaaaaatacatttagtcacaacaaattgtaatttttgtgactaacaatttagccacgaaccttttagtcacaacatataaaagtaatcacactttttttacttttagttacaacttttgttatgactaaaaaaaaaattttgtagtgtcacttatttataaaagtgagtagttaactcattgattgatttgttttatatatacaacaaacatattagggttaagcctaacatcatgttatccacgtgagatatgacaataacaacacgtacccttgaatgtaatgttgagtacaagtaagatacggtaatgagaacggttttaaaatcatatgat

SEQ ID NO: 353409 - DNA, 622 bp, Cannabis indica
agcattagttggtgatgtaggagcaacctgctccacctcaatctggacattctcatctaaaccagcttcactgtctttacaagtgctcttggttttcatggccatttcatcttccttgaaaaccacatctctactaatcaagcacttcttgaatccaggttctaaacaccacactctatatcccttaaccccttcagggtagcctagaaacatgcatctcaatgctctaggttgcaacttatcttgtctaacatgcacaaatgcagtacatccaaacactttcaagtgatctaaatttggggatttacctgtccataactcttgtggggtcttgaagttgtttggcacagatggtgatctattgattaggtaacatgcagttttaagagcttctccccaaaaggttctgtccaaaccagctcctagtaacatgcacctaaccctctcaatcaaagttctattcatcctctcagcaacaccattttgctgaggggttttgatcacagttctatgtctcttgattcccattgtggcacacaatcccttgaactcatttgagcagtactcaagaccattgtcagttcttagtaccttaattttgttcccagtctggttttctagt

SEQ ID NO: 353410 - DNA, 413 bp, Cannabis indica
gcatctcttggatgcatccacatcaatgaacctcgtggacagctagctcgcgcgtccagcctgccccgtgcacccagccaaccccgcacgcccatcctgcctgcgtgcccagcctgctcacacgcccagcctgcccgcgtgcccagccagccccgcaccagtgcacgcagcctcaggactccgcccatctgcctttcctttctaacatcggcagaattactgagaaggtgttagtggggacaacgacgacttaacctgttggaatttttttaccaggatcttagatctactcataagtatgttgattaacatcctaaatatgaacttctaaaacgattataagtaaacacatataaagtatgagaaaccttacattgggtgcagcggaataatgtgtctccttccactcagat

SEQ ID NO: 353411 - DNA, 776 bp, Cannabis indica
aaatgctagcgagaatggagtataacccgctactctcttctcagttgtcctgtgagcccaaagtaattgaggtagttcattgacccatctacctttggcaacgtctagtttcttcttgatattatccttcaaggtcttattaacaacttctacttgtccatttgcctgagacctggatactgacgagaagcttttgattatcttgttcctctcgcagaactcagtgaataattcactatcaaatagagtcccgttatctgatactatcttaatgggattccaaacttacaaattatgtttttgaccacaaagtcgataacttttttacaggttatggaaactagaggttcagcctccatgcattttgtaaagaaatcgacagccaccactgcgtattttggtcatcctcgccctgtgggaagtgccccaataaaatcaatcccccatattgcaaatgggtaaggcgaggtcatcattctcagtttcattggtggtacgcgaggtatatgcaaaaatttcttacacttatcacacttcttgacaagttcatgggtgtccttgtttatgattagccagtaatatccttgtctgataatattttttgacaagcttttccaacctacatggtccccacaaaagccttcatggatttcattgatgatctctcttgcttctgcacgaagaacacaccgtaggaggggcatcgaatagccccttctatacaatttgccttctactatcgtgtagcgaggcactgaatataggagttttcgtgc

SEQ ID NO: 353412 - DNA, 599 bp, Cannabis indica
atattttctttttgagtcaaatgactgaattcttttctcttggcacttctgactgcctcattatagtacttggcattgaataactccagaaatttctcccaagtaatagttgtcacatcatgaatcatggacaccatgtcccaccaaactaaagcgtcttcttgaaattggaaagtggcacagaccactctatcatttccattgacaaccatgaaattcaatatcctgatgatcacagttagccattgctcggctttcataacatcggggcctccaaggaaaacttgccgtgcttgcttccggaacctttcatacaggggttccattcggttcgttgccacaaccggttcggcctgcacagcagagccgagtgccactggcatttttggaaccggcactgctggagcaccctgctgtcttaactgtcgaataacttcctcttgttcattgattctagtttgcatttctgcaaacctgttttcccaattttgggcatcttgagcaacttgggcagcttgggcaccctatggcgggttaacaccaccccgaccacgtgccctgcccttgggacctctacctcgaccacgaacatttggggg

SEQ ID NO: 353413 - DNA, 536 bp, Cannabis indica
tacgttaaaaatcacgctaacacgcctatgctagttagggtgttacaggttcaacccttttaattagcgggtagtgacctactcctcttttaattgtattgatactgagagataatactactcaaatcactatagtgacgggatctgaagtagctctcttaaggttacaatgtaggaattagagtaggcaaatctcaagtatgagtatagcagtgggtgtgagagagagagatgagttatcaaacttagagctagggtttgagacttaatgatttcagacttaacacttagaacacagtgttttgggatttaaataaggcttttatatataggagagcttacacccttctaatcccttaaaaataggtaaaataagctattgtttgcatattacattaataaaatacaaatgattgaaatgccccttaaaaataaatattatctctctattttcgtgggttgctacgcaccaaaatcataccatgcaaaagctggttggccatgcagctgtaggatgcatgtgttggaaattattt

SEQ ID NO: 353414 - DNA, 719 bp, Cannabis indica
aacaacatgggctaacacagcaaagaactatccaatcaacccaagttttaataaaaccaataaaatttaatgtaagcccaaataaaagtctaacatctactactcctcattgatcattatgtggtcaaagaattttcgagttgatacaattttaatagatgattgataaggctttcgttgatggtttttgattctaagattgaatcaccttctccttacaaccacactccaagaccacaccatataagtttaatagatgatcgataaggcttttgagaatggaaatcggtttgggtttttttttttttttttttttttttttttttctatgtaaagactgagttgtcgcagtcgattggttcagttcttaataatgtgacaaaatctgaacaccaagttcgtggctcaaagctagaaacgagactagacagctttaaaaacatatattgcgattttcaaataatcaccaaccctaaaaaacataaatcttccccttcccctttctctttcaccctattctctcacaagaaagcttaatatttctcaacaatggcattagtttttgacaatccccaacctcaccttctctcctctttccattgcataagactgtttgttatacctattttttgcaaaaagtaaaataaaatggttactcttgcaaaaggattcacaagccaagagtgtcatgaagactagggttgtatagaaagtcatcc

SEQ ID NO: 353415 - DNA, 1237 bp, Cannabis indica
gggttcgcgtcctgggtcttggtctaggtttggtccgagtctcaagttccaatcgcgatctgattctggattcaattctgggtctaagtccatggttctgatcctagtttgggttcgagttttggtccgggttcgggtctagctttggtgtgagttttttagttcgcttccgagtctgtgtccgggtttgtgtccagctctggacctcgatctgggtctaggttcgggtacatgtccaagttcgggtcccgagtgcgggtaaaagtttgggtcttggtgaagatctccgtcttgatctaggtccaatatttcgatcccattctgggtcttggtccgagtccaggttcgtatcgggagcactatctaggtccaagtctgtgtttgggaatgggtcccagatttaggtcaaggtctgggtctcagttcttgtctggatctcagtttcggtctgggtacacgaccgtgtctaggcccgagttctagcctcagtttgggtctgaggctaggtctgtgttcgggtctaggtcatatttggagaccgggtcctgctccggttacggttcgggatctaggtccaatttaatttatgattccaagtacaagtcctagttccagtcgcgatcaacttccgattttaattccaattttggttcacagagtacgggttcgggccacttttgggtttgggactgagttcaggtccgggagtgggttcgcgtgcttgtcagggttcgggtccagggctgggtcccaaatccagacaccgactacgggttttctccaagcccttggtccaaatctgaatcccaatctcgggtctctgtccggctccatttctggtgccgggtcacgagctgggtcctaggttcaagttgggtctgggtcgggttctaggtcccggtcctagttctgtgttccaggtccctatcttaattctaggtcaaggtaccgattattgtatgggtttgggtcctggtctaggttcaggttcgagtcctagtctcagttcgggtttgagtccttgtctcggttcaggttttggtctctatctaggttttcatcagggttcatgtttgagtttaggtccaggtccttgtcctagtcctagttcggttctacttcaatttgcgattctgagttcgtgttaaggtttgagtttgggtcggagttcgagtcatggtctgagtttgggtttgggttcggattttcagtctaggtctagatcaggctccgagtg

SEQ ID NO: 353416 - DNA, 550 bp, Cannabis indica
aactaatgcttcaaaaggcaatatacctagctttctttctctctagggttttttagacttcttcttcttcttttcttcttttattttcgaatccttaatcttcttcacaaaacaaaattcagccattactgattgagtgcatgcctacacataacaagtgagtcctcaatcatagtatgtaagactatgaagaatccaaaaaattgaaggagaatcgggctcagatcttagtgatactctacgacagaaaggatacaagagttagagatctgagcggaagcagtcatttaattccactgcagccaatgtcaggtttctcataccttttatgtgtttatttttatcattttagaaattcatatttaggatgttaaaaacatacttgttagtaaatctagatcttggtaaaatatacgccgcctggacgagccgcaatgatggaacgctgaattagagcgtgatgcagccgcagcgagggcgacacaagggaataacactcaaaacaacctgaacctggagtgagagaccacgaggtagaccttgtggctca

SEQ ID NO: 353417 - DNA, 544 bp, Cannabis indica
aaggctcacctaaggcctttagggctcaccctagacctcaaggagtcacccaagactcctagtgttgacctcaaaatttctcaagtataattctgagttctcaagacaagaggctccaccattcatttcgtttacctcctcaaagcaccttaggcccagagtgagtctcctacacctgcatgaccttaagcctgaacgagaatccaactagtgacctaggataggaattttttgaaaaatttgtaagtaatcgtaaataactacaatatacaagatcatgaaaaaaaaaatagactaacaactcttctggatgttgaaacagataggagccttagtccacgagtaaatattattgttattgttattgttaattattaatttatcataaccctattaccctgtgtttaacgagattttttaaaattaaaccagtaaaatattaagctaagaaaagataattttaaagtaaagaagaaaaatatttttacgtgcttagggtgttaatgtgtaacaccctaactaccttaggcgtattacgtgattt

SEQ ID NO: 353418 - DNA, 1041 bp, Cannabis indica
gatcaacttcaggggaagatggcttttcaaagattgatctccgatcgagctatcatcagttgagaattcgagaggaggacattccaaagacagctttccgcactaggtatggacattatgaatttctggttatgtcttttggactaaccaatgctcccgcagcttttatggacctgatgaatagagtattcaaggatgtcctcgatatttgtgttattatatttattgatgacatccttgtgtactctcaaatagaaaaggagcatgagcaacatctccggatggttctacagcggcttcgagaacataagttgtatgccaaattcaagaagtgcgagttttggctatctcaagtgtcctttcttggacacattgtcagcaaagatgagatcaaagtggatttgggaaagatagaattcatcaaggattggccaagaccgaaaatagttacagaagttagaagtttcttaggtcttgctggttattaccgtcgatttgtggagggattttctaaaattttaacacctttaaccgagctcactaaaaagaatcagcgatttgtgtggacggacaagtgtgaagcaggctttcaggagctaaaacagaggttaatcacagctctggtgttagctctaccttttgataaagagaagttcgtggtttattgtgacatatccaaacagggtctggggtgtgtactgatacaggctgatcaagttattgcctatgcctctcatcagttgaaaggatataaacagcgatacctaacacatgacctagaacttgccgcggtagtgtttgctttgaagatttagcggcattatctctacggagagaaatgtgaaatttatactgaccacaagagcctcaaatacttctttacttagaaagacttgaatatgagatagaggcgttggttagaattggttatggattatgactgtgaaatcctttaccatcctgggaaggccaatgtagtggccaatgccctgagcaggaagggtcccgggaaggtaactagtataatccagatttcacctc

SEQ ID NO: 353419 - DNA, 1042 bp, Cannabis indica
cctgctgcgtctccacagaaccgaacctcgtgtatctgctaggtgtacgaccatgcgcggatgatgaggtggattctgcgtcattgtctcttgaaggccggctgcgaggatcacgtcgctcagggtcttcatcaacctgtgtttcctaattagggtacctagcagattggtctctcgaggttggctggtttaagtccagacctccaggattgcttcttcgttccgtgcgaacacgattattacgacgtctagagttcgttacctaagggttatctgcgcgagtagtaggggcccaaggggggcgtcgggccctattctgtccatccacctcgacctgcaacgcgcgtagttgatcctgaatcgcagtatattggtcggtggtgagttggacgattccctcggataccactgccggagtgacaggcggaaagtgcattgttgatggtggcgtggacgtttccccgacttaagggacagctatttcagggaatagattgagaggtctaatattacctctccctactccgccattaacgacatccacaggtggcgtcctagctccagataatggcacattcaccattccgatgttgatggactcgttattagcacctccatttgtttggtttccagccatgatgattttcttacttgaactgaatgaaactttaattctcgattcccacagacggcgccaaatgttgtcgagtaaaatttgacaacaccaaatatatgtaataatattaatgacaagaagaaaattgcttgaagaacacatgcaagtattcaacctagaacggcgagtactcgagttgagaatatgaatgcttaatagaaaactggaaaaaataaggaaatagaggattatagtggttcagtcagatcaccgtctgcttagtccactgtagtaagagtgccgtaggtctcatttcacggtggagcacccctttaaatataaagcaggtgtccagtttaattacaccaggattgttattcattgtcaatccgtttgtacattgattcataataaattaaactaaaa

SEQ ID NO: 353420 - DNA, 711 bp, Cannabis indica
gggcataaaacccaacaaagattacattaaaatggaattttatttaggacataaaacccaacacaaccaatgaagttattttccttggagaaaggaaggataatgtgtaagtcatttatgttgattcatttgatagtaaaaataaatgcttaaccgttataaatgataattcttggttgtggcatagaagattaggacatgctagtatggattctatctcaaaattggttagaaaagatcttgttattgttttgccatctattccttttgtcaaagataaactttgttatgcatgccgatttggaaaaaaaattaaaacatcttttcattccaagaaagagattttaactactagacctttgcaaatacttcatattgatttatttggtccttctagaattgttagtcttggtggtaactactatgcatttgtaattgttgataaattttcaagatttatatgggttattttcttgacactcaaaagtgatattttggaaaatcttgtcaaattttataagagtgcaaaatgaaaaaggatattctattacctctattaggagtgaccatggtggtgagtttgacaataatgccttagaattgttttgtgatgaacatggttttaaccataactttccatctccaagaactctacaacaaaatggagttgtcgaaggaagaatagacaattcaagaaatggctaggtcaat

SEQ ID NO: 353421 - DNA, 580 bp, Cannabis indica
ttatttcatttgaggaattaataggaaaataagagaaaaggccaaaaattagagaattcatcttctctccctctctttgttcggccaaaccaaaaaccaagggggttttgctgctaatctttggagtttcagcaaggagttcaagaggaattaagctaaggtaattttagaatcatggttgtttatttttgaagctttaaagtttggtttagtatgtgatttttgaagttggtggttgttagtgtttgaagattgtgtagtctgatttctaagtttgttttgaattgattttaagccctggatattagttttgagctatggtgtgggaattgagcaagcttgagttttgaaactcaagtttaggtctttaatcgcataagttgatttagcgactttttctaagaattactgattggaaaatattggatatgcattgtacaggtatactggaaaggtttgcaaagtttgggttgattttgaggtcatgggggcatttttcgggttcccagcacagaaccggaattccagttcttggggacctgtagcaaccggtcgaccggttggtcccaggaaccggact

SEQ ID NO: 353422 - DNA, 589 bp, Cannabis indica
ttaattaatcaaaacctttcttttatttcattttatccaaatatagaaaagtcatgaaatgactctctctctcttctctctttcgtgagccctagaaactagcaagaactttggggtttcttcaacaattctgggtttagatagcatctttgttaaggtttcaagctttggtaagctttctagttcatcttttattgtttcgtaagtttaaagttaagaattttgcttgaaattgtgagtactaggtactgtagttgctgctcttgtttgatgttgtttctgaagttaaattatggttagaattgatgtttagagctggtttggtggtggtttagaaggtttgttcaaggtttgagcttaagagctctaacttcggtctcacatggtgaaacttgtctctgtgcatgttgaggtgtattgttgccttatttatgttctttgagatatattgagcaggtctgaaaggtttggtatgatttggggttgatttagttgagatatgaagttttgatattttcctgcactgaaccggaattccaattcagggggacctgtaggaaccagaattccggttggtccccaggaaacc

SEQ ID NO: 353423 - DNA, 507 bp, Cannabis indica
aataatatatggggtaattccttttttttatattaaaaaaagtaattatagctgtgttgtgataaaaaaaatagctgtggcagtacttagaaaaagttgagttaagtatttggtaaattttaaatattaaaatattctaagttgttgatattataatggtaatgataattctataatttaagttactataatcacaaatggaatacttcttaatgggtaatacccattgatggacactaaaaaaaattaataaggtaacaatctaataaccttttatagcaagttcccaacaattattttttaaaaaaattatatatttttttttataaaattagaaataataattaaaaccaatagtatgaaaaaattataaattatttttaaaaattaattgaaattactactttattattttatgaaattgtgagtttattaatcatttattattgtaaaactaaaaataatttacacatatattaatgtgtattttttattaggagaataaga

SEQ ID NO: 353424 - DNA, 902 bp, Cannabis indica
ctaggtgctattgctatgtgtaggtaagggcaaggctaaagctgaggtgccgtgagagcgagcaggtgaagattgtacatgtcggggcggttaggcctggagcgtacgatcctcgagacattagggtttttgttatttagtcactgggtgacaaatcttttgtaaataaatagcaaacttttgtaaatgtattttgtaaacgagatcccagaattttatatgtataatatgttatatttaattaaaaagcaaaattttaattattcacgttttttccaataacctcgttgattagcaatgagctgcacagtacgttacaaatcacgctaacacgcctatgctagttagggtgttacaaataatttaatagcatccccaatttttgcattgtattattaaatccatatttagtaatactatatattagtaattattcattattgatatcaatcactttttgtcccgagtctatagcagaaaaagatctttcgatcatggttgcgtgagcaactccactgaagaaaattattttcttgagttcgaggaggctgataaggatccgaaggagtttgagttcctagatttgagctcggaggatgaggagtctgagggggaaggagaagaatcaatgcctgaagaaggagaagaaactgatgctattatatgcagtattaatgaactatggagagaggaggctgaagttcttcagaggcaggggactagggggaggtgaagctggatgaggttatggttgctaagaaagatgcagtagagaaggaggttttagatgaagcaaatgagatcatgaatgatgcaatttcctggtcaatattgttgaatccatggctgagatgggcctgaaattactcagaattgagaatgatcaaagatagagaagtcag

SEQ ID NO: 353425 - DNA, 787 bp, Cannabis indica
acctggagtgttcggtctcgggacatctgggagtattattttgtagtcggtgtgcgaccagatttatattttggtatattttgtataaaagtttaaaaacaggatcccggtacttgtaaacagttttgtaaattataagtttagtatttattataaaaagttttaatttgacaagtttttcgagaaaaatctttgattagcaaggatagcactgtcattaaaaaaatactgtagcgtgtcttagcattcgagcgttacactaactatctcaggattagaatctattgacctaagatcaactaaatgatattgacttagaaagatataacagtaagtttatgatatcttttctactgtcattatcagtccagtctgatgtataatccatacatctgatactagcatattttgctaatgtcctggaaagaacattccacttatacaagtgtcagtgtaaatctagtgcactaataaatcataggactaagaactttgaaacatataatcatacttacttttcactgtgatgacatcactgtgattgtaaataactatatgttatggatttaacagaaattgtatattaaacaaataataacatgaaaactacatgtaaacttaaatgacttctaatcttctattgatagaaaataaattatattgaactgggttttatatagggcatcaaaacccaatagtcccttccatgttttgtttgtgtgttgttgattcttctattggtggtgcatttccaatcagttttctgttgtatatctttgtttaacta

SEQ ID NO: 353426 - DNA, 634 bp, Cannabis indica
cttcttccagtgcccctccaaacactattgacttagtggatgaggaggaggtacttcttgaggaagctgaagaaggtgaagaagagcaaggggctcttcctgaggaagttgaagaaggtgaagaagagcaagaggttgctcttgtgcgcaagcgcaaaggaaagatggtagctgaggagtcttctaaacgcccacggagggtggacactccggctccgagtcatgattccgggatcccccacgaggcgaaggagtatacaatgcctcatggcattgtgctgactccggtccccggagatgaggagaggcaagagcttcggatagccaagtataattatgcccttgacgagtacacccggggacacgctgaggtggaggccttgaggagggttttgcgagaggaggtgcaaaactctcttaacgaggagaacttccaaaatccgtgggatctgaacatggaccccctgacggactggttcaaacgtttcctcgggcccaccttagccccttttgcctccgagatgaccagtgagtacgtctcccatctgactcggtgcgcacctaaacggtacgctgcttgtgcatccttgaactccatctaccaggttcaggacatcagccatgccttggctgc

SEQ ID NO: 353427 - DNA, 617 bp, Cannabis indica
tcacctaatcaggtgagcccgttccacaatctggcaccaatatatcgcattgtctaattagacgagctcgtacctacgctcggtacttatcatgtcactgacacccgtacttacgcccagtacgtcaccaggaaaatcatatcacctaatcaggtgagcccatacctatactcgatactcatcatatattactgacgctcgtacttacacccagtaaccgccccaaaaaaaaacgcatcacctaatcaggtgagcccgtacctacactcggtactcatcatatatcactgatgctcgtacttacggccagtgcgttgccaggaaaattgcatcacctaattaggtgagcccgtacctacactcggtacgcatcatatatcactaacgcccctacttacgcccagtgtgtcgtcaggaaaattacatcacctaatcaggtgagctcatatatcatatgcataatatcatcacattatcgatactcaacccatcaatcttttcattatataacaatattaactgtatctccatattaattaattcactatccattcaaaaaaaaatttaattcactgcaatactaattgcattacatacaacgtactatgcagtacaat

SEQ ID NO: 353428 - DNA, 1200 bp, Cannabis indica
tatatatatatatatgtatcacatgttttacgctattcctaccttgtttctaaattcaagtgagttagctgacctgaacgaaaaatctcattctggatgaatgccctaatcacaaaatataattgggtaaattaacacgccaaaaccctaatccgggaaaatccaaacctctaacctaaggttctgctattaataactaaaactacaataccctaagaaacatggaatcaccaaaccaaggctctgaaatggacacgaatcgacgaaatgaattgttcggggaactttcccagaactagctaactagttttataggtcctggcaaaccggttaaccgatttgcaccaggttttccccaaacaattcaaaacatgtccaaatcttaccaaactttccagtttacctatattgacttcccacaacatattacaatcaatagaatccagaaatactcacaaaatcaaaacatgccatggacgaaccaagcttgagatttcaaactcaaacttgtgcatccaccacacctaacaacaaaactagctgcaagaacctatttctaacttaaattaaacataaaactaattccaactcatacaaaccctaacagcccctaaacttcaaaattgcataatcaagctaaacttcaagttaaaaattaaagaactagggtgctagcgcttacctccacttggaaacactaagatttcttgctaaatttccagaaaagatgaaggaattgggtgagctccttctggttttggtggtgcatgagcaaagagagagaaagagaaaagagttttctctatttttggtttttctttgttttttcctaagtgaataaaggcataattgattaatcctttgctgaaataaaattggctaggtgtcaagccctaaaacaaccacatatcccccacttgccaaattaccagaatacccatggtgcttaaacttaagctaattcaagcctaggggtaaatggttaaaaaccatacccccgctcaaacccggtattctatttatctctaatattatcccactaagaaaaagcttctaaacttacccatgtgattcaaatggccatccatcgcatttttcgtcatcgccgagtaaaaatcataaaatttgcatatttcatatataatacaaataatacatctagtttaataagttcttcaaaattgagaaattataactcta

SEQ ID NO: 353429 - DNA, 1013 bp, Cannabis indica
gatttccacatatgcagcttttgttaaccatgaatacataggcagtggtgctccttctattgtccctgtttgatgcataatctgcatcaacatagccttctaacctcacatcagatgtgtctttctgatagatcagaccatacttgattgtccctttcaagtatctaatcagccactttacagcattccaatgctctaacccagggtttgccataaacctactcaaaacacttagagcatgtgctatatcaggtctagtactgaccatgatatacattagacatccaacagccatagcatatggtacacctctcatattttccctttcagtttcgttttagggcagtactcattagacaacttgaagtgccctgcaagtggaactgcagtggccttagatgaatctaagttaaacttcttgatcaccttctcaatgtagcttctttgagttagcaccatctttccttcttgcttgttcctcatgacttcaatccccaagattttcttgactgctcccaagtccttcatttcaaattcagagttgagtttgttcttaatgacttgtatttcagccttgtctttgctgatgatcatcatatcatcaacatatagtaataggtacacaaccttaggtgttcctagttccttgtagtaaagacaagagtcaaattttgaccttgaaaaaccaatactctgaacaaactggttaaacctttgattccattgtctaggtgactgtttcaacccatacaatgaccttttaagcaggcaaaccagatcagttttgccattttccacctgaaaacaaggtggttgttccatgaatatctcttcatccagaaaaccatttaagaaagttgttttgacatccaactgctcaacttccaagtcattgtgtgcagcaatggctaacatcattctaatggttttgtacttcacaacaggtgagaagatgttgttggaaatattttaccaggatctagatttactaccaagtatgtttcattaacatc

SEQ ID NO: 353430 - DNA, 769 bp, Cannabis indica
gaagcgtgtgagtgaggacaaagcacgctagatacacttgtgttggtctgtagggtcagtcgtcagtccataaagcagccagagtagcgtaatcgtgtgtaagagccattagtccgtgggtgtaagggcccaatggaggcttgaagcttgaagcggggatgttacaatggtccacacctaatcactttagaatagctatcaaacatgcaaaccttagcgaacagttctagcttttattaagtttatgattaggacattcataaatctagtaatggtgtgcactaagtacacaacaattccatcattctgaagttttcctatcactagagtatttctctagaaggactcagacagctactagtaacttatcatagaccttacattttcatcaatatgcaatccaaatttctggggaggtaagtttgaatacaattcaaagttcaacttaatgatctttgaactgtataactaaatacttctccacccctaccagctcgtaagatctttaacctttaccttaatgttttttaacactgttagaaattcatgaaatttctcaaacatttcaaatttctttgcataaggtaaaatctagagtgatcgtcttaagaatttaacgataatatccacccctgaatgtacatccatatgttcaaacacagatgatcctactttgaagtggatattgacccattttctttttgcagagactcatcttgtcaaaaccactatgaataagatgcaaatgccatagatatatattatgtgg

SEQ ID NO: 353431 - DNA, 735 bp, Cannabis indica
ttcttatatacaactgacatttgcaaaaacacggtttttcaatgttcatgagtcgaattctttgagctcaaaaatcaaatattgtagtactgctttagccaaatgggggaaggatatcactggtaatttcaagcagcaaataaacagttgttataaaattctgaagcttttgaaaaatagaagggacgttgattcggttaacaggtacaaggaggctcgaaatcgtttattcgaagtcctcgcccagaaggaggtcttctggaagtagagatccaaacaattgtggttgcaatttggtgaccaaaacactaagtactttcatacttgtgcgagtactaagcggaaaaataatcagattttgtctttaaaaaatagaagtgggatttgggtggattgggaaaatggcttaccgggtgtcgttgaagactattttagagagttgttcacagcttcagagattgattggggtagggtcacggcttgtgtgcataatcgggtattgactgctatgaatgagtctcttactattccggttgacgctgaggaggttcagaaaacactctttcaaatgcatcctgataaatctcctggtcctgatggctttaatcctgagttttatcataagttctgggatatcgttagtaaggatatcattccgttagttcaacacttctttacttttggtgaatttcctgatcatttaaaagaaacaaatattatgcttattccgaaaaa

SEQ ID NO: 353432 - DNA, 899 bp, Cannabis indica
tcatgctaactcgctctttttattttcgtagatagaccagctcgacctgcactcgacgcgactcgcagacagacagctgaagttctcgggagccttcctgtacaggatcgcgacttgcgattattgtgtacgactgccaagctgggagaacataagctgattccagagaacgcaagtcttcagagagagacggtgtacaaggaaccttctgagaagcaacaagagcgaatagataaacgcctctctaaacaaacttctagaccatcatcaggtaacatatcgcgtatattaactagtgccttgaaatttatctatacttatcttttatttgtccttgcagagatgactttcttgaagtcctcacccattcttaatcgcaagccgaaatctagaacagcggcaacttcccctatcgttcctcagaagaggaagagcgacgtggtagttacccctgtcgcggattcttccaagaggccagctaagggcatacaagagaaagggaagaaggtcgtgattgacctagctgtccgagcccacaacatacggactctccaagagaagttcgtaagcgatgaattccaatcgaagatcgataagactcctgctgaggagctgttgcctcgctctgcggagttagcttcgcagttcatcgccatgttctcgaaggcctttgttactgggtccaaggaggtcgaactcgtgaagagacagaacgttctgcttcaggaggacattaagaagttgaaacaagatgccacttccaaggataaagagctcgaggaacttcgcaaggccaaggagcaagtcgagctcgaggctaagagtgctcagacgaagatcgaggagatgtctcgcgattttgaggccgagaaggagaatgggaagaagcagtacgacca

SEQ ID NO: 353433 - DNA, 1080 bp, Cannabis indica
agggcataaaacccaacagtgccttccaagcatccaattgaagatctaacttttgcattgaatccatcttcataaaaaatggggaaataggtccttccagaggaaaagcaacaaatcctgggcagaaaaaataggagtcagcacccaggttgacacttggggttggccctacgctcaggttgacaatttgtcaagctgggccataaaaaatggagttttctcataattatttcaagcatcatctctgttttagaatatattgagaatcacctctttctagggaccaaacaaaaattttgaaggggcagaagagggatccaacgactaggttaacacttggggttggaccctacgcccaggttgacatgggttgtttccaatttagttcagaaaaaagtgctccatgcatcttcgctattataaaaaataatgaagattcaagtaaacccggggataaaaccacaaactcgagtccctggaaacagggcccagtgcctaagttgacctagtgttgggcctagcacccaagttgacaatcaacctaggacgctaccttcaattgctcaaatgtcaaattcgatgcaaccattgaatcccgcatggttaaaaacaagggaagagaccctgtactcatgttcagaagccttggaagtcttaaaagtatcgaaaacagaatcccaaaagctcgatttaaaggcctcaacgcccaggtcaacatttggtttggttcgttgggttttgcttatttaaatctgatgttgttttgaccgttcatcaagtttttcacaagtgcaatgatccataaagtcagaccaaccaaattcacaacttcaatttttgctcatttagaacccgaaagtttcaagtcttccgtttctacaaaacagtaacatcttcgagaatgtgtgaccagcttcatcaaaacatataaaaggactaaggagtgtcaaaccatcacttgggcatctcaaaggacttcccttgaacgtttctacacttttacatcgtctaggttgacatcagatgtctgttaggttttatgccctaaataaaactccatttcaatgtaatctattttat

SEQ ID NO: 353434 - DNA, 781 bp, Cannabis indica
atacctactcattactcccactcaacatcaagtgtctggtctaatgcatagcaaaacattcatgagacctctcactattgttccttaagaaattattttcatgacttcatcttttcgggaatagttaaaactgttccttagataaataaaatctatgtctaggagtcaaaagacttcctatagagtgagccattagaaaaaatgctctagcatcttactaaagtaagttgcttgcactagaataagtaaattacaagtcataccacaagccacaagtttagataaactcaaacctatgatactaggatctggaagtttttttaagcccattgaatatacttattattaaaatttccttattgtccgtgtaatagaaaacttttggttactccatatgaatggttttaaccatagttctcttggctttgcttcttagttccttattttgacaatccattacttgtttaaaataacaatagattttatcaccattgtcttccaagtcataacggggtgagtttcttgaaaccctcccactacaataaggtaccgtgatgttctgtctaagaacctaaatggcattgacccatcggttgtgtcaagacaacagaggaagtggtaccatcttatatagaataagatgatagaacacttttagaatcaagattatctcctctactttgctactttatttttcagatttagtcatattcttagggaagtagtatttgttgaacaaacactttcttatcttaatgaccatatgatggtcttcccataa

SEQ ID NO: 353435 - DNA, 519 bp, Cannabis indica
tggattggtggctgcctaggaaggtgacatgtggcctcctttttctttcagcaaagaattaattagagaaaaccgttttctcatttgaaggaaaaatcaaaattagaaaattcattctcttgagctctctctttctctctttcggctgggaccaaaaaaaaaccagaggaaaccatccaaattcttctctaattctgcaatcaagttgaataccaagtgttcttgaggttgaggtaatcccttgctctttgctctttgtgtttttaagctttaaatttggtttcaagtaaggatttttagtgttagtggctattagggttgggaatgcttagggtttgaattttaagtttaatttgagttgattaagggtcctagcagctggaattgatggttggtttaggttttgtgcaagtttaagctttgagttcaaagctttgatcattaatggaaagttgagtttcattagttttttctgtgaaatactggttggaatattttgtatataccctaattaggtac

SEQ ID NO: 353436 - DNA, 750 bp, Cannabis indica
gagcgtagtttgatcgtgatgaagatgaggacgatgatcccgacgatgctgatttcgatattgatgatggagattttgactccgatgacgatgacgatgatgattctaatgattttgatgaagaagtggtgaaaaaagagaaggtgaaaggtggttgcggtcatcttgatcatcatgatcgtacaacatcgctgataccttactcgtcactaccatagccaatggctccatcaagctctacgacctcgcttttccatgcaatgcatggatctactttcttttgggttcaagttctgattgagaatcgtgattgataaaatttaatcaatatatgaagaggtaaagaacaaggtttcgagcgatatgatcggtcaacctctaacaatattggttttgttagagacattgttttaaccattcatttacatgacttttaagtgtatcaaattaaatattcttttttcaaaaattaaaaagaaaataactcacaccaaaatgaatacagtaaaaagcttcaattggttgttattgaaatctggcttaactaccattaatttcaggaaagagttcttctgtgcaaatcaaaacaaaacaagtttttattttcttttccttgttcatatcatatggattagtagacaaataaaaagtctaaaaaagaaaaaggaaaaattgtaaacaaagaatgtttgttagctataaatgggaagcaaactaataaacaacttaaagctaaggatgcctctttca

SEQ ID NO: 353437 - DNA, 632 bp, Cannabis indica
aaaccggaagttgaccgggactggaactaggacttcgacttggaatcataacagaaattggacctcgattcagaaccgtaaccggacaaggacccggactccaaatcagacctagaccggaattgggagctgcactcagatcccaacccaaacctggactcgagacctgaacccgaacctgaactcagaaatgtgacctgggacctgaaccagaacaagccaagacccgagacagggatctagattttgactcgggattcaggtaacggggcctggaacacaccagtagttggtgtctagatttgggactcagataggaccacagcccagacgaagagccaaacccggacccagaccgagacctggtacccaaaattagaacctaaacaagaatcgccgaaccaggaacctagaacaagattaggaacgtgacaaggacccggacgcagacctagaaccgaacacagacctagccatagacccaaactgaaactggaaacctggcccggacacggtcgtgtacccagaccggaattgagacccggacctagacctaaatatgcgacccgatcccaaacacatacttggacatagatagggatccaaataagaacctggactcggaccaagac

SEQ ID NO: 353438 - DNA, 508 bp, Cannabis indica
tcacgaaatatctcaataccagagcatacccacaaaatggaagataatatactcactaatttcaaaggtgtctgaaaacgtgttgacacaaagtactccattccttccaaccattgattgcgccagaaagtgattgatagtcaatttcaaaatcattgccttcataatgacaacgcaatggaagatcttggccagaaattatatgatctctcgctgagtcctgataaaggtaaaccccgtcttcctcatagatagtaggaaataattaatcacgagaaggtggagcgtcatcacatttagatgaaactacactctctacagttgaagaaactgcctttcttttatggcccatagtatggagttccattcaatctgcataaacacatacacaaaacaaactccttttatccacagccaaatacattacaattcataaaaaaatatatatatatatatatatatttgtatatgaaattatgcatactacagtacaggagaagcaacacaa

SEQ ID NO: 353439 - DNA, 513 bp, Cannabis indica
ttatactctgctacagactggaaccaagggttagggatctgagtggaaggagaaacttaattccgctgccagcactttaagttattcttaacttttatgtgttttgttcatcgttttagaagttcatatttaagttgttaaatcaacatacttgtgagtagatctaagatcctggtaaaattaattccaacaaggacacgtgtactcagatttccaaatgaaagttgagacgtccatgagagattccttaaagttttaaacctcgctcaatatagattcaacgagattacagcgagcatgaccaaagtctgatcgcatgattaaaaactcatattctgtgggacaatagagtaactgggatgtatcgaactatgtgcgagtatcctctccatgttctggcataaacatagagaccgactttctataatgcgagttagtcccgatgaccctacagccttgataaaccgatatagactcgcatgtctaggttctgacaactcgtcatgcgatgtc

SEQ ID NO: 353440 - DNA, 661 bp, Cannabis indica
ggaggaaaacaggaatatcatccagttaacctccgatgataatctggcgaagtatgggctttaccgagaggacttttctcctaagtccgtgccggggaagaaggggaagtctgatgctggccggcctaaacgagctcataagaaggatgagctcattcaacttaagtgggaggctaagttgaaaggaggtgccagggccaaatagtacgctcaggagcccttaaatcctgaagatgaagccgaggctgaggatgaggctaagcaagtgaccccattgaagaggaagaaaaaactcccggccacgcccaggcctgttgaatatgcaattcgcataagggagcccatttcacctgttcggccatcttatccctttgttggaaaagggaaggctgtcatgtctgagataaacgcgatgtcaagtgatgatggacttctgatcttctgggcgggcagtcactctgcattttacttctgtttcagcttcttgactttcatgctttgtatttcctgctggctttttctaaccacggtatttttgttctgtgcagacatgtctcggcagatgcttgatgctctaaggtagaggatgggcggaagctctagcgcctcccctccggccaagaagcttaagggtggacaggggtcctcgaagaagagacct

SEQ ID NO: 353441 - DNA, 620 bp, Cannabis indica
gcttcacatcgagtctcgaacggtcatgctcgacacgtgtccccatccaaaggcaaagccagctcggaataagtctacacgcaacctcggaggtcccgtacagacttgtgggccaatgttatcccaaatttggcattctgacgtggcatcatgagaatggtgacacgtggactctatttggagcatatgttcggattaatatgccgagcaggatgcctcgctggcatatccagaatggaatactcaacgagtcgtgcagaatgagcaacactgagcgaattcagcttattgcatcatgagtcaccagctcaatccctataactcagggatcaacttacgtggatatggcatacacacgatcccactatcagtgtattcagcctcaatcccacgatccttgcattcagcattgatcacacaatctttctgtttatgcgcattgtaacgagagaggagactcttcctcctcaagtttccagccctataaatagttaggaatgttcactgggcaaaggaccgagaaattataagccgaaacgctgtaagctaaggctacctaagaattatatattcagagatattattgtaagagctacaagaaaaggaaacttcttccttat

SEQ ID NO: 353442 - DNA, 514 bp, Cannabis indica
ctctctctctctctctctctctctctctctctctctctctctctctcgttgtcaccggtacaactaataaaatttgagatttgactttactgtgttcactatcttttcattgccatctcgattcaattgtttaactttgtgttggttattttgcttcgactgttgcatgaaaattctatatcaactaccaagtacaactttttttactttttgccaaaggaactatttgaacaggtaatatacttgaaggccttagccaatatgcaattaggtttgtagctattttcatattaccttgaatgttgttttagggtttggggcagcatttgttttttcagttcattgtttttcttgtgaatgtgggtttatttcatgcgtctcttttgtcttcaattgggcagaaagagggaaaaggttcctatctttgagctgcttgttgttgtgtgcattactaagtttgtaagattcatcacatttaataggtactattcttttttcgatttaaatctaaagt

SEQ ID NO: 353443 - DNA, 819 bp, Cannabis indica
aaagagttttatttagggcataaaacccaacatatcctgcatagcagcaattacttgttcctagagtttagctgataaaggattttcttccttaccatccatcctgagctcaaacaacttgctaatcagactgttcaattgccctttttgcataacttatcacacatttaatccacatcttccaacaatttagaacttagacaaatatcaatatcaatatgcgtataccatacacatattcttatcataatcatcacaatgctacttttcccaatatactttctaatagtccaggcaggtaatccaattggaaataatataaatacttactattgttggaaatattttaccaggatcttagatttactaacaagtatattgtttaacaccctaaatatgaacttttaaaacgatatgaaataaacacatataaagtatgagaaccttacagtgattgcagcggactataatgtctccttccactcaaatctctaacccttgtatcctttctattgcagagtatcaccaagatccgagcccaaatgtccttatgttgaatctggattctttcacgatcttccacactatgattgaggttaccacttgatcgtgtcccccagactagatgcttgtctgaacatgttcctgaccgagagaagctcggttctgcacgcgtgagggagagtgatcactctatctttttccaaaacttcaaaaaatcataactaattcatataaaattgaaattaagtctctaaaaaagtaaatggcttaattttttcaaaactatccaacaaaactaattccagaacgaaaatt

SEQ ID NO: 353444 - DNA, 765 bp, Cannabis indica
aatatttatgctatataaatttttattttctatttatttttaattattttttcccaaagtaaaaatttatatgcgcttaataaaaataatttatagtatttttaaattatatttttatcacatgtaaaaaaacaaaaaaagctcaagtatataagaaagtttgttaatgttaatattaaaataaaaatttaaaatattttttaaaataaaattaaaaagtaagagatattttttatttttgtagtatataaatatgtaaatatatttttagtataaataaatttattatagagtctttcaaaatcaatattagggaacaatccaatattttagtatataaaatgtcatattattattggtacaattaaatattgggtctcatatatttgatgtattaacttttatagaatattgttaactaatgacaagacgcctttttgtacataggtaggttgttagcaaagtcgtagattcatatgttacttttttaagagcattgatattggacactagtggttccaacacaatttttagaggtggtgttctatgattaattagttctttttgaactattaaaattgtaggacttaaggatatttgtctagtttcattaaattttactaattttgtaattatccatatactaaatcatgtttcttagattttgatatctactcaattatgtctctcgaactttcacacgtaccaaatcaagcccctaaatttttatacatgttagactttttttttttttattaaaattgg

SEQ ID NO: 353445 - DNA, 499 bp, Cannabis indica
attggtgatcaggcaattaaaataatttaagtacgaatgaaatagaataaatagaaactgagggaaaataaatcatattaaaaccataaagcaatgtcaacaatatccatctaaaccctaattaagtgtttagctaatcatgttcatggaagtaaaatcacgcatgtaaactaaagaaaagagaagaaaatagagtagaaaagaatgctgaaaaccgtctgaagaatgcctccagtattatagttgatctccaaaatttgtactctatatagccattgagggactataaaagatagaaaaacgcacatgctgaaaatcctattcagctttgaattaagaagccaccaaacctacgttgagaaaagataggattttctactggaagggggcaagccgcgttgccctccttgctaggccgcagcccgtgtgtccttttcctacgtcttcaaggcaggcttcgtcatgtgcaagacatgctccatctgcactcttatccttt

SEQ ID NO: 353446 - DNA, 669 bp, Cannabis indica
tttgaaggttttctggtctaagggtttctttctctctggatgaaagtaaccaaatgaaagaaaggtggtggcttttataggccaaggtgcatgtggaacaggcacaatcacctaccaatcgaacggctggggaggcgcacgattcgaattcccaagatccaacggctagattgatttgtaattaaggcggtggaaacgtttgagtatccgtctgacacccattaatgtgtcgtatcaattaaagggcatgaaacgaatcaacgcctgcaaaaagtgaatcgctgcaataatagtaatcattaaatacgccttcacgcgcccgaagcacgtgccaggaaaccgaggagtcaaccggaggcatccgagcaagccttgttcatttcttaaataaacaaggcttggggggtaaatgttgcccctgattttgcccaatatacgtggaccaaccagacagggacacctggatcaaaaactcttaacatttgaattaattgctaagtcttcatgaagaaagacagcatccaggacctgcctcccggagaaggcatacgaagtcccctgtgctccaggaggtctaagtggtatcaaagtatctccgcgaggtgtcaggcttcccctgagcagtcatctcgcatttaatgtcgcatgggaggaaacgtgttgggactg

SEQ ID NO: 353447 - DNA, 1174 bp, Cannabis indica
ttctcacccaaatagcctttgtgttctatgaaactttatccaaacaattttaaacctaaaatatccaaatacaagttataatttcattattttactaatattttttactaaagaaagaaaaaacaccatttttggccaaaaatacaccattttcggcaaaaaaaaaaaatcaaaactcaccaaaatgaagctctaatgaattctcaagcttcctttatgttgtatgaagcttacccaaacatatttcaatctaaaacattcaaatacaagctaatatctcattattttactaactttttaaactaaaataaattaaaaactattaggataagaatatcaaaaaaaaaaaatcaatagtatatatattcaagctcaccttttctttttggagtggttgtgatgaaatagaagaagagaaaattagtttttgcattaggaaaaaatagctgctattttcgaattggggaagaaactagggctggttagaaattgaattatggaaagaagatgaaagggaggttaaggggcgggctgggctcttttttgaccaatctcggtaggccaatataggcccaccgttattggtaaccacagcaaaaaagggctggaccaataacggcgggcctatattagtttgttgagattggtcaaattttatgttttaaaaaatagcaataatggcgggccaatatagacccgccgttattgctatgctcataattttcttaaaaaaaatttaggcctatctcgacaagcacatgtgagcccgccgagattgcttaaattttaagttttaaaaaatagcaataacgacgggtctatattggcctgtcgttattgctatgctcagaatttttttaaaaataattcaggcctatctcgacacgctcacactcgcccgctgagatagggctaccgagataagcctttttttttgtagtaaatggttatggttaaactagtagtcttatataagaatagattctatttgtggatgtccaactaagatgaggtcttgttagcctgttaaaggaatctagacttcaaaatattaaggagttactttactatatactcttagtatttaaagagctacaaattttgtgatctcacactaaagttcacttttgagataatgaaagctaacatatttgaggatgttgagtttgggaga

SEQ ID NO: 353448 - DNA, 519 bp, Cannabis indica
ctacagatctattttttagaaaatcaatttttccttgccgttattactcgaatgtataaataattaataattataataataaaactcatgaagcttacaaaaatcgatctgatactgaaagtttggacgatacatcggtcggtttaggtaatttatcctatatatttgttgctaaaatttaagtgcgacccgtcccatttaaaaaaaaaattgtaaaccgaccaacggttggacggtatggttaagttaaccagctcaaaccggccaaactttttttaggttcaaaagtcaaagtcaataaaaattaaaaaaaaaattaaaattattaaattcaaccaaagaacaacacaatatatataactttgaaactaacacttaagtatataattttatattattatatatttaatcaatttatgttatacataataaaaactaaaagtaaaaaaataaaaaatttaaaagtcagattgatcgagtcattcggtttatttgtagtagattagacttatttctaac

SEQ ID NO: 353449 - DNA, 640 bp, Cannabis indica
tcgaagcgtttgacgtagtgtttcgcagacgatgggggttaggagctcatctcttttggccttcttcaaggcttgatctttaaagtccctgagctccttcacctccacggttaggttggtcgtccactgcaagtccgcttggtgtagctcctccatggattttaacttggcatttagcttgtccatagcttccttggcttcccgcaactcccacttggcctaggccacagcttcgccctgaaccttcagctcttcctggtgcctcgcctctgcttgagcctccctctgctgggcctcctcctggaatgccctcctctcagttgacaagtcccgcagactcttcactgcctcgtccatgcccccaaattcggacatgaaatacccatgatcaatcagggtctttgagagggggctggtctctgcagtgatctgaaaaaagaagcaagaatgagaccagatgccttaagacaaaatataagcaaaaagagaggaatggatcgcaagaacttaccgcagccagggcagcgttgatatcctgaaccaggtaaacagagttcattgaggcacaggctgcgtatcctaatatgaattctaaaacaataaaataaatacatataaagttcaggaaaccttacattgg

SEQ ID NO: 353450 - DNA, 1036 bp, Cannabis indica
gaggtaggttgctattagtgtcatccagtttggggaagtgtcaatcatctcgatttcttctgtgccagtgatgctaggctcttcggggaactggataggaaccaagttcgccttgtcacttacattgctgcttgccaatcgagctaacacgcctgcagttgtattttttcccttggaatttatctgagaccgtagcttttgaattgtgcgagcagatcatgtattttgctcagatatgctatcatcttttctcctcgagcctcatattcttcggatacatggtttacaaccagctgtgaatcactacagatttggatgtgttcggccttcatctcctgggctagctttagcccaacaattagagcttaatactcggcttcattattagatgctttgaatccaaacttgattgcagcgtgcaagtgtttcccccatgagtgacaagggcaattcctgcaccagatagttgatctgtagctgacctatctacatgtagtttccaggtcggcttatcttcattgttacttggctgaggtgtttgtaccgactcggggttgctttctgatatgctttctttcttgccagtgcattctacaacaaagtctgctaaggcttggcatttgattgctgttcggggttggaaagtaatttcgtattggcacaactctaccatccacttgtgtagccgtccagaagcatctggcttttgtaatatttggcgtaatggctaatcagtgtatacccgaacaggatgagcttgaaagtaaggccttaactttcttgttgctagaatcgggcagtaagcaagtttctctattaatgggtatcggccctcggcctcaatgagtcatttactgatgtaatagactaggtgatgtatgttgttctcttctctgattagcacggcacttacggcatgttccgtgacaactaagtatattccaagttcttctccgtccagaggttttgagagtacaggaggttttgcaagttgtgcctttagctcttgaaaagctttttcacactcttctgtcca

SEQ ID NO: 353451 - DNA, 927 bp, Cannabis indica
atatattatgttaaaaagcacaaattaattaatcttgcataaattgaatctcacgtctaacttaagagcatatcatattatatatcataaatcgagaaaataccactattggcagaatgcagtaaacgacatacaatataataaatatactaaaataattaataacttaacttacataagaaaatcatgactgaacttatataaaatgtactattgaatttggaagaaaagttagaagatgaagaacaatttaataaatgagatatggagatgaagcacaaaagaatcaatatcaatattaagaataagaagtacaaaactacactctaacttcaccaaaattactattttaatacactcatttttgtcactaaaataaggataaataaaataataataagagagaaaaataaaataacaaagtgtattttctctactccaaaatttgatgcattgacattgaatttgagtcctatttatagtacaaatttgttcctcaaatatggtattttcgtctaccatttaatgggataaatgacacaaaaaactgagaaaagtgggggacaaaatgtcccatttgcgtcacgcggagtgggaaagagggacaagctttcacaggtggcgttgagggagactctcagatgcaatggggcacgcgtaagagagttgaagtaaacaagcaaccacgtggcatctcctgctgcttccgtcaagtaataggattggttagttacatgtagtagtagcagctagggctgtacaaaaaaactcgtaaaccgctcaaaccgaataaactgtccaaaccaaaccgaaaaatcgaaaaaaattataaaccgaaataacccgaaaaaatttcaaaccgcccaatctgttaattgggcgggttgaaaataggtccaacccgcccaattaaaccgaccaacccga

SEQ ID NO: 353452 - DNA, 638 bp, Cannabis indica
acctttcttgctgtagtacagttaaacaagacataaccaaccgattcccatgcattattacacaatgagcaagttgcagaatcaattacctttcttcggactagaccagtagctacaggaagtgcattttgcatcactctccaagcaaatatttttaccttagatggtagttccaaattccaaaatgttttccaccaggtgctatgagaagaggaggcatgtgtttgctggttttctgccaagttctcagcaagatgaaatcccgaattcacagtataacaacctgtagtagtatggtgccaaatcaaccgatcattggtttgaaaaaaactaagaggaatggtaacaattttgtcaacatctatggattgaaaatattgattaagaagagagatgttccattctctttggtctgttatgaagtgtgacactgtcattgtatctgccccattgaagctaaccggtttaaaatctgtgaaacctggaatccatctgtcaaaaccagcagatacagtaactccatttccaatcttatatcgcaaaccttcaataagtaattcccttccccaatgtattccttgccaagtgagtgagggtgagtgaccaagtcgtgcttccaagaaattgttatttgaaaa

SEQ ID NO: 353453 - DNA, 555 bp, Cannabis indica
tctcaatctattccctgaaacagctggccctcaagtcggggaaacgtccacaccaccagcaacaatgcactttccaccagtcaccccggcggtagtatcagagggaatcgtccaactcaccaccgaccaatacaccgcaattcaggatcaactacgcgcgttgcaggctgaggtggatggacagaacagggcccaacaccccctcgaggccctactaatcgcacagataaccctcaggtaacaaactctagacgtcgtaataatcatattcgcagggaacgaagaacaaatcctgaaggtctggacctaaatcagccaacctcgagagaccaatctgcgaggtatcccaatcaggaaacacaggttgatgaagaccctgagtgacgcaatcctcgcagccggccttcaagagacaatgacgcagaatacgcctcttcgtcctcgcatggtcgaacacctagtagatacacaaggtccggttctgtggagacgcaacagggaggacgataccaagtccatagggggcgatctgcgtaatcacctcaacgcagtttt

SEQ ID NO: 353454 - DNA, 1484 bp, Cannabis indica
actctgcgacaaaaatgaacaagggttagagatctgagcggaaggagtcattatatttcgctgcaaccaaaggaaaggtttctaaactcttatgtgtttattttattgttttagagatattcatttttaggatgttaatcaacaaacttgttagtaaatctaaatcctggtaaaatattcccaacaattataacaaggcgcctatacacctaatcataaccctatcccacgtccaacacatacttgatttggaacatgtgtacgacagtacgatttaccataatattagtctatactcagtattctcacactttacttgggtagatttttgaagagaaaaatttgacacatttgatgcttttaaaactctgtgtttgaaattaaaagttgaaaaaggatgtaacattggcaaaattgtttgaatttagagtgatcgtggtaaggaatttgagaacactgtttatgatgagttttgtaagtgtacaggtataactcatgaattctcagctcctaaaactccccaacaaaatggagttgttgagagaaagaatcgaaccttgcaggagatggcaagagtgatgttaaatagcaagaagctaacaaaatggttgtgggcagaagtataaacacagcttgctatacaataaatagagtgtttatgcatccgggtacctctaaaacatcctacgaaatttggagaggtaagcgcccaaatgtaagtcattttcatatttttgcatgtgtttgctaggtttttagagatcgtgagcatattggaaagtttgatgctaaaagtgatgttggtgttttcattggatattccttaaatagtagagcctatcgtgtttacaacaggagaactcaaactgttttggaatcaactaatgtggttgttgatgattttaaagattttttagaattttccacagaagccgagacagatagttttctggatactccactagaagcaacaaatgtagatgttgatgcagcagaattgaattttgaagacgcaactgacgaatctgctgctgcaactaaagcaggtgaaccagaacagcctatctcgattcatccaaacatcattactgattttacccagaaagaaccaagcaccagagtaaaactaaatcatcctaaagatctcattcttggaaatcttgaagaaaacatggtaacaagaaaaaggtatgttaatttgattagttttctttgttttgtctcacaatttgaaccgaaaaatgtgaaggaagccattgcttttgaagaatggctcaatgcaatgtaagaagaacttaataagtttgtctgcaacaaggtttggattttggttcaaagaccaaaaggtatcaatgtgattggaacaaagtggatctttaaaaataaaagtgatgaattcgatacaattgtaaggaacaaggctcgattggtggcacaaggctatacacaagtagaaggtattgactttgatgaaacttttgctc

SEQ ID NO: 353455 - DNA, 808 bp, Cannabis indica
taaaaaaaaaaaaattaacatatgactaattaaatttattgttaattatacattatttatgtagtgtacacttttgttatttgaaatggaaagaatttgttacatttttgataaagagtttaggtaataaatattagtatatatttttagttattattagaaaataatatattttcactatatatactttaaactttttataatttcaaatttatatgggtttaaatttttgtaataaacacaaaataataaaatttctaagcaaaattaagcaaacatacaataccataatgtatgttgctaggggtgttcattggatcacatccaatgtttttaggcctatccagatccgatctaatcatatattggatgttggattggatcggttctatccattagatgtatttcatatatatttatttgtttaattagggtttatctaatattttagacttaatattttttggatcggatcggatccatctaatattttagattcagtatgtattggattggactggatccatccaatccaaaaaaaaaagtaaactttaatgttaattttcatatatacatatagatttgacgtataataatataaaatctaattactcatccaaagtaaataaaaatagtaattagttcgattggatgttagatgtattggatttttaattagacaccacatccactatccgatccgatccaattggatatttaaaaataacatccaatctgatccgatcacaattggatgtccaatatttggaggtcgattgtaattagatcggtcggttctcattggatt

SEQ ID NO: 353456 - DNA, 618 bp, Cannabis indica
aaaaaatggcattcattggttctcttgggatcagctttgtatgcataagtctaaaggtggtatgggattccgctcattgagagattttaacctgtccatgctaggaaaacaatggtggagactcatgactcgtcctaattccttggttgcaaaagtcttcaaagctcagtactttcctaatagtactttcctttcggctgaattgggaaagaacccaagtttcgtttggcgtagtctccttgaagcgcaagatttggtaagaaaaggaactcggtggtgtgttggtactggggaagagattaatgtcctacatgaaccatggctgcctagtgaagaacaaccttttgttatgtcaactcatcctggtttgatgggcagtaaggtgtgtaatcttatggagatagggggtgggaattgggacaggaaaatcttagatgatttatttgaggagcgggacaagaagcttataatggacatacatttgcatagtactcaaggaagagttaaattaaactggattcatgaaacttcaggattttactctgtcaagagtgcctataagcttctacagaagttaaagggcagatggcatcaacaagaggatgagcaaacgaaatt

SEQ ID NO: 353457 - DNA, 1006 bp, Cannabis indica
taaaataatttccaacacgagcttcctcccactctcttttttagagcctcaagcattttctgtgacatgtctgcatgaaatgaaagtaacatggttagaaaaaagcatgaaaaatatgaaggcatgataattaagaaggttgaaaacatgatggagtaccttgcactttggcaggggcatctgcctgaacaactactgaaggggcatcatcatctgacaagtcttattgctcctccaggacggctttgccctttcctactacaggagtcgatggccaaacaggtaaactaggctccctgatctgaaatgtatgttcgataggcctgtgtcgggccgaaagtttcttcttccttttaagtggagtctcctgctcttcctcaacctcatcttcctgctcaacatgttcctgagcatgctgcttggctcccacacctcccttcaacttagcctcacgcttcagttgaatgggttcattctcttgatgagctccctcagcccgaccagcactggatttcctcttcttctccttcacaggttggggaatgaaatcctttggataaagtctgtaatccacaaagttggcctccgaagtgaacaaagtaatatttcgggcatcatccggcagctgagcgatcctttgagatttatccctaagagctagcgtgaagggtggacggtaatatatagggatctgctggaaccgagtataggtggtgcccatgccttccaccatgtaatactcgtcgacaaaattcccaattttgctcatggccttgtccctggcgctcgtcaaccacttgaagtctagctgagagaaatagaagtactccgacctgccttgcttgggagtagacttcaggtcaaaaaacatgctgacctcgtgcggagaaggcataccccatttctgggtggcgtaaaggatgaacagggctgacagatactgttggaattattttactaggatcttaaatttactaacaagtatgctgtttaacatcctaaatat

SEQ ID NO: 353458 - DNA, 663 bp, Cannabis indica
ttcgtttggagatgtgtaggttgagattttaacagataactaacgagtgtaagagtaaggaaaaacttgttaaaattcccctgaaaagaagaatatttcaattaggggccatttcaacaaattttaacccaaaaccattcttcatattcatttcttagtagtacaaattgactaatatcttcttaattcactttacttttttatttttattctataaatattgattgatgcattaattaattaagaaaatataataattaattaatagtttattttttttaaaaaaaatatatagttgtataactcaaatagcataaccatcacatatttcagttcttatttttttacgacttatatattttttaaagcatttttttttcataacttatatttattaataataaaaaaaaaacaaaaatatctctaaactattgtaacatatttaaatttttttcttaaatatcttcaaactatctatctgtctatatctatatacataaagcagagatatgaggcggtaactagcattctaaaatcactctaataaatacatctaataattatatccttaattctctcactttttaatttttgattaaagtaaaatcatttaaaatacatctattgattttatctttaattttttaataaatttttaacgtt

SEQ ID NO: 353459 - DNA, 1255 bp, Cannabis indica
ccaaggtacacgtcgttggtattgcagcaaattaatctgagctttttctcgacgttcatcaattaattctaattcttctaaccgtgcttgatgtacatccattcctgcagacatggctagcctagctgacggcacggctatttcggcaggcaataccgcttcagatccatacactaaggagaacggtgtaaaccctgtagacccacgttttgaggtacgatatgcccataaagccagaggaatgaattcatgccaaattgtgggactgtcatgtaccatacgacttaatacccgcagcaatagcttattaaacgcttctgctatgccatttccttgcgggtagtacctggttgatttcccatggaaaatttgataatcttctagtaacttttttgtcgctttgccggtgaatggcgtgccattatctgacaagattctttttggaatgccgaaacgacaaatgatgtgttctaagatgaaggtggccacagcttctgtagaggcctttttcaatgggattgcttctgaccattttgtgaaacactctgttgcggctaaaatccaaattcttccctgagagggtggcgagattggacctatgaggtccatagcccaagtgtgaaaaggccaaggggtggtgatggattggagagggatagctggcgcatggattttgtctcaaaaatttggcatttttgacattcttttgcgaatttcatggcgtccgcttccatggtcggccaataatatcctatgcgaacaatttcttcatataattttcttcctccttgatgttcatcatcatttgttttcaagaaatacttactaatgtgtctgagtagtttttctttttctttcttatcacatggtgttattttgtcctgtaaatattctttatatggtatcctccaattgtaatcttcggttatcaaaattgcctcatggttattaaataagagttgacattacggacaatctttttgcaatcttgcagcatcttcctccatttctagccaaaaataaccgaccctttgtaatcttcttgataacttgggaccttcgactccacaggcagcattatgaatttcttccatctgagtagagatttcctcttggtctaaacatcttgctaacaccccatccaatgatcggtaataaagtgtcccacctataacaacaaagcgttgcatctctttaagatgagtctttttcaattttgcgagcttatcaatcatttgttgtgtccacttcttgc

SEQ ID NO: 353460 - DNA, 609 bp, Cannabis indica
ttctatttgtagacccaaataaatgacgaataccaagtcccgtcccgttccagacaatattgaagatatttacaaaaatgtcattgcttacaaactaagcatcaacataccacgagcatgcaccacaacatgcgccactacttgaccaccaattggccaacttgtggacattacttagcttgtaacgtgccctcttggaccgcacgtaacactcagctatgcaaatgaacaatagggctttggtgcagatcaagactttacatttgaataatgttctcaaaccgtgggttatataaaatagcacattgttcaaggaaggactactccctaatatgtcacgcatagttgtgaacatatctgccacagtgttaaacatttcattaggggatagaggaattgtcgtcaactgactttgactatatgatttttttcctttgcctttgaccttataactcatgcctctttgatagtcagatcttttgccaagaacatttccaagtatgtcgaactgataactgttgggttttatgccctaaataaaactcatttcaatgtaatcagatttacttattaatatagatcaaaaataacatttaatgttgcatggtt

SEQ ID NO: 353461 - DNA, 647 bp, Cannabis indica
ttaattaattaattaattagtcaaaaatttattatttgaaaattataaaaataattagtcaactaatttaattattttagattacttttatttaaatcataaattatgttatatactgtattttattatttgttcattcattaattaaattaaaaatttgttaatttaaattataattagtggtaaattgctctaattaatttaaactttaattattagcaaaatttttatacacacatacaaatatatacatatacatgtacatgtatatatatgtacatatatacatatacatttacatatagatatataatcatacatagatatatcctattgttaaaaaaaacacaaatagatatacatacatatacacactcacacacatataaacaacaacaataaaaaaaaaaatcatatttttcacaattttcacaacattaaattgattataaatagtagcagataagctcaaaaaagggacgtaaaaatcttatacaggagaggccctaaaaaacacaatagaaaatctgaataagattgactcgtggactatatagaattttaactgcaaaaccaggtaaaaaaccctgtgttcatatattaggttttatttttctgtgtggaattactactgtgaggctcaaatt

SEQ ID NO: 353462 - DNA, 648 bp, Cannabis indica
atccatctcaaatatttctaatacttattgattttacataattttaaattctatattttaattttatgttatatttctttcctgttgcaggatcaagcataagcggcaatggccccttattcgccagcctacaagtctctaacggtatattactagcaacaccacgaccttttcttttgggcggtggtgctgcctcgcaagttgagggtaccctactaggatctggtggatcgcaaccatcaccgtctcccccatgagaagaagctatatcggttaacattatgactctttaaaagtaaagttatagggctaaattagtatgaatgtagattagcaaaaaaatataattagtttgaattacaattaacatcatcaaattcatcgcttataaaattattacaaaaaattaaaaatataagtaaactaatagtcactatcacactcatcattcttcagaaacaatatcgtcttcacatcgatcaattagcaacttgtacccttcatcagctattacatcatcaacgtaatcatccacagcgttttcatcaacctgattaacatttaaattttgtgtagtatcaattattttcgccactttaggaggttgcaaaattaactctcctagatccacagtcaaccgaaaatttg

SEQ ID NO: 353463 - DNA, 787 bp, Cannabis indica
ttatcaagaaagtccttgaatactctattcatgagatccataatgcggccgaagcatttatcaacccgaatgacataactaggaactcataatgaacgtacctagtacgaaaggctgtcttcggaatatcttcctcctggattctcaattgatgatatccatatctcaagttaatcttagagaataccgtcttgccctgaagttgatcgaacaaatcgttaattctaggcaaagggtatttgcttttaatggttaacttgttcaggtccaagtaatcaatacacatccaaagagttccacctttcttctttacaaatagaaccggagctccccaaggtgacacactaggtcgggtgaaccctagatccaacattccctgaagttgtatctttagttcttttagttcagcaggtgccattcgataaggtgcttttgaaacaggttctgccccaggtattaggtcaataataaaatctatcttctgctgaggtggtaaccttggtaattgctctggaaacacgtccaggaattccttaaccacttttacctcttcaggtccaagtaacacaggttcactacaatcaactacaaccgctaggaatcctacacacccactgcgtagtaaatccctagctttcaatgctgagattcttgggacacgagaaccttgaactgaaccaacggaaacaaatggttcctcattctccggttgaaaagttaccattttccgtttgtagtcaataatagcagagtacttggacaaaaagtccattccaagtataatatc

SEQ ID NO: 353464 - DNA, 503 bp, Cannabis indica
gatctataaaagcctcaagtacttgttcactcaaaaggatttaaatatgaggcaacgatgatggttaaaattggtcaaagattatgactgcgagaatctctaccaccctggtaaggaaaatgtggtagtggatggtctaagtcgaaaaggaccatgggaagtttgtgaactaaagaaaatttcagcaaagctggctgaggatatgactagagcgagaattgaatttgtaattggaaaacttgccaacattaccctgaaatctgatttattggaaagaattagagaagctcaacaaagtgatcttgagttacaggggcataaggagaagttagaggctggattggcaaaagacttttcatgtttatctgatgggttgctgcgatacaagaacagaatttgtgtaccggttgacaaagacatcagacaggagattcttgatgaatctcataccacaccgtactctttacacccgggaacaaccaagatgtatcatgatgtgaaag

SEQ ID NO: 353465 - DNA, 666 bp, Cannabis indica
caaaaatctgcgttaacagtaatttttcaatgtctgcgttgatttgaagttgtacttctggcctgtaattcctttaggtttgctttactggtttcgcttcttgtagtgtgcttaatttgtgagtgactagtttaggatctagcctaggcatatcttcttatgtccaagcaaacacattttgatatttatataatagctccatcaattcagctcgtatagctacaagtaagtcagtagaaatgaacacaggttttttctctttgggattatttgttaaattaatttcttccaatttgttagacatggattttggctcttcttgtagctcaagtgatattgacttgtcttccacatcctttaacagactatcaactcgtggatggggtagaacaaacttattctcaacttctttcgccatagcaatggtggggccaaacatgatagccgacctcgcataccgtcataaacgatatgttcttttctcattaggcaatgtgactttctaaaccttcttttctttgggcttggcaattgaaggattatttgttattgcatattcttccaattttggtaagcgcaccgcacgtggccttgtgactattttcatgttattttctaaaagctcgtcaaagaacattgcttccgccatgtgagcttcttctctag

SEQ ID NO: 353466 - DNA, 948 bp, Cannabis indica
agactataaattaccttagtaaacctgctgttgcatagaaattaacattaggaaaataatcatattaggccataatcaatagaaacaattgaaatcgaagccctagtttttaataacagtcaattttcttaaataattgcttcttactagttccttatttttaattctttcttaattttcattcaaccaaatagaagtaaaggtttaattttaacgtacttaactgcactccatgtgggatcgacctcactcctggtgagtttactacttgaaacgatacgtacacttgcgtgtgtaaaatatcgcaacagttagcccattttggtggaaaatagtgaattccaaagattaattgtcgtgtctatctattttttttttccatagttgtttagttaattactttaatgtctcatccatggttttgtggaaaataattttgttgatgatgaaattcttaattgtgtgatagttataattttaagaaaataatagattctcatgatttgagtgcttaactcatgattaattactactcaagcataatatctctttaaaaaaaaaaattgcacatcagttgaattgttatatttgctaatgtttagaaagatgaatacatgtttgacttttgatttaaagtctcaaccactgtaaaacttgtttgataatcatttgaggcaaaattaataaattacaaatgattttgtgatatgatataggtaattttttagatcgattgagcttttcaagcgtagcctatttgtgaatttcctagttttacccaattgagcctaaaattgttgaaatcttgttttcttttgaccctatacaataacctttgagccttaaaaaaataagaaaatccctttcatcttttttataccatagtatattgatgttttatgtatttgtaaatgtgtgagaattttgttgagggaaaaatattgatgg

SEQ ID NO: 353467 - DNA, 922 bp, Cannabis indica
aactcttctgaccacattaaaataccccactaaacaccataactcgccacatattgaactcaatccccgccaattcatcccaaaaatcagctctaatcttataagaacaaggcccatagacccctcaaaaccaccaaggctctttgccatcaacttgaatcaaagttgaaatcgaaaaatcaccatccatcgagtctaaaaccgtgatgcttctagtgtcccacactatcaaagtaccacccgagctccctatagttgggataagaatccaagctttgaaacgagacctccaaatactcccaataaagcttttgtccactgcttctctttttacttgtaaaataattaaatccggctcttcgttctccctatccccactgcccctaattatccacgtaagaatcttaattgtaatctttttttggaaccctggacttgttctgacttttataatagtttatgttaaaattcaaatttttaattctctgcttttatttttcacttccttttcattaccctcctccactacctctgcttcctcattagatactattgttattcccttgtttgtcaaagttgccactattatgccaagagaacttgctcgatttagattcctctttatcaactccattatttcttctatatatctttataggcagtttatgttgatgttctgcctcactaacacattcttttcctctttcttcatgccacaattcatcccctcgattcaccatgatgttatcctcatgccacaaaacttttatttcacatagaatatcttccatttgttcactaacttcttttctcttcgaccctttccaactcttccctctgataactttaattgcaatccttcttttttttccttttgtggtttcaatgattttttcacaaaatttgcccaagtttgtgaatc

SEQ ID NO: 353468 - DNA, 585 bp, Cannabis indica
atttacgtgaaccaataaaattgtgctatgtttacactgtgaacacgagtttagggagttttaccaccccaattttagaattggatgttagttgtaataaactaaatacttatggaagttatgccacaaattactcaaatatatataaattaggttctaattttttgatgtgaactggcatgtttggtttccaaaagatgccatctagtaatattcataaaatatctgatccaatttaatctgaacgatctaatccaatccaatctgcaaagtgcgaatatctgcacttgtgcggattgggttagattaaaaagttcaacatccatacttgtgcagattagatgttaattgatatgtaaaagtaactgatccacacatatttatatatatttaaaaaattatatattcaattagtattttaatgcaaaaaaaaataattaaaaatctattacatacgatataaatatatctcaagattaaagatttaatttatatttataataagaaaaatataattcaaaacaaaattaatcattttttttctatctacaatttttttcttcctttaaatttgttattttattt

SEQ ID NO: 353469 - DNA, 810 bp, Cannabis indica
taaaatatatagattaaaataaatgattaattaaaaatacattattttaaataataagctttaatcaaaaagatattcgatcttcattgttggtctgacaatggttaaatgttttcaatataacctcgagacgctagacttcgtcccccttatggatggttattcatttaaagaacttaacaccgtaaaatctcatatgataagtattttgtaagttttcgtttctattagactctcccctacggtgactacttagaaataaacttacagaatatgaaacaaagatggaagctcataaaatgagaataaccttgactctcgcctactgggacaacattagattcttattttgatcgaataaaaggttgctaaaatggtgtccattttagatgagctaactactttattcaactaaagttatctttgactcttgtctactgggacattgtattttattacgttagaaaccttagaacataataaatatgtttagtttttggtatttttacaaacatatttgttttacttgttatatctgaacttgtgtatgaattaattgaaccaatgatttattttgtttattgatatttgtagtgtcaaaatatactacccacaccccaattctcatctagaatatgcctttaggaatgaacttcaaaaaattgaagatgactcctggtcaaagtatcacttcacgcttgctcatgatgaacatgaaattctagaaagcagctatgctgggaatcattttatctggagagcaaagagtttattttgtctcaacagcttatcacttgagtttaaccattt

SEQ ID NO: 353470 - DNA, 850 bp, Cannabis indica
tacttagaaataggagtactatatatactttgaatagctgaaaaattgggactctttttcatttattaattgcagtagttgtgtgtgaaactatggctcttgtggaactaatacaaaatatgacataacaactaatccagtttgctattgtttattaggctttgagccaaagattaaagaaaattggaatgcaaggtgttggtaaaaaatggtgtgtaagaaagagttatttgagctgttgagatgatgcagagaagaaagatgggttcattaaattttttagcttaaaattgccttaatatactcaatatacttgggtgagtaagattataaatcttgagcgatgcaaggctaaatggttgagcacatgctcttgtaaaattaatacaaactcggatatcagtggagaaggcagagtggctgcttcgtctaatttagagatctgcttgatattcaaaaatttcaatcttgccgacaattgtgcattccctatcaagctattagtacaattactttcttgtaactcttttagtgtaaatatagcatgcttgagcacatgctatattttttgaacaatcatcaaaaccttatacattattttttaatatcataacattattattacttgtaatcagtttcactaacaatagtcatttaatttatagatcaaaatagtgaagacaccattttaatttaaatatatattcccattaacaatctacaaactaacaccattctcctaatttttaccactaataataaacagtctaatataaaaattagcatacatgtatcgcacgtaaaattctgctagtatatatatatatatactagaagaaaggtacgtgcg

SEQ ID NO: 353471 - DNA, 532 bp, Cannabis indica
gccaggcgcgagctccgggaggctagggaggccttagatgaaatggctgccaaggtgaagtccttagaggaattacaccaggcggacttggagtctagggaaaacttggccgtggagctgaaggagcttaaggattttaaagaccaagccttgaagaaggctaagaaagatgagctcctttctcccatctcttgcagccgatgcattaagcacttcgacgatggcgtttacatggcctggtcaacaaatggccagaatatcaagctcgacttctacctaaagcccgcggaggtgattactaaattccaggagaagaagaagaagcttgacgccatggtggaggcgcgcattggtcctcgccttcctccttgaattgactaggccgttatgaatacaacccagatttttcttatctcttttttttttatttacaaccaattctcgtttatttaagacaatctttgtttacagctgtttatttctaaggggaacaatgattaaggcctgtacccgggccctttgtatatattta

SEQ ID NO: 353472 - DNA, 842 bp, Cannabis indica
taaggcccaggcggctgccgggaagcccctttggattgggagcccggtggagaggagggcccccagaccaaggcctacggtccaggtgccgaatactgaggctcccgatgccagcacttctggttctggtaagtcccttttaacgatatattacgtccctcctgttcgtgaatatgctagccttaggcccatagggttcaacgaacgtctccttaggtttaggatgccctctactcggtggggggatcatgcaaaggagtattacttctctaacttaggtgtttacttaggccggtctcggatgggttctggacctccggtgcccgttcccttggatccttcgacctatctgtcttctagctggttccatccctcaaacagctatctcagggatgatgcagccagtgttacgattcgggactttgctagggccgaattagagagtcggggtagggctagcttgattgctttttaagtgttcactgctttcacagacattctaacactttactcttttatcttgttgtagcaactgaccccatggaggcgatcttggccacccttgctggagcccatagtcctgatgcttcccctcctcctacttcttcccagatggtcacccccgggaaagcttcttcaagcgcccctccgaacactattgacttagtggacgaggaggaggtacttcttgaggaagctgaagaaggtaaagaagagcaaggggctcttcctgaggaagttgaagaaagtgaagaagagcaagaggttgctcttgtgcgcaagcgcaaaggcaagatggtagctgaggagtcttctaaacgcccgcggagggtggacactcc

SEQ ID NO: 353473 - DNA, 647 bp, Cannabis indica
tatatagcaagagaagaatatatgtatgtacactcactcacaagcttgagtgtagattagtggggatcactatgacttttttttgctgaacggagatcactataacttgaacaatgtattacacttttgtccaaaagtttatttccccctatctctaagtattaagggacctctcatggaaatagcttcggaaattattaagtcttatgattttctaacaatgtgcttttttgatagaaaacttctcttctcaatatgagcaccttagacctctttatatagtgtttaggatccatttgaaatttaaactcataaccccatgaatgttataaataaatgtaactcatgcacacatcataactcctataatattaaaaaaatttaaattaggatgtgtaatacctttttacactcttaagattgatgataatagtgaaagttactcgtagtaataagtaaatcctctaaatattacaaaatcatgatacctaatatataatgtcatatatattgcatattagtttgttacacatatttaatttatatattatattatttataaataatagggtaaatactattttggaccctctgttttgcaaaagttaccaattagaccctgtgtttggttaaatgacaaaatggac

SEQ ID NO: 353474 - DNA, 757 bp, Cannabis indica
ccaggttgtgtttagccgcggccagatgtgcacaattactcagaagttgtgttttcttcggctcagcacatcttttaacgaatttctgcacccgagatctcttttattccaaagaacctgaaaacatagaaaacaagcgtaattccgtcccaacacagctaaaaacgcacataaattggatccaaaacataggctaaaaatagcctaacattcagacccagccgttggtggtcaagactccttcgacttggcagacttgggggtagagggttttgcagcagtcagctcctaagaaagataaatgacctctccagaaggtctcttttcctttgaagagggtccctcaacgcccttagacttcttggccggaggagagacgttagagcttccgcccatgtctgcacagaacaaaaacagtatggttagaaaacagccatcagaaaacacaaggcatgaaaatcaagaagctgaagaataagagaaagtaaaatgcaaggtgaccacccgcacaagactcagaagtccattatcacctgacatcgatcctatctcagacatgacagctttcccttttccgaaaaaggggggagatggacgaacagatgaaatgggctccctgggcgtggccaggagtttcttcttcctcttcagcggagttacctgctcgtcctcagcctcatcctcaggatttgaagactcctgagcatactatttggccctagcacctcctttctgttgggttttatgccctatataa

SEQ ID NO: 353475 - DNA, 562 bp, Cannabis indica
ttttttcttcttcttttttaacaaggggtggcacaccccaaacctagttgtaaatacatatatttctttttcaaggggtggcacaccccaagcttattaaatagcgtatatataactaaatataatcatgttcctccgctctcgggttgcccaaatgtgatataataaggccaaggcaacccgaagtcattcttcaagcttctttcaaagtaatggaggtctttgcttggttcacctcaccacctccaaacttcactccttagcttttcaccaagaattttcttcttgaaagtgcatcacgtagttccaccaccccatcaggatatactctcaccaccaagaaagatccatcacaccttgaatctagtcgtccatgagtagtcttcgttaaagagttagcaaaaatcacttgttgcccaacttcaaacatttgagaccaaatttttctactaaacttctttttctttctcttctttttgggtggttttttaggttcaaatgatgttttgtctttgctttctcgcggctcgtgatccttagcaatttctttaaggggaatctt

SEQ ID NO: 353476 - DNA, 401 bp, Cannabis indica
aagggcatatttgtcttttttatttttaattaataaaattaaaattaaaataaactaagcaaaggaaaggtattctatggggtagaaactttccctatattttcttccctcacctgtgttgttcattttccatttgaagtgtttattactggtgcaatgaaactcttgtatcaattattttaaaggcttttaattaacacatgatttcataatatcctactagaattcattttggaaaatttatatttaaacccctaaaatacatctcaattacacaaatgacatgactcttaaaattatcaaaattatcgttgtagttgtaccgttttcatattaattagtttttttttgttaataagttgtcagagtgacctcacagtacgaggtctagtgtgtttttt

SEQ ID NO: 353477 - DNA, 757 bp, Cannabis indica
agagactaatttttttttaatgatttactccgatttattaaaccaatcaaattaccactaggttacaacatatattaactttaaaagtattattatttattttattactaactatatttaaattttttttttgaaataggaccctgagcggtgggggggcctaaggcggccgcctccttcgtcttagctcagggctagccctggcaagtagttaaaaggaaaaaaaatctctaaagttagcattttgtaaactatttaaatatttgtgtattatatgtgatgataataatatactggaagagtaatttaattattaacatactatataataaaaattaagatgcttcaactgttcatacttcaaactatcacaaatttctagtatgatctaaactccaatcttaactaaattaatgaccaataattcgtttggtacatcatgatgtactgtattatattgaattgtattagtattatttaatatatatatatagtattatatttcacattaacttttatttatggattatgtagaattatactatatttaccataaacgcgactctaatcttgatcctaaacctggacccagatcccatctccagccccaggctactaaccctaacctagacccatccctagaccttggcctcgaacttttgcaccctggtccgggttggatccgaggtccaagttctgaggtttggggtccgggaccaattctagatctggggtccaggttagggttctggactag

SEQ ID NO: 353478 - DNA, 853 bp, Cannabis indica
gtgtggacaatatttgtatttttatgtgattttaattaccaaaatatctcttacactatcacttacataatcaaacgatagttgcagggtggttgctgcgtgattatgcgatagttacatcagacgaaggttttaatcatacgaaggttactgggtggttggccgaatgttgcatcagacgaaagtttcaatcagacgaagattacagggtggctggtcgaaggttgcattagacgaaataactgttagcaaaatgtttatgcaactgtaatgcaactgttatgaaacattaaaaattagaatagtttttccacgtacgtttctcttcctacatgtctcttcatgatttaatatgaacaaattcaccattagaaattttaaaaacgacgaaaatacaccaggataaatattttactatagtattgaagtaatttttttaggattataggtgagttgaattatttgggaactccggttcaatatattgagatctgcatttcatagtttgaaaattaaagtccagacattagttttatgcaaattaaattgaatttccggttaaattttagtttcgtagtagtttttctacacttattttttcatgaattcgaaacaactcctgttttaattaattctagtcatcttcttaggtgaaatcgccgaaattaatgttgattctctttctgattgaattttcgtttcagttgtgttaggttgctgcgtggttgcacgatagttgcttaggaagcatgtatgcttggttgaaggtgtgtgtaagtggtatttgtgtaaaaaaaaattatttggactgtatatttatttatttggcaaactgaaagtatttttgtaatat

SEQ ID NO: 353479 - DNA, 1074 bp, Cannabis indica
tcaacagcaagtgtctggtgtaatgcattgtaaagcatacatgagacctatcactgttgatcctaaggaattctttccttggcctttatcttttctggaatagttgaaactattccttagataaataaaatctatgtctaggagaccaaaagacttcctatagatagccattagaaaaatgcttccaacatcttactatgtaattcgcttgcactagagtaaataaattaccaggcataccacaagccacatgtttagataatcttaaacctattatactaagatcaagaagctatgttttagtccattgaatagacttattttcaaattgtctttcttgtcttagtaataaaaaacctttggttattccatatgaatgattttaaccatagttctattgactttacttcttagttctttattctgactatccattatttgtttaaactaataatggattttgtcaacggtgtcttccaagtcataataggatgagttccttgaaaccctcccactacgacaaggtaccgtgactttctgtctaagaatataaacggtattgacctcatcagttatgtcaagacaacagaggcagtaggaccatcttatatagaataagatgatagaacattattgaaatcaaaaaaatagtataccctctactttgctattttattttcaaatttaatcatattcttagaaaagtagtatttgttgaaacaaacactttcttatcttaatgaccataggatggtccacccctaatcactttagaatagctatcaaacatgcaaaccttagttaatagttctagcttttcttaaggtcacgatcaggacatccatgaatctagtaatggtgtacactaagtacataaccatttcatcattctaaaattttcctgtcactagggtattccctagaagacttaggcaactgctagtaactaatcataacctttcactttcatcaatatgcaatctgaatttctagggaggtaagtttgaatacaattcaaaattcaacttaatgatctttgaactgcatatccatcaaatatttctccacccctat

SEQ ID NO: 353480 - DNA, 831 bp, Cannabis indica
tatagaagctatagatttcattaacgctcacaatcattgcactaccgaattcctatgatgtaagtatgagctaatcctacgagtaagctgaaacaacaagtcaaagaacatgtatagtacaattaagctaaagcttaatcatctcagcattgatatcaattgacctaagataaactaaatgacattgacttagaaaagattatataacggtaagtttatcatatcttttccactgtcaatatcagtctagtctgatgtatagccaatacatctgatagaagtttactttgctaatgcactggaaaagatattccacttatctaaatgtaagcaaaccacatcgctgattatcacatctgcataaatccaaagcactgataaattgtgggagtaaatagtttgatgtatataatcatgattattttacattgtacaagcaccactataaatatgagtaactatatatttgagatttaataacatttatatattaaacgtataatcataaaaataacatgcgaactaaaaaatataaaataatttttaaaattttattatttaataaattaaaattatattgaatgaaattttgtttagaagataccactagaaggacttctccaataatacactaaaatcctaagaatagtggagtttggacataaaattgttccaatggcacactaaatgctatcctatatatgtgggagtctatagtgtcccactatttttagtgggacactatagactacaccaattttttttttaacattaaaataatgtttatgactaaatttttatatttatatacatattatagtgtgagataat

SEQ ID NO: 353481 - DNA, 428 bp, Cannabis indica
aaataaaaataaaacatatatttccaatcttcagctgaaccaattggtacttatacctatgaacagataaacaatgataaaacatgtacatattattgaaactcaagagaaattatatatggtaagtactataagtattttataaaatgaaccttaagtactatgatgactcatgatccatgatacatatacgtatatgggttattaggtatatatcctagagtttcattacttaagaaattgattatgaacttaaagttaaaattagatagaataaaagaaaataaatttgatctacactgaatagggataaatttactgttctacccttaaatgtaatttatccttaaaacaattagctacctacatatgatacttcagtaaactaatataattaatgaaatgaggcatcaatcatttatctctat

SEQ ID NO: 353482 - DNA, 503 bp, Cannabis indica
aaatgaaccttaagtactatgatcactcatgatccatgatacataatacgtatatgggttattaggtatatatcctagagtttcattatttaagaaattgattatgaacaagttaaaattagatagaataaaagaaaataaatttgatctacactgaatagggataaatttactgttctacccttaaatgtattttatccttaaaacaattagctatctacatatgatacttcagtaaactaatataattaatgaaatgaggcatcaatcatttatctctattcagtcaagctcgaaggaaatcattgtttcacttctaaatacttatagaagctatagattccacatctatgatcagcactcccactaaattgaactaccatgttcccaagatgtaaatatccaccaaaaccatttgttggcttccacgaacaacttgaagaacataaataatacaactaagattgaacctaaccatactaggattgagatccatagaccta

SEQ ID NO: 353483 - DNA, 499 bp, Cannabis indica
aggacttctccaatgatacactaaaatcctaagaatagtggagtttggacataaaattgttcaaatgtaacactaaatgctatcctatatatgtgggagtctatagtgttccactatttttagtgggacactacagactataccaatttttttttaaacattaaaataatatgtttatgactaaatttttatatttatatacatattatagtgtgagataatttcataaaataatataataataaagaatatattttttagtgtaatttttagttgtagttggaattgaaaaaaaatttagcgttgaaatagtatttttttagtgatgatttaatactaaatttgagtttccctattagagaggatggggaataagagggatagagaggattattaatctcttttgtattatttagtattaggtgtgagataggaaggagggagaaaaattgatcagtaaaattacaaaattgtccttttaaaaacaaaattttattat

SEQ ID NO: 353484 - DNA, 600 bp, Cannabis indica
tggatcgatctcgatctcttttagctcttctattggtccaacattgctgcttggatccccaagtcgaggatccacatcttcatcccctccttgggaagttccctactggggaatgttttttcctttgtctgtgctgtggctggaggatacttccttcttagccttggccactgcaaggttgtaacattcctgagcagactgctggtttcctcctagatacccaaccccattctttgttggaaacttcaggcacgagtgaaatattgatgtgacagcttttaagtcatacaaagccggtcggcatagcattacgttaaaagttgaaggaacatccagtatcaggaactgtgccatgacagtcatgctcgtcggagcttgtccaacaatgaagggtagacgaatttgtcctagaggtgcgactccttgaccggagaaacaatagacaggcttaaggcacgcggttagatccttgagttggagtcccatcttttaagcagttttgaacaagatattagaagaggctccattatcgatcatggttctggccaccattttattggctatctggacttccacgaccagcgggttgttgtgcggaaa

SEQ ID NO: 353485 - DNA, 544 bp, Cannabis indica
aaaaaaaagaaaaagaaaagaaccaaagaaagtaattgttttaaaattttaatctttggcgaatattaattttgcaaaaaaaaaaaaaactaaactcactattacaaaattaacaattatcaacacttattcaacaaccctttattcacaattgaaaacaagtagtaccaaataattctcaattattatgaattgagatttgaataatacacttgaaaataagtagtactattattatgctctatcatttctaataattatcatgttagtacatacataaattgataatacaagtctttttttagtgaatgatacataattaatggctgtgaagtgacgaaatcatatactatagtcacagagcattattattaaacaccaataatacttagtactttttataagtggcgttatacgattcgttagggttattttcttaagttatacggactcaatacttaattacactaataacagtatgatacctactaagtaccgataatatttaggaaatttacatagtatactaacttttgttattttt

SEQ ID NO: 353486 - DNA, 947 bp, Cannabis indica
attttttaactgacgtaaaataaaaaagtaagtatttagcgtcggttaataaatgtcgaaaattattttttgcgtcgttttaaaaatgacgctaataaaaaactatttgcgactacggtatatacgtcgattttataaaccgacgtaaattctttaagtgacacttaaaaaccgacgtgaattgtactttttgtagtagtgatcatacaattgcatcacctaattaggtgagcccgtgccataacttggcaccaatatatcgcatcgcctaatcagacgagcccgtacctacaccaggtacttatcatatgtcactgacgtccgtatctacacgtcgccaggaggaaaccctacaacggtttcattttatgccataacctgacaattttcatatcagtaacgccgtatctacacgtcgccaggagtaatcgcctaatcaaacgaactcgtacctacacccggtacttatcatatgtcactgatgcccatatctacatgtccctaggaggaaaccctacaacggtttcattctatgccattacctggtgatttttcatatcactaacgtcgtatctacacgtcgccaggagtaatcgcatcaccttatcaggtgagcccgtacctacgctcggtactcattatatatcactgacacccgtacttacgcccagtacgtcccaagaaaaatcgcatcacctaatcaggtgagcctgtacctacgctcagtactcattatatatcattgatgcccatacttacgcccagtacgttgccaggaaaattgcattacctaatcaggtgagcccgtacttcacatgcataatatcatcacattatcgatactcaaccaatcaatcttttaattacataacaccattaattatatctcaatattaatcaattcataacaataataattataatacatacaacgtactatgcagtac

SEQ ID NO: 353487 - DNA, 621 bp, Cannabis indica
aatttattatttaataattaattaaaatattataattatggtgaaatttaattactaaatatttcagttactcgatttaattttcagaattaattgtcaaaatattctgacaattaatgtggcagagactttgatgaaaagtctcacttatataaatatagggtctcggtccctgagctcactattcatttagtgaagcacagtaaatacatctaaagaaagtagagagagcttgaaagtctgaatactcacactaactaagtttaattttcttttgtgaatccaaaacttgtgtgagattaaagctaaaaaaaaaatcaatagctagaggtttgaatccttagttcatagttcatatttcatatatgtttgattaatttcacactttatatatgatcattgttatagtgcgaattttttacctaaaaatatgagcccaatctcgtgaaaagttaccacgtggagtcagtcttcgcgggaaaagataatttgtcgcaagtatccactactatgttgttaactgtagaaagaagaagtatggacacagaaactagtgcgatcagaaagaatgattagttcaccttgcttgatgtgaacttgcgagaagatgcgaccgagaca

SEQ ID NO: 353488 - DNA, 830 bp, Cannabis indica
taccacaagccataggtttagataatctcaaagctatggtactaggatcaggaagttttgttaagtccattaaatatacttattatcaaaatttcccttcttgtccttgtaatagaaaacttttggttgctccatgtgaatggtttcaaccatagttcttttggctttatttcttagttccttattttgactatccattgcttgtttaaactaacaatgaatatttatcacaattgtcttctaagtcataacagggcgagttccttgaatctctcccactataacattgtactgtgactttctatctaggaacattagtggtattgacctcatcaagtgtgtcaatacagcagaggcagtgggaccatcttatatagaataagatgacagaacactttggagttgaaccaaaaaatatctcctctgctttgctactttgtttttgttgacaaaaacacattttttttatcttaatgatcataggatggtccacccccaatcactttagaatagctatcaaacatgcgaaccatagttaatagttctaacttttcttaaattcatgatcagggcatccctaaaatctagtaatgctgtacactaagtgtatgaccattgcaattaattgaggttttcttgggatcagacttagatgggatgacatataatgtcatttgctatctctaaggcatttccttagaaggacttaggtaggtgctcgtaactaatcatagaccttacattttcatcaatatgtaacttcgaagtttttaggaggtaagtttagatacaattcaaagttcaacttaatgatctttaaactgcataat

SEQ ID NO: 353489 - DNA, 711 bp, Cannabis indica
ttatattcaaatgagttttatttagggaataaaacccaacaaaatgatcaaaacaacagtatggctttttccattcaaggagagaaaaacaacacaaaagggaacaagactcagcaacaataaagaaataggcccttttatacccattgtaacatcttgggtcacaccattgaaaagtgttacaaaatacatggataccctcctggatacaatcagaacaagggaaaagatgtagctgtaaaccaagtgcaagccaatcctgaagcaagcaatactggtggagacagtcaagttattcttcctcaactcacctttgcacagtatcaacaacttccaaatttactggttctgcaacaaaccaacactgctgctgcagatcttggcacatccacaggtaacacttgtattatgttttccattgtgaccaaactcccccttgataaaacttggatactagattcgggagtcacaaggcatatattaatgggttgttactacccaataataaatatatgcttgttgataaaggtggtttagttaaactctcatctaatttgattctaaatgatgtgttgtatatgcctagcttcaaatacaacattgtgtctgtaaatttcctaactaaagacaactctctttatgtgaaattcgatactaatcattttgttatacaggacaatgtgcacaagaggatgattggcaaaggtgaat

SEQ ID NO: 353490 - DNA, 490 bp, Cannabis indica
taatgtatttataataataataaaaaaaattcttataaaaaaatgggtctttacaaatagggggccttctgcaatggtcaaagctgcccaaagcttgggccggccctggtctaacccaaattctcactcctacatttaatatctaatctgatttaattggatattcgaaataatatttaatctgatgatcacaaagttgtaattggatttgattaatttatacatacccacattttataattagagacttacacaaatttttaaaattttttcaaataatttacaatatcaaaggcaaagttaagcaatttattaatttagagtattggagtcaaaatttaactagcttataacactcgtatatcaattggcctttcctagacatgaataatgatttaattcttcttaaaaaatataaaatggagagtttataatgtggagacatgcattttgctttcattagtaatttatttttttaaatttttgtata

SEQ ID NO: 353491 - DNA, 502 bp, Cannabis indica
ggcacaaaacccaacaattaagtagtaatgataaggattatgatcctgctaacttaatttagcataaattataaattttgctataagtaaataaataagcgtaattaattaattacagagatttaattagaatgtgtggatataatgtatgttatttgtgaaataaaaatattttcagttttggcgatgtcgaagacccgataagtggataaataagcttaatttattaattatggagatttaattgaaatatgtggatataatataagttattcgtaaaattaaaatactttcaggttcggggacctcagagactcgattggaagccaaaatgtcacaacaattttagttagtaatattaatgggattattgagataagtcaattttaaaaaggataattaggatttttacccactaaactttgacatgtaccaaatcacgccccctgaacttttaaggttgttaaaaatttcccctgaactattgagactgttggattta

SEQ ID NO: 353492 - DNA, 835 bp, Cannabis indica
gatgttaatgaaacatacttgttagtaaatctaggtcctggtaaaataattccaacaatatcgtgggtcagacccaggatgtcagtgtaatgacctgggaagagtttaaaaatctatttgaagaaattttttatagcattgctctgagaacttcacacacggaggactttgctcagggaaagatgttagtgaccgaatacaccctggagtttgattagctgtctaagtttgctggtgatcaatttcccacagatttcaccaggaaacataaatatgtgaagggactaaatgccacgatcattcgggacttgaaagttaccactactcatgacactttgtataagaaagtggtacagctagccttgattgctgaggaggctgagcaacatgtagcaaaagagcagattgtaaaggatgtcgtcacggtatcgaatccgcctgctagtggtaatattagtaaggggaccgacagtggcaaccctgatcacaaacggaaggctgactctttcggagcatcagggggtaatagaaagcttcgaggaaattgaggtggtcatcaaggtcacgaatctagaatattcaaatgcaagaacactatcagggtgaatgacgggccaaggctgcatactgtatatttgatatggattatatgaatcagatgtttcaggattacatgaacagatgtgtgatcgtgtttatagatgacatcttggtgtattttgaatcaaaagaagaacatgagttgcatctcaaagcagttttgtaacgattacgggatcacaagttgtatgctaaattcaagatgtgtgaattttggttatctcgtgtttccttt

SEQ ID NO: 353493 - DNA, 789 bp, Cannabis indica
gagatttttctgacctagaaacttgagatcaaactcctattaaaaaagacacgtgtgttcactttcctcgaggagagctgagatgtcgatgagagacccctcgagtatgaacctcgcctgaaccaggctcagcgagatgatgtgaatatgacagtctaatcgcattcgtatgactcgcattatgtaggaccaaggaacaactttaaactcacatatatcaggatatatgcgagtatccccgcgatcctcatgcaaaaacataaagatcgattctctatgttgcgagctggtcccgttgacccaacaaccttgattgtaacactcgtatttgaaatttactaggcttgaaagctaattttaatatattataattaattaactataaaggccgagattccgagttataaaacacattaaaaattatatttgttaatagaaattcccttgaacatttttcttttaaacaaatgataggcaacacaaaatacaactcaaaatattgaaagaccgaaaccctccaggttgcactaccgcgatatatacaatcactgccgagctccatctcactgttcctccaacttagcttttcctttacctacacaaggtagcaaaatgataagtcaacagactcagtaagatatgcataacatatatataagcaatgctataccggctttatgcttaagccgccctgagctcatcaattgagcccaccaaatggttaagaacgttcttaagggaagtacgaccactgtaccaaattcactaaagtaccaaccctgtactcgt

SEQ ID NO: 353494 - DNA, 650 bp, Cannabis indica
ttttttaaaattgattttgaatttacgtgtgtagttttgtctacttttatatttttttagttttatggccaatttttgaaaagctaaaagctatttcttgaaaaaactgcgacaaaaaagtgtttgttaagcagttaaaaaataacttattgaagaatttataaaaaaagttacagataaataagctggtacaacattattagactataataaattattttttactaaaaatttatataaaaaaaaaaaataaaaattttttttcttcaaaaaaatatttaaaataaataatatataaatttctaattttttattttgttttaaaaatattttagatttatatttatatttttattattaacaaattttttataaactaattttttttttactaattgataaaaatataatttaataatattaaaaattatttttatcaaatgtatataaatttatactataaaaaaaattaaaaataatataaaaaatcaaaaaattttaatgtaacatattttacatatatatttgtgattttaatgaaacacattaaaaatattattattattattattattattattattattataatagaaacataataacttgcagtactttaaaaatttataatttatcaaatactcagctta

SEQ ID NO: 353495 - DNA, 550 bp, Cannabis indica
acttggccaggaaggatgctgaacaagccagagcgaaagtcggagctgttcggttggagttgggtgaagccaacaagaagttgtttgccgctcagaagaagatcactgagctgactaaggatctcgaggttgctgaccgttttgatgagaccatcgagaccttatctgctgaggtaaacagtcttcaggatgagaggacttcccttcgggcagttcttcatgggatgaaggaggaaaaggaagccaaggaggagctttcggctgaggtggccaggttgaaggagaaggtcaatgccttggagatagccggtcttgagctcttctttgatttttggaaggctaatcctcaagccaattttgactacttgggtgatgctaagggcatgtaccttgatttctacgcgtcccaagtggcctatggcaaaactgaggcggctgcttcaacctcaagtcaaactgttgatgtacctcctattcaagcaacagatcctcctgctccgattggcccaaaagaaccgaaccaagagcctaggactccagctgcttaaac

SEQ ID NO: 353496 - DNA, 1004 bp, Cannabis indica
agggcacaaaacccaacaacttgctaagcacatatcaagaagtgtgcgattccgtctttcagcaattccattctgctgggatgtacctggcattgtatatcttgcatcaatgccacaatcctgcaagtatttggaaaacggcctgaggttccttcaagtttcatcataacgcccatcatactctccacctctatcataattgacagcttcaatcttctttcccttttggagcccaacattcatcttgaaaatcttaaaggcatctaaagattcagaattctcacaaatgagctcaatatgaccatactgagaaaattcatcaatgaaggtgataaaatatttatacccgcccatagcaggtgaaacaaaaggcccacaaatgtcagtgtgaataagctccaatacatctgtgcacctgtctgacttactctttctaaccttagcagctaactttccttttatacaatcaacacaggcagtgaaattagagaaattgagatcctggagtacaccatctttcaccaatctctccattctatatctaaaaatggccctaacgtttatgccaaagcatggaagatatcaaatctaatcttgcacgtttggaaccaacaatagcattaagagaagaagaagaagaagaacaaaggcaagagggagaagtaacaaaaacaacatcatataaatcaagcttatataaattttcacataaactttcatattaccaaccaacatagagtcacgatacaaaatcagatttccagttccaaaagaagactataacctagtctatccaaaatagatacagaaatcaagttcctccgaatacagggccagtaagcaacatcttacaattccaaaaaatgtcctgtatttaactgtagtctaatagttctaaaaaactctattttgactttagtatcgtcttccatgtactcttccgaactatttggccttcttcgatttgtcactgcctttcttctctaagtggacttttggtcact

SEQ ID NO: 353497 - DNA, 583 bp, Cannabis indica
caaatgacatgggtgaagaagaaccttagtgattattgtaattttttttttattttctcttaataattattgaaagattatttcaacttttttattcaaaaaaatttattatgatcctttgctattattcattacttcgtttttcctacatcaaataaattaggttatatataacatttcaaattttattatatatatttgaaataaatacaaatctatatattatatatatatataaataaaggaaagcataaaagtattgatgtggcatcttttccttccatttctctattttctctattttgttatgttttctaatttttttctattgaataataagaaaaaataaatgtaacctcccaaaataatgtaacctaacctccccattattaattttttattaatctattagtattcttttaaactattagtattctcatctatatatatatatagatattttattacaccaaaaaatatgatatatgtatagtaattttgtaaacctatataattaattaatctttaacaattcaaaatatatgcatacatatttatattgcaaaaaagtaatatacatata

SEQ ID NO: 353498 - DNA, 666 bp, Cannabis indica
tttctgaagagctatatttttttaacaaattgagtgtctgttttcacatgtggtaattttcacaattttttttctctaagtcgttttttttggtacgtattgcctatctcgagttgggctgttgtttttttttcttttgttaatgggcttgggcttcattctatataatgatcagggcagtttggtctttttccataaatggtaataaatatctgtttttaccatcatttgctttcaccaaacttgtcaactcaaactattcatcttcttaagctcagttcaacttctctgtggattttactgtttctggggtgtcttggctgtgcaacaatgggcaaaaaggcagggcgtctcgtgaaaacgtctgcgttaactggcgatggctcgtcgtctctctcaccaccggtgcaaccacactcgtctcccactaggtcagaatcgcctccatgcacaccaatcccaggtaagccttcttcctctgtaagtcttccgagaaggtttactaggtcaatgtccattccctttgcctcgactaaggctccccctcatccaccacttcccccatcctcccactgagtctgactcgtctccgccccctctgccaaagtctcacccaaaaaggaaacatgtttcctctgatgcaactccttcgtcagtgcctaagaa

SEQ ID NO: 353499 - DNA, 686 bp, Cannabis indica
tctatcttattcaaatatttctgggtacagaattagggttttacaattagtagacttcatttttctcaaagatttttcatcccctttatctgtataatatgcccttatttatagtcagatatgtaggcagttaattacatttaaattcaaatcccataacaatattccccaaaattgtgggctataattacgttctacttaaatacgtgtagataacgttagaaaatcacacagctgtgacttaaactatctttaaggcggtcaatgctaacaggaatggtaactcccttccaaaggtatctcgctggaggtatctcaccttgtacatagatgacttggtttattcatatatcttccagcaatggcatgagcaccagtgtactaagcaaacttaagaactgctctttgaccataaggccttacagattggacaatcatgttctctaagttctcaagctattacacttagttattataacgtatattatatgctaagtattttaataaccaattcacctcgtcaatacttctttacatgcaacgaggtagatgcctcgttatgcgttgtccatgtctcccttgggattatgccttccgagacaagatagtttctcgtctatacatgaattaatagtttgtatattcttatctcgcttaatactatacagtcagcgagttaagaatat

SEQ ID NO: 353500 - DNA, 985 bp, Cannabis indica
atttcatgctttgcctcaaaacctattaggtaaaataataaagatcttgtgaacaaataggggtagagaatatatggatatgcagttcaaagatcatttaattgaacttggaattgaatcccaatacactgccccaagcactccacaacaaaatggagttgcagaaagaagaaatcgcactcttttggaaatggttaggtctatgctgagttattcaactctgtctacgtccttctggggatatgctattcagatggcaaatgatattttaaatgtcgttccatctaattagttcccaagatacctgtagaattatggaatggccatatacctagtttacgctattacagaatctggggtgccaaactcatatcttacgaaagaaagaaggcaagctagaaacacaaactaaggtttgcatgtttctagtcaattctaaagagactaggggtggaatattctatagtcacaaggataataaagtgtttgtttctacaaatgcaacattccttgagaatgactacattaaaaacttcaagccacaaaacaaagtagtattggaagagatgctttcagaattaactccaaccaatgttccatagtcttctactcaaatagaggatgatcatactccctcggttgaaccaatgcaaattgacacaattgaggaaactatcattaatgttcctattcagaagatcacagttccttgttgtagtgggaaggtttctacataacaattatggcttggatggtgaaatcagtatggttgctgatgacgacccattaacctataaacaggcaatcgaaagtcctgaacaaaaacaatggtcagcctacatggattcaaaaatggatttcatgaagaaaaaaaatatgggaatatgtagatgcacctgatgattacatccaatcagatacaaatgggtctacaagaagaaaagaggtgttgctagacaagtcgaaacttttaaagctagacttg

SEQ ID NO: 353501 - DNA, 762 bp, Cannabis indica
caatgcacccccttaaaagggaagtattgatgcacctttaacttatttcggcatccagaaaaaaattttagtctaatttttttttcatattcatgtacattatagctatttaagatatcctacaaaattttgaaaaattcggaataatttacaatatagaaaacaatgttcaaacagtctattttacacgcgtataaaataaaatagtcacgcgtgcaatacactgtttgaacataattttcggcatgttaaatttttccaaatttcttaaaattttgcaggatgtcttaaataactataacgtacatgaccatgagaaaaaatttaactaaaaaattatttcggatgctaaaacagataggggtgcatcgatatatccattttaaggggtgcattgtagaattttcctataaattatacttcgttcgaaataatttaaaatttagaaatcaatatttaaaccatttatttcacactcagtataaaataaaaaaaatcaacacgtgtaataatttttttaaaatttttttttcgtaacgtgttaaatttaaaattttgtaaaatgtactgaataactataaagtatacaaccataaaataatttagagtaattttttttctaaaattaccaaaacagatttagaatacatcaatatacatatttgaaagggctattttcaaaaatatgggaaaaattattaaggttatgataaatatggcataaaaagtaaatagccactaaatatggcattatctaaccaa

SEQ ID NO: 353502 - DNA, 739 bp, Cannabis indica
actctagatattgatctctggggagaaaggggatccacgtgatcggtccaactcaaggtcattgttcttctaaccggccaggccttggaacatattttttagttcatccaattgtgcttacacagctggattaacttgtttagcctcttggccgaccaaagtcatatcaacatatctttgagcgagattttgagcacgagccccaggctgaacgactggcgcgtcatgctgctcgtctagccctctgcttttgtttagatcatctttgagatcatgagtcgttcccaatcgattaaatatagaaacacccagctgtctcagtgactagttggtttggccaatcaactggctagaaccattaacttgggtggagttattaggtatgacttctcctaacgaattgttagacaagatctgcccgcctaccacttggcccacaggcaaaacatgtgaccggggattggacggcgtacctttcagagtttgagaagtgttcacggctggatcttcatctgtctcgcccaagggaatgatagttgcaggctgttgactggtagcctgataggcttttcgtatcagcatggtggcctgtcttgttctgtcgtcaatggctgcttgctaagccctcaacatttccatctctttatccctcctgatcatgatgtagggtgttggtatgacattgcatgattctaagagtagcacggagattttggatctcggtgtcatctccaatggt

SEQ ID NO: 353503 - DNA, 544 bp, Cannabis indica
aacaaatgaaaaatctcatagcgcatttatatcgtggaacatatagaacattctatataattgagagtgcaattctaaatctatattggtgcaaggagaaattaataagttagagaatttacttggtaaattctaaattagcttattggaagctcggtggcaatgattggtaaatttactaaaaatgtagtttttatgtattgaaatacatgagtgacatcgttgcagatacaaaccctaactgttatttaaacgttcaaaaagatgtaagttttcattatcaattatcttatttatattatattaataaacaataatatatactaatataaatatttacttcttttttacagtttgagaaaaaaaaaagcatacgatgtaaaaactgaattgttaccgttacagcgagagtggatagaacaattgctgacagtaattcacgaaggcttggacgattgatgttgaactgtataaaaaaatttcttccctagcttattttttaggttaacttgtaattttcatatgtttaattaaatatattaac

SEQ ID NO: 353504 - DNA, 515 bp, Cannabis indica
gatacctcaatcatagtgaggaagatcgtgaagaaagactttcagcaagaaggagtttcagcatcaaagattcagagaaagagatccaggttcagatattgataatgctctgctacagaaaggaatcaagggctagatatctgaacggaaggagtcatattattccgctgcacccaatgtaaggtttcctaaactttatatgtgtttatttcatcgttttagaaagttcatatttagggtgttaataaacatacttgtgagtagatctaagatcctggtaaaataaattccaacaaatatggaagatctaatggatgagaatagaaagaaaatagaaaaaatagaccattaatgctattgatgtgcctcgaaaccgcaaaactgccaatatcagaggacgtgcattttttcaaaagaaattgtgacaaaaataccctccgtattcattaaaaagcactttttattaaaaagaaatttttaaggggcaattgttatacccaaaattcggctagcac

SEQ ID NO: 353505 - DNA, 532 bp, Cannabis indica
acccaaaattcggctagcacatccgaggaggacacgtgttagactggggagaatacgaatcaacacacgtaatagtaatcatatttgaaatggaataactcattaaaggcaaaattgacagagtatatttataactcggttgactaaatggtcctaggctagataaaaatatacaaagtgttaatttgtgcattaacgagaaaccatgcaacttcaagtgtacaaggcgaggcatcaacctcgctacgcataagaagacgagaattacgttatcaacctcgaaaagatgtgggaaaagctccagctcgctaccagggttgttgttgccatgttcctagcgagacgtcctaaacgatacgattgcaacgtatttaatacacgttcaccttgacccagtaaaagcaggccaatcacagttatgtgatttttaaatattaaccgcattcattttatgtgagatgtaatcgaatctcccgttttcaggggataattactgtaaagaaatcagtcaactctgtaattaactgcctga

SEQ ID NO: 353506 - DNA, 520 bp, Cannabis indica
tgagttatcttttcttttagtaagatatttcctaatactaaaatagaatcttaattctaaaggaatttatctatcttttcaagcactataaatagaatcctaattctaaggggattgatctatcttttcaagctataaatagggcatcttaggctacgaatttattaattcaaaagctacaaattagagagagagcaaggaagagacggagattgcgactttgaagtgttcttcattctagttcttttcttctctttctactattactaattattatgatttttgttataatgactagttctgagtagttttcttttagttaaggattatttcaaaactcgagacatgaattcttaattttattattgaatgctaatttctagtttccatcatatatcaaattacttctattcttctatgttcaatgtcagggttattgctttaatcttgtttagatgaccactaaattaggttttactttaatctactaatgaagaatagaacctaggtcaaatgaatt

SEQ ID NO: 353507 - DNA, 789 bp, Cannabis indica
aaataatttccaacaggttgttcattccttagtgcatagtctaaatccttacatcccagaactataagtgagttccttttccaatccttgaaattggtcccattcaacataggaatagaattaatattagcagatattaaggcaactgaagatgaactagctaaatgtagaacaaataaaacaagctcacatcaatatgcatgataaaataataaattcaaaaattggttattcccatctcaagattcaaaacacacataaatatcaagtctttggacaataatattaactgtaagcggtactcttggtgtagcaatcaaatattgacaatcaaactttgccaaacaataggttaatctttggactaacatattgctcacataaaataccttataattgtcacatatttattgacacatgtatatttgaaatttagcaaaatatttacttaccttcggattagtcaatatatgcatcaattacaaacacacaaccatccaaaaatatttaaataaattaatctacacaaaagaggtcacattggcgacataatgtttcaacaactaatttactctaaatattacgcattaaaccaagactaaaatttgaattaaattgtttgaaccaaaatatatatatcaaactatacagtaatatattatattacaccgtactgaaatatattatataataggctaattaggatttttgtcccctgaattttgacatgtaccaaatcatgccccctgaacttttaaggcatttgaaaatgccccctgaactattgag

SEQ ID NO: 353508 - DNA, 601 bp, Cannabis indica
ctacttttaaaggtgaaaccttttggtgacacgtgctctctacttttaaaggttaaaccttggggcaacgcgtgtccacaacgtacaatggctcccaattgtctagttgcagcatgcacgagcacaattatttccagagggtcctaatagtcagctctctcttgcatgtaattcaccccattagtgggcttttagtagaaaccctacgcgggtcatgggcatgtccatactcgcccttagcctataaatacttttctatttctatatgaaagggagatcacaaccaaaataatcgaagctctgccaatattgttttaagtcttcatcttctttaagagaaactaagaacacccggttagggtttcgtgtaaaaatattataaacacatcaaacacgcccttaagaggctaatagactgactagtggactaagtttaattaacacctaaaccacgtaaaaatcttcatctagttagtttgtgtattttattatttctttagttttcaaatatttattttttgaaaatctcagtaaaaaggtccaattatatagttcgttatttaataaaactacctactctgttattgttgaccgaggtttt

SEQ ID NO: 353509 - DNA, 593 bp, Cannabis indica
aatattttcttattaatataggagttaatccattacttttaaatcagtattttgtaatataaataaaaggatcatttataagctttatcttcctacgagggtcaaagtgtgacctttgaccacccaagttatggatattacatatctgccacagcctagggctcgggtcatgacaccatcgaccatacttcttaaactccgacaggtgattatgggttaaatctgggacaacatttaatctcgactgcttgttaccgaataatatactaagtttcaatcatactaaagccaccaaagggttgtgatcatcaattcaaaagtctcacgagatagcctgtcaaagagaaataatagaattttctgtattggtccatgtacacatcgacggagcactaaccacacccccaaccaatgccacatttgaatcaaaccaaagcaagaaaaaaaagcatgataattaggagtttcaggttcttctgatccgcatcgtgaacaacaaagaagtacctaaaatttatgggagataagttgtgttgctactggtaatgccaaatagaacatacgccaaacaaaaacttttacctttggtggca

SEQ ID NO: 353510 - DNA, 1199 bp, Cannabis indica
gtggctatctaatggaattcttggtttaacgatattttttagtttctacgttaattttaacagaatatatatcctattacttaaacataatattttttttattaattttatattattattatgacatatatttaaaaataaaaattatataaatattttatacaaaaaaatttaattttaatttaaaatataaatattattgatattttaaaatcatatttttaaatttattagtttaattttaagttaaaataatagaaaaattatatatgttgatattttatataaaaaaatttaaatttaaaatattataaatattttcaaccatattttaaactttattattatttattttatattttaaattaaaatagttgtaataaggaattgattgctttcttttttagttatggtaaatcgattcatacaccatatttttcataaagtttgggaataaaaaacttttatattaaatttacgtatccaacctatatatagacaccctcaaatttagttatgtgagttttgggtaagaatataataaattacaatatatgcactatacgttatccaattaaaaaaaattaaaaatttaaaaaatacgtacatatataatcacattcaaatgacacaccaatgtagcaatagctaaaaaaatttcttaaagatcaaaatctcaaacgttcatttcaaaaattaaaaaaaaaaatacaatacataattaaaaataataaagcatgcatgtattgcactaattaacatcacctaattgaacttaattaaaaaaaaattaattagacgtgcattatatatacataacatcaacctagtatatatatatatataaataattaacctgaagtgaccgttaaaagtaaaaataaatataataaataaaatgaggatagccaaattattgttagagattttattacaatggaagataaatcaagatatgtacaactcaattataaaataatacaaggatcaacaaagagattaaattaatgttacaatacataatatacaatatatatatacactatatatattatctataagaaaggtagaagaagataagaacaacacatgtaatataatatatatatatatatatatagcaagagaagaatatatatatactaacttacaactttgagtgtagattagtggagatcaccatgacttgaacaaggtat

SEQ ID NO: 353511 - DNA, 550 bp, Cannabis indica
tagagaattcatatttaggatgtgaatgagacatacttgttagtaaatctagatcctggtaaaatattcccaacaagggcaagtggcatacaggttggctatgtccccagcgctagcatctgtacataatgtgttacatatctcaatgctttggaagtatgtgtcaaactcatctcatattttgagttatatgctttggatctttagctagatcttttctgtatgatgaacaaccagtagagatactcgaaagaagagagaaagttttgaggaacaagacacttgtgttagtaaaagtgttatggagaaatagcaaggctgaagaggaaacctatgatttagaatctgataagaggtagaaatatcctgagtttttcaagtaaattttgggataaaatttctataaggatgggaattgtaatagcttaagattagtaaatagattagcaaccataattaaattaattaagtataaatgagtaattatattattatataattaattatgtgaaattattgggaatatatgaatttaagaccccatttgtga

SEQ ID NO: 353512 - DNA, 860 bp, Cannabis indica
aaaccggtaaaccggtttttatatcagtctccccaaaaattcactaattttctcaaaacttgtccaattgccaccaaactttccagagtacctaaacaatgtatacacaacatattccaaccagaaaatcaaagaaaaacccaatgaaactcaacttgccattaaagaccaaagctttgagttcaaaactcaaatttgtataaatccaaccccatacactaaaaccagctgcaagaagcttaaaccaactcaaatgaaccttaaaattcgaaccctaaacatttctaaccctaacaaccatcaattcacaaaatcacaacttgaaaccaattaaaatcttaagaaaacaaagctacaaagtatctagggttcaccttggcttgattccctctaaatccttgctgaaaacaccccaaagatcagcaacaacccccttgttttgtgctagttcgaagagagaggaagggaagagagcttttctcaattacttggtattttcttcaattttcctatttttctaaaatgagaaggttacttcattttggttgaaaatgaataagtggctagctgccaccttctaatccatccacctaaccccgataataaaagactaaaatacccttgtagcctatacttaagttaaaataaagtctaggggtaaaatggtcaaatttcataaccctgactaatcccggtattttattttctctaaaatatttaccactaagaaataaggttctaaacttacccatgtgatcaaactagccaccatcgcattttccgttgtcgtcaagcaagaattacaaaaatagcatatttcacatataagaaaaataatacccctagagtttaataaaatc

SEQ ID NO: 353513 - DNA, 1391 bp, Cannabis indica
tacgatcaattcccataagttgctcatgaattggttgtccaacaatgaagtcatcgtaacataagtcagcattctcctcatcctcttcagtctctaagaacctcctctctggtgtcgataaaacaatagaccatttatcattagccggatcagaaatgtaaaaaacttgagctgcttggctagccatgatgaatggatcattcttgcttcctctcttacttaaatcaaccaaagtaaaaccaagctcgtcagtttttactccaacgttgttgtcaacccaagaacacttaaaaagtggaattcggaacgcaaaataattgagctcccatatttcttcaatgaccccgtaatacgtcatagtacctaaaacagggtttctatcttttgcacttgcaaagtgcatagtttctgcgacgatacgtataccactattttgaacctctcgagcatcatctcttgactttgtatgaaaacgtttaccccttacaatgtacgcttcatgctttgcaaccgcaaaagttggtccaagggcaatacgactcaacacatcagatactccatgattcggttcgttcaactttgatataatggtattccttaaccacccaatgaaagtttgacgatgttggtctgcaacccatttttgtttatttttttgatttcttggaaccattgattgtaacagctccatatggtcactgtaaaacaagtaaggtaaatcaagttattgttcatcgtgacttaagtaatgttaatcaaaaaaaaggtacttacgttatatatggttgaacctctgcgttattgttcatcacgactaattgagcttgatctagttcaagcttggacactgtcaccattgtccctttcccccttaatcctctatcaacatcatctgggtcagttcttggtttgctaattcctattgcctcaactccagccatgtactctgaacaaaattccacaacctcttcagatatgtagcaccaaccatagatgcttctggtcgatagtggttacgcacataactgtaagtaccttcatatttctttcaaataaatacatccatcttgcccccaaactggcccacacaaccttgcttctctcactagataaaccattaattgtatcatgatgtcgaaaaaagatggcggaaaaaaatttccaagttgcacaatatttttactacatgttcatgcaatgcacctaacttatctagttctaattctttcccgcacaacttattaaagaaaatataaacatgtgtcgaacattctcgaatatttttcggcaagactgatctagtagcaattggaagcagatgtgcattaatgcatggcaatcatgtgatttcagacccattagtttcatttcaacctcatttaccaagtttt

SEQ ID NO: 353514 - DNA, 562 bp, Cannabis indica
aataaccgtgtgagggttattttagtaataaagaatgcattttgtatttttggtgtaaaaatttctattttatttgctttgttattttttttttcctctcatttgctttctcaattttcatttattttctttttgttttcatcatttttattcttttcattttgctttttcttttctttatgtttttcatttttttttgttgatctttcacccctctctagtttttcttatttatttttcttttattaatttcttaataatacataaatcatgttaatatttgtttttattattgtatttttttttccttatagttggtacaatttaattaggttgcctttgtagttattctgaagtgaagatccacttatcataagagcttcatcatctaatttaaacagttggttacccaaaatataagtaatcaattacttaagatattatagttacccaaaatataagtatattattatctgaaatataattacctagttacctaaaatataagtggttacccaaaaatataaataatcgattatttaagatagtataattatccaaa

SEQ ID NO: 353515 - DNA, 422 bp, Cannabis indica
cttgtaactttgtaacatttatttaatcaatcaaaatattatatcgaaatataatattccccccactacttttgaagaagtctcgcttaggtacattagataaaatgagtttcgactttaattttaccttagtgtaaatactacaaactttgataaaatttctatagtattgaaccactattcttttagtataaactggtgataacaaatacacccttgctaatgctcacttaagaccacatgtctcgctcttgcaccattaatgaccatatgcaaaattctaattcatgaagtctctaaagaatactctcaattctcataagcggtgggcaccacctctagtccataaaggtagaggtttagtgtctcactattttttagacacttcttaagcttaagttccattaaaaaaactttcggtt

SEQ ID NO: 353516 - DNA, 666 bp, Cannabis indica
ttctattaagcacgtaattaaattaagttcatcattttacccttcctaggtcacaattactaaaatgcccctagctcaccaacggggtcttaccatattataaaccatattaattcacataaattgaactatataataatataattcctcaattattcataattttttaattagggttttgctaattcatttcacaattccaaaatactacagctaaacttagatataaaatctatagcttctatctcgacatagaagtgaaatgatgatttccttcgagcttggcatgatagagataaatggaagagctcttgtttcagtgattatattagtttactgaaataccatttataggaacctaagtattttaaggataaaatacattgcggggtgaaacggtaaatttgtccccactcgatgtaaataatcaatagaggatctttgattattgggattataacgatggttaaatgtttatagcgtatctatatcgttgaatatatagagcgttctatataactaagattgtaattccaagttctacagtagtttaatgaggaattaataagttagagaatttacttagtaaaatctagatctacttattggaagctcaaatgtataggcccatggtccccatactaacaatactgcttgtaagactta

SEQ ID NO: 353517 - DNA, 710 bp, Cannabis indica
ttgaagaggttgctagcatgacggatacagaagatgattccagcgatgggtctgttagaaaatacaagaaattaaaagctatgaataaagttcttgggagccggtcggactatctaaggggactgggttataaattgaaaggcagctcggaaacaagttctagtactcaaagtcgagctcaatcacaaataccgacttcatccattattccggaagatatgggagtctttgccgagtttatgttaaaaatgcgtgataagattgaccagtctggcacctccaatgacgcgtctctacatgacccgcggtttaacaattttttacaaaaatttttaccatcacaaccgcaaggtagcgcgtccagttcagccccccaccaacgttaaggccacaacaacaacaacaacaacaacaacaacaacaacaacaacaacaacaacaacaacaaccacgatcgcctcagctgcctcagtttttcaacaacaacaacaaaattctcccaacatgtctgctggctcttcacaatcgcctcagttgcattacatgttcgggcttccctcacagtctcctcctatatttttttcggatgccgctggaggatctcagacacaacctatggttggaaatattggaggctcatcccaacaacaataccctatgtacggtcaatttgggtcattgttgcagcaacaacctgtgtatggtcaaat

SEQ ID NO: 353518 - DNA, 682 bp, Cannabis indica
aaagtcatagcttatgcttccaattgaaagattatgagcagcgctatccaactcatgacctggaacttgcagcagtggtgtttgccttaaagatttggcggcactactcatatggtgaacggtgtgagatctatactagccacaaaagtctctagtactttttcactcagagaaatctgaacatgagacaaaggcggtggttagagttggtgaaagactatgattgcgagatcctgcatcatcttgggaaggaaaatgttgtggcagatgccttgagtcggaaaggatctgatcagactttcaatatggtaatgatttctcctcagttagcctcagatatgtgtagggaaaatattatatttgtgatcgggaaattgcataatctgacacttcagtcaaacttgttggaaagaattaaagtggcacaacaagaagaccctgaactgcttaaaacttgagaagatgtcttagcaggcaaagctacggacctttcgatctctagcagtgggatgttattgtttaaagctcgggtttgtgttccgagtaacattgagcttaagaaagaaattctggatgaagctcacactaccccttactcagtggtagtggttgattacttcactaagtggacaaaagccgaaccactcgcaaccattacatcaaagaaagttcaacactttat

SEQ ID NO: 353519 - DNA, 1138 bp, Cannabis indica
  modified_base (62)..(62): a, c, t, g, unknown or other
ctcttgctcttcttcaccttcttgagcttcctcaagaacctcctcctcgccaccaagacaanagtgcccgaaggggcactggaggaagacctcccgggagtgaccaactgagaagaagcaggaggtggggaacatcaggactatgggctccagcaagagtggccaagatttcgtccatgggtcttgctactgcaacaagaaaataggtcaagtgttagaacatccgtgaaagcagcatacacttaacaaaaagcaatcaagctagtcctaccctaactctctaattcggccctagcaaagtcccggatcatagcactggcttcatcaaccccgagaaagctgtccgagggacggaaccaactagaagataaatgggctgaatggtccaagggaatgggccccggaggtctagaacccatccgtgaccaacctaaataattgcctaagtgggaaaaataataatccttggcatgattcccccacaaagtggaaggcatcctaaacctattgagacgttcatcgaaccctacaggcctaaggctggtatactcacgggcggaaggaacataatgtattgttataggggacttaccggaacccgaagtgctggcattagaagcccccgtattcggtaccgggaccacaggctttggtctcggggtccttcgctccagcagagccctaatacgatggcccttccggcggtcgcctgggccttaatgtaagccagctcctgttccctcttgaagaggtacttcggtacttatcctcccccgtggcgatgatgtcatcccagaataccttctctgcggccggagccctcacattcgggcagacgactttggaaagattgtagtcatccaccgactaatgccccaggatcagcttggccttccgacagtgctccgttgtgaccaacttcccgacatcaagggccttcttgtcatacgtggcgaaggtcttggcccgttgaagaaaaatttgagtaggttcggtccgcatgtgaggggggatcctaacccgctcagtgagaagctctggatgatccacagcctgcaaaccggaggagaagaagaagtggcgacggtattccttcacgtgcttctgataattgaaagggatcgggccctcattcaaa

SEQ ID NO: 353520 - DNA, 503 bp, Cannabis indica
caggatgctctattttgaatgtagtttgggaatgcaaagtttatgatgttaaagcactattaaaccagtttgtaaatattttaaaaaataggggaccctgtagttaatattacttatcttttattgtaaagaagttttaaatgtctattttaattattaaaaatttaattacccaaacttttggtataattatattgtatataatatcagaatttaatcaaatcacacacacgtggcgtccctattggacatggccttacaccaagtctgctaccgaagttagaagtttccgaggattagcaagatactacatgggattcatagaagggtttgccaagatttctgcacccttaacaggattaactcgaaagaactgtaaatttgtttggactgacaaatgtgaaagtagcatctaggagttgaagcagagcttaattactgcaccaatactaagcttgccgattagtgatgagaaattcgtgatttactgtgacgcttcaaaa

SEQ ID NO: 353521 - DNA, 707 bp, Cannabis indica
ttttgagttgcatatgagttgtataaaattagttttactgataaaaactatttaaactacatgtagtcaactatgccttctaatataactgaagcagttaactcagcaaatgtagtagccatgaaaacaccagtcacaacatagtggagtgcttgcgcgcacaaatgcaagaataaacatacaataatagattagaagcacaaaagtcactactataaaaagtactatttacgtcggtcaacgcgtctcaccaaaatggttgactgagacaaaaaataagcagagattttgtgctttatagtataactgaagctaaaaaataccaattagtgtcggctcgttccccgatgcaaaaagtagaaccgaggaaaaatgtgaaaattttaaaaattatcttttataatttgcatcggtagaaaggtgaagctaattatttttgcttcggttgaaaagtgagattaatacatttttcacggttatccaccgaagcaaaatgttaatacatttgtaaaactcaattttcacaaaattgaatttcatttcatgtaattatcccctaccgttttgaaaccctagcacacccaccccccatttcaaaaccgagcagagttgcaccagccaccattttgaaagactcccggctgcccactgttcgtccaccgcccttctatttctctcggtacgtacctttttctctctcgtctgaa

SEQ ID NO: 353522 - DNA, 959 bp, Cannabis indica
tctaagatcctgataaaataattccaacactaaagccccaagagaacagaatggataagttgaattcagccagcatatgactcagcctcagtttgatcttcttaagaattgcatcccaatcttctcgcctccacttggttggcctaagcgggaccccaagatatctgagagggaaagatccctcaacaaattgtaacatatccaaaatcttagctttaacattggggttaacaccaccaaaataaacttgggatttagcctcattaggatataaacctgtaacctccgagaagctttgcaaagtaacttgaagatgatgaactgcagtaggagtctctttgcaaaaaataattaaatcatccacaaagaaaagactaaccaacttgagattcttgcacttaaaatgaaatctaaacgatttttcagtagtctccaacatcaaccttcttgtaagatactccataatgagcacaaacaataaaggcgacatcggatccccttcttcataatcgtataagaggtacccttcaagcagatcatgttattgtatattatttttattaggggtgttcgcggtgcgggtagtgcggttttgaccattttttcaaaccaacccggacatgtaatttttttaatttctcaaaccgcacacgcaccacgaaaataaaaaactgtagaaatcgcaccgcaaaaaatgatgtggtgcagtgcggtttttgcgatttctgcagtttggactaccactaataattaaactatcacaaatacaacaaagttgagcaatacttgtcaaaaatactataagacttgtaaataaatatgaaaaaaaaaaatagttttaataatacaataattagtgggctttgggttagacattcatagattgaacctaaataaatataaaaaattggtatttttataatatgcggtgcggtatggtttgaaccgcatattatcaa

SEQ ID NO: 353523 - DNA, 628 bp, Cannabis indica
tttagcagttaaatccttctatcgtttcacttatatttaaattttcaagctcaaattttgacggtaagtctctctaaattactgaactggtaacaaatttaaagtgtcatccgattaactgtcagtataaactacttatgtatacactcttgtatacatgatatatttatattaacacacttaatattattatataaaaattatttttaaaattaaataaaattataaaaataaaaaatgttacaaattttacactaataatatgaagtgtatcaatataaatgtgatgcatgtacaaaaaatatacatataaataatttatattaacagttaattataaaaagtaaatgatattttaaatttactagcagttcagtaatttaaaaaattttaccgttaaaatttaaacttaaagaaataagtgcagaatgatagttgattggattttgaccacaaaatattctaaataataagaggaaattacactctataccctttttatattgtattaattttgcccctgtcacttcaagatactctctatgtgattctgttatgtccggatattttaggcacaatacatataaaaagatgtatgtttcaaataaatataaaattagaagcaaat

SEQ ID NO: 353524 - DNA, 560 bp, Cannabis indica
gtctggagttttcatctctttctctctggatttatgaggagtaattttgaagctgtaagtctttctgagtcttggattcatctatttatagttgttgtagctgagtaggttagttaggattaactaactgattttggatcttgatgtctaaccgttagattagtttggcttgtggtaactaattggttttttttttttttttgattttattaactgttacaggtagacttatatggggattaacccaacatataacttggaccatttgaggatgggagggatagaatacagcttaggggagagaatataagagagttatatatatgtgtagtttataatgtagggttatagtaactaattcttattataaaccatacatgtatatataatgtgtagtttataatgtagggtttagagtaactaatgtgcagttattttggtatttttttatttgtggaaaattccattaaacaacgtgatggagaaaaaaaatctatttagttatgatattttaatttaattcatattgttagttatataataagaaaaaaaataataaa

SEQ ID NO: 353525 - DNA, 239 bp, Cannabis indica
cctggtaatattcctacatctctctcctattgtcctcggttctactatcgtgataattagcgtgattggaatttgtatgctacctgaaagtttgagagtgaaaggaattacgatttgcatgctcatagggtgtatggtattgtttagttcattcaataccatcaatgagagaacactctcactagtttcaaacggtatattgcaaacattgtcaaagatttctatgctaacttatctga

SEQ ID NO: 353526 - DNA, 501 bp, Cannabis indica
ttgatttgtttaaacgtttatatgaataagtgtgttgtgttagaattttcaataaatcataattaagcttgtgatctgcaagaagggaccaagatttatccaagatcaatcgaaattcaatgatgagtacattagtaaggtttgaactcgagaaattcaatggaacaagagactttggtctttggagggaaatcttgaaaaggattcttgctcactagaaagttggaaaggcactcaagctaaaagaggaatcgactaataaattgaagaaggaagagatcgaggatatggaggaattggcttactacacaattattgcaatgaccgcatattttaggcatggaaattagtagtgcattagtgatttaattacaatttattttatatatgtgtgcctaagtgtaaaataaaacctattgtcatagatatgtatttgtgatataatttcttatttatagagattttatagtaattttagtgtgtcatgcatgttatatatga

SEQ ID NO: 353527 - DNA, 998 bp, Cannabis indica
aaagatgttcctgcggattttgacattggagtttatcgtactcaacttgctgcccttttcttctcatacgggcaaaggtaaattgatgaaagtattgatagcgaggatgagaagcaaagcaagtcttccaaggcttctcaattgaaaaagtagggtcttttagtttaatgacaatttgttgttattggttgactttattatcagacaattattagttattttatgtttctaggtattatattttgttttatgttctggatctggtttgaaacttttaggatatttgacattaatcattataatatgttatttctgtatgtttgtatcagcatcagttttatatttttccattttttttaagtttttttagaaactattatgcaactatatacaaacaatttataattttcagcatacttgtaattttaattgcaacttatttattatccttgttaattatgttttataaattcctatctgtctttttaaaaattttaataatgaaattcatttcgtagttgttatcccaaattttgcactctgacgtggcatcacgagaatagtgacacgtggagtccacttggagcatttgctcgagaagataggccgagcaggatgcctcgctggcatggcctgagtaagatattcagcgatccgtgcagagcaatcaacacttagcgaattcagctttcgcatcatgagtcatcagctcaatcccataactcagggatcaatttacgtggatacggcatacacacgatcccactatcagtgtactcagcctcaatcccacgatccttgcattcagcattgatcccacgatctttctgtttatgcgcattgtaacgagagaggaaactcttcctcctcaagtttcccagccctataaatagtgatgcatgttcactgggcaaagggaccgagagattgaaagtcgatacgcagctaagctaagactatattattatctaagaattatatattcagagatactgttg

SEQ ID NO: 353528 - DNA, 552 bp, Cannabis indica
aagtgtaaaaataaaaaatacccttgttattgatattttatagagaactaatttttagaaaattatttatttatgtaatttatttatttactaggactgcataaaagaaaactcaccacagttcattggactgtagaaatcaaagcacagctgccatagtccatgaaccattgtttgtgctcaaaagcctagtgaaaagataagtgggagctttgcttgctcttggtcacttcaccttctctattatagaacctatggttgactagaaatgggtaatccttgcattttactaaggaattgttgttagtttgtactccttcttcttctcccaatgcgtgtcaaaccctagtgaagaacacaaccattgtagtctactacattcactcaaagatcacacactcatgtgttaagatgccaaagtatatgatcaaacctttaactctttgaactgtgcacgatatagcttggaggacaacttgtaacgccctaatgctaaggcacgctacagtgcttattcaattattgtgcaatctttgctaatcaaagaaattt

SEQ ID NO: 353529 - DNA, 743 bp, Cannabis indica
gcatgtgtggaaagattgtgttgtttttagataaattaaagtgtaaattctataatcttgttgtgatttatgttgtggagctttgaagggatttttagggtattctttcgattgaaatccttgttatttttggttgttgctgctagaaaatgttagaaatatattggcttgaagctcaaactcttgagcttgagtgtttgtgggtttagagcttagttatgagatttttgtgtaatctgaaattggggtttaatattaaaattgatgcatgaaatatgtttatttgagcatctattagctgttagcaaccctatttgatggtttagaagtttggttgtgatttgggatggtttagttgagtttttggggctgattttcgtgttttattgctggttttctaggttttgaacccaggtgccgcggcatggtatttagcatgccgcgacgcgcctatttctttctgggcagatccttttgcaaacttcaaatagccataattttgtgattcaaactccgatttgggagttctatataccgttggaaagctcttttcgatctctatctgaatatctgaattttaaatgccatgtgaatatttttatgaatgtgaaatcaggggttaaccctatttgtgaaatcctggattgtgtgactaggattactggcacctgatcaggagcatcccggggattcagaatctctgatattgcggcacaacaggtaagacagtgattagcacgtag

SEQ ID NO: 353530 - DNA, 608 bp, Cannabis indica
tttttagggtattctctagattggaatccttgttatttttggttgtggctgctggaaaatgttagaaatttgtgggtttaaagcttagttatgagattttgtgtgatctgaaactggggtttaaaattgaaatcgatgcatgaaatatgtttatttgagcatctattagttgttagcaaccctatttgatggtttgaaagtttggttgtgatttgggatggtttaattgagtttttggggctgattttcgtgttttactgctggttttttgggttttgaacccaggtgtcacggcatggtatttagcatgccggggcgcgcccttttctttctgtgcagattctttttgcaaacttcaaatagccataactttgtgatccggactccgatttgggagttctatataccgttggaaagctctttttgagatctatctaaatatctgaattttaaatgccatgtgaatattttatgaatgtgaaatcaggggttaaccctatttgtgaaatcccgaattgtgtgactaggattaccgacacctgatcaggagcacccggggattcggaatctccgatattgcgggacaacaggtaagacagtgattagca

SEQ ID NO: 353531 - DNA, 765 bp, Cannabis indica
tataaaaattgtactataattaacacaaaaaattattttgtaatatatttacattaaattttagtattatatttaaatacacaattacaaaataaaatttaatattttattcaaaatataaaaaaaaattggagtaatttacggcataaataattaagtttaacttccaattgcgaataaatgcttaagtttactttttagcgataataataccttagttatatttttagaactctgtaggtacttcaccattaaattttaagtcattatccacgtgtcattttttattggtatatttaaattactttttttaaatagccgcaaattactcaaaaaaaaacttttgaccaagaaaattaactcaacgtgaccttattaatattttctattgactctttgaacagttgtacttcaccatatcactgcccatatatcccatgacttttatcttctgtaaaaaagaaaaagaaaatctttattctgttattattgttcgtattactagataaggctgattgggtaaatttctgttacgaattcaaatgacattcttaaatgaatgaacatttttttttctgttaaaaaattaaactttttaaaaatgactgtaattttattatttttttttcaatggtcatataataaataaactaagtaatacaaattttaatattttggttgatgaggacaaagaagaggacgaaaaccacccaaaaaggtttagtgagactcattttatattatatcattaaaatgatttgtaac

SEQ ID NO: 353532 - DNA, 649 bp, Cannabis indica
tttttttttttgtttgaaaaatgtatattcaatcgaagaaattacaaagttttaggcaaatccgccattatataggtagatgcacaatcggggtaactccccaaccacaacttattacaattagaattacaagccaacttggccaaagagtgagccaccaaattgttctgtctgctggtgtgtgttactgcagtgcagtgattgaattccatggtctttttagtatgccacattaaaatgtataagaatttaactctaaaattaattaaatcccaaaatgccctcctcataagttatacctttcctctttctcttggccttctctccctctccctctaactctcaccaaacccaaccaatatccacgaccacagaaccatatcgaaccagacccagaccaaactcacgaccaccacaccacctccggcgaaacccactccgaaaacaaaacgtaggacaaagctgatgaggatatcgcgaaattacaaagagaaatcgtgaaacccaaagctccaaaatctatgagttctcaactcgcttgttttcctggtttttgacgatgtcgcgaaacatcgcgaaatcataaaacatgctaaatgtctccaatccacaacatcgtgaaacaccgctaaatatcgcaaatcatcgc

SEQ ID NO: 353533 - DNA, 849 bp, Cannabis indica
taaacaaggatggagattgtttagcgtccggactcacttgtcagcaagatttttaaagctaggtactaccgtaatggtaccttcttaaatgttgagttggggagcaatccaagtttcgtgtggcgaagtatttatgaaactcaagagatcgttcgaaaaggggcgagatgcagagttggtgatggttctcgaattaatatagtgttggatccgtggctgccgaatgaagataatccaagagtaacttcgaataaccctgctcttattgatcaaaatgttaaagcacttatggaaattgatacgttggcttgggatgttgacttggtgcatgatatgtttaatgaaagggatgctaacttaattcttagtatttccttgtcttcaagtcgtttatgtgatgtttggtattggagttgggagagctcgggccatttctcagtaaaatcggtttataagttcttacaattgagcaaagagttgggtgcactaaatgataatttcctctttggaagctaagtgttccttcgaaagtgaaagacttgttatggcgtgctgctactaactgtctacctacgaaatccaaacttcattctcgatgtgcctattgataccatctgccatgtgtgcaaagtaactgatgaaaccatctaccattgcttggtggatcgctcttttgccaaagcgtgttggcaacagttggctgctggtgttaatttgacagcaggtggttcttttgccaactggtttgctacggttcttcagtagacggatggggagaaaaggaggttgattgcaatgacatgttgggcaatttggaaacatcgaaatgagctagtatggtctgataag

SEQ ID NO: 353534 - DNA, 736 bp, Cannabis indica
aatgctggacctagatctggaccgagatcttgacccagacccaaacttggacgcgcactcgggacacgaactaggacctggacctgaacctagacctagatcggggtccagatctagacacaaactcggacccaaactcaaacacccacacctagaataagacccaaagctagacccggactcggacctagatctggaccaagatcctgacccagaccctaacttggacccgcactcacgacccgaacttggagctggaccctaacctagaacaagatcggggtccacacctggacacagacctgaacaaagactcggacccgaactcaaactcccacacctagaatctgaccaaaagctagacccggacccggacccaaactcgaacccagaccaggatcagaaccaaggactttgacccagaactaaatccagacttagatcgggattggaacttctgatttggacctagacttaaatccggacccgaaccaaaactcaaaccaggtctcgaactccgacccgaactaaaacccaaactcgaactcagaatcgcaaatggaactcgaaccgaactaggactagggccaggataagtacctaaacccaatcccaaacccagattaaaacccagacagagacctaaacccgaaccgatacttggactcgaacccgaacttagatcgggacgaaaacccaaacaataactgggacctggacccagaatcaggatagg

SEQ ID NO: 353535 - DNA, 904 bp, Cannabis indica
cacaataaatactattttttattattataattcatttgacttttactaaatttatattttttatttaccaaattactattatttaaataataaaggctaaataccatctcggatactatgttttgcaaaatttactaattggaccctctgttttcttaaacaacaaaataaaccctgtattttttaaaatagtacaaataggaccacgaactgattttttgtcaaaataaaatttaataataatctaatctaagtgtgttatgacaaaactgtttacattttctgtatctatttgggttagaattatcaaaaattaagctcagggtcctatttttaccattttagaaaatatatggttcattttgtcatttaacaaaatagatggtccaattattaatttttgtaaaatatagggtctaaaatagtatttacccaataataaaagaataaaatataataatttttttttttgtatatttccaataaaatattaaatgacatcaatataattaattattctttttattttacatcttgtgtatttgagtataattataaatgagattatttcacaaatacagaaaaacaaaaaacaaaaaaaaaaaaaaagaaaaaatacaaaaatacggttggacaaaattttaaatatttttatgatttttataattttatttacaaaaaatacactattttatgttgtactcttattaaatttttgttatttgtatgttaatacagttttacggaattttaaatatttttacgatttttttgattttatttacataaaatacggtctttttatgttgaaattttgttcatttgttgttaattttttgttatttgtatgttagattttgttgctattttgatgttattttcatattacttttatgttgttttc

SEQ ID NO: 353536 - DNA, 838 bp, Cannabis indica
atggtgagctaccaaaacaagatacttcttgctaacataggtagtcacacccttacataatctcaaaattagtacacaatcgttgccttcaattcacctaggatttcagacaatactcataacactagatcacttttaaacaaaaagattttgttatttgaatcaattagattgatgcatccattaactactcatgttctatattccactagggaatatcaacaatttaactcatattgtcatctttctaatctgtctatcctgttaaatgggttaccactaaataacatacatgcacagtccattctgatttcttgatgtctctaactaaatgtacaatgttcaatacaaatataaatcgcaattataatattgcccataaaattctaacttgagttgggcgaaagaccgatacctgagtctcctttgatcataactagcacttgggtaggacccatacatttttcttctttaacatcagtctttcttaactatggataggttctttttagatgacccactaccccacaataaaacaaaatctggctctacatttgctcaaatgacgactttttgcatcttgaacactcaggataaggtcaccatctcttatactcactttgaccgctatcatggtcaccaatagaacctttcgttctatcccataatttgtggttcatttagtttccacctattgatttgctcgtaagttaggttcatatatttcaccacatttagtggtacaacaagaagtgtcggtagtatacgaacagacacaagatgagcctgtaccttttcaaatctcagattattttttctccttgtcgtctaatcatat

SEQ ID NO: 353537 - DNA, 692 bp, Cannabis indica
tcttcttgttaaaaaaaaaaaaaactcttggttacataggctgttttaaatagtatggatgccaggcaaaacaccaggagccagggtaattcagttggatccagtggtggtgagggagtttcatatcccccttaatatccgtggccgaggtagaggtcctagaggcagggcacgtggccggggtgaggctaacccgccacaggctgctcaagctgcccaagctgcccaggattgttaaaacaggtttgcagaaatgcaagccaggattaatgaacaagatgaagagatctggcgtttgagacagcagggtgctcgtgcaatccctgctccagaaataccagtagctcttacccctgctgtgcaggtaggacctgtagctgcagtgaaccgaatggaacccctgtatgaaaggttccataagcaggcgcctccagttttcttgggaggtcccgatgtcatgaaagccgagaaatggctaacagtaaaaactagaatcttgaattttatgggcatcaccggtaatgatagggtggcctgtgccacctttcaatttcaagaagacgctctggtatggtgggacatggtgtccctgactcaggatgttactacgatgacttgggaaaagttttaagaactgttcaatgcaaaatattacaatgaggcagttagaagcgtaaaaagaaaagaattca

SEQ ID NO: 353538 - DNA, 735 bp, Cannabis indica
cttagacaaattccaagagaagaaaatacaattgtagacgcgcgtgttagcttgattggcaagcgacaatgtaagtgaaaggcaaactttgttcctatccagttcctcgaagagcctagcatcactggaatggaagaaatcaatatgattgatacatccccaaactggatgacaccaatatcggcctaccttgagtctgggaaactcccagataaccgaaatgcagctcggaaaatgagaaggaaagctgcacggtatatcatagtagagggactcatgtacagaagaggattctcgatgccattgctcagatgtgtcactcaagaagaagctacacgactcctatccgaagtacacgacggattctgtggaaatcatgccgccggacaaagcttatcaaagaaaggtctaaggcaaggttacttctggccgacaatgactgaagattagacagcctatattaagaggtatggcaaatgctagagattttcaaagattcaagagctccacccaaaaagttaacatagatgcaaagtccgtggccctttgccatttgggggattgacctcatcggacaattacccaaaggtaaaggtggagtgcagtatgtagtggtagcggttgattactttactaagtggactgaagctgaaccactcgcaaccattacatcaaagaaagttcaagacttaatgtgaagaacataatatgcccgttcggactaccgtacaaaat

SEQ ID NO: 353539 - DNA, 595 bp, Cannabis indica
ttttcagcttcttgactttcatactttgtattttttgctggtttttgctaaccacgctgtttttgctcttgtgcagacatgtctcggcagatgatggacgccttaaggaagagtatgagcggaacctctagcgccttccctccggccaagaagtctaagggtggagaggggtcttaagagaagaggccttctggagaggtcattgacctttctggggagctggctgctacaaatccttccactcccaagtctgccaagtctaaggagtctgggccaccaacatctgggtccgaactggtcaggaggattcctgagcggatgcaggcaccaactccacccatgcccgtgctgcctgaggtcaagaagggcaaggaggtgatggctcatcacatgaaccggctggttcctgaggtcggtgagcaactggctggtgctgacgactcatctctggatgtgttggtgggcggagtcttgaaggagcttaccagggttagtcttttcttttcgacacttcccttttagcttttcatacttagcttcatatactgaccttttcctttatgcaggccggtttgaagttggcttatacctactc

SEQ ID NO: 353540 - DNA, 483 bp, Cannabis indica
taaatatagaccaagaaaaattggtaacagacaagaaaaaagaaattatatttgtaaattttattaatcttaaactatagaaattataagtatagtgtgtagacattaatgaatccatatatataatttggaacaataaaaaaaataataaagtagttacaactacaaacacaatgaaataaaaaaaatagtcatagtatatatttaatatttatgtgctctaactgaggatatcactaaataatgtcaatgtattctaaattatcaataaatgaatattattgataaatatatatatatatatatatatatatatatccacggttagttttatatgggaaatttgaatttctatgcatgcattaggggataattttttccctaaactaatacttttctacattgaaaatttatgacgactttttcaaaatcccaaaaatacctctctcaaaaactcaaaccctttctctctccttcactcaa

SEQ ID NO: 353541 - DNA, 639 bp, Cannabis indica
aatgctttgatcttcacagggtttgcctctatactcgctgattaaccataaacccgaggaatttccctgaaccgactccaaagacacacttagaggatttagtcgcattttttatcgtcgcagtatttcaaacattgcttgtaaatggttgacatggtcttctacatgttgagattttacgagcatatcgtcaacatacacttccatggtgtctccaatcaaatctgcgaacatcatatttactagcctctgatatgtcgcatctgcgtttatcaaaccaaagagcattaccctataacaatacaaacctcgatctgtaatgaacgaggtatgttcctgatctggttcatacatcgggatttgattatatcccgagtatgcatccatgaagctgagaagctcatgaccagtctgggtagaacgactcccgtatgaaggcacatgccaagaggcggttgacttcttccttcagcgcttggtacctcgcgacatccattttgcggtgcttctatcggacacctcgtactttggggtcaatgttcagtcgatgacacatgacctgtggagatattccgaccatatctgaatgtttccaggaaaaaacatgaaggttttgtttgagaaatgtcattagttttt

SEQ ID NO: 353542 - DNA, 1162 bp, Cannabis indica
aggctaagttgcataaaaatttaagctttgacttcacttgaaaggatcaaagggtgaagccatcatggggagtaagacagaattctagcagcccttccattctgggaaggagggtttaagacatgtcatattcccgtgatccttctcgcatgaaaaacatcgtgcatgcgagagtcatgttgaatatttacgaagcaagcttcagcttccgcgagggagcgctgaagttgcataaaaattcaaactttgactttgcttgaaaagattaaagggtgaaagcaacacgaggagtaagacagactttaagcagtccttccatttcgagaaagagggttaaagatgtgtcatacccccggtgatccttcacgcacgaaaaacattgtgaacacgagagtcatgttgaggttttacgaagcaagtgtcggcttccacgagggaaggctgaagtcgcataaaaattcaagcctcgactttgcttgaaaatatcaaaggggtgaaatagtctttgggcgtgcaatagacttcaaggagtccttccattttggaaggagggttgaacacgtgtcgtacgcctagtgacctttcacacacgaaaagcgatgcgcatgtgtctcccaagctccgggaagctctaagagatgcgtgcatgcgccttggatctcctgggcagtcggtttcttccaatggatggcaaggcacttggtagctttttgggcaaagactcccccagtaggatgaatgctactttggtagagtttccctaactagtttttaatggcacgatttactttctttgatgtaactccagggttgtagctacatcgtgatgacagagaccttctgagtaaactttgcggaaaatggcctgcctcaacaaacagtaccataaccaggccggactagaggccaaggacacgtcgaggtactaatggactactcttagctgtcgccattacaggatcaattttcgatcaacttcatggctcagcacaaaggtaggggaagtagtcatcaacaatggatctggccctcgcttgagcactagcgctggacccttgggatggatagattcattatatgtgatgacccttgatgagttagtcatcgtaaatgcatcgggtcttagcaccgtcggctcgtcccaacacctcttgcacctcat

SEQ ID NO: 353543 - DNA, 595 bp, Cannabis indica
gttacatggataatgtttgttttatttgaattatttattcaaaacttttttctaacaaacctattatttatttaatctaaattgctatgattaacttgttgacagatctaatgatctaattttaatcatagtctaattatcaatagatcttataaataatttgtaacagataaattttgtatttctctcatttgtgtaaacctagaaacatgataggactcatccatatcaatttgacttgtgtgagcctatatgtttgtttttaggcttagatacatataggaagaacatttatttttagatatataaatggactaggttgataaaatggaatatcaattttgatagtttaatttaggcccaattagtattgggcttattcaatgaataacagttatttaatgaaaggttaaatttctctcctttgggccttgtgtgagagttaggggccattagtagtgggtacgacatacagtacccagacctccctcacatgaacaaccccaactctgaaggtccatttgccttattatttaaataattgtattaggctaattaaactagtttaacctaattaaaattgaattagcaacat

SEQ ID NO: 353544 - DNA, 619 bp, Cannabis indica
tgtatatcatcttttggataaattttttataacagggatccccggaactcctttttactaccgttataatgtctgtttttagtgttttattttagtcaagtttttattatcctcactgtttttaataattaattaatatattagttttaaactagttttataaaatgacacacgtgacattcctatagattagggcgctacatacatgttagtaaatctagatcttggtaaaacaacttccaacagttcggtcccgtgatggtaatagcctactccccttttacttgtattacttgtgaaaagaaaagcaagaagttcttgatctctgttgatagcttacagagattttagcagcgtaagtgctctttagaaaataagattttggatccctaaatagagaaatggctccactatttatagggaagaattacatgttgtgattattttaccaggatctagatttactactatgtatgttgtttaacatcctaatatgggtttctaaagcaatgaaataaacacatataaagtttaagaaaccttacattgattgcaacggaatataatgactccttccgttcagatctctagcccttggttcctttctgtagcagagcat

SEQ ID NO: 353545 - DNA, 576 bp, Cannabis indica
acacactacaacatcaaatttatttttttttatctcaaaaactacatcgttggcttcatggatatctccccacggtgatctcgttgccatggcagaacatctaaacaaaacttcttactggcgtcaatggagattagcctaaagttcttcgccggcgttcatggagatcgcaaaaagcttttaaatcattggtggttgatgatttcagatctccatctctttttaagtgttatcgacgatgaagagaaactcactgttttgctttgcaagattaaggagaagttcttttggggaagaaaactctttgtttcgtatttttgaaaaaaaaaaattagttttctttattttgtttattttgtcatatggtaataaaaaagtaaaatttaatttaaatatagctatatatataaactcattttttaaataaagaaagataaaattaaaagacatgtataatagctataattataaaaatagtaccaagtagtatttttatttttagtttataatatactcattagtctaattttttgtaaagttttttttattgtctatttctaatttttttttttttaa

SEQ ID NO: 353546 - DNA, 506 bp, Cannabis indica
ttgtaaacctgtccattatgacccacacagattaaattgtcccgttgttctaggcaaacctaccacgaagtccatagcaatatcttcccatttccactgtggtacgttcaatggctacagtaaccctgcaggactatgatgttcagcctttacttgctgacaggtaaagacacttagcaacatactcagtaatgtcatttttcatgcctgcccactagaacatggctttcaggtcttggtacatcttcgttgaccctggatgaactgaataaggagttgtatgagactcatccatgatctccattttaatacaatcatccataggcacacaaacacgatctctaaatcgtaacattcccgttacatccactgagaaatcactagccttcccagccgaaaccctatctcaggtttttaccaactctagatcttgcatttgtacttctttgattcgctctaaaagagtagattgcagggtaacattagccaactgccccacaaccaac

SEQ ID NO: 353547 - DNA, 547 bp, Cannabis indica
atagtgcggctcggcgtctggcgactcggcttcgttttagcttcggaagatttttgttgcgtcagcgtatcaagcccgcactacggcgtggtcggtgtaagtaatcggcgatttcaatagttttttttttaggccttatttgtttgtatatttatcgtatttttaaactttctttctttcatttccttttccccttgaatttaggtaatcagcttcggtttaccagttctctatacaaccgtacaaacattttcttcttacatctttttcagtgctttttttaaaataaaataaaatgtgagtttaaaaaatcaaataaaatttctcaaaaaaaaaaaaatataattattatatttttttcaaatgcataaaataaaataaaaaaaaaactaattagtaatttttttctctgaactttaacatgtatcaaatcgtgacctctgaactttttttgctgttataaattcctcttgaactattgagattgttaaatttaaagacttttgtttaattttatttaattttactatttcagtgattgtttatg

SEQ ID NO: 353548 - DNA, 749 bp, Cannabis indica
tatatatttatatatatatatatatatattttttatcaacattatatatatatatatatatatatatcagagtcatgatcatctaatctgacacattaggtaattgggaacttcatttttgagaaatcgaagggttaggtaattggggattcatggagaatagaggagaggttagttaggtgattgaagaatgaaaatgaaaacgaaaataaaatcaataagtaaaaaaaatagaattttagtatatcttagaaatatctgtaaaaaataagtaaaataaatatttagaaacctttaatgcgcctgtattgttttgaaaaatttttaagaacggacaaattttcagcaactaccgcctgtattattatattattctagtcgcttttattgaaatgagtctagaaaagtcttgattcatgtagtgcctatataacctaattaacagtaataagccttttcaacatttaaaaacgtacgaatctagtaaagcattgttatttttgtgaccaagttttagaatttcgtaaccttttccatgattgatgagatgatgagatgagaaaagggttacgaaattctgaaacttggtgacaaaaattaattggagacctctacaacccgacttccgaaaaggccaactcgtacacaagctcaaagtcaagttcgaactccacaacaacaaggtacgtactctgtttatttgaatatagaagtcatactctgttttttgttacttgatctgtttcaat

SEQ ID NO: 353549 - DNA, 536 bp, Cannabis indica
tgtacaagagaattaagattatgtgataagaaaaaaacaagttggtagtgtattaaaatattgggaatctttaatatggatctgctaagtatagtttactatacactatacttcttgttgacctcccttttagccaacgacaacgagtggaatttagtaagcgattagtgatttataggaatcgatatataataaaacaatgtaaagacacgtgaattttatggaggttcaccctcgagcagttcggtaatagcctaatcctcgttatttgtattgacttaagatcaaggagaaagattccttttcttatagctcttacaatagtatctctaaatatataattcttagataatatatttacggtatagtctcagctaaactgtctttgacctcttgcccagtgaacatacatcactatttatagggctggtaagcttggcgaggaagagtttcccctctcgtcgctatgcgtataaacaaaaagatcgtgggattgatgctggatatactgatagtgggatcgtgtgtatgccata

SEQ ID NO: 353550 - DNA, 772 bp, Cannabis indica
gatctaaaaaaaatgggaaactcaacacaagatcagaatatacagctagttagataagaatcaattgtgtaatcaaacttaccatttttacctcaatttccataaataggaaagctagacaactttccttccaagtttggatacacaaaatatggaaaccatatcaatatatgccagccgaaatatacaaaataataaaatatttttgtcaattaaatatgccaaaaatggaattaacaatctccccctttggcactttgattgacaaaacattttattatgagaaaacctgcatcaagtgttagaaaccaaagcaaatagctttttaaagatacaagagtatagaaaatactccccctgcatgaaagctctctaacacataaaacaaagaactttttttggacggaaaagcttgcaaaccgaagaacacaactttttaaacggaaaagtgttaaaccacaaacaagacaactccccctaaaacaagggtccagagttgtaacacataatccaaaaaaataatactactctccctttttgtctatcaaggagccaaagataacaaaaaacatgaacaaagtcataatagttcagtcacacaaaaataaaaagcaagagatagaaaatggaccacttattcatcatcattggattggaagaatttcatgatgttgtccatcctcctaagaagcaaagctttgacttagtctccattcttcccaaacgcaagttgaatttagccatttctgtaggagcagaagtggaagcagat

SEQ ID NO: 353551 - DNA, 869 bp, Cannabis indica
ttattagttataagatttcaaattttactacttgttaattttggaggtgttcatccaatccaatccgtattattttattcacagtataagtgtgaatttcatattttggatccaattagatcagcacaaataattcaaattaaatacaattcaatttgcaatagtgcaaattaaattgatatgttattttttattaatatttattaaaatatgtttttttacattgctaattaacaacaaattattatattattaaattattaatatttgttaaattattcttgttcatatatctctaatgacaaattaaaataaataaaaaataacaaatctaaagaaaaaataatgtatgtagagaaaaatgtttggttttattttaaattatatattttttattttaatatcttaatagtcgtatcgttagtattttttttttttttgaaacggttcgtatcattagtattagaaattgaattattattttctttttactttaaaatattaattacaggtataatttttttaaatttatataaatatgtgtgaattaaatttgattagtaattttcacatgtaaatcaacatcaaatctatacaagtggagattttagatttttcaatcaatctaattcgcaaaaaaatattcacactttacgcattagattggattgagacccacctaaaaagataaacctcttcatcattaaaattttaatttaccaaatatgtgttaagtttacattctcattcctatcaagtctaaatcccaactttataatattcacaaattacttatgagcaatgtattagaatatttctaattaaggaaataaaataatattattgattctgataaatgaatattttat

SEQ ID NO: 353552 - DNA, 992 bp, Cannabis indica
ctaacctgaataactctggatattgagtcttcatgtcaaactctagttcccaggtggcttcctctaccttgctattcctgtagagtactttgactgatgttatgacattgttttgaagaaccttttccttcctactgaagatttgaactggttattcttcataggatagatcttattttggttcttaggcttcgtaactcaagacatgagtcaggtctgacacatattttcttaacattaaaatataaaatacattatgtacagccgataacgctggtggtaaggctagtgaatacgctacctgcctgaccttctcaagtatcttgaatgaccctatgaacctagggctcaacttgcccttcttcccaaaatgttttatacacttcatatgtgaaactctcaagaaaacatattctcccacctgaaattcaatatctctacgtttaggatatgaataacttttctgcctactttgcgaagcgagcattcgagccttgatcttgtctattgcctcattggtcctctgaactaactcaagacctaaatactttatttcctcggtctcatcccagtgaattggggaacaatattttctactgtccaacatctcatagggagtcatccctattgtgctttgacagttattgttgtaggaaaattctatcaaaggcaagtacttgctccatgaaccctaaaagtctgtaacacatgctcgtagtaaatcttctagtatttgtattgtcctctcggactatccatctatctgagggtgaaaagttgtgctaaacttcagctttgtacccatagctttatgaagactcacctaaaatttcgatgtgaatttcaaatctttgtttgaaatgatggattttggagctccatggagacttactatctcttttacctacaactctgcatacttatccacaatataagtttttttactgacaaaaagtgtgttgactttgtgaaacaatccactatgacccata

SEQ ID NO: 353553 - DNA, 503 bp, Cannabis indica
actactggcatctgccacgaataagcatcagtgtacagatatttagtaatacaaaaccattataccaataatagaattcatattcatttgatcatataaataatatatatatattacctcataaagtaaccatcttcatgacatcacgttgcctaatcaggcacatcgatgctttaatctaataatcctgtattgcatcgcctaataaggcaagcccttgccatagtctggcagccatatgtcgcaaaactgcatcacctaatcaggtgagcctgtgccaaaaacctgcacccatatatcatataattgcatcacaaaatcaggtcagcccgtgccataatctggcaccaatatcgcatcgtctaatcagacgagcccgtacttacgcccgacacttaatatatgtcactgacgcccatatctatgcccgatatgtcgctaggaaaattgcatcacctaatcatgtgagctcatacctacactcggtactcatcatatatcac

SEQ ID NO: 353554 - DNA, 727 bp, Cannabis indica
agtctacccccaagcaaggcagggcggggtacttctacttctctcagccaggcttcaagtggttgagcggcacggatgacaaggccatcaacaaaatagggtattttgttgatgagtacttcatggtgaaggatccgagtatcacccggactcggtttcagcagattttgacatatcactgtcctcccctaactcttgctcttagggataaagctcaaaaacttgcccggttgccggaggaagacagaaatatcatccagttgacctctgatgagaatctggtgaagtatggtctttaccctgaggacttttctcctaagtttgtggcagggaagaagaggaagtctcgtgctggccggcctgaacgagctcatccggagaatgagttgattcaactgaagcgagaggctaagttgaagggaggtgtcagggccaagcagtacgctcatgagcctttggatcctgaggatgagactgaggctgagactgagtagctgaccccattgaagaggaagaagaaactcccggccacgcgcaggcctgttgaacatgaaattcgcataagggagccaatttcacctgttcggccatctcacccctttgctagaaaaggaaaggttgtcatgtctgaaataaaattgatgtcaggtgatgatggacttctgattctctctgcgggcggtcaccttgcatttttctttacttttgagcttcttgactttcatac

SEQ ID NO: 353555 - DNA, 747 bp, Cannabis indica
tgttgtaccttaacggagctgactcgaaaaacctaaagtttgtttggactgatcggtgtgagaaaagttttctggagttaaagcagcgcttgattaccgctccagtactaactcttccttcagataaggaaaagtttgtggtttattgtgatgcctcgagacagggtctcggctgtgtgcttatgcaagctggaaaggtaatagcctatgcttctcgacagttaaaagagtacgagaagaggtaccctagtcacgatttagaactcgcagcagtggtatttgcgctaaagatttggcggcattacctatatggcgagaaatgtgatatacactgatcacaaaagtctgaaatacttctttacccagaaggacttgaatatgagacaaagacgttggctagagttggtgaaggattattactgtgagatcctttatcaccctggtaaagccaacgtagttgctgatgctttgagcagaaatggtcagagtcagttgagcattgtgaaacaaatctcccagcagctagcaaatgagatgacccgagctaagattgagttggttgtggggcacttggctaatattaccctgcaatccactcttttagagagaatcaaagaagtacaaatgcaagatccagacttagtgaaaacccgagttagggtttcagttgggaaggctagtgatttctcagtggatgaaacaggaatgttaagattcagaaatcgtgtttgtgtgcccatggatgag

SEQ ID NO: 353556 - DNA, 642 bp, Cannabis indica
atctctcatattggtaaagcttttattccatccaagaattcctctcccttgcttttaaattctgttttacaagttccttccatcactaaaaatcttgttagtgtctcaaagcttactcatgataacaatgtctttcttgagtttcacaaaacttgttgttttgttaaggacaagcaaacaggggctgctcttctcaaagggcaacttaaagatggcttgtatctccttggtgatgaaggctcaagtttgtccaatacctcaattcaatgtcatatttagctgaatttccatattcttgtacaccaaaacaatgtcctaattcttgttcatgttctgtgtgtaatttttcaagtactccaaagtcttgtaataatgccaatatcaataaaacacactgtcttttgtctaattctactattaatgctgctgcttattcttctactactgttactgacattaacttgtggcattgtaaacttgggcaccctgcctctaatatcctatccaaaatcttaacaacatcgagcattccccactctctcaagaacttgcagttctgcagtgcttgtcaaaagggaaagatgttggaaattattttaccaggatctagatttaattactaccaagtatgttttattaaca

SEQ ID NO: 353557 - DNA, 515 bp, Cannabis indica
gattccagtccaagttctagttccagtcccagttaacttcctgttttggttgcaattttgggtcacagggtacgtgttcgggtctgttttgtggtttgggaattgcttccgattcgggtgtgggttcgggtccttgttagggttctggtccagggctggtcccaaagccagacaccgactacgagttttgtccaagccctaggtgcatatctggatctaaatctcgggtcccagtctggtttgatttcttgtgccgggtcatgagctgggttctaggttcaagttaaggtctgggtcaggtactaggtccaagtcctacttctatttccgaggtccctatcttgattctgggtctaggtcccagttattttgtgggtttgggtcccggtctaagtttggattcgagtcctagtctcggttctggtttatgtctttgtctaggttttgatctgggttcgagtttgggtttcggtccttgtcctggtgctagtcctagttcggttctagttccattt

SEQ ID NO: 353558 - DNA, 506 bp, Cannabis indica
actactatggtcggccacttagtcattatttttcctattattttatattttttaattccatataattaaatcctaaaccctagctgaaatactataaaaggaataagatgctctcattctcatcaaactaaaaatttagttttcattctttgtcaaacaacgtaaatgagagtctccttctatagtgatttcactccttgttcttcatcaatttcaagcctttagtgatagggtatcatgcccagtcataacaagtcaagtactcaattatagtgtggaagacggtggttaaccgaaactgaaagagagaagatttaggttcagatctttattatgctctgctacagaaaggaatcaagggctagagatctgaacggaaggaggcaaatttttccactaccatcaatgtaaggttttctaaactttatatgtgtttatttcattgttcatcgtattaggatattcatatatagggtgttagattatagattataatcaacatacat

SEQ ID NO: 353559 - DNA, 598 bp, Cannabis indica
cttgtaggttagttgacagctgccttttgttggtttaggaggtgttatgctgaaaattaagtgaaaatcaaaatcaaaggaaaaaaaaaatagagaattctctttctctttctctctttcggcttacgcaaaccagaaggaaccctcttctaacttggtatttttctggattaaagctaaggattcaagtagctttgaggcaatgtaaaccctagtacctttaccttgagtttttaaagctttgttattggtttggataggggattttaagtgttaggagctgttagggtttaaatctttcgtagtatgatttctaagcctattttgaattgattttaagttctggattttagttttgagctatgatgatggaattgagaaagcttgagctttgaaactcaagtttagatctttaatggcataattttatttagtgtgttttttctgtgaattactagttggaatatattgtgtataccctaattaggtactctggaaggtttggttacatttggtggagttttgagcaaaatatgaaatttttggggtgaactggtataaaccgtgtacccgtaaaaccggttagccggtaaccagt

SEQ ID NO: 353560 - DNA, 550 bp, Cannabis indica
ttcgtagaatgcttcccatttttcagttgtcgagactcttgcctagcacgtcgtgtatttcaatctcattcactggttttgtgatgtttagctctgctgtgatggtttcccattcataagtgtgttcgtcattcatgttggcttgttattgatttctaagaattgtagatgaggagtaagggaaagggagtagtgaggggattgaaattagattttatgagttcaaaggcctgagataatagggttgtatggagttggtgatcacatttaaagctgttgggctgatattaatgggcctctacaatattacaatctgaattcaactcctctcgtacgtcagaacagtacaatagtacaaattgttttattttaattccaaatgtaattgtaaaataaggttatttcacgagtgtaaatggctgatattattgagttcaaagggttggtggtggcatttaaatagattgaccttatgttaatgggccttcacctaagtttttcaatgagttgaaccattttcgtacgtccgaaatgaaacattgtacttttt

SEQ ID NO: 353561 - DNA, 538 bp, Cannabis indica
gtcaagtactcaatcatagtgcaaaagaacggtgattaaccaaaacccaaaagagagaaggagatctaggctcagatcatgttattactctgtgacataaaggaacaaaggttagagatctgagcggaaggagtcatattatttcgctgcgattaatgtaaggttttctaaacccttatatgtttaatttcaccatattagagaattcatatttagagtgttaatcaacatacatgttagtaaatctaaatcctagtaaaataatcctcaacaagggatgatgtctaaataggtccgatggtttagggtgtccgatttaggtcaattgtgtgttcgatggcaaattagaatgtggtttaatgggtcaggtacgattatttgtccgatagtgtgatccaatttttatttgttgaaattgttcaaaagtgatctaatatttgtctgatatgggcccgatggtgttcggtattttacagatttatagttttttgagaactttttttatcacttttctagtagttttttgttcaaaattttt

SEQ ID NO: 353562 - DNA, 507 bp, Cannabis indica
gtctttaacagcttcatctcattaacacctttgttatcattccgtgcttcttctttatgcaaaaaaatttgtgctctttcattaaattcattaatatttctcacagggtgaccttacaaatcatcccataattcacccctacagtagataaataagttgttatccgagcctgaagggctgtaacttgtatattatcattcaagtttctgacttttgcagcaattgtactgaatcaactcaagtacgctttaagggactctcctggttgttgcttgatgttggtcatgttgggttttatgccctaaataaaactcaatttcaatgtaatctttattattcaaatatcaataagaaacagaagtattttcatcacttattgtgtcatttggttcatgttatcatttatttgtttatttgatttataaattcaccaaatccttatcacatttatatccttgtttattgtgtcgtcagcacagtggaaagtaatcaagattatgtgattaa

SEQ ID NO: 353563 - DNA, 682 bp, Cannabis indica
ctgggaaaatatgttgaacctcttgtttctctgctttcttgcaacttttcaacatccacactcaccccatttctttacgtttcagatctatagcaaaaatatttagttagaaggtttttgtttatctgtgtttgtatggcagggattgtcacttgcgtactaggagagggtggtgtttgttactctgtgttttagatctcttgtccttctttctttttctttctctttgcgtttagcttgtggtgttggttttgtggagatggtggtttgtggtgttgtgcgggtatagatgaaaaaggtggctggaggtcgagtttcgtggttgttcgctaggccttgtgatgttgcagctccgtggggatggacggaggtgctggtgggcggagtggagtcttgtgctggattctcaaattggggggaaatggcggtagtgatggtgatgaagcttcagattttgacggtaatggtggactgagctgttggttcgtggagatggtgattcggtttaaggattggtgaaaatggaagtggtgactggttcgtggtggatggatggaaatggtgatggtggtgttgctggtggtctcgtgggattggcggtggctgtgcgtggagctggttaatggggctgattttgggggagtcggctagggtttcagagatgaagaagttagagagagaa

SEQ ID NO: 353564 - DNA, 875 bp, Cannabis indica
tattttaaattaaaaggataaagttatcttttaatttaaaatatagctaatattaaaatatctaatcttataattaaataatatataaatattaaagaaattaacaaaattttaaaatctgaccataatttaaaaattatataatcaatttttaaatttaaacctcaaaatatcataaaatttataataatctattaaaaataaatattattaatttaaaattgatatttaagtttaaacatattaaaattttattttaattttcaggtttgaaaattcgaaaacaatcaaaacttggggggaaatcccacaaaaatcgctttttggggcttgctgccagcaaggctgcacgtgcagccaagagaggctataaaatgcccatggacgcgcgcggaggagagagttgcagggtgcctgaccgagaaaactcggtcacctgcagggtgacacgcgcgcggacatgtgtgtgaaggagggacatgccgagcattcaaacaaaatgtgtttgagatccacgcgcacaacctcgtcttgtccgagggtctgtgcgtgcggtgcacccaatctcgacaccattgaactccgattttcaaactttcatagctttttcaattttttatcggaatcgagttccgtaaaaaccaatattgcttaattttttacaaggaatccaaataaaatattttcagaatgaaaataaaattattttcatggaaaaaattcgtaaatcacattcaatcatcaaataacatataaaccaacatgaacacatccaaatcaacacacaaacaatattcatcgttttaaatccatattatatgaaagtaaatcattaccatggctgtagtaacaagtatgttgggaatattttacca

SEQ ID NO: 353565 - DNA, 558 bp, Cannabis indica
aataaaaattgtatagagagtcttagaattaatacctatatgagaatccacctttaatcaacctccattggagacaacttgaagttcttgagacagaagaagatgaataggggtttttaaaattttgggtgaggttttagggatttggggttgattttgagtgggaatgagtgattgattggaagaataatggtttttaaggatttgggataaagatttatggtgagatttgaaagaaaaaggttttgaatgggatttgaagaagaaaaatggtgtgggagaatgaggttcggcgtggaggttaggtttaagaaataagagaagtgtttttgaaatgatatggaaattgctctttttaaacttgtctgcacacctcgccgcggccaaaacacgactcgccgcggccactgaacccaaattaataggcctttctgtaacgcttaaacggccgcggcggcattacccctcgccgcggccagaggacctcgaaaaataagactttctgtaagtcttaaatggccgcggcggctctacatctggccgcggccactgggcgaa

SEQ ID NO: 353566 - DNA, 1816 bp, Cannabis indica
gcatctgtgttaactcgttgggcggagctcttggtatctttgagaatctctggcatttgccgcagttcttaacataggctctcgaatcttcaatcatcgttggccaaaagtaaccttgccttagaattttctaggataagctctgtccggcggcatgatttccaaagaatccgtcgtgaacttcaaataggattcgtgcagcttcgtcttgagtgacacatctgagcaatgtcatcgagaatcctcttctgtacatggctcactcaactatgatataccgtgcagctttccttctcattttccgagcttcatttcagttatctgggagttccctgagttgaggtaggctgctattggtgtcatccagtttggggatgtatcaatcattccgatttcttccttgccaatgatgataggctcttcgaggaattggataggaaccaagtttgccttgtcacttacattgttgcttgccaatcgagctaatggtctgcagttgtattttcttctcttggaatatgtctgagaccgtagcttttgaattgtgcaagaagattgtgtattttgctcagatatgctatcatcttttctccctaagcctcgtattctccggatacatgatttaccaccggctgtgaatcactgtagatttcaatgtgttcggccttcatctcccgggctagttttaccccaacgattagaggttcgtattcggcttcgttgttaggtgatttgaatccgaacctgactgcagcgtgcaggtgttgcccccaggcgtgacaagggaaatccctgcaccaaataattgatctgtagccgacccatccacatgtagtttccaggtcagtttttcttcattgttacttggctgaggtgcttgtaccggctcggagttgctttctggtatgctttctttttttcatgtgcattctaccacaaagtctgctaaggcttggcctttgattgctgtttggggttggaaagtaatttcgtactgacccaactctaccacctacttgagtaaccgtccagaagcatctggcttttgaagtatttttcgtagtggctggtcggtatatacccgaacaggatgagcttgaaaataaggcctcaacttccttgttgcaagaataggcagagtttttctattaacggatatcggcactcggcctcactgagtcttatactgatgtaatagactgggtgctatacgttgttttcttctctgatcagcacagcactgacggcatgttccgtgatagctaagtatattcccagttcttcaccatccagaggttttgaaagtacgggaggtttagcaagttgttcctttagctcttggaaagctttttcacactcttctgtccactcgaactgcttgtttcctcgcaggatgttgaagaatgggacacacttgtctgttgattttgaaacaaatttgttgagtgaggcgatccgactagttaagctttgcacttctttggttttgttagcgagttcatatccaggagggcttgaatcttttctggattatcttcaattcctcgggcattgacaatgaagcctagaaactttctcgagctgactccaaaggaacactttaagggatttagtttcatattgtattttttgaggactttgaagcattcgtccaggtcgtctatgtgcccccagcctttctggatttgacgagcttatcatccacgtacacttccatatttcgcaagatctggtctttaaacattttgtttaccaatctttcgtacgtagctccagcgtttcttagaccaaactgcatgactttgtagcaatagag

SEQ ID NO: 353567 - DNA, 688 bp, Cannabis indica
tagttgaaacactataaaaggaacatgatgctctcatctcatccaactattgccttcaaccaaatcaaacctacttttctctgttagacaactagtagatgagaaacaccttctatacagtttttaagcctccttcattgttcttcatagttggcctatagtgatagagtgtcatgcccatacatagcaagtcacatactcaatcataatgcggaagacggtggtaaccaactcgaaggagagaaagagatccaggctcaggtcttgataatactctgcgacagaaatgaacaagagttagagatctgagcgaaggagtcataatatttcgctacaaccaatgtaaggttttctaaactcttatgagtttaatttcattattttagagatattcatatttaagatgttacttcaacatatttgttagtaaatctagatcctggtaaaatattcctaacaattgatacatataagtgccacgaattggggattgccaactctctttgactttttcagcataatccgggaccattctccatatattataacacatgaatggtttcttcttcaaagtaatttcattataaaatgatattaaaatagggctatgatcaaaattaccttctggaaggacatagcttctgaattagggaatatattagaccacctcgaattcacaagagcgcga

SEQ ID NO: 353568 - DNA, 671 bp, Cannabis indica
tttttcacatatactcggttcgtctcacacttccaccggtaccaaattcaattcatcaagtttgttctgcgaggccaactttgccaaggcatcggcattagagttttgttctcgtggaatttgttcgatttttaaataatcaaaattttcgaagttcttttgaaccttctctaaatattttgcaatttttaagccctttgcctgctattcgcctagaacttgattcacaattaactgtgagtcactgtaacacactagatacttgacttttaacacttcagctattctcaaaccagctatcaaggcatcatactcagcctcgttgtttgaaatgtcaaattggaatcttgaggcatagtgaaacttaaagcattctgacgagattaatatcacccctgcacttgagccatcttcattggatgttccatccacgtacaacttccaagtgtctatatcttgctcaacaaatggattttcatctataattattccttctatcaagaaatctgcctatgcttgtcccttgatggatttccttgggtgataagttatgtcgaaatgtcccagtaaaatagaccattttatcaagcttccagagtcatctggttttgacaaaacttatctcaagggttgatcagttaacacctttatcggatgtgcctggaagtaag

SEQ ID NO: 353569 - DNA, 692 bp, Cannabis indica
ttgaagatgtgattttaagctttttctttggtttgaatatatgaaattgttaagtaggggctgttaaggtttgaattgcctagggttcgaattttagggtcttgttgagttgattttaacttcttgcagctggttttatttagtgttgatggttttatgcaattttaagtttagagtttaaagctttggtctttaatggcaagttgagtattgatggattgttctgtgaaattctggttagaaatggttgtttatgcattgtataggtaccctggaaagtttggttaagtttggttgaattttgagttcaaggggagatttttcgggttcccagcacagaaccggaattccggttctgggggacctgtgccaaccggtcgaccggatggtgacccagaaccggatttccggttgggaaccggtctgcctgttgggggaattttcagaaccctagttttgcccaattttgagatatttagggtattgccatgaggtttatcgatagggaaacttttagtttcaagtttaagtcccggaaagtgatttagcgagtcactcatctgtgttacaattattgtgattagggcatccatctagcacgagatttccgttcaggtcggccagcacacttgaattcggaaaacaggtaagaactgtgtataatgtatgatgtgattatctgaatgtgtgta

SEQ ID NO: 353570 - DNA, 885 bp, Cannabis indica
aattaactgagtctacaagaagtattatctcaagtagtgaggggaccatgagcctatatgaccgagctttcaataagtagatctagaatttaccaagtaaattctctaacttatcaattctcccttgcgccactatggatttggaattgaatagcactctcaattatatagaatgctctatctgtaccatgatatagataagttatgattatccattgttacaatcctaatagttaaaaatcatctatagatgattttcactgaatagagataaatttaacgttcaactcttcaatgtattttatctttaaaatacttacctacctataaatgatatttcagtaaactaatataattactgaaatgagatctcaatcatttatctctattcagtcaagctcgaatgaaattatcgtttcacttctaaatacttatagaagctataaattccatatctatgatcagtgctcccactcaattgaactaccatgttcccaagatgtatatccgccagaactattagttagcttccacaaacaacttgaagaacataaataatacaactatgttgaacctaaccatatcaggattaagatccatagacctaagataaaccgttgatattgacttttaaagatataacaataagtttataatatatcttatccaagatcaatatttgtcccttgcaatgtatactccatacatccgatactggtaaactttaccaatgccctagaaagaacatataagacttatccaagatgtaagtataccttaatcgttgattatcatgctagtctaaatccagtgaattgacaagtcataggaattaaacttttgaacatataatcatgattatattctactgtgctgacgacacta

SEQ ID NO: 353571 - DNA, 720 bp, Cannabis indica
taggtgttttatcaatgattcagccaaaccattttgagtatgtacatgagcaacaaaatgctcaacagaaacaccaattgacatgcaataatcattgaatgcttgagatgtaaattcaccagcattgtcaagcctaactctcttgattgtataatcaggaaattgtgctcgcaatttgattatttgagccaaaaatcttgcaaatgccatattgcgacttgacaataaacatacatgtgaccattgctagatgcgtctattagtaccatgaagtatctaaatggtccacatggtggatgaattggtccacatatatccccttgaattcgttcaagaaatgaaggtgattcaattgcaagttttcctggcgaaggccttgtgattaattttccaagggaacatgcctcacatgtaaatttatttgtttgaggtatcttttgaccccttaatgaatgaccatgtgagctttcaataattcttcgcatcattattgaaccaggatgaccaagacgatcatgccaagtatttaatattgagagatctttacttttctctttaactaccacatgtgactcaattacacttatatatgtataatgtagtccagtggggagcattggtagtttttctagtatgtatctttttcctgcattacatttagtaatgttcatatatttcatgtcaccctcagtagcacactcagtatcatatccatgaaga

SEQ ID NO: 353572 - DNA, 589 bp, Cannabis indica
aaatgtaaatgttcatgaaacgtagataattcacatgtttcatttaaatgtatgtgggataacatatgataattgcttaactgctcaactgccttttgttcttatccttttcgatggttaatgctgatttggacgattgtatctcacttaaaatgagttatcccccttatccatcgtgatgtgaaaaaaatgctaagtgttggcagatggtttgcctcgttatgtctctttgttcgagttaagattgcgaggtgaccgtctcgctatatgtaatctgagattgacatgtgtgactatgtacctcgagacaagcgcgtatctcgtcaatatcagttttaacaactttttattcttatctcgcttaaggctatatagtcagagttgtgaatattttttattaaaatatttatgatttattatatcaagtaattcatattccactatagggcacatgtcaacttctgaagtgcagctaaactttgggtataacattactatgcacaaccaaacacggtaatgttgttttcctaggtttatcattcccttcatcactcttaacaatgttaaacctattctcatgaaatgaaac

SEQ ID NO: 353573 - DNA, 745 bp, Cannabis indica
ttatgagaaaacctgcatcaagtgttagaaaccaaagcaaatagctttttaaagataaaagagtatagaaaatactccccctgcatgaaagcactctaacacataaaacaaggaacttttttttggacggaaaagcttacaaaccgaaacaaatcaactttttaaacggaaaagtgcacaaaccacaaacaagacaactccccctaaaaacaaagatccagagctgtaacacataatctaaaaaataagtactactcccccttgttgtctatcaaggagccaaagataacaaaaaaatgaacaaagtcataatagttcaatcacacataaataaaaagcaagagataaaaaatggaccccttattcatcatcattggatcggaagaatttcatgaagttgtccatcctcctaagaagcaaggcctgacttgtctccattcttcctaaacacaagttgaattcacccatttctgtaggagcagaagaggaagtagatgcagcagcagagccacgaaaggcttcttggacggttgagcatttttgacttttgccatttcttctttgaaaccctaaaaagcaaacacactctcacacttgaaaagattggacttttgagaaaaaattgaaagagaggtgtgaatagaggtgaacctgggtaagtgggaagttgaacatatatagcatttcaaatttaattacccaataatcagaaaaaaaaaatgaaaatggaaagtaacttccttac

SEQ ID NO: 353574 - DNA, 509 bp, Cannabis indica
gggtgctcctgatcaggtgccggtatcctagtcacacaaatttgggatttttcacacttagggttaacccctgattccatactcataaaattaaatcatgtcatttaaaattaagataatcatacagatcttggaacgagctttccaacgatataaagaactcccaaatcggagttcggaatcaaaagttatgcatttttcaaaattcaactcgaaactgcccagaaacacgagggcgggccgcggcatgcccaaaccatgccgcggcacctgggacaaaacccaggttccactaacaggggcgggccagaaaccagcaagcatgaacacgattttcaacaagagtttccgatcttttcaccccaaattctcaaccaaacactctaattaccaagtattgttgctagcaatcaacaaggaattaaaattcatgcttcaaacactaatttccagcaataacttaaaactttagattgcacaaataacacaaggttcatgcataaacatgg

SEQ ID NO: 353575 - DNA, 190 bp, Cannabis indica
gttcgaattattcaaggaagaagaagagggtataggtggccggctaggttagagagagaaggctcaggtttttctctgaaggcagatgataaaccctataaaattggccggccatggctatatggatttgggcctcactttttgcaatttttgcagttctatcattttctgcatctcattttctcaaaaa

SEQ ID NO: 353576 - DNA, 630 bp, Cannabis indica
gttagcttttaaaataaaatatcgcatcaccattatcaaaatatttaaacaaagtggagagatcacaaataatcacaaaatcaagcgtcaaatacatatcacatcgtccactagacccctagctctcaataccaatcatagaaaatgacatccaaaatcaggtagacgcaactgataaccaccataataccggggctcagattcagtttactccatgtacagattctaggtctttcacctacaggtgagtgaatacctgatctacttatgatgacacaaagactaggtcgtgaaacaacagtatgcacaaatcatgatcaacatgactctcatcagtataaccaaaagcatgcaaataataaggataacaaaagagcataatccttttattttatagaaaattcggcagcataatgactgtattttgaataaactcaaaaatcataacctgcataaatatttgtataaaaatatagttggcactcagtgtcccagaatagtccagaaaaatatgcagattgagttttcaatttttcaaataatttgcaaatcataaaaattagaatatgtctaatgttattcaacacatataaaatcaagtccaataatcaagttgagtccttacctctc

SEQ ID NO: 353577 - DNA, 547 bp, Cannabis indica
taatataacgggtaatggtccccatttgcatcgtatattttcactcttgtatccccatcaccaagagaaaaactacagagaaaggttttgatgtaaattggaagatcataccaattaaaggtcattacaaaatcgattctatggactctggtacacttccgctattccttaatcttattgtttaattctcatgaattaattaaggctatatacagatttacagtattctaacatgtggtatcagagcatccctaaattagttcttgaggatttatagtggtgttgatcttccattaaattatttttcctgcatttggtgactgtggtattatatatatatatatacttataccattgaaatttatgcattactgcatgcgattaaaatttacattgtgtatatatatatacatgatatgcatgcgattaaaaaggctttacgattgaagtttttcttttatgttctaccaattacgatttatatatactgccaattatgttttgtggcatattcataaatcaatcgtgtatatatatataaatatat

SEQ ID NO: 353578 - DNA, 857 bp, Cannabis indica
aataagcatttcgagtggacagaggaatgcgaaaaagcttttcaagacctaaaaatgcaactcgcaaagccttccgtactctcgaaacctctggacggagaagaacttgggatatacttagctgtcatggaacacgctgtgagtgccgtgctgatcagaaaagaaaacaacatacaacacccagtctattacattagtataagactcattgaagccgaaggccggtacccattgatagagaaactctcttactgcctgattttagcaacaagaaagttaaggctctattttcaagctcatcttgttcgggtgtacactgacctaccattacaccaaatattgcaaaagtcggacgcctctggacagctactcaagtgggtattggagctgggtaagtacaaaattaccttccaacctcgaacaacaataaaaggtcaggccctagtagactttgtggtagaatgcacaggcaaagaagaaagcatactataaagcaaccccgagctagtacaaatacctcaaccaagtaacaacgaagacaggctgacttggaaactacacgtggatgggtcggctacagattagctatctggtggaggaattgcccttgtcacgcctggggggcaacacctgcaagctgcagtcaaatttagattcaaggcatctaataatgaagcagagtatgaagctttaatccctggcctaaaattagcccgggagatgagagccgaacacattgaaatctgcagtgattcacagctggtgccaaattatgtaactggagaatacgaagctcggggataaaagatgatagcgtagttgagaaaaatacatgacctgcttgcacaattcaaaag

SEQ ID NO: 353579 - DNA, 601 bp, Cannabis indica
atttttcataatttattattaaataaagatcttttagcaattcttttcgcccttaaatattaaaatttttatagcaaaactctttataattttataattaaaattttattatacttataactttaatttaaaattattatacttcattatttagtttttttatttaaatatttaaaaagtaaaaaaatgaaataagttgaatgtattttactaaaaaaaatggccaaactccccatcttttttttataaggagtcatttactcaaaaaaaccaaaccaaagtcaaaaggcaaattcaaactcctctaaaaaacgaagcaacatcaaattcatacttagtgcttttagttataaaaaaaataatttaatatcaattaaaaataattaattatttaaaaatttattatacaagaagagaattctaatctgtgtaaaaagaagtctaatttttataaaaagaaaaaagaaagctttattgtaaaatattataattaaatggcttaactgttaaaatatttaattatagtagagatttatataaaaaattattcataaatattaattgctaaaataagacttgttaaatatttaattaattattt

SEQ ID NO: 353580 - DNA, 809 bp, Cannabis indica
ggttaggttctgggtctgagtccgggtcaaggtctttgttggagagtctgggtcaaggtcttggttggagagtccggttatgggtcccatatcaaaacacgaactacgagttaggttcaagcccccggtccacatctagttcacagtcttgggtccaagtctagttccacttcgggtcccaggtcccggtacaaaattctaggtcagggtctgggtccggggtcagatcctagttttcaatcccagttctaatggtcgtgtcctgggtccaggtcccatatccaagttcgagtcctaggtcccagtccaagtccaggacccggggccaaggtccaggtgccccatccaggtccgagtaccgtgtttagatttgggtctgggtttcgtggcccaggtccaaataccccatccaagtttgagtcctaggttccggtttgggtcctagtcccagtttcgattttgattcagtgtctgggttcgagtttgggcctaggtctgggttgaggtctgattccttgtccgagtctgtgtctgagtctgggaccgggtgcttgtccaggtctgggtctgggtcagggtctcgtttagaatctaggttccgagtttcgatcctggtctgggtccaggcctcggttcaagtttaagttcatatctagatccctatctaggtccgagtttaggttttggatagggtcccaagtctaggtatgggtccgagttttggttcgggtctcagtgttggtctgggtacacgacgtgtcagggcccaacttcaagtcacggtttgggtctggggctaggcccgagtt

SEQ ID NO: 353581 - DNA, 1559 bp, Cannabis indica
agacggtgccaaaggtagatgggtcgacaaactacctcaggtactttgggctcatagaacaactaagaagacagcaacgagacgtacttcattctcactagcatttggtttggatgtattgttgcttgtataagtaaatacctcgactcatagacgagagttttataatcaagaaaaaaaccaaaaacttttaaaattgtccttagatctactcgatgaaaatcatgctgagtcgcatattactaatgcagcataccaatacccagtaacaagatacatcaacatcttaacgtagattttcgttaactaaatttgagcctaaccgtgaaaatctcacacagaaaaaataaaagttataaaataaaaagtatgaacacacaaggttttttacgaggttttgcaattaaaattctgcatagtccacgagtcaatcttattcagaaatctgattattttttagggccttttttgtacgagttttgccatcccttttctgatcttgtttgctactatttataattacatagtgggcagttaattacaaagttcactgcaatctgtttacaacgatcatcccctcaaatcacggggtttgattacatatcacgtagtgtaaatacagttatgatttgaaaatcatatagctgtgattttctcgcttttaactaggtaaaaatgatcgtgtattaaacacgtctttaattgttgtatcgtgggacgtctcgacagaaactcggttcctgtgatctcaatagcaggctggggccatgttttccttccgaggtcgacgatgcatgtcttgtgacgatcgtggttcttatttacaaagatttcttcaaagcttgtttgaatgttagcttctgactcgtcagggctgtaagcctcactaacgttaactgaatgaagttacaggaatccttcccatagcgagatgggcaactcccttacttggtctcgagtcgatccgactgttgcacttagtttgtacattatatactaatgtctttcgcagttgatatgtgttgctttcgtcttcctacgtatattgtccttgatgcctagctatttgcttttagcgacatatggtttctcgctaatttactaagcaccagtttgaatattgattccttgcctaagaccttacagtcaacaggttacaaatatactctgatacttacataattaatttgttattccataaaaagcgattgcatagatccatattccctttattttgacacgtgtcctccactgagatggcagccgaatttcaggtataacaattgccccttaaaaagttttttttagtaaaaaagtactttttaataattacagagggaatttttgtcaaaatcccttcatggaaaaatgcgtcctttgattctggcggttgtacaatttcgagggccattatgaatcgtctcttcatattctgccctactcccaaccattagatttcccaatccttagctttcttgtaactggactttgtgtataaaaaggtgacttaagcttgtcattttccacaaacttctggctttttggtgagatccatcttg

SEQ ID NO: 353582 - DNA, 571 bp, Cannabis indica
gttttattttgggcacaaaacccaatagctcaatcttctcaattcgagattctgatgctaacaagagagcttcaatcttagcaagcgagtattcttcaattctagtgttatttgatatgatgaaagtatcatattcaggtggtaaacctttgaagatagcaacaatgtaatcccttgagcttagaacttctccaactgaggcaagcagatccacattttgcttaactttcaatggataatcatttaatgacatacaaccttttcgaagtgtctgtaatttggtttgaagctccaggatcttggaggaaacttgtagagtaaagggtttttcgagagcactccagatttgtctcgttgtgttacacccaaccatgcgtgtaaggaaatgttctgtcattgaagagagaagccaggaaacaaggaactgatcttgaacctcccattcaagaaaagctggattgaattccttgtgatgtcttttggacattaagaattccttgtgatgtcttttggactcactaatgcctcggcgtcattcatggatcttatgaatcgggtgttcaaagattac

SEQ ID NO: 353583 - DNA, 618 bp, Cannabis indica
cagacaagttccttagaagcctcggcggtatctatatattctgcatccatggtagagtttgacgttgcggtttgcttagcacttctccaaacaactgctccaaccccaagagtaaataccatcccagatgtagacttcctaccattaagataagcctagaaatctgagtcggtatagcctacaagatttaaagcaccaccgttgtagactaacacataatgccttgtactctttaagtacttcataatatgcttaactgtagtccaatgttcctctccaggatttttctgatacatgctcacaattcctactacatagcaaatgtcaggtatagtgcataacattacatacattagacttctaactgctgaagcacatgaaaccgttctcatgtcctctatctcttgaggatcagtggagagtgttccttagatagatagatactgggtttagaaggcatcactgcccctttggtatttgtcattgagaatctctctaacaccttatcaatgtaagttgtttgagagagagcaagggatctgctcttccattttctgatgatctgaatatcaagaacataagcagcttcacccaagtctttcatttcaaattgagtgt

SEQ ID NO: 353584 - DNA, 1032 bp, Cannabis indica
atgacttgaagatgctaaaggaagctggccgaaagaactccctggagtactatggtcttatcgcacaattgagaaaacaacgatcggataaactccattcgccgttgcatatggttatgaagatatgctgcaagtggaactagaacctccgtcacagaagattgacatatgaccaagaggttaatcatccactccttgctaaatcacttgatgaaattgaagataagcgaagtgtagcagacctaaaactggtagcccatcaggaataggtagcttggtactttaacaagcaagtgaaagcactaaaattctttgtggtagatatggtccttagaagggtattcttgaacaccaaagacagcatggtaggtgtgctcagaccgaatagggaggggccatatcaagtggttgaagttctggaatcaggagcatacaaactaggtaagtatgatgaaaaaatgcaacttgttctagtaccaaggtattggaatgaggaacatttaagaaaatactaccagtaaaagtatcaggtcagatgaccatcttaagtacgaaacaaaagaacatttactcttaagtaaatggccttttgggcggaccacgccaaaaggtttggatgaaatgacaaagtactgaggtcggatgaccacgtcttaaagtacgatttctattttatgcaatttgttttgtttatattaagctaaagatcggattagatcaatataatagcttctatgtaagttactacggttacagatgtgttctgaccaataaataaataaagatgcttatttatattcaaattgtgtcaagtctattagcaagttataaatttaccattaaatgcgtacaaaggtctgctcgtaccattagacccgaacagacaaaaagcatacttgtgaaaaagcaagtggccaagagtcaaaagtctgctcggtcacttggggggcatctatacccatacaaaacattaggtaaaaacaaataacaagcaaaaaaaaacaaacgaacacagttgcacaatgatcataa

SEQ ID NO: 353585 - DNA, 744 bp, Cannabis indica
ttcagtcctctcacatatttctatttcctggtgaaatgtgtgggcaccagatcaccagcaaacttggacagccgatcaaactccagagtgtactcggccactgacatcttcccttgagtaagcttcacaaactcctccatgtctgaagttctcacaacaatgttgtaaaactttttttcaaacagatttttaaactcttccaaggtcattacgctgatatcccaggtttgaccctcaatatcccaccagacacgggcatgatcttgtagcatgaaggctacacagttcactctctcaattctcgtcatccccatattatcaaggatacgggtaatagtactcatccactgctcgacctttattatatcagtacctcccagtaaagtcggaggttgcatcttcacaaaccgctcaaatacagaatctctgtgcggcaaaataaacccatggttacccaccactggcacaggtgctggtggtaacacttgatcaacaggggcagctggttgccttaatctacgcaactcttccacctgacgaagtatgatacctcgcatttcttggaacatttggtgccagacggcaggaagattagcattaccaacccccacattatcccttggaatcaacgaaggtggaggcggtgctagtggatcggtttgggcaaccccaggcttaacttgctcgccctgtggtctagatgattgcggagggtccattactagtacccctgtaatcaacaac

SEQ ID NO: 353586 - DNA, 614 bp, Cannabis indica
gccaaatcctgttcggcgtcgggcagggtggcaagccgagccacctagggatcagaagcgtcagccaaacgcgtagttttcttcgtacgagccatcattctatggctgggtacaaaatcagaagaaggattagcatgaagacgagggtggacttcgtgcagaagttgaagcagttccttgtccatttgatgctcgggttcccaagactcaccagggttcatctacaaaagacaacacgcaagatgagtgttggacggagtatcaagcgaaaaaacaagcaaatatgctgaccaagagtacccaacagattaaagaacaaccatgttcgaagaaaagtctaaactcaagaagtcagaaagttttcttgagttagggcaaaaaagttcatgaagcttaaagaaagcagaatgaaaaacagacgcaatgcagttctaaagtaagcctcatggctgaaagctaaagcaaggacatggaaaagaagaatcgcagaagtttcgaatcctagggttttctacagtgttctttcttacagcaaaggtaagttcaaaagcacaaacatgcaaaaggaaacataaagggagtcagaaattactcaaagattcaagtgtccgaat

SEQ ID NO: 353587 - DNA, 786 bp, Cannabis indica
atctacatataaatatatgtataaatatttatagatgtgtgtaattgatatatgcacacatatataaatgaatatataaatttaacttttgataagaggataagtttcggtaaaagcaccaaaaccaaacaaacaccatcttgaaaagatgcatgagcttagcatatattaattatataaataaatatatatacatcatacatagatgcaacacacccattttctctcactgattaatgactcttatacacagttacatcacttcaactgctttttggaatgacgaatgactcatcaaaccaacacccactttaacgttttttgaaaaaactggaaggaggtcactctcaagattacttcaagttaaacatacttggaccaccgaaaacaagatacaccttattgatatagacaataatcatcaatttatttaaggcctcttcaactgaatagtcctatacctacacagtcttatagaatcatcacacttgaccgttcctaaacattgtgggattgcacagctccttatggatcacaaaactacagtcactgtgattgctgattcaagtaactctaatgcatgccttctttctaaatcctcaaacgagtcattaattttggtgccacagatcatatgacaagtaattattccaatctcttttccatttttcagtctcatagtctcacttttattgttaccttagctgatggatcaacatcttctgttcttggatctgacactattgttcctacacctatgctcactttgtcatcagtcttacattt

SEQ ID NO: 353588 - DNA, 949 bp, Cannabis indica
ttccagcggttaggggaccctcattccctttttacacattagggtttggtttggggcctaactgctggaatttctcaattttttcagaatcaaaatgtcttcttccgcatctaactccaagccttccaagaagggggcggttcaactagccaccctggaagaggtcatgcagggtcccatggcccatgagaattttaagtctcgcgctaacggttgggaggcggacgagctacactccacattgacttgtgcccaccagctcaaaaagatcgtaacggtggcaggcattaagctatccgcctccgagaccttccaccggctgcctcaagacgaggaaacacccaatcacaactatgggggcttcggagcctggagccagacccatttgatgtccggggctatgctccctcttcaagactactttgtaaattttttagtttttgttggccttgtgtcgtaccaactgattcctcaagcataccgcctactttcaggcttattcattttgtatgctgcccggagctggggttcgcccagtccggctgaaattttatatttttatgaacttgtatccatccccaagaaaggggacacatttaaagatgaatttaatagacttcggtcccaccctttgaattagggcccagtcccttttaattaccagaagcatgtgaaggagtactgccaccacttcttcttttcctccgatttccaggccatggaccgcccggagctcctgacggagtgggttaggatccctccatacctgcggaccgcgcctacccaagtattcctccagtgggctaagactttctctacctacgacaagaaggccatcaatgttggggacttagtcacgacagagtgttgggttttatgccctaaataaaactcatttcatatgatcagatttacttattaataaagatcagaaataacattttatgtt

SEQ ID NO: 353589 - DNA, 786 bp, Cannabis indica
tcagttggcacaattccccaggccaacctcgctaatcggtcaaattgcgttgtatattcagtagcactcatattttctttctgagtcagatgagtgaattcctttctcttggcactcctaactgcttcattgtaatattttgcattaaaaagttcctggaacttttcccaggttattgtcgtgacatcatgtatcatagacaccatgtcccaccagaccagtgcatcttcttgaaactagaaagtggcacagaccaccctgtcattttcggtgacgcccataaagttcaggattctagtaatcactgatagccattgctcagttttcatgacatcaggaccttccagaaaaaatggaggagcttgcttgcagaacctttcatacaggggttccatccgattcattgccaccactggttcggcctggacagcaggggcaggtgcccctagaatttctggagcaggcattgcaagagcaccctgctacctcaatcgtttaatttcattatcttgttcctcgattctggcttgcatagctgcaaacctattttcccaatattgggcatcctgagcagcttgggcagcctgggcaacctgtggcgagttagcatcaccccggctacgtgccctgcccctgggacctctacctcggccatggacatttgggggaatctgagctccctgaccagcattagatcccaccaaattgccctggctcctggtatttcgcctggcgtccatactaatctgaacagcctgcgtacccaagagctagtatggtcagatc

SEQ ID NO: 353590 - DNA, 1081 bp, Cannabis indica
accatcaggtatgacttctcctgctgggcccacgagcggaactcatgaccggggattgggccgctaaccatttatagtctgggaagtattcatcattggaccttctcctgttccacccaggggaatgacattcggcggctgctgacctacagtttgataggcttttcgtatcagcacggtagcctgccgactacggtttttgatctcttcatggtgagcccttaatgcctccatctctctatccctccattcagcgaacatgcgcctttgttcgtcgaatgcgagatttactgcagcacgcagttcgtcctgatcatgatgcagggtgttgttatgattctgcatgagtccaagagcgtcacggagattttgtaactcagtagcatctccgatggtcgtctgggcattggttccaggcggaacagttgtgttatgaatgccctggttgggtgcagaactgttattcccagtctcttgcacaccaggcgcaattccatctataggaactgtttcaccattgcccacgttcagcgtctgtccaagattaacagctggcggaacccttgtgtttcctggattttgcaaggcaggatccatagactgtgaatttgcttgattagtcaaaccattacgagtttgcaccattgtatctgtggtcagatttggaatagacagcgattcttgattcttctctcaatgaaagcaccaaaatgttgacttcacttttagccaacgacaatgagtctgttttacaagcgataaatgatttataataacaaatatacgataaagcaataaaaagacataggaattttatagaggttcagccccgagcagttcagtaatagcctaatcctcgttacctgtattgacttaagatcaaggagaaagattccttttcttatagctcttacaatagtatctctgaatatataattcttagataatagtatagtcttagctcaactgcttttcgaccgatcttttgcccagtgaatatacatcactatttatagggctagtaaacttggagaggaagagtttccctctcattacaatgcgtataaacagaaagatcgtg

SEQ ID NO: 353591 - DNA, 561 bp, Cannabis indica
tggttgtggttgtggttgtggtgatctggaggcatggttgtgaggatttgagaattgagattcagaggtttgggggaaggatttcaatggcggaattttgagaattttggtgcttcgtttttatttttggtatttagaaactgattttgttttcctttatttatttatttttgaataattatttattttagggaatatacttctttcttttggatcctttggtaatcatattaatttaaataataataataataaaaagtaaataccatcttagaatatgtatttttcaaaatgttataagtaggatttgaattaattttttgtcaaaataaaatttaataataattttatctaaagggattatgacaaaattatttatattttctgtatctgttcgtgctaggaattgtctttaaattgattatattaaaaaaaaattgtcaaaaattaagctagtgtattttatcatttaacaaaacagagaattcaattggtaacttggttgttaaatattaagtaaatggtcacatgccactctttggtcaaagtcattaaattttt

SEQ ID NO: 353592 - DNA, 515 bp, Cannabis indica
aggtagcagttgacctcaaaaaaataattaactgacagcggagtcatatagatctaatgcttgccacgtgtgtgtacaaataagaataaaaagtaatagataataggattttttatagaggttcgacccccttgtgatagtggtaatgacctactccctttttaactgagagaattactgtccttatcgctataggtgagatcttcatagtacccttatgattacaatgtatgaattaatgtttggcagaactaaagtgttggacaacctagggtaggcctgtcagagaaagaatgaggaagagagagagtttgtcaaacacttagagtttgagatcacgtttgtagcttagaggcaacttaggttttcagacagaggttaaggcttttatgtaggacgccttaaatactaggtttaaaattaaaatcccttagcaattgtacagttagttagatatttacaaaagaccaaagtgtccttgattttagatattattcatgttgggttttgtgccc

SEQ ID NO: 353593 - DNA, 726 bp, Cannabis indica
ggaggtatttcagattgatcgtacggtacgatcaggtaggagaaactagctactcggtggatcgcttaaataactgtatatgtctatgacgatttgttgtcaaacttactcgatcgttgtagatcaagacttagcggcacactgtggagtaattcttacacaattaccctaattaggggtatgtcggaacaattgtacgattcgatcaggtagcaaatatagctactcggtagatcgctacaaataactgtaagtgtatatgacgatatactctcaaacttactcgatcgttgtggatcaagacttagcagcacattatggagtaaatcttacatgcgtaccctaataagggagtatttcggaacgatggtacgaatggatcaggtagcagaaattagctactcggtggattgttcaaataactataattgtctatgacgtatgctgtcaaacttacttgatcgttgtagatcaagacttagcagcacactgtggagtaaatcttacacgcgtaccctaattaaggggtattgtaacgccctaatctatagggacgccacgtgtgtgattttataaactagtttaatactaatagaataattaattattaaaaaccgtgataatattaaaaacttgactaaaataaaacactaaaaatggacattataacggcataaaaagtgtgttccgggaatccctgttgtaaaaagttttgctaaagaaata

SEQ ID NO: 353594 - DNA, 453 bp, Cannabis indica
aaagaggttttaggatttatttgttaattaagagaccttattaagtctaattaataaataaatgcaattttatttgataattgattttaattattaaataaatagttttgacattaaaaggattgaaatttgaaaatatggtatttgtgaaagaaaagataaattgttaaataaaatggcaaaattctaatttagtggggcctatcttatggtcggccacttaagggtaattttagccaatttttgtcatttttttaacgccatataatttaaatctaaccctaggagaaatcctatataaggaataagatggttcattttcatccaaccaaagtcattctagttttcattctttctcagataattagaaacttgagaacctccttctatagaatttgaatctccctttgtttctcttcattattttcgagccttattgttgggttttatgcc

SEQ ID NO: 353595 - DNA, 525 bp, Cannabis indica
taagtatcgggtcccatataatctaataaaataaattttaagaagtattgctagccaatcgcaaagcgacatatttaggagtgctaggtactattggtgccctatagcaatgctcaataataaatagtaacaaatcaacgcaatttttgtaataatgtttttatatctaattttactaatttttataaggatactatatattgacttcttgaaatatttttgatattttgacagaaaaaataaacatgatacatatattatttacaaaaaaataaacacgttattctctaattaaccaaacaaaactaaaaattattgctctattatatttttttttggttagtttttttatcaatcataaaatatgcaataacaatattcaattttatagataaacatattagatataattataagtatacaaccgtagatctaaagaatacctttgttgattcaaagagaagaagccaaatagcggaagcgtaccttaatccatagagagtgatgatcttaatctatcttgta

SEQ ID NO: 353596 - DNA, 521 bp, Cannabis indica
taatctgtggtttttgtgtccttgaaatcgaggtagattttgttacgagcagcctgtatttttatgggttttttttttattttttgcgattttatgcgactttgtgcgatattgtttgcgatttcatgagcaatccaaggttagggatgaaacgatttattttggcgactttgtacgatttgaatgcgattatgtgtgcgattgtaatatttggggatttttgtgcgatctttgtgcattgttatgcgattttagctgacaggatcttgattttttagtttgttttgttctgtattttttggcgatattatgcgatttttgtgcgatgttagctgacaggatcttgattttttggtttccttggttctgtattttttggcgatattatgcaatttgtgtgcgatgttagtgcgattcattttttaatttgtttggctctgtatttttggcgacattatgcgattaatgtgcgattttaatgagattcataccagaatcatttttcaagatgtcatcatttc

SEQ ID NO: 353597 - DNA, 1325 bp, Cannabis indica
aatgatgataataataaaaatatattttctatctttatttaaatttcaaaacctacccaaacttttacttttaaaacctatcaacacgtcacacacacacaaaatcaatgcaacatccattatatatataattagacaaattctcacccttagtccctattctacatgtgtatcataaaccaaactaactaaataaatttaaaccatcttagtatcataagattatctcataatttgcatgcatttaatagtttatctccttacttgtactctatttcttttctctaaatacttagagaaaattaaattataattatgttaactacctacatatatttttatattaacaactataagatctttctctatcataatttaaattccttgtgatactttcttactatatctcaacggctgaagtacacaatcaaacttaaagaatattctaacccttactagcttattcacataattataataaaataagcttaaacttataatgggctaataattaaaataaccttatcatgtaatcaccttatttcatacatctgacctatgcctataataaaaagaattggcaccaacgattttaatataacttacctgggcccaacaacacaataggccttagagttaatctcagacctcaaagccctaactaccaaattactcattccttaaggtaatcatctacttccaataattgttgtcatacaaccactattataatttttaattatatatctctacatatttagtcgattatcacaccttccgtaaccatgaaatggcatttttcccagttcaacaccaaattagaatcttcacaccttgttaataccaatttcaagttgcttagacattggtcaaacgatgaaccaaatactgaaaaatcatccataaacacctcgatgcatttttctattagatctgaaaacatggccatcatacacctctgaaatgttgctgcagcattacacagcccgaatggcattcgtcgaaaagcaaacgtaccatatggacatgtgaatgtcgttttctcttgatcttccagtgctatagctatttggtgataccctgagtacccatcaaggaaacagtagtactcttggcctgccaacttgtctaacatctggtcaatgaatgggagtggaaagtgatcttttcttgtggctttgttgagtttccggtagtctatgcaaattctccatcctgtgacagttatagttgggatgagttcattcttttcattcttcaccaccgtcatccctcctttctttggaacaacctggactggactcacccatttactgtctgaaata

SEQ ID NO: 353598 - DNA, 421 bp, Cannabis indica
ggtttatgtatgagattaaattaatatttatgaaatgtatattttggaaatatatttaatatcatatatgttattatgctattttatgtaaattacttaatttctgtgttgtgttcgaaagttgtggaaagcgacgttgggcctttagagagtcattatttttgtatgtctagaatattagcggggtgttatagttagatgttagaggtgttggaatttttgggaattggtaattgaccaatttacccttggggtgtgtaattgttctatttaattaagggggcaagtaagtcttttggtaaggtttattttgtcttatttgaattataataaggctgtatataagttgttttattttttttaaaaaaaaaaaaagaaaggaaaagctatttacttagggtagaaggaaaatcaaagaaaa

SEQ ID NO: 353599 - DNA, 655 bp, Cannabis indica
tcagagctaccaggttcgtctactaaagatcgccaagatatgtacaacaatcatcatcagagaaagctcggctcacggttcagtaacccgtacttgtttagtatgatatgtgattattaaagcatgttaggaagcatattagtttatagtttattttaatgcgttgccttaaaatctataagagcagtattaagtttgtttgatcattgtctgacatgtctggcttatgggttcgtaggctaagtcttattaaatggatgcctagcgaaatacaaggagtcaggataacagggttgagaccggaagcgatcaaggaaattaaatttcctagaatcctcgtggtcgcggcagaggccatggcaggtttcaggttggtcaacatgtgaaccaacctcaagctcctccagattgggagcagagattcatagaaatgcaagattgtatccgccagcaagatgagaaattttgagattaaggcagtagggtcctcctgcagtgcctccaccgtaagctcagaccgttgtagttcctgcggtgccagtagaacaacatgttgctggcaaccgtatagagtttttatatgagaggtttcgtaagcaagcacctcctgtagttttgcgaggtccagatgtggtgaaggctgagcagtggctca

SEQ ID NO: 353600 - DNA, 576 bp, Cannabis indica
aaatctgattatattgaaatgacttttatttagggcataaaacccaacagaggctcggggagaaaaaatgatagcatatctgagcaaaatacatgatctgctcgtacagctcaaaagctatagcctgaagcagattccaagagaggaaaatacaactgcagatgcgctagcccatttggcgagcagcaatataagtgacaaggcgaacttggtcccgatccagttccttgaagagcctagcatcacaggcgcggaagaaatcgaaatgatcgacacatctccgaactggatgacgccaatagcagcctatctcaactctggggaactcctagacagccgaaatgacgctcggaaaatgagaagaaaggcagcacggtgcatcatcatagacgggatcatgtacagaagaggattctcaatgccattactcaggtgcgtcacaccaaatgaagcggcacggctcctatatgaagttaacgacggattctgcagaaatcatgcagccggacagagcttatcaaagaaaattctaaggcaaggctacttctggccaacaatgatcgaagattcgaaaac

SEQ ID NO: 353601 - DNA, 528 bp, Cannabis indica
aattttacaatatattttttttagaaggatccactaatttacttctatttgtttttgtatttgagaattttttttaagattttttaaattgtagttatttatgacatctttatgagatttaccttatgtatattttttttaatttttttttaaatttatagttttgattattttgataatttctatataggttggtatgtagattttagttgcgatttaagttgttttgttagttgtcctgtgtatttttatatggatttctataaaaatataaaaaataatttaagtgtaaaaaatgaaaaaaaatttatttacaaatagagttcaaatagtttattttatgcatataaaataaaagtcttgtgtgtaacagacagtttgaatactatttttcacgtgttaaacttttttaaatctcttaaatttttataaaatgttttaaataactaaaccaataaaaaaaaagaattaccccatatactttttttttcaaatttacagtttaatttttgttacaatttagattgc

SEQ ID NO: 353602 - DNA, 550 bp, Cannabis indica
gtcttgatcaatctggccgtgtctatatttccagggatgtccatttcgatgaaactctttttccatatgcatctcaacagcataccactattacacctgaggttatagcatccttttatccatcatccattattccaaccatcccaactgtttccactagtacacatcagtctcatggttcagttacaagtaacaataatattgtgtctagcatacctttctctgtgcaggatagaccatctttgccatctacttctgctgcaataaatcctgacattataccagaccaagctataccacaggacaatgattctatggatactgatcctcctgctgtcactactacagatccttcatctgctcagaatcccacttctaatgaggctccatctcctgcttctttaaatgagcaaactgtcccagctcacaccagcacctctgagcctacccctggtttatcagctgctaatgtttccagcaatgtggcacctccttccacgaattcgcataacatgcaaactcgtgccaaatctggcataagaaagccgaa

SEQ ID NO: 353603 - DNA, 617 bp, Cannabis indica
catctactttatattattttatattattttataacattgatatgattttaaattattaagatgttgtatagttttaaactagaaatgtttataatcttttttatattaaatgtgattatctaataaaaaattttatgaaaaattataagtttaataattttttttcctcaacagttaaaactaacactattaaaaaattaattaattatttaattttttaaataaaatctaaattttaattttatttattaaaatataacttagataattatttagaagaattgtttatcaagttttttgaaaactaaatatgttaagagcttaaaaaagataaatgataataaataataaacaaatagttttatacgtaattcaggttttaatgatccttagtctacgagtctatattattggcctctttgggcaaatgttttcaagactacaagacattacaatgaaggttgctctgcttctcttgagagagaggtttcttagaagggcaatttgcggcataacctctttaagtggccaggtttttgcaactaatcctcaattctaaaattttggtggtaaaacctcctaaacccaaattttgttagcacttagccattttcatc

SEQ ID NO: 353604 - DNA, 553 bp, Cannabis indica
tgtttttgtttaaaaatgttttagaaatgagaacaaaaatagtttttgaagtttttaaaacacaagtcacgtttggttagtgatttttaaaaacaatatggaccaaaagtgaattgatttttaaaacagaaaacaacattttgttgttttcaaaattcttgttttatgtaactttgttttttgaaaactgtttttaaaaagcaaggccaaacaagccaaattgtttttaaaaacaattttctgtttttaaaaacaaaaaacagttttttagttatgatgccaaacatgcacttaaactcttccaatttcacttttgttatgtatgtacagttccttttaaaatactctattaactacaaaatacattttcaaattctttgaagtgttgttgtagtttgaatttttatttcaactgtacggtgcaccgtagtttgtagttttgaattattaatatgagattcaaactttacctctacacgtattataaaaactaaaattatatgaaatatgggattttgtaaaaaagttacaaaaatatgtcatttataggttt

SEQ ID NO: 353605 - DNA, 728 bp, Cannabis indica
gttgtccaaaaaatgaaaaataattccaagtttaaagaccgcttggccggtcatgatgtctgaaaggccttgaggccatataatatatatatatatataaacaagagagataaaaagatcaatgatcaaacagctggagtcccaggctctgggttcagttcttctaagccaactggagcaggaggatctattgttggagcaggaaaagcatcagcagtctggtcagaagcttggccggaagttcaaacaaccacctctttcccaccataggcaacttgggcagcacagtactcgaggtacatgtccttggcgtcgcccaaatagtcgaagttggcctggggattagcgttccaaaaatcaaagaagagctcgaggccggcagtctccaaagcattgaccttctccttcaaatagtccgcctcggccacctgagcgtccttatcttccttcagcccaagaaggacctgccgcagagaactcctctcatcctgaagacgatcaacctcagcgagatagggtctcgatggtttcctcaaagcgatcagtagcctcgagttcctttgttagcacggtgatcttcggtagcaaacagcttcttgttggcctcacccaactcgtgacgaacagctgcagtctctgccctggcctcctcagcttccctcttggccaagtccgcctctgccctcaaggtgtcggacaaagccacactcttggaagtagcagattta

SEQ ID NO: 353606 - DNA, 562 bp, Cannabis indica
ttcctacacagtagagcacccgtgagccaagcccaacaagatggtataaaatatattaataatatgctcatcatataatataaacagtaatgccattcaaatctgtctgcgtgacaccgacctccatgttgggctcacatgcctgtttatgtttacgtgacataaacctacgtgttactctcacacgtctattcatgtatacgtggcgtagacctacgtgttgctctcacatgtctaaatacaataagggcttagaatggttcatctcggttatggttaccgagtctaacccgattatgtcttgaacacataacccttaaatctcaatataatcatatacttagcatggcatagcatttacttaacttatatcactagggtaataaccctaggctattaacggctcatattagggtaataaccctaatcccagttataattactcacaaatatcatattcaatgtaatgtcctcgcttcaaacctcaattgggcccttacacccacggactaatggctcttatacacgagtacgccactctggctgcttcctggattgatga

SEQ ID NO: 353607 - DNA, 484 bp, Cannabis indica
cttgatgggggaagatgagaatataaattggttcttgtttcttggggaccactaccaatttataacctatgagcccatattgaggattttaatccaacaatacatacatacatacatatatactcacctacacatacacatatatatacccacatacatacatactcacctatactcacatacacatatacacatatacaaatatatacacacatacacatatacatacactcacatactatatgcatatatatacatatatacatacataatcatacacatatatgcacatatatatataaatctaaatatttaaaaaataaattaaaattaaaaataccttcaggtggtgtgttgggcggtaatacagtggtgcggtggtgcattcggcggtgctgcggtcaacggtggtgcggccagagttggtgatcagaggttttttatttgggaaaaaaagagagaaacaaagagggattgagaggga

SEQ ID NO: 353608 - DNA, 727 bp, Cannabis indica
gaaagttatgagagttattggtacaataaagagggtcattagttgaatacaaggaagataatgagcctgcaattgaagatcaagatccttttaaagtggtattaactcaaaatttggctacatcagattcttacttgataatgaatatcgtgtagtgaatgaaatcatagaagagaatgaattcatccatgatcaggaactaattgaatatgaaatcacaagtaaggtatggatagccaagtggagagtaagcaacaagaagaagggttgttacatgaaagtgtagatactgtgacattggaggatgaggaagcacatggcatcgttgattcgacttcatcaatgatattgactaataaactacaaatggatccatatattttataaacaccatattatatcctctacgagctacgaaaggcttctctccaagctcatcatccaaagtcttatgttgttggtgctgactttagttcaaactcatcacttgccaagcttgaagacaagtacaacaataattttcaagttgtcttgcatgacgcttattatggacgtcaactgcttgtgatgtggcgctcatgtaagtttcctttccctttttctttaatgtcacattagggaccatgtgtcactttagtttggggggtgacttaaatttttatttttagttttttgtttttaagtttttacttttttagtgtttagtttttattgttttgagtcgatt

SEQ ID NO: 353609 - DNA, 437 bp, Cannabis indica
ggcataaaacccaacagaatcgctcttcattctaaattgaaccacaagtacaatggtggtacagactcgtacgagcctagttgatccagcaaatccacaggcgatggatcctgcattgcagaacccaggaaacacaaaggttccaccaactgttaatcctgaacagccagcgaatgcgggtcatggtgtaacgactcttgtggatgaaatcgcgcccggtgtgcaggagacttgaaataacatttcagcacccaaccagggcattcataacacaaccgttctgccttctaccaatgctcgaacgaccattggagatgatactgagatccgaaatctctgtgctgctcttggactcatgcagggtcatacgaacaccctactgttggaaatagtttaccaggatctagatttactaccatgtatgtttcattaacatc

SEQ ID NO: 353610 - DNA, 605 bp, Cannabis indica
ggaggaggcggttggccatagggatgcgggggtttaaggtttcgcaccattgtccaatcaatattccgttgtggctgtactagattatcataaggatattgtggcacattatgagcttcacacaattcagttataactcccgctaggccaattcccgcatgtgttgatcctgcgaccatgttatctaaactattcagaatgatacccccaaccggcacagtaatccccttcattattgcataaacaactttgagtctatccaatggaaaatctgataaatgcttactaggcataagcctagcactcacaaaaaacatccaagcgcgagcaacttgattcaattcacagcgataaagcatttggggctcatcatccacctcatgcaatcttaaccccggaaaaccaactgtttctgccaagtccacaggatcaaacgttttctccataaacgttttgtagtgttgtctattcaccatttccacgttaaacagtttatggatagaaccataagttgcaagcacatttgttttgcggacccgtaccctatcgttctctgcttcaggccaattggctaaaaattcaagagccagagtttgattgattct

SEQ ID NO: 353611 - DNA, 651 bp, Cannabis indica
tccatgtaaatggttagattaacatttttttgttttaaaaaaagttcctatcttgaacataacatattaggctatcactagtgtcatccaaataataataggttgtacttttaaaattctcccactaacgataaggtactgtgattctatgtcgaaggacttcattagcatccattactgtagtaggagacactggaacatatacaggattaagaataaattctacttgtttgctagttagtttattatattatatacatgtctaatcaaaataggtgtgttatagagattttgtggtgtattaagtatagtctagagttcagtgagtttgaattacatatattaataacttcttccacccttaacgtgttatagagattctgtggtgttttgaatatagtttagagttcaatagatataaaagatctttgaactgcattaataatttcttccaccccttatcagatgaaaatatctttatattaaataaaatcttaataatttcttatgaaatgaaaattattcataaacatttgaattctaagtgtttatgtagcgttatctctttacagagattaataccttagattttgtaccaataataaatacaaaacacataaaacatgatataaatataaaacgtattggcat

SEQ ID NO: 353612 - DNA, 1011 bp, Cannabis indica
gccctaggtttacaggacctttcgagattctcgagaaggttggtcatgtggcatatcggttagctttgcctccaactctttctgcagttcataacgtattccatgtctctatgttgagaaaatatgtttcagatcctactcatataattagttatgagaaccttgagctgcagccacacatgtcatatgagaaacaaccagtacaaatcatttatagaaaggataaagtctttgggaataagaccatagccttggtaaaagtactctggagaaatagcaaggtggaggaagccacatgggaattagaatcagatatgagagcccagtacccagagttgttcaggttagattttgaggacgaaatccttttaagcggggatagttgtaaagatcgcttagtttaaattttgaaattagcagataattagggtttaattatgaaaattatctatggatattcaaatcattatttatgttgatttattttaattcagaatgcattttatatgtcatatagtgaaatttcataattttgcattttcggtgcccgacaatatggaacgcggtgtatggctcagtagaatcacaatctaatattttagtatagcgggacggtttagttagacattgggaatgttgggaatttataatttcccaaaatacccttagtaccctttttatgtcaacttagtgtgagagggcaaaaaggtcattttgcccatttgtaattgtcttttatggatttttaattatgttagtaatctgatttttctaacttggtttggctaaaacaaaataaggaaaatcaattattatttcattatattagaaaagttaagaaaaatcacatttttcatctctcaagctcactttctctctctcgaaaattctaggggctgctagggtttgattttgttcttcaattcaacaagtttgtagcaattcttagtgtaattcaagttgaggtaatctttgaacaacctcgtctttgttttcttgaagtttaagaaa

SEQ ID NO: 353613 - DNA, 840 bp, Cannabis indica
gtctttcttattagggatattttagagtatagaatacaacaactgatactgaataataatgattctttctcaattgctgtcccttttctcatggattctgcccctaggttggtagatattcttttatggatagatttaaatataaatatatatgaaacatggacaatcccacatttcattcaaaccacacgtgagatcatactaaataactaccaaaccgttctttagttttatcctttatagatggttattgttgacgtggaaggttacatctactctaattcgagttatctttcttgtccatcttgacaagaaaaaacactaagtgttaagaaggtttccatctcgctatgtcctctttgtggcttttgtaatgcgaggtgatcttgtcattatatataatgcaaggcagtttatgttgatacatttattctgctcggatggatgaatatcttcttctttttttcgaggcagatcaatagttattattcttgtctcgtttttgactataaagccaacgcgttttgaatattatctatttatcctttaaataataacgagttattcaatatgcattcaatgatatcatttagaattgattcgtattccatacattggacacgtgtcaacttctgaagtgtagccaaaatttgagtataacaataggtttattgaatttttaattatttttctttatttaagatatgagtttataaatataaataaatttgatattttctttaaaaatcttagtttgtttaaattatttattggattctcaataacttttgtttaattttttaagttacctgtttataaatgaaataaagtttgaaaata

SEQ ID NO: 353614 - DNA, 623 bp, Cannabis indica
gtattttgctcagatatgctacatttttcttctcgagccacgtatttgccaaatacatgatttaccactaattgtgaatcactgcagatctcaatgcgctcggccttcatctccttcgctattttaagtcaagtgattagggcttcgtattcggcctcgttgttagaggctttgaatccgaatttgaccgctgcatgcaggtgttggcccccaggtgtgacaagggcaattcctgcgtcgaataattgatctgttgccgacccatccacatgtagcttccaggtcggtttgctttcagtattactcggttgtggtattgactcgagatcgctttctggtatgctttcagttttgcctgtgcattccaccacaaagtcggccaaggcttggcctttgatagctgttcggggttggaagttgatttcatactgacccaattctaccgcccacttgagtaaccgtccagaggcatctggcttttgtagtatttgtagtagtggttggtcggtgtacacccgaacaggatgagcttgaaagtaaggtctcagctttcttgttgctagaatgaggcagtaggcgagcttttctatcaacggatatcggccttcgggctcgacaagtct

SEQ ID NO: 353615 - DNA, 507 bp, Cannabis indica
cctattctcaagcctcgggccaaatgattaactttgattaatcatccattcttttttcttccaatactactgctaatgtccgagatatgtttatgcatacttttcaattagtggataagccttttatttctaagtatcttgggcttccccaatgtttttctcgtgctaaataccaatctttttcatttcttaaagacaaagttttgtcccttatccagtcctggcatcacaaatggttctctaaggctggtaaagaaattttggtcaaggctgttcttcaagccattccttcttatgctatggcttggttccgaattcctaccataatttgcaaggaatttgaatcgattgtgtctaggttttggtggggctcttcccctaatcgtccttcagttcattggaagagttggtctatgatctgtcagtctaaatttgttgggaggaagggggtttaaaggttctttggttgtattctaaccaacgcactgtagtcaagcaggcttggag

SEQ ID NO: 353616 - DNA, 1034 bp, Cannabis indica
gtattgtccaatgtatttttaggacatgaaattaaatttctattgggaatctaaaatttaatgtcaaagacttaaatttataccaaatatttcttgagttattatactagtttggaccaccactactaatctaactctatgtttagggtgcctatagtaagcataagcatagtcaaggaggagatctcttagatcgagaatttatatcattttgggatagaatgttgggaatgtagtcatctgtaccattcaatttcatagaagaaaatacaatgacatcttaagcagatgatttataaaccattcatccaataatatactatctaagcaaattctaaataaaaaagctaagaggaaactaataaagaataatttcgaataaaataagaattcaacaatgttccgtttagccgagagtcaaaattattcttattttataaatctcttcattgtttcatattgtaatgactagtctaagttgtcatctttggatgtacaagtagatggtgcaattacaaatatttatctatcgagatctaacactattatgattgtctaacggatgacaatcctttggcatttgtcccattaaaaacaacaagctaagttagaccaacaatgaagattcgaaattatactacaacattattaacagaaaacaacataggttcaatataaattcacacacattcagaaattatcatacattttgcaagtacgaaagaaatgtgaaaatacaaaataaagacatcttaaataagttttaaggttttcaataaactgacactgtgtcccatttaagcgagagttaaagatatcattcatagaatagagcagtcaattaatctaaaatggataccattctagcaaccttttattcgatcaagactagaatccggtgttgtctcatttaggcgagagtcaacaccattctatcttatgagcttccaccattatttcatactttgtaagtcttactcttagcagccactattgggatggacgttactaaaaataaaacacttacaataata

SEQ ID NO: 353617 - DNA, 630 bp, Cannabis indica
agttgggaaccactgggtgagaggtctcggtccgtcaggcctattgcagtgaaggcctccttgaagagtagattcacggaacttccgttgtcaatcaagactctggccaccactttattggcgatgggggtctctatgaccaacggatcatggtggggaaaacgcaccgtcttggcgtcttcttccgtgaacgtgatgggttgatctatcagtcgggaccttagtgctgggagctgagtaacctcccaaacctcattgtgtttcacggcccccgcataccgcttcaattctttgcgggtagttcctccaatatgggttcctccttagatcatggccactctcccattaggtctgggtggcagaccgggaatatgttgggcatttccggtgggagcaactggagccaatactcctgctgcacccactggtgctccctgcggcacaacccctgtcgcctgacccggattaatgtgaggcagccgattcttgatccactcatagaggtgccccaattagattaggttttcaatctcatccttgagatttttgcattcattggtgctgtgcccaatgtcgttttggtactcgcatcttttgttgggctccctcggggctatcctgtcaagggag

SEQ ID NO: 353618 - DNA, 795 bp, Cannabis indica
tgtacagagccggaccttgtatacctgctcggagtgcgtccatgcgatgacgaagaggctgactctgcgtcgttgtctctcgatggtcgactgcgaggattacggcgctcaggatcttcgtcaatttgtgcgctctggttaggaaaccttgcggattgatctcttgacatcggatggttcaagtccagagcttcagggttagttcttcgttccctgcgtacacggttagtatgacgtctagaagttgttacctgagggttatcgttgcgaatggcgggaactcgaggagggcgtcgagctcgactctgtccatctacctcggcttgtagtgcccgcagttgatcctgaattgcagcatattgatcagtggtgagctggaccattccctcggatactaccgccggagtgacggggggaaaatgcatggttgctggtggtgtggacgtgtccccgacttgagggccagtcgtttctgggaataggttgagaggtctgatattgctcctccctactccgccgttgatgacgtccacaggtggcactccagctccaggcagtggtacactcatcattccaatattgatggacccgttgttagcttcgttagcgtgatttccagccatgatgaatagtgttctttgaagtgaatgaaatctttagtcgaattcccacagacggcgccaaatgttgtcgagtgaatttcgcaacaccaaaatgtattatttaattaatataaaaagagaattttcagggaagtgacaagtgcgagtattcgacctagaatggcgagtactc

SEQ ID NO: 353619 - DNA, 518 bp, Cannabis indica
aaaactaaattagtgataatttatatttaaatactatgttttagtcacaagtaattttttgtttttgaataaaaagttacaatttacaaaaaattaattttttttatagtgatttttagaaaactgtgtcctttttatttctctttgttattttgtaaccaattttcaaataaaacctataattttttccaagtaatatactaattgtaacacacttgtattttttttactaacaataatatttagttaatgtcaccataaatttaagaaaaagtgatatacatgagtcaccactcattgtgtgtaaaattatataatgtgaatgtgtgtctaatataattttgggataattagatgggaaagattttttttttcttttcatttttatgattttttataaaaacaatacgaaaataacaagaaaactgcacgaaaataacatcaaaataacaacgaaaaatcaacaacaaattaacaagagtacaatataaaaagtccgtattttctgtaaataaaat

SEQ ID NO: 353620 - DNA, 836 bp, Cannabis indica
atctgagaagactataaattaccttagtaaacctgctattgcatagagattaatattaggaaaataatcatattaggccatattcaatagaaacaattgaaatcgaagccctagcttttattaactatcaattttcttgaataattgcttcttactagtttcttatttttaatttctttatttttatttagccaaataaaattaaaagtttaattttaacgtacttaactacactccttgtgggatcaacctcactcctggtgagtttactacttgaaacgatacatacacttgcgtgtgctaaatatcgcaacaactggggatgattttctgtctaaatattcggccagtatagattgtaagcggaaaatgttgacttttcagtcggaaggtgaagatccatttgtttatgttggatcagttcaggggtctcggatcccatttatttctgcattgagggctaggaatttactatacagtgactgtgtaggatttctagcagtggtgattgactccagcagacccgaaacatttgggcctgaggcagtcagggtggtaagagactttcttgatgtgtttcccgaggagttgtcgtgattgccactgcaacgagaaattgattttgtaattgatctggcacctggagtcgaacctgtttctaaagctccatataggatggctccagcagaactcaaggagcttaagttgcaacttcaggggatgcttgacattgggtttattcgacccagtgtatcgccctggggagctccagttctatttgtgaaaaagaaagatggttccctcagaatgtgtattgattatcgggaactaaacaa

SEQ ID NO: 353621 - DNA, 800 bp, Cannabis indica
aaagaaagataacagaaagtagttacaaggaaacagtaataactgttttaactaattaattaactaaacagttagtttaggtacagtagtagttgtatcacaattgaatctacactagtctatatatatattcaatatgaaaaacagaataaagtataaacatatcaaaatcatacatgcgatgaaaggagcaaaatatctctagacattgatctttgagcttcaatcaccagtaatagcttcgggttgagaaattggactttcaagctctctctactctctttaaatggaaaatttgttgttttcacaaaattagtgaagatttttgggaccgatacccctatatttattggtgagatactccatcagtatctgcgtcacattaattgtcagattattttgacaattaatttggaaaatcaaattagttaataaatattgtaatctgatcatatataaaatattaactaattaatttgttcaaattcattgaacataaaatattcttttttcttatacatgtataaaattgatggtttgagaataaatttgtattggttttgtttaaaataggtagatttgtggttaatagtttgttgtggtaatgtaagtagtgatgttgatgagtagttgtagatttagtatatgagaatggtttgggcttagaagagatggttgtatgagaatgtagtcagctttattgatagtttggatgttggttgttggatgtgttggttacaatttagaacccttaagggtatttatagttgctcccccttacactttatggttagaattat

SEQ ID NO: 353622 - DNA, 577 bp, Cannabis indica
ataaaacagcaacaactaatagagagagcatcaaaataatattataaactaaatataacaagggaaatttgaattttatgcttacaaatatctaatattttccccctaaatacataacatgtaatatttgtgggatatgacacattttacaatatccctaaaatactcccatttacattatctcctatcccctctcttcttctctctttcttcatacccatcaaaccccaatcggggtccccataggatccgtcggacccaaatttttttttacccaacacatgcatcagacccccatcggacccgtcagacccaaaagttttttcgacacatgcattggacccatcagacccaaaaatagaatttttcacacatgcatcggaccccatcggaccccatcgggccatcgtcttccccaaactgcgatttccccaaatcgcagatctaaaccttggacattgttgggcaccgttcaggtctcctccgtgccgaagtgggtctcctctgtgacgcggtgatgagggtcagaatggtgggtgtaagtctcggtcggagtggtcagtcggagtgggttgtg

SEQ ID NO: 353623 - DNA, 547 bp, Cannabis indica
ccacatctcttttcatcccataccaccaaaagtagggttttagatcctaatacatcttggtggttcccgaatacagtgaataaggcatggtgtgggcttcatcgaggatttccattttaagtgaatcaatgttaggagcacaaacataagctttatatagcaacatttcattgttcgagattgaaaattccttaggctgaccagccatcacgtcatctcaaattttaattagctcaggatcttctaactacgcctttctgattctctcaagcaaatcagattggtgtgtcaaattatgcaactttccaacacaaaattcaatttccgcattatccatttgtgaggccagttgaggagctatcataacagtggtgaaaacctgcccaggacctctactactcaatgcatcagccacaacattagctttcccggggtgatacagaatctcgcagtcgtagtccttaaccagttccagctaccttctatgcctcatgtttaaatctctctgggtgaaaaagtacttgagactcttatgattagtgtaaat

SEQ ID NO: 353624 - DNA, 830 bp, Cannabis indica
tatattcattgggaatgtgtaaccaatagttacaaaaatgcatgtaccttaattctagggatcaccccacaaaaacactataaataccccccaaagctcattaaagaggggtcgagaattctgggtttcataagaactaaaagagtaaaaaatcaccaagaacattctctgtattaaatactatcataaatatacagactcgtggactaaggctcattaacgccccaaccacgtaaaagtctctctcttaatttcttacagctctccaaattattattattttattggttgccgaaaacctcggtcaacaatgactcttcctaattgtttctcaagaatatttcgaaagattttgactttatcaaaaatgtcaaatttttcttttgattaagtaggtaaagccatctcgagaaaaatcatctgtgagagttataatatagtgtttcgtcatacgtggtggaataaggtccactgatgtcagtgtcgataatgtctaaagtatcccaaccataagcatcaagaggaggaagaatttcagctctaatgaatcgatcaacccttgcttctgaaatatgaagcaatcttttgtgccataataataaggatgttacattaatgtaagatctcttacccacattattcacagcactgaaagaggaagctaaggaagtcaatggtaatttgaaaagaccatcggagtaaaatcagtttccaattattcagagtcaaacatgatgtcaacactataattcgcaaaatgaaaagaaagacattgtttaactaaaagctgaagcgaaactaaattacttttaaaagtaggaatcaagaaa

SEQ ID NO: 353625 - DNA, 821 bp, Cannabis indica
aatcaagaaagtactgttcaaaataatctgaacactacacagtaattcaagaataaatgtgccaacatagatagtgtcaattctaacataagtccccactttaagctttgaatccctctcacttggctttctgagatcccttagccctcggctgtattttttttataatttttcctatcttttgttgggcttaggttgagaaacatagtgagaaaatgcattcttctcttttcacagcttgctttcctcagcaataaactgagaaaaaaggtcactaacactccatgttatactataagtgttgtaggttatcttgataaggtgaaaagaggcagaaagtgcatgatgagcacgatgaataatgtaagaattaggaagaggaatagtatgatcttttaacttggactgaacattcacaattttcaaaataaatctcacactcctttaatttatcatactaaatggttgtcattcgatccatacgatgtccaactacagcgttttcactagtgtcaaatagtttttctactgctttgaaaaaaaaaaactcgttagcatttgtggtgtttggcaaaccactaaataaatgttcaggaattgaacttttcatagtactgagactaagatgatttgaaattttccattgtgcatgaagagttatgtaggcaacaatgctcgtatcagcatgatcaacaaatttttttttctcgcaggcataagtccaagtctattatgccttaagtaattttcgcatctcgtttccatgtcttaaagttagaagcattcagaattcagatgaaaacgttattgttgttctcaga

SEQ ID NO: 353626 - DNA, 644 bp, Cannabis indica
attcacgtaaatctacatctggttacgtgtttatgtttgctggtggagctgtgtcctggaggagtaacaaacaaactttgactgctacttctactatggaggctgagttcgtttcatgttttgaggctacatcacatggtgcatggctaaagagtttcatgtcaagccgtagagtttttgattccatagcaaggccattaagaatgttatgtgacaattcagctactgttttcttggctaagaacaaaaaaagtggaagtcaaagcaagtacatcgacattaagtacttagctattagagaacgtgttaatgaaaataaagtagtcattcaacacattagcactgaattgataattattgatcctatgacaaaaggcttgccacctcataaattcaaggatcaggtagagaatatggaactcggttcccttatataatttgtacaaataaaattgttattaatgaaactcttattttgatgtattttgtttggtaaaattgatatgcaagtatatacgaaatcgaatcaagtaatataataataaatagagtatcgttctcacgagaattgattatcaattaccaatcaattaattctttagttttattttattaataaaaattgttggagaaaaagtaaataa

SEQ ID NO: 353627 - DNA, 741 bp, Cannabis indica
ttagggtttaattatgaaaatcatttattagtattgaattaattatttatgatgatttatttgaattcaaaatgcatttttatgtcacatatagaaatttcaaaagtttgcatattttgtgctccgcaacattcgaacgcggtgtatggatattagaatcacatcttagaatttttagtatagcgggataatattttagacattgggaatatcgggaatagtcgggattttagaattcccaaaatacccttaagtacccttttatgttgttttaatgtgggagaggcaaaatggtcattgtgccccattagtcttttgtctttagtggtttgttattaattaataaaatcagattttttttattaaacaaatgggctgagatatttaataaaacaaggttttacttcatttattcaaaaataagaaaaaacttggaaaaggaagcattacactctcaattctctttctcattttcgaaccctcctaggtcagctagggttttgacttttattcttcaatccttgctaattctagcagcttaaagttaaatccaagcaaaggtaacctcttcataactctttctttggtttcttgaattgtaaaataatggaatatgcatgtttttgtgtttttggttgttgttcttgctgctggtgattggttatgttttctgtagtggatttatgttaaaataagttaatttgggcaggttttgattggtagtttgttgtttgagcaagc

SEQ ID NO: 353628 - DNA, 409 bp, Cannabis indica
tcaactccacataatctctataacacttagagaatcatgatctttataacctttaggggtggatcataatctctatatacttaggggtggactttaatccacagtactctctgtaacacatattttctttaaacatggaagtaatataataaattagctattatcagtataaatccttgatcttgattatatgttccagtttagttttactgttgtagtaaataatgataccaataaagttctttgataataagataaaaaaattctagcatagtctattcgaatgacttgagccaagattcttaatcctcataacattttatggtatcttaatttgattacttaatctctagcaagtatttttcacttcaaatactagtatgctatgttgatgatttagtcttaaaag

SEQ ID NO: 353629 - DNA, 1008 bp, Cannabis indica
gtcgtcgtggacatctccgactgttatgaggcggtctgcagcggggtaccaggtttggagaggagcagaaggggtttcagggctaaggttcggtaagagagagagggtgaaagaaatgtgttttaggtttaggttaggattttttttagcagagaaaaagatagcgtcaaggaattagggaattagggttttttttaaatttttattttttaaaaattgtttttttaatttttaaagaaaaagaaattttttattttttctatttttcatttttaaaattattaattttttattttttaaatatttatttacgtggaccaataaaattgtgtcacgtgtacactgtgtacacgtagacattccaccatggcagttaacagctaaaaatggatggaaatattaaactgttaacagaacacgagtttaggaggttttaccaccaaaattttagagttgggggttagttgcaataaactaaatacttatggaggttatgccgcaaattactcattaggaaattactctttgttatttctcttatttttatcttagttctacttattttagtgacaaaaatgagagaactattttagaaatattggtgaggttagagtgtagctattgtactttttattctcaatattgatattggttcttttgtgcttcatcttcatatctcatttattaaattgttcttcatcttctaattcttcttccaaacttaattgtatcttttataagtttagtcatattttttttatgtaagttaggctattaattattttggtacatttattatatcatatatcgtttactgcattctgtcaatagtggtattttgtcgatttaggatatataatatgatatactgttaaattagaagtgagatttaatgtattcaacattaattaatttgtgattttaacatatatatatatatatcttccaattgtaattaatggtgtagaattgcaactgtgttttaaattaatattagtattagaatag

SEQ ID NO: 353630 - DNA, 638 bp, Cannabis indica
taaatctgggacccaatccaaaaaacagacttgcacctagatatggatcagaatacgaacctggactcataccaagacccagactaggatcgaaatgatggacgtagatctggtttgagatcctcacccagacccaaacttggacccgaactcggaccttgacccgaacctagacccagatcgaggtccagacctggacacaaacctggacacagacttgcacccaaacccacacaataaatgggaactggacccagaaatggaacaagacttggacccgagattgggattcgaatctagaccaagggcttggagaaaacccgtagtcggtgtttgaatttgggacccagtcctggaataataattgaaattggtcctagatccagagccgtaaccgaactaggaccagactcaaaatcagacctagacccgaattggaagccgtacccggatcccaacccaatcctcgactcgagacccgaacccaaacttgaagtcagagcaaaacatggaaccaaactagggacatagaaacaaggtcgggacctagaactgcaccccagtctcaatcccgaacccaaactcaaaaatgggacctgggacctgaactagaaccagaccgagacccgtgacagtga

SEQ ID NO: 353631 - DNA, 523 bp, Cannabis indica
ccctatttatacgcgtgaatgactgttagtctttcactgtataatgttttgattggtccacgtgaattagcttgtctttgtttcctcgcgcgctttttctccttattcctatttactaaaatcctcaagctctggttctttaatttcttcaagctttgttccgtcttatttttttttggctgagttttgcttttttcgagctgttttctccttttagtgaaacaatgcgcttagcaatcctgccatattataatatcaattctgatttgttactaatgaaggagttacctttttaaccccaagatcttttttattagctacaattaccgctcggttctacaatttttaagctcgtgactatttcaatttgagctctgatgtcatgaaatcgattacccaaaataattcccacgtgtcattaataaggcataattgatttaatagagtaatcatttcgaatttttgagaaactgtcactgccttttctatttatccttatattttcattttattcttaatttaa

SEQ ID NO: 353632 - DNA, 590 bp, Cannabis indica
atcaatgctacaaatattgttctcattcctaaggttcataacccgaagagaaccagtcattttagacccatctctctctgcaatgtcgtgtataaggttatttccaagatcttagcgaacagaattaaacctttgttaccttcctttatctgtcctacccaagctgcctttgttccaggaaggaacatacacgacaataacgtcattgttcaggaagttattcattctttcaaccgaaagaaaggcaaagaaggtttttttgctattaaaattgatcttgtcaaggcttatgatcgtctgagctggcgatttattgaccatgtgatggagtgctgtgggaccccagtgagattccggaattggatctcgcaatgcatatccaccactactttaaacatctgtctgaatggggctcaggttggaaaatttatccccacttgtggtcttcgtcaaggggaccccttatcgccctatctgtttatttgggctgcggaagtgctttcgagactattacatgacgccctggctcaaggaagcattcaaggcataaagctaagtagaggcggtccagttctatcccatattttttt

SEQ ID NO: 353633 - DNA, 549 bp, Cannabis indica
ttacactaaaaaaaaaaaactaaattgtttttagtaacaaagtgtatcaattggataaatactattttaaatcttttattttgttaaataataatttagactttattttttttcaaaatgacacaaaataatactctaaattcagggtccgacggcctaaggtccgagatcgagcatgggatcggtgtcagcgcccaagtttggggtaggccgagatcaagattgaggtccacggttggggtcgaggtccaggaccataggtcgaggttgaggtccgagtctaaagtttggtgccaggatctggggttggggtcagggactgagtcaagtcgaggttgaggtctggatctgggttagggtcagggcctaagaccaaagttcgggatccaggctcaggtgtttgaggatagggtcgtggtcaatgtaggatccagagttagggtcggggtcggggtctgttaactctatgaaatagagttattttcatttctttttttttttttaggattttgattaatattagtgtgttttaaatttattttctttaat

SEQ ID NO: 353634 - DNA, 590 bp, Cannabis indica
tgattgacatgggagtccgtgacttgttatttaaggaagccttcacggctataggcctcacagaccgagatttgtcaccaagcgatttcaagcttacgggattcaacggaaccacgctcatcgcgatgggaaaagtgaggttgtcggttaccttgtgcccgaactcaccctagagtacttttaagtactgcacattcgtggtggtagactgcccaactgcttacaacgtaatcctcgtccgaccagccttagtagactttggcgcagttacctctatccggcacttgtgtctgaaattccctactcaagagggtggagtagggaccgtgaggggcaatcaagttgaggccaggcaatgttacaatgtcgcggcccacttaccagtattgatggtccgtgaaggtatcgagctagaagtggcaaaagaagatgagttggatccctgtgtaggatccgaaaaaattgtagaacctatggaagacgtcgaggaagtgccagtatgcgacctcgaccctaccaagatcctctggctggaaaaaagcctagaaccggaggaaaaagaaaaaataattaaagcactaagggcagcc

SEQ ID NO: 353635 - DNA, 861 bp, Cannabis indica
agagagattcaccaagaacattctctgtataagaactctcataaataacaaagactcgtggactacgactcattaatgcctgaaccacgtacaaaccacttgcattaattattccatagctctcctcgttatattatttaattggttgccaaaaacctcggtcaacattttagtgttttcattgagagctgtcggaagcgttattaagaagacaacagtcaaagagtcagagtaacaatggtggaaactcataacaacacacgtcagccccgtcctcctcaggatgctcgaaacccagaaggcgaagaagtggcctcacgagtaaatgtgggctctgaggaacgacatgaggcaaacgatgaggaatataaaggaaactttgaagggtacgacacctattacgaaggtagttatactgaactgctggtcctgaggcaaaaggcggctgatcatgaagccgaacttgccgcccaaaaatacattgtagggtgttacggtaatttaatccatttactgtgtagatcatctatatagaggatcattgatcaaattaggattataacaatggataattaatagcgtgtctatatggtggaacatatagagcgttctatataggtgagagtgcaattctaaattctatgcgtggattcaaccaaaaaataataagtcagtgaatttaagaggtaaattcttgatctgcttattggaagctcagatatataggcccatggtccccacactagttgagacaatactacttgtaagactcatttaattggttttaattaatcaattataattctcaaattagactatctatttgtgaatttatcacttattaagggcgaaactgtaaaa

SEQ ID NO: 353636 - DNA, 721 bp, Cannabis indica
ataattttcttagcttcagggttcgatacacaccttaggtatggcatgctgagtcctcttcaatagagaatattgtccatcatcacataacggtgcgcttgatactgtatccttctggatagtgctttttcttgggacaagtcgccttttgttatgtattcgatgatggggaccatccagttgagctcttgttcaactgttgctatggtactcttgactttaatgcttggctccgcaaggcgttccacgggcactatccccaatttctcaacttcgttgtctgaggctaacttagccaaacagtctgcgtaagcgttcttttctctggggattctttctactttatagttcgtgaactcgtgtagcagttcccagactattgctacgtacgcaaccatcttttctccgcgcgtttgatattcccctgatacttggttcactaccagttgtgaatcactgtagacttctactcttctggcccccacgacttttggtaatctcagccctgctatcaaggcttcgtattcggcctcattgttagaagttgtgaattcaaaccgtagggctgcctggagtcgaagtctgtttggggatatcattgctacccccgctccggatccattttcgttagaggcgccatccacaaatactttccatgctaggacttgcgttgtgggcatgcttacgttagcctctgcctcgtggcactccgtgatgaagt

SEQ ID NO: 353637 - DNA, 1086 bp, Cannabis indica
aattgataagatgaaccaaaacataattctgtttctttattgatgttgaatgaaatggattacattgaaatggagttttatttagggcataaaacccaacacaacgatacccaactcacgatttagaacttgccgcggtgctttttactttgaagatatggcggcattatctatacagagagaaatatgagatttataccaaccataagagcctcaagtatttctttactcaaaaagatttgaatatgaggcagaggcgttggttagagttggttaaggaatatgtctgttaaatcctttaccatattgggaaggccaatattgtggttaataccctgagcagaaagggtcccgggcagataactaaaatgattaagatttcacctcagctagcagaagacatgatcagatcaggcattgagtttgttgtaggtaaaattcataatttaacattgcaatctaatctgttggaactatagttttttcttgtttttgcgatatttagggtattgcatgttattcatcgatagggaaacttttagtttcaagtttaagtccccgaaaagtggtttatcgtgttactcaccagttttacgaataatgtgatttaagggcctgtaattcgtcgagcagttgttttactcaggttggccgacacatctaaattcggaaacaaggtaagattagtataaagttatgcatatgtatttacatgtctagcgggcatgtttatttggcctgttagcttagatcgatagtagtatcaatatacgtagagttatattgggcattgatagatgtatgtttggctcagatgctgatggacgctacgtagagttacattgggcattgatagatgtatgtttggctcagatgctgatggatgctatcacattagtatggttggagcataactagcatactgagtgtaggctgacattatgctcgatatagtattgttgtacgaacgttcttgagtcaacaccgtgttggacacggggatagggttatgattgggtgtatgagtgcctgattataatctgagttgatgctatgttattgtttatactgttgggttttgtgccc

SEQ ID NO: 353638 - DNA, 758 bp, Cannabis indica
gacccacgacccacgacccacaatcaccaccgtcgaactaaaaaacaaaagatatatggtttctttgtattttttgtatttattgtttggtaaaaaataaaatttttttaaattttgcattttcagtgattttttttatatatggtatgattatgtacgatagtgtctgatggttggacgttgggaatgaaagttcaatgatggtctgatgcaggcctgatgcctttctattgttgaaatgagcaaaggtttaagatgtaggttcaatggtggtccgatgctacccataaatgtaagatatgatccaatgatggtctgatgcaggtccgatgcctttctgttgttgaaatttgtaggttgtggaagtaggtccattggtacccatttttattttatgaataataataataaaaaaaaacattggtagcattgtgccactatcggacctacatcgaacctacatcttcaactttacccatttcaacaacagatggtcattatacttgcaatggaccaccatcggacctacatcgaacctactgtaaaactagttttctgcccaaaacacaaatttgaccaagcgtaaccctaaatcaaatataaactcatagatcatagaaattcactatacattctaatcctaaatcaataagctcatacaggtctctccattcgtggttgaggaggagataggcgtgggctcggacagattgaaatggagtcaagagggtcagccgattagttttttagtgggtcga

SEQ ID NO: 353639 - DNA, 816 bp, Cannabis indica
ggatcacctcccagcgaacctcccgagtagttgcgactcccgcagtcgcagcagtcccgactcctgcgactggagggattgaccaaagcatgcttctgcaagctttgaaaatgctcgagcagcaacgaaagcccatatacaagttgcatgggacctcacccttcactacggaagtgcgacaagcccaacttcccaagggatttcgtctatccgaatccctaaagtataaaggtacctctaatcctatagattatcttgaaaaatttaatactataatggaggtagatcaggtaccacagctcgcaaaatgccgcattcttgcggcaacactcgaggaaaacgcccacgattggtttacccaattgccagaggcatcaatatcgacatgggaaaccttcgtcgacttattcctcacgcatttccaggccacgatgacctacaggccaccttatacgactttggccaacatcaagcaagaacccggtgagtctttacaagactattttaaacggtttaatgcagaggtaacgaaagtcgagaaggctcccgagtcttcgcttgtttgtatgttgataacaggtattttgccaaggaccgacttctggaaggaattacaagctcggagaccagaatcgttagtcgaattcttcgccatggccgaaccccataagagaatcgagaattctctggcagagttggagaagggcaaggataagcgcaaatcaccactaccgcgatcacgatctcgcagtccccgagggaaaaactccaggggccgaagcccaagaagacgcagcccacggagacagcgaagtc

SEQ ID NO: 353640 - DNA, 619 bp, Cannabis indica
tcactacaatacccattacccaacactttacctaggggtagtaaaatgggtatcgacacggcacacaaatacgaacacgacacaaattttaaaggttagagtcgggaaaattagacccgggttgaaaacggatcaatacgacttgacacaaaataaaaacaaatcaaatacgacacgacccgcttaacacaaatgtgacacgtttgacacgatttttttttaatataataaaataaaaaattattaataataatataattatataaaaatatatatttagtaattcaatattaagttaaaaaaaaattaaattaaattttatttaacatgaaattaaaaatattttgatttttttaattttattttatatataacaaattatatatacataaatgtacataaattttctaatggagcttaaatttattatttttctctacagttctagctacaataatagcaaaacgggtcatagtgggtcgacacgaacacgacacgattttttacggatcgggttagggttgagataattagacacaagtcaaaaaacgggtcgacacgcttgacacgaaatataaaagcgggtcacataaaatatgacacgaacacgacacgatga

SEQ ID NO: 353641 - DNA, 1002 bp, Cannabis indica
ttataaaatcacacacgtggcgtccctatagattagggcgttacaatatctcacattacatacagttcttaccttctttctagattcaagtgtgctagccgacctgaatggaaagtctcgtgctggataggtgcccgaatcacataacaaaaccgagtaaatcacatgatcgaaaccataatctgggaatcccaaacctataactctaggctctgttattctcactagggattacactaacttaggagacagagaaacacccaactgcggtactgaaatggatgagaattgagaaaatggcttgttcggggatcctgccaaaaccggctagccggttttacaggcctggcaaaccgactagccagtttgcaccaagtttcccccaacaatccatttcttgctcaaaactcatccaaatgccaccaaaccttctagagtacctaaacaatgcataaataatataatccaaccagaaattcatagaaaaatccaatgaaattcaacatgccattaaaaacctaaacttgagtttcaaagctcaagcttactcccttctatcactgttactcaaaattaataactagaactcaatattaacctaaaatgaacctaaaaattgaactccaaatactacttaccctaactgccccaaataaacaaaatcacatactcaaccaaccataaaattcaagaactaaagaagggtgttactagggcttaccttggcttcaagaacccttgaatccctattgaatttccagaaaaaaaaataagcaagaaatcagctagttcctccttggtttggtgctgctcaaaatgaaagggagaaagagaaagagtttctcttggctttttgtctctttttcctattttctctaaaaaaaagaatcaaggataataactaatcttttgttgaataattagttgctaggtgtcactaaccaaggcagccacctcactctccactttatcgattgactaaaatgttgggttttatgccct

SEQ ID NO: 353642 - DNA, 890 bp, Cannabis indica
gtccataccccttttgcgatcacgattcttactttaacagactgaccatatgttattttggcacatccacaagtcagcaaactttgaggataccccaccctgcctctccttacatgggagttggaacaagtcatacgaacgttttgaaacttgaagagaacctaacaaacatgattttgtcaaatccaaattttctagccacacgatcaggacaatatgaaataaaagaccaagaaagagatttggagttatcttgaaggaacaacaaccatcgaggaagacaaatagcaaaccaaaatcgtataccgccacgagaaatattcaaattcgatcgaacctcgctcgttaatggtaccacacttccatcacacatgtcaagggtgaaataagcacatatgttggtaagatacgggtggaagttgaattctgaaatatagtcaacaatatcagtcaactgtactgagccctttaaacgagaacaaaaccgtgaccaagcacgaggacttccatccttcaaacatttgcggggtggggcaagcttatgaaaatgctcccaaataaacagttggaggaaagaagattccacgacactaattttcttcatacttccagaatttatatcacgaactatggagtctaagttatgatacaaagttcctaggtaaaaagctcctattgggagttgcttcccgcgggcaagtttacatgctaaggggtataaagcacgacgtaccgcctggattgttttgagggaaaaacatacctacttaaccataaagtgatacaagtagccaattccacaagactatacccgttacctctattgaaatgggttatctattcgtgcatatcacacgtggcatcattttttttaaatcattggatgcttc

SEQ ID NO: 353643 - DNA, 1323 bp, Cannabis indica
attacagcaaagttgaatgaaccgaatcatggagtatctgatgtgttgagtcgtattgcccttggacagacttttatagtagcaaagcatgaagcgtacattgtaagaaataaacgtttccatacaaagtcaagagatgatgcacgagaggttcaaaatagtggcatacgcatcgtcgcagaaaccatgcattttacaagtgcaaaagatagaaaccatgtttcaggtattatgacatattatagggttattgaagaaatatgggagctcaattattttgcgtttcaaattccaatttttaaatgttcttgggctgacaacaatgttggagtaaaaactgacgagcttggttttactttggttgatttaagtaagagaggaagcaagaatgatccattcatcatggatagccaagcatttcaggttttttatatttctaatccagctaatgataaatggtttgttgttttatcgacaccagagaggaggttcttagagaatgaagaggatgaggagaatatagatttatgttatgatgacttcattgttgggcaaccaattcatgaacaagttatgggaatcgatcataaccttaaggaagatgatcctgaatacattagaaacaatatttatgagggaatatgggtcaatggtaacttacttgtaatagcttacttgtgataacatttatttatgtatttaatattttgtatagcttacttgttaggcttttttttatgtacgtagttactctgttatatagctagctgtatattttgtttgttaatggtgtagatatggctaactcagattcaggctcagattcaaacccagaagcagattgtcctaggccgataccaacacgaggagctactcagatgaatgaaatacccaagctgatggaccaaggaaaaagagtggcacttgaagtgaatgacaaaggacagtactgtggaaaaaaatactccaagctagtatcaactttatgagttagatgtcgtcaaacgatagggttgtcctataaaaattggaaagaagtcaaccctatactaaaaaataaagtttggaaagatatacaggtaagcggttatttgtgagaattttgatttattttttattaattcagatgttaactttaatcatgtttgttttccttcaaattagacgagttttatagtgttggatgatttcaaacatgattgtttgatccttgctaggaagttaatgaaagacttcaagaatagaaagacaaaagatgttattatgcccgcattagaagaaaaagatgtggaacgactggcacaagtgttgggttttgtgccc

SEQ ID NO: 353644 - DNA, 961 bp, Cannabis indica
ttcccgagagattgaatttgtgactgagttagtttcgggagcggaaccagtaccaaaagcactgtatcgaatggctccagcaaaattgaaagaattaaagatccaacttcaagagttattgaacttggggttcattaggccgagttactctccttggggtgctctaatattgtttgtaaagaagaaagacgggtcactgcgaatgtgtattgattatcgagagttgaacaagcttaccataaaaaaaaaaaatatcctctaccacgaattgacaacctatttgatcaattgaaggggaagatggtatttcctaagattgatcttcgctcaggttaccatcaactgagaatttaagaggaggatatctcaaaaactgcgttctgtactcggtatggacattatgaatttctggtgatgtcttttggactaaccaatgctccgacggcatttatggaccttatgaatcgggtgttcaaggattacctggacagatgtgtgatcgtgtttattgatgatattttaatctattctgagtcagaagaggaacatgagctacatctcagatcgttattgcagtggttaccaaatcacaagttgtattccaagttcaaaaagtgtgaattctggttgtctcatgtctctttcttagggcacataggggataaagataggatcatggttgatccggccaagatcgaagctgtttgggattggccaacaccaaaattggctacggaagttagaagctttttgggtttagctgggtattattgtcggttcgtggagggtttttaaagattgatgtaaccttaacggagctgacccaaaataatttgaagtttgtttggactgatcggtgtgagaaaagatttttggagctaaagcagcgcttgattaccgctccagtgttaactcttccttcagataaggaaaattttgttgtttattgtgatgccttgag

SEQ ID NO: 353645 - DNA, 801 bp, Cannabis indica
caccgcgttccaatgttgtcaggtacataacatgcaaaattatgaaattccatatatgacatatcaaatgcattttgaattcaaataaatctccgtaaactgataattcataactaacatgcaagtttcatatttaaaccctatttatctgctaatttccaaattaaggttaactggtgtttacaattatccccccttaaaaggatttcgtcctcgaaatctatcctgaaaaactctggatactgagtcctcatgttggactctaactcccaggtggcttcctcaaccttgttgtttctcaagagtaccttgaccaaagctattgtcttgttccgaagaaccttatcttttctgtctaggatctgaattggttatttttcgtatgataagtcttgttgcagctcaagattttcataacttagtatattagcagggtctaaaacgttttttcgtagcatggaaacatggaaaacgttgttaactgctaaaagagctgaaggcaaagccaaatgatatgccacttatccaatcttcttgagaatctcgaaaggtcttgtaaatctagggaataatttgcctctttcctgaaacgtttgatccccttgattggagacaccagtaggaacacatgatctcctacttgaaactctggattcctgtgtttcagatctacataactcttttgcctaatttgagaggcaagcattttggttttaatcttctcgattgctttattagtccattgtactgattctggacctaagtatttcttctcccctgtctcatcccagtgaatgggag

SEQ ID NO: 353646 - DNA, 1371 bp, Cannabis indica
catgcggacgatcagggtgtcaaaacttatactataatggaccactgggatcaatgtcccagcgaatctcgccgcagtagttgcgagtcccgcagtcgcagtaccccggctcctgcgactggggggattgaccaaagcatgcttctgcaggctttgaaaatgctcgagcagcaacggaagcccatatacaagttgcatggtacctcgcccttcactacagaagtgcgacaggctcaacttccaaaagggtttcgtctatccgaatccctcaaatataaaggtacttctaacccgatagattatcttgaaaaatttaatactataatggaagtggatcaggtaccacagctcgcaaagtgccgcattcttgcggcaacactcgaggaaaatgcccatgattggtttacccaattacctgaggcgtcgatatcgacgtgggaaaccttcgtcgacttattcctcacacatttccaggccacaatatatgccaccttatacgactttggccaacatcaaacaagaacctggtgagtctttacaagactattttaaacgctttaatgcagaagtaacaaaagtcgagaaggctcccgagtcttcgcttgtttgcatgctgataacaggtatcttgccgaggaccgacttttggaaggagttacaagctcgaaggcccgaatccttagttgaattcttcgccatggccgaaccccacaagagaatcgagaattctctagcggagttagagaagggaaaggacaaacgccggtcacctataccgcgttcacgatctcgcagtccccgagggaagaactccaggggccgaagcccaaggagacgcagcccgcggagacagcgaagtccgaagttggccaagtctcctccaaagaaggaatcctcgccgaaaaggaaaggtggacctcgtttcgtcaactatactgaactcgcagtctcccgagaccatatctacgcaatcgaagaaagaaacggagtcttcaagaagccgccccccatcaggggaaatcgcgacaggagagaccctaaaaaattctgtaagtaccacaaggacattggtcacactaccttagaatgttgggtcttgcaggatgaaatcgaggagctaatccggagagggaagttcgacaagtataagaagagcgaggaaagtcgtccccaagcggatgacaaaggagaaaaccagaatgcgagtggctccagaacacctcgcaacatcctaactattattggaggacctcatatcgcaggggactctcgcaagtcacaagagcgatatgccagagaagccaaggagaagccgcttaccaatgtgaataatcttagtgagcggcccgagaaactgtttaagaaggaatg

SEQ ID NO: 353647 - DNA, 535 bp, Cannabis indica
agggcacaaaacccaacaactacgacctgtttgcttgaactttgtcgaaggatggcacctgaaagcgccttcgctagatctcggtgcctacgagggtgcccatttgctgtcaaccagagcactgacatagtttccaatgctaaagtcgaccaactttagtcttagtggttgggcccgagggttgtttccttcttgccacatgccaaaagtgttgtccatgtcatcaagatcaagtttctaggtaaacaagttaacaagatatactttttacgttaaaatcaggttttcttataaattagtttcattatatttttcagagaaatttgcagctaaacccccctatgtttcaattgttaaacacttaaccccctattctttgttttttggtggtaatacctcctcatctttaattctgtttgcaaatttaatatatatgttaagtttgggtgttaaatgccaactaagaatgccactgtacacatgcatacacgtggcatattttcattgctccaaaataattttaataacttaaata

SEQ ID NO: 353648 - DNA, 739 bp, Cannabis indica
gagccaggatccgtgggctgctggactaagctgcaaaccagtttccggaggaagtttgtcgccggaagaaaagttattctagaggttagcgccttgactaacatcaagcagctgcttacagagacactgaagaatttcataaagaggtttacggaagaagcctcaaaaaccatgaaagtcgatgacggacaacagctcgctcttcttcaagcaggcatccgtacagggactctgttttggaacgagttacagcaagaaggaccctccaaccttcaagaattccagaaaatagtccaaaattacatcaacctagaagaggcccaaatagtggcctacaggggatactaccctactaggatagcgggatatgtacccggagctcagctcccaggaaccttaccagcagctgttccaccgatgagcgacagacaatttccgctaccactggatatagtcagggtcaggctttagcccctacgtgttctcatttaaggaaacccgtctgggataagcggaccagccccgtctcactctgctccgaccgcaagcttagcaagtccctcttaaggctctcggagcaagagttcctcaaaaggaagcaaccggacagaggataagcggcagaaaagggggtacactcttcaatatacccagtacacggagctaacagactcccaagagcgtgtgtattttgctactaggaaaaacacgcactactggagaccacctcctctgtaca

SEQ ID NO: 353649 - DNA, 648 bp, Cannabis indica
aaaattatttaattttttttaatcatgcattggaatggtttttcctttcatttcaaaatggaattgtcattcaccaaaatggtagaaaagtcattctattggaatgacattctaacactttaatatataaccaaataaaaaaacaaaatagagattgtttcatttcctttccattctattttattatttccaactaaacgtcaccttagttatttagctactatacctttgttgccggggatgctcttagttgatgtggtagtaacctgataccaatatcaataataaaagtaaaatatgtaacctaccataactagttataataaataatagaggaatttaccgtgaaatttctttatgttttaatttatataggcgtttgattggaggtaatgaaatggaatagaatggaaaggaaacaattttcattccattcctttgtttggttgcatataatagtattggaatgtcattctaatggaatgacctttccaccattttggtggaatgactattccattttgaaatggaaggaaaggtcattccaatgcatgatgagaaaaattttaataatttttttatcaattttttttatacattttaaattttattccattcctattcctattcccattcccattctcattc

SEQ ID NO: 353650 - DNA, 813 bp, Cannabis indica
gaacaacatcagaaataacaacagagaaaagagagcctttttggctgagagttgtcatctccttatgagctcctcttagagatgtacatgtaaaagaaaagagagaaaaacagagagaaatacaaacagttgtaaatcaaaagtgtaatctgttatttgatgattagtggaatcaagctgagggcttgacggagaagtagccggttgttttgggcgaactccgagataaaatttggtgtctccatctttaccatttgtgtttgtatttctcaccttaatctttatattttttatatttgtatttgtgtgtgtttgtgttcttgctattttcgggttgtgttaaattttttggccgaagttaaaggggtttttctggttcggttttgagaggttggagccgtgagtgagtatttttttctgggtttagattcgggtagaagaagttgcaaaataaataatagtaaaaacctagctgccattaaaggatagaaaggaagaagcttgacaatctttagaaccctagaaaacctagctgctaccatttagaagcgaagaaaagaaaataaccccatataaccctagctgccattagagtgagaagaagaagagaagaaattaaaagaaccctaaccctagtagctgcggctgtaaagaagaagaagagaaaatattagaaaccctaaccctaatttgtgttgctgtcgttagagagaaggaaaagatatttgaaaaagtttgaatttttggtgaagaaatagttgtggttgccgtgtgtttcatctagggttagaaaatacattaccttatatatat

SEQ ID NO: 353651 - DNA, 533 bp, Cannabis indica
tggatactaatcgatacttatttcaattctaccatgagttagataacaaaagcatgattgatcgcagcccgtggatgttcaacaagttcttgctgactttcaaaaggctgaggaggggggaagattcgagaatgttagagctgaatgaggtcgatatgtgggtacaattacgtgatcttcgatcgggatttaaaacggcaacgatagtcatgaatattgcaaattacattggtaagtttgttgaatcggatgagaagaacttcttggggttatggagagattatttacgtgttcgtgttaccatcaatgttacgaggccacttaagaggcttatgaagttgcgaaacacagagggtatccaattttgggtaaacttcaagtatgaacatcttccaacattatgtttcatatgtgggataatgggccattcaaataaattttgccctagaagctgtgatgtcccagatggaaggattgttaaaccatatgggaatggatgagggtgaagccagtgcgtaagaatcatacaattg

SEQ ID NO: 353652 - DNA, 618 bp, Cannabis indica
tcgtttttagcaaaacgttcctcaatttgttcaaggaaattcttagccatagtgaccccttcagattctgtgcccgagaaggcttctggaatgctgtgtttcataatcattagactcatgcgatttgaacgatcccagctctcaaattcgcttttatcatcatgggaactttccttagtgagaggtgcaggttgttcatttcttagtgcatgatctaaatccatacatcccagaattataagtaggttccttttccaatctttgaaattggtcccattaagcataggaatagaattaatgttagcagatattgaagcagcagaagatgaactagctaaatatagaacaaataaaacaagctcacattaatatgcataattaaacaataaattgaaaaattggttaatcccttctcaagataccaaacacgcattaatatcaagtctttagacagtaatattaactgtaagtggtactcttggtgtagcaatcaaatattgacaataaaactgtgccaaacaataggtcaatcttcggattaacgtattgctcacataaaataccctataattgtcacacatttatcgccacaggtatgtttgaaatctagcaaaatat

SEQ ID NO: 353653 - DNA, 546 bp, Cannabis indica
tcgcacagttcaaaagttatgctctcaggcaaattctaagggaagaaaacacaactgctgacgcattagctcgacttgcgtgttgtaatgtcagtgatagagcgaatctggttcctattcagtttcttgaagaacctaacatcactggcatagaagagatcgaaatgatggatgcatccccaaactggatgacgccaatagcaacctaccttaatactagggaactcccagattatagaaatgaagttcgaaagatgagaaggaaggctgcacggtacatcatagtagagggaattatgtacaaacgaggattctgaatgccattgctcagatgtgttactcaagaagaagctgcacaacttctgtttgaagtacatgattgattttgtggaaaccatgctttcgggcagagtttatctaagaaaattctaaggcaaggttatttctgatcgacaatgatcgaagattctaaggcctatgttaaaaaaatgtgataaatgccagagatttttgaagatacctccagcaccgccaacgagttaactc

SEQ ID NO: 353654 - DNA, 811 bp, Cannabis indica
tccttttgggagagctgtatgaagataggggacagatttggcggtccatggctcatattgggtgacacgaactttatcctgagtgaatctgaacgagttggatctaaaggaagagaccaattcattccggttatttccagtttggtgaattccaggggtctggtcaacttggccatccagggagactgtctgacctgggataaccaccgctccggatccaaccacgtcaaatcggccctggataaagggctagcgaatggagcgtggattagtcttttcccaaaggcggctctctgctcttaccagacctcaaattcggatcaccgtcctctgtgcctgctctctgggggtttggaggataaaatccgaaggagttttaagtttgaggaagcctggactagggacgaaaggagtcgactagtggtggactctgcttggaagtctgttagttaccactgggcgccggcccggatcttcaagaaaattggggctactagagtcgctctcttacactggaacagatcacaatttggaaaaattgacactctgattcgagatctggaaaggagactggatcatattcaaaagctcccggcgggctctagagattgggagactgaaagaaatctgcggagctctcttaacgaggcccgtgttcggaaggacctgtactggaaacaaagggccagggtctcttggctgaaagaaggtgacaagtgttctaagttcttctttctttctgcctctatcagagggagaagaaatgccattgagtgcattctcaacaaaaataatatgtggatcaataaga

SEQ ID NO: 353655 - DNA, 763 bp, Cannabis indica
ctcaaatttaattttcctattctctatctctctttccgtctttccctctctttcactctctctctctctgtcgttccctctctctctgtgtcgttccctcttccctcttcgacatcaacccaacaacacacgacaaccagcaattacagtcccaacaacgccccaccacgaccatgacccactccgaccatccacccacgaccccgacccaaccctcattttctctttctctctctctctctcgtcggtcagtagccaaatcgacccgtgcccgtcgaaaccaccacgaaccaccacaaaacgtcgccaccaccaccacccgtgatcgtcgacaccgaacagaggccatcgccaccacgagcaggacccgtcgccaccaccacccgtgatcattaaaaggtaatgtttatttttgagaaaaaaatatatttttcatagatttggatgccaattattgcatgttgttgagattagtggattttttgtagcttttgtgatctttaggttgtagatgttagtgtttcaatggtatctgtgtttattacagggtttatcgatgacatatcgataggatgtcgataggatgggtgtctgtttgaatttaggtgttatttgtatgtcgatagaatatcgtttgtatgtcgataggatgtcgattagtggtttaagtgtattttctgccctatattatcgacgacttgtcaatagtatgtcgatggtttgtcgattagattaacttgtttattgttaggttgtattgtcg

SEQ ID NO: 353656 - DNA, 541 bp, Cannabis indica
cataaaattataatttgagagttataattttatgtatgggagttatatattaattttatattaatatatgagttacatagcataataatgctaatagtaataaaatagtgtttattattattgtgagaattattatcatttattttgtgaataaataatattttaaattattttttaatttggtggtgaacatctcattttatgagataataaaagatggcttttgagaagttacatctttataagagataatcatctcatataatgagataaataaaagtgaactatgagagttacacttatgagcattgtcttttcatagcaagaacaaatagatcaaaagtagatccacacttgtgaaaaagccactaaggctagcttagtggtgagggagggatgggaaaaagggagaggtcatgagttcgaacctaggaccttgaagctattaagctattaaatgattgtaaaataccattacgctacactcaaaaataaaaaaaaaatccacacttgtgaaatgagtcataattttgaactaaaa

SEQ ID NO: 353657 - DNA, 505 bp, Cannabis indica
ataataataatatattaataataataataataataatattaataaaaactttattattaatagttatcttattatttcttagccactaagaaatctctatttttagggtatttggccaacttcgagtaccctaaaataccccgatatttctaaaatcaacttatcccaataatctcatcaatatttctaactaaaactgttgtgacatttttggcctccaatcgggtctccagggtcgccaaacttgaaaatatttttatttcacaaataactcatattatatccacgtatttcaaataaatccccgtaattaacaaattacgcttatatatccacttattgagtctccagggtcgccgaacctgaaaatatttttattccacatatagctcatattacattcacacatgctatataaatctccgtaattaacaaattacgattatttactcacttatagcaaaatttaaattttatactgaaatagattagtaagatcataatc

SEQ ID NO: 353658 - DNA, 497 bp, Cannabis indica
ctttcttaaaaaattcttgttatgtttcattattttcttagacactatttttgctctaaagtgttaatcggtgctttattttttctttgtgttgtctttttcgtttgtttttacaaaataaaaaaaattcaagaaaaagggggtcatattttttcgatttttgggcattttttcttttattttttcatttatagaaacatgtttttattgcattttatttattgtgttttttttttttttggagatttgctcttatttttttgtggtgttttaggaaacttgtttctatttgattaattattttgctggtttcctttttgatagcattttcagatttggttggtgtatttaatttttagattttgtgggaatattttatttctttttcccatttttggtaacttttgactaatttttgaaatatcctttttggtttctttttttttcctctccacgtggtggccaaggtaaggaagttacttctttttttttttttt

SEQ ID NO: 353659 - DNA, 537 bp, Cannabis indica
aatttaattataatccaatctaaaagttctatgacaaaactgtttacattttctggatatgttcgtattaggaattgtcatcaagttggttatattagaaaacagttgtcaaaaattaaactcagggtcttatttttaccattttaaaaaatacaagatccattttatcatttaacaaaacacagggtctaatcggtaacttttgcaaaacataaggtccaaaatggtatttactcaatattttatggtggattctttaacaggagtgcaccgatgcagtattatctgttttaacatataatagaatttttttagtctatttttttacggtatatgttatagttgtttaaaacatctagtaaaactttgagaaatttgaaaaaatttaacacacagaaaataagatttaaacagtatgttatacacgtaactattttattttatatgcgtttaaaactgtttgaatactattttctatattataaattattttgaattttttgaattttactatatgttttaaataactataattta

SEQ ID NO: 353660 - DNA, 1493 bp, Cannabis indica
tcgggtcataattaccaaaatgcccctagctcaccaacggggtcttaacatatttaaaattcatattaattcacatatattgaactatataataatataattcctcaattatttataattatctaattagggttttgctaatccatttcttaattccagggtattacactaaaagtgcacttcttcgggttaagtttcatcccgtatctccgaaccacttcaaagcattctgcgaggtcatctgcatggcttgcacatgtctttgatttgaccatgtccacgtatacttccatattttttcccagaaggcctttaaacatcgggttcaccattcgttgatatgttgcactagcgttctttaatccgaaaggcatgaccaggtagtagtatacccccttatcggccctgaagctagtgcattcttgatccgccacgtgcatattgatctggttgtagccggcataggcgtccatgaaggacagtagcttgaatccggaggtggcgtcaccatttggtcgatccgtggtaggggaaaacaatcttttgggcaggccttgtttagattggtaaaatctatacatacccgccatgtcccatttggttcaggcaccagcaccagattggccagccattctggataatacacatcccgaatcatgccactagttagtagtttgtccacctctctctccagggcttctgcctttactgggtcgaggagacgccgcttctgttgaactggtggcatgtccgggttaacgttgaggacatgggttatgacatggggacttatgccggtcatgtctccttggcaccacgcaaaaacatccgtggcccttagtgctttaattattttttctttttccttccgactctaggctttttcccaaccagaggaccttggcggggtcaaggtcacatactgatatttcctcgacgtcttccattggttctacgattttttcggatcccacacggggatccaactcatcttcttccgccattcctgacaaaataacttcacggaccatcaatattggtaggtgggcggcaacattataacattgcctggcctctcctagaatacccctcacggtccctactccagcttcctgagtagggaactttaggcacaagtgccggatcgatgtaactgcgccaaagtccactaaggtcggtcgggagaggattgcgttgtaagcagtcgggtagtctaccaccacgaatgtgcagtatttaaaagtgctttggggtgtgtccggacacaaggtgactggcaacctcacttttcccattgggataagtgttgttccattgaaccctgtgagttgggaaccgcttggcaaaagatcccggtccgtgaggcctatcgctgtgaaggcttctttaaagagtaaattcacagaactctcattgtcgattagtattctagccacaatcttgttggcgatgggagtctctatgaccaggggggtcatggtgaggaaaacgca

SEQ ID NO: 353661 - DNA, 1101 bp, Cannabis indica
tgttaatgaaacatacttggtagtaaatctagatcctggtaaaatatttccaacatgaatcacaacatataagcatgcatatacactaaacatatacatacatttgcatatacatatcacacattatatacagttcttaccttcttcccaaattcaagtgtgttggccgacctgaacgaaaagtcttgcgctaaatggatgccctaatcacataatgaaaccgggtaaatcacatgatcaaaaccctaattagagaaattcgaacccaccactctaggttctgctatactctctatggattaccccaactcatgaagtaggggaacacccaactacaacactgaaatgcacgagagtacctaattagggtatacacaatatatcccaaccagtaattcacaaaaaatcacactaaatcaatttatgtcattaaagactaaagctttgagttcaaagctaaaacttgaacaaaaccaactccatacatcaaaaccagctgctagaggctgaaaccaactcaaatgaaccctaaaattcgaactatcaaacaacctaaccctaacagccattaatttgcaaaatcactacttgaaaccaattaaaatcttgagaaaacatagctagaaagtatctagggtttaccttggcttgattccctcggaatccttgctgaaaacacccaaaaatcagcaacaacttcctttgttctaggctggttcgaagagagaggagaggaagagagagcttttcccaattttggcttattcttcttattttctttaattccttctaaattgagaaatgggttaactaaattaaaccttggctgaataaaagctaggtgtcatcatcaaaattagccacctaactcaccattaaaattactaaaatgccctccataaccttaactttaacattttcaaacttaggggttaaatggtcaaatttcataaccccgcctaaccttggtattttattttctccaaaatatatcccactaagaaataaggttctaaatttacccatgtgatcaaactagtcatccatcgcatttttcattgtgccgagcaaaaaattacaaaaatagcacaattcacatat

SEQ ID NO: 353662 - DNA, 708 bp, Cannabis indica
tttcaagtttaagtccccagaaagtgatttagtgtgttgcttatcagtgttatgattgatgtgatttaggagcctgtaattcgccgagcaattgttccactcaggttgaccgacatacctgtattcggaatcgaggtaagattagtataacagtatgcatatgtatttacatgtttagggtgcatgtagtaagcctgttagattacattagatatgtatgttggtttttgtactatccgacagtatcacatcagtgcgactagagtatgactagcgtaccgagtataggctgctattatggtcagtagtactgtactttttgacagtatcacattggtgcagctagagtatgactagtgtaccaagtataggctgatattatggtcaatagtaccgtcgtacgaacgttctagactcagtaacgtgtggggcacggggattagggttatggtcaggggtatgggcgtctgatcataattcgggttatttgtatgttatatgatttatgcttttcttactgagtctgtcgactcacaatgctattgctatgtgtaagtaagggcaaggctaaagctgaggagccatgagagcgggtcggtgaagattgtacatgtcggggtggttagacctggactgtatgatcctcgggacttcagggcttctgttgtatagtcgctgggcgacgaatcttttgtaaatgaataacaa

SEQ ID NO: 353663 - DNA, 943 bp, Cannabis indica
atcataacctgcataaatatttgcacacaaaaatatatttggcactcagtgccccagagtagtccagaaaaatatgcagattaagttttcaatttttcaaaaaattttgtaaatcataaaaattgaaatatgtctaatgttatacaacacatataaaaatcaagtccaataatcaagttgagtccctacctcttccgagtcgttaaaatttttccaaaagacaatcttaagctcttaagtcctgagctccagttgttttagtccaatcttacatattactctcacatataccatcaaatggttaaataattatcatcatcgcattctacattaaaaaccgagtccaacgacataaaatatgactacatttaaaattaggggttccgaaacctcacctaaggggtgcacattcacaatcgatggcggtaaaaattagtgtaccggaaacgtcgccaaaaataggggtagtgtatatcaaaacgaccacctcgacgagtagatcacacccacgccaaccgtttgtcaaaacggtacacgatgtccccggaaagtcgccggaaaggggcagagctacaaaaatgtcatcgaaaaaagtagcgaaccgagaaaaatggtttagtgtaggttgttctcctcgacgagctgagtttagtggtgaaaacgcctcgtcaaacggaaaccgaaggtgaccgaaaaatccgttcaaagtttgaaaccccaaactttgacttgcgatcccgatctaacggcggggaaaggagctgcgccgcttggggtgaggtcgccgacacttgggcttccgatttatccggcgcatgaggttcggcggtggctggaggtgggtcgccggagtgtggtggttatggagctttgtgggttttcttttgtgtttgtgtttaaagagagagaaaaagagattgagtgaagaagaggacgggtgagt

SEQ ID NO: 353664 - DNA, 792 bp, Cannabis indica
aagttggcatcgatctacatgaagaaatctcttgcaaacaagttgtatcttaagaagaagttgtacacacttcgaatggatgagtcaaaggaattgagaagacatctagatgattttaacagaatcattctagatctgaataatcttggggtgaaaattgatgatgaagaccaggctataatcctgttgagttcacttcccaagatgtatgagcactttgttgatacgatcttgtatggcaaagaaactctgactatgacagaggttaaggctgcattgaattcgaaagaaattcagaagaagggagatgagaaagatgagatcaatggggaaggattactcattgttaagggaaaattccccaagagggaattcaagggaaatcagaactctaatggctacagaggtaaccattcaagatccaattctagaaactccacaggagggccaagctctaatggagctgcaggaaagcaatgttattattgcaagaaggagggccactttagagatgagtgtttggctttgaaggctaaacttaagagggaaaatcatcacaagtttaggaagcaaggagttgctgatgtagctgatggctatgggtcgtctgatgcacttacagtgtcatctgatgttctgtgatgtctagttcagattcaggtggagattggattctagattcagggtgttcatttcatatgacaccaaacaaaggactgtttaggactctttcagagagtcatgggggctcagttcttcttgggaacaacaaagcgtgtgagatcaaaggtg

SEQ ID NO: 353665 - DNA, 916 bp, Cannabis indica
tttttctgttttttttccctttattattttatgaggtgcaaatagaacttttcttaatttattagggtgtacttataattatttgtagtgtaagtataactcctttttatattattgagagattggaaagtgctagcggtaagtttatatatttattttgatagtaaactgtatttattattttataaggtacaaatagaacttcttttaatttgttagggtgtacttataattatttggagtgtaaatataactcccctttatattattgagatattggaaagggctaggggtgggagtgaaattgacagtaaagaaggtgaagtaggaggcttgagtataatacgtgtcgattttcagagagtggtgatactgaaagtcggtaaagcaagtgaagatgaagaaggccgtaattaagaaggtgaagactaaataacacaggaggtttgatgtttgaaaaaaaaacttaaaagacaattaagggtaatgaaaaattaaaaaactgaaggtatataagagaatcaagcaggacgtgattaagagacttagggttcgtttggaacgtcgtattaggtcgtattgtattatattgaattgtattttatacaatatttttatgtaaaactatatgtggtaataacttttatggacacctaaatacataatattttagtataaattaaagtttaacataatattatataaaaatatgatatataatctaattcaatataatacaatacaatacaatacgatctaagacgacgttccaaacgagcgcttatagtatataaaaagatattcagcaaaatatatatattttaatcattgctgatttaaagcaaatatataatacaagaaatgtatgtataatgtataaacgaaaagcattatataagtatatgcccgatagaca

SEQ ID NO: 353666 - DNA, 490 bp, Cannabis indica
cggttgattactttactaagtggacttaggccgaaccactcgcaaccatcacatctaagaaagttcaagactttattgcgaagaacaaaatatgccggttcggactaccgtacaaaatagtctcagataatggcaagcagtttgacagccaatcctttactgatttcagtgcgaaccatggtatcatcaaaagtttctacatagtggcgcatcatcaggcaaacggtcaagttgaggcagtcaacaaaaccttgaaggatacactaaaggaaaaacttgaagatgccaaaggaaactggccagaagagcttcctgaagtcctatggtcatactgtacaactgaaaaaacggaaacttgacaaacaccattcacaatggcatacggttatgaagctatgctgcccgtcgaactcgagccaccttcccacagaagattgatgtatgatcaaggtaccaatcacatactccttgcagaatcatttgatgaaat

SEQ ID NO: 353667 - DNA, 990 bp, Cannabis indica
atatattcttacgctatcttacctcgttccgtgctccggtcagcctgagtggaaacgcagctcgacgttttacagggccctaaaccataatgtttaaactttgatgagagacttgctaaaacacttatcgaggattaaaaataggaactaaacttaaccctatcgataaataggatgccaacaccctaaattacttaaaaacgggaaaaaaccagggctcgggaaaaaccagggctcgggaaaaagtcccaaccggaacctcggttcctggctaccaactggttgaccggttgctaaaggcttcccagaaccggtcgaccggttcatagctgggaacctcaaaccgatcccctctcccaaacaatcccaaactttacaaaaacctccacaacacctgtatgcactataataaagcataaccaagcagcagaacacaaagaacaccacaaaatttcaaactaccattagaggtcaaggtttgagttcataaactcaaaccttgcaacaatctttctaccacaatcaaaaacaactcaaaaccatctaaataacctcaagcaatctccagaattccaattaaaacaacaactatatccacagctccataaatttaataaactctacctcaaaacctaacctaagcttaaaaaataacaaaaagagaaagactagctcataataccttaaatacaagcttcaactcccttgattgctcctgaattcagctatgaaaattccaagttggatgaggatgagtgaggttcgaaggagagagagagagaaatgaagagtaaaggaaattctaggtttttctcttttattctcctttttccttatttaattttttccttcttacaacaatattaattttctcaaataagatcagcccccacacctcactacaagacaaataacctataaagaaaagacctttttaccccttaaacaacttaaaatgaataacaaccccccaagggcaaattggtcaat

SEQ ID NO: 353668 - DNA, 507 bp, Cannabis indica
aaagagttttatttagggcataaaacccaacagattccagttgtgattggaacttgagtatctagatctgcaatctatcggtcttgaaggagacccaaagatgcaaatggtgtgacatgagttcttcttgtgttaaccatgacatttgatcagatacgatattcttgctctcaatgaaagcaccaaactgttgacctcaaaaagtgatcaactgacagggatgtcatatatatctggtgcttgccacgtgttacacaaacatgaatgaaaattagtaaacacatagattttttatagaggttcgacccctttgtgatagcgggtaatgacctacttcccagttcgttgtattgatacctagagataatactattcagatcattataggtgggatctgatataactctctataagataaaaaatatgaatcagtaggcagatctctaatgagatagtgagattgccttagaggtgcatgagatagatgaagagaggagagagagagag

SEQ ID NO: 353669 - DNA, 532 bp, Cannabis indica
agatcggggtccagacctggacagaatcccggacacagactcggacccgaactcaaaacccacacctagaatcagatgcaaagctagacccgaacccggacccaaactcgaacccagacccggattaaaactaaggacataaacccaaaactaaatcgagactcagatcgcgattataacttgggactcggacctaacatagaccaagacccaggataggaacccacacccagagcctgatctggacatagactgaaatcccgacacgaacccaaactcagaccaggacttgaactccaacccgaactcaaacccaaactcaaacacagaatcgcaaatggaactagaactgaactaggacttggaccaggacactgacctaaacccaaacccaaaccttaacccatatcaaaacccagacagagacctaaaaccgaaccgagactagtactcgaacccgaacctagaccaggacaaaaacccacacaataactgggacctaaacccagaatcaggatagggacctgggaaa

SEQ ID NO: 353670 - DNA, 925 bp, Cannabis indica
acttgcaaatagatctaagatcctggataaatataataccaacagtttgctctttgccttaagttttatcaaacacacaaaatggtggtgcaaactcatagaggcgttgttgaccagagtgatccactgttaacatatcctgcattgcagactcctgggaatacaagagtcccacaaggaaccaatcttgaataaccaaacacgcagccacctattgtgggccaaggtgtgacatcccctctggtttggatcacacccagtgtgcaagagactgggaacaccagtttggcagccgatcagagcactcccagcattggaatcccatccacaaccaatgctcagacgacaatagaagatgatactgagattcagaacctctgcaatgctcttggactcatgcaaggtcacactaaaccttgcatcatgattaagaagagctttgtgctgcaatgaaccttgcattcgaagagcagaggcatcagttcattgaatggagggatagagagatagaaacattgaaggctcaacaggcaaccatcgatgaccgaacaagtcaggccaccgtactgatacggaaagcctattaagttgctaatcagcaaccagatgcaacattgagtatcccgctaggcggcacataagaaattcttgttgggcatgccgcccaaactcataacggtcagccgtccaatccctggtcactggttccacctgtgggccaagtggtaagtggccagaccttatctgacaattctttaggtggagttatacctaataattccgtccaaactgacagttctggccaacaaaccggctaaaccaaccaatcactgaggcaacctggtgtctcagtattcaacagactgggtatagcccatgatctcagggatgatttgaatagaaggaggggtctggacgaacaata

SEQ ID NO: 353671 - DNA, 625 bp, Cannabis indica
acctttgtccaaaagcttatttccccctaccacaagcactaaggaaaaagaaaagagcagaaatagctttctggaattatctagcctaaagtgtttctagcaatgtgctctcttgatagaaacttgttgtcttacaaagtgaaccaaagacctctatttatagtgttttgaggatcacatatgaaaatcaaagtctcttcaccacatggttgttactagcactttaattggtgtttaatgggataaaaatgttggagaagagagctggaaacatgctcaattaatttatgtacgttttcaaaactggttccacgtgtttgtaaaacaaccataaaacaacataaaaataaccattaaacaactattttcagaaaactcaaaatttagtttttgtaactcctctccaagttaaatctttccccaacgtcccaatactcatttcaattatataattgagtattgtaacagtttctaacagcaaaaaacttatcccattgattccattactttcatatgtaataactcacttaattacatgtgatccttaagttacaatctattttcaaatttgtaactcctcatatgttacaatttttatatgcattattatactatatatgatata

SEQ ID NO: 353672 - DNA, 645 bp, Cannabis indica
tgttcgataggctgggaacgacccatgacctaagggacgatctaaacagaaaaagtggaatagatgagcagaatactgcaatgatcgtgcagcccagagcccatgctcagatccccgcttagaaagacgctgacgtaatccaagccgaccaaaatgccaatcaagtcagcccaaccgtacaggcccagcttgacgagttgaagaatatgtttcagggcagggcctgacagcataacaatgatcttaagtttgaccgtgctcgcagaactcccttctcaccagagatcaatctcctgccactgcccacaagttcaaaatgccaacatcgaagatgtatactgcgagagaagattctctttcccatctcaagtattttgagatgcaaatggatttacaaggagtacggggggacgtatgctgcagaatcttcccagctactctgtcgaaagccgcacagtaatggtatttcaagttggctcctggaaagtttagttcatggaaaaccttctcttcggaattccatgcacaattctcttcctcacgtcagctcccattgcatctgggagatttgctcgaagtaaagcaacgaccaggcgagccactctaagcatacatcagcagattcatgacagaagcgaccaaggt

SEQ ID NO: 353673 - DNA, 973 bp, Cannabis indica
cttgtccaatttttttttcttttatatactgtatacacaaaaaaaaaatagagacctctatcttccacacccacggacagaatcaccacaggaacaccagaacaatcgaaaaacaactattaattctggtgagattaaaaataataaaatcgacgtcaaataaataatcatggcaaaacaattgtaaaacaacactaaaacaaatcaaacaaaagaaagaaaaacatgattaaaaaaactaaaaaatattctgcacaacctcaataccaaatgcaatagcagttatatttgcaagtccaatcttaaaaaatcagaacaaaaaaactactaaaataacacaaaaataaatataaaacaataagcagatataacaacttagtgaaacataaaagaatcacacacctcaaaactttttttctagtgcgctcgtcaaatatatttttaagaggacaaaaataaaaaaaaaccataaaataactatagaaaagcaagaaaaaatatattttatagcctccatcttccacacacacggatagaactaccacagcaccacgagaacacccagaaaacaatcattaattctagcaaaatggagcaatagaatagtgaaatcgacgttaaaaaaataaattatgaaaaataaccgtaaaacaacagtacaacaaataaaaaaaaaataaaagaataaacagaatatactgcagcataaaacttataaaaatatacaataaaaaagtaaaaaatatagcatagcagtatttttataaaaaataacaaaagcaagtataccctgtaaataggcaggcctaggtaaggatacttaacattttagccgaccatatataagaaaatatatgttatatatatttgaaatttttagaaaaaatacctaaaatagtaccttttttttaaaatatttttacaattattttaataagttttttacttgtattttttcttcaaaaaaaaaaaa

SEQ ID NO: 353674 - DNA, 658 bp, Cannabis indica
aaatttgaaatttcactacagacataaaaatgcattcagaattcaaatataacacataaataattatttaaatatctataaataattttcataattaaaccttaaatatctgctaatttccaaattaaattaagcggtctttacatggagcagaactggtttctaaagccccttatagaattgctccagctgagattaaagaattgaaaattcaactccaggcgttgcttgacatagggtttactcggcctagtgtgtcaccctggggagctccggtattatttttcaagaagaaagatgggtctctacgattgtggatcgactatggggagttgaataaactaacaatcaagaataaatatcccttaccgagaatcgatgatctatttgatcaacttcaagggaagacggtcttttcaaagattgatctctgatcgggctatcatcagttgagaatccaagaggaggacattccaaagacgactttccgtactaggtatagacattatgaattcctggttatgtcgtttggactaaccaatgcccccgcagctttcatggacctgatgaatagggtgttcagggatttcctcgatatctttgttattgtgtttatcgacgacatcctagtgtactctcaatcagaagaggagcatga

SEQ ID NO: 353675 - DNA, 572 bp, Cannabis indica
tgaaaagtaacataaaaataatagtacattaaatattttcaattaaaatgatgaaatatttaatttaaattaattttatgtccataattaaggccttaaaacatacaaatttgagcattaatcagagacgtcctagttgagggcgtggactacggcagtgaggaacttacggcggcggttcctcatagaaggcagggtgccttgggcaccaggtgggtaagccctccgtccaaggttactaaggcgcgccttcggtctctcgaccaggatggatacctgggcggcttggagtgctacattcctaccaacaacaatcgtgccacaaaccctgaaaaggggatgtgagcctggtcgggtgcccatggtcagcaaggggcattgatgcctttgcatcaatacttcaaaaatgttgcagacttcttcggcctctgcctggcccagttcactcctaaaggcatcaagtatttgtctgccctcttcgtcctttatgcctcccagaaatggggtatgccctctccccaagaggttgcttggttctttgattttaattccaccccaagcaagccaggtca

SEQ ID NO: 353676 - DNA, 589 bp, Cannabis indica
tcaggatttttgaactattcttactctcttccttacttatttaatgaaagtgactctgagatgcctcatcttatgaccaccctccctccatattgtcttcttttttctttctttctttctttctttctttcttttttacttgagaatggtcagtgcacaacccctgaatttatagtgtgacagtattttatttcattatagactaattaacactaaaataataattttaacactaaaaaataaaattaacactataattttattttataatagttacctaacaataaaattaactccaaaaataatttagagtgtttaatcatttagtttagttttgacaatccaatttaactgtgcattgttttagagtgttttgttgcaatggcacctctaatctttgagaaagtatattgatttaaagttgtagtatatatattatatctaatagaatttaaatctatataccaacaatttaattttattacatataaaaaattactatgatttctttgtttgttaggaacaaacaactattgtggaggaacaaaaaatacaagagaatgttgaaatacagatataaaaaagaaca

SEQ ID NO: 353677 - DNA, 576 bp, Cannabis indica
gccatacttcaaatggtgcagtcttctatccagtttggtggactaccctctgaagaccccaatctgcatctatcaaacttcatggagttatgtcaaactttcaaagtcaatggagttagtgataatgccattcgtttgagactgtttccattctcgctgagagaacgagccaagagttggttgatctccttgccaccaaattctatagccacatggactgatttggcaacaaagttcttgtctaagttctttcctccagcaaagtctgctaagctgcgaggagaaattaataatttctgtcagctggacaatgaatctctctatgaggcttaggagaggttcaaggatctcatcagaaaatgtctacatcatggtattgaaaactggatgttggttcacaatttttataatgggttgataggtaatacgagaacgatcatagatgtcgtagctggtggggcatttatgagaaaaagtgcaaacgaggcgtatgatctgctcaaagaaatggctatgaataaccaacaatggccaactaaaagaagtcaaacaaagaaggttgctggtatgcacgag

SEQ ID NO: 353678 - DNA, 573 bp, Cannabis indica
ttataattaaatggcttaactgttaaaataattatagtagagatttataaaaaaaattatttataattattaatgactaaaagagctcttgttaaatattaaattaattattttaaaaaaaaattaattataattaaagattctaaaaaaaaaaaagtttgacctattggtaacctgctattataggtaaaagaaaaatgtaatcacgatggttagaattagtagtcacccatacatttataggcacaccaaaaaaaatctctgcctctcttctcaactatacttttactataaattaaaattcctagatcaatagaagaaacaaaagtagtactattaattacgagtattagtattggtcaccaggtatattaatatgcagagttacaagtgtttagcaattttctatatcatttattaaattaaaatatatagaattctatattgacttgtaataataataataataataataataataataataataataatacgttaactttatagtacttagctacctttaagtacccttagagcatctccaatagtaatattttagagaatgcttga

SEQ ID NO: 353679 - DNA, 646 bp, Cannabis indica
tgataatgagcgattggaattatatgctaccgaaagtttgagtgaaaggaactatgatttgcatcatagagtgtatggaattgttaagttcattcaataccatcaatgggagaacactctcactagtttcaaagggtacattgcaaatattgtcaaagatttctatgctaatttatctgatgattttcttgatgataattctagactttttagaaaagtgtatgttagaggacattggttttcgttctctgaaaaagacatttctcaagccttgcaacttccagagaatgtcccaaatgccataatgtctatggatcgccaattgatgctcattgaactcactagtgcacgggctgaactaaaatcgggggagagtcttcgcattacacatctcacatttgctcatgcatctctcatgcgatttgctcttagcaattgggttccaaactccaacaagactatggtgtctcaagatgtggcctcattcctataccgtatcaccttcggagcatctattgacttggcctcccacattttgaaccaaattgtctcatttcgaagaggtaaaaagtcaacttttaagcttgtgttttcaaatttaatctttaaggttttgtcctcttagaaaaatgtggcccaatctcat

SEQ ID NO: 353680 - DNA, 1338 bp, Cannabis indica
gatacaattaacaattgatgatctttttcttttcaaaaatatccgtccctttttctgtagaatctgtccctatttataggaatatcagttggcagttatttatacttgggatcgatttaaaatgtaaccgttcatgaaacgtggataattcccatgtttcatttaaatgcatgtgggataatattggataacttcttaactactttttattcttatccttatagatggttaatgttgatttggacaattgtatcttgcttaactccgagtttttatccttgtctattataatgtggaaaaaatgctaagtgttagcaaatggttcgccttgtcaatttttttaattagaattgcgaggtggctgtctcgctattcgtaacttgaggttgctttgtataattgtatttactctactttgaataaatgaattatcttctttggctatgtactctgaggcaggtgtgtgtctcgtcaatataaggttcaataacctcttatccttatcacgcttaagactatgcagtcagcgagttatgaatatgttctattaattctttattaatgagttattcttttttgtattaaatgatataattttactatatcaggtgatttatattccaccgcaagacacttgtcactttctgaagtttagctgaatttcgggtataataattaattaaattaattttattcaagatacttaattattgtttctattttaataaatttaaataaatagaaaattatacttaagctggaaatttttcaatttcaaatcaacttaaattaggataattttctgaatatattttattttattttaataattatttccctcataaattttgagttgcatagattttaatgtagatattttgaaattttcaaaattagattaaagttggaaattaattttagatcaacttgaattcaagtaattttcattattgatttatataaataaatagactaaaatatattatatttttaatttgaaaattaataattagttaatgaattatctagataaatattttctaggtagactttgatatttttctagatatatttaattaaattagaaaattaatatttaagttaattttgttcaagatacttaaatatttgatatttttcttaggagatttaattaaataggaaaattatatttatgttgaaaattaatttatttaattttagaccaacataagttagaataatttttccagttatattttaatttattttaatgaattttgaaaatgtattactttaaatacattagatttcaattcaattataggtatatatttatagaaaattaaatttgagttg

SEQ ID NO: 353681 - DNA, 676 bp, Cannabis indica
agttgcatgcttgataatttgttattgttgctgctgtgtttctgtgatgctttcagaggtttaatcttgttgttttaagtagattagagctagtgtaatgcatgataattgctttgatttcaagattgaaagttttagctcaaagtttagttttcaaaaggaaaatttgaaatctattgctgtgattattgcatgagttagagtttgtgtccgactagatggacgccaggcggactaccaggagccagggcaattcggtagggtcgaatcaaggtcagggagctcagttcccccgccagctaggggccgaggtagaggtcccaggggcagggctcgtggtcggggtgatgagaacccgccacaggctgcccaggctccccaagccgatcagggagcccagaattgggaggttaggtttgctgaaatgcaagccagaattgaagagcaagacctcgagatacagagattgaggcagcagggggctcctgcagtgcctgtgccagtagttccagtggcacctgcccctgctgctcaggccgaaatagtgtggcggccaacagattggaacctttgtatgaacggttccggaagcaagcacctccggtctttctgggaggtccagatgtgatgaaggccgaacagtggctacggtgatcaccaaaatcctgaactttat

SEQ ID NO: 353682 - DNA, 541 bp, Cannabis indica
aagcatatggaattttgggttagttgattgatgattgaaattggcatgcataaaatggttcaattgttagttaattgtgttctatggtttcatgagctgaatgaaattaaattgaagtgtgtcaagggcgtaattgaactgaaattctggattgttatgcaaaagtaaaatttttcataatgatgttattgagtctacttgaaaattacttatattctggagatatacttgtttaactttgtttttcgttttagtgttttactcaaggtcgagtaaatatttagtttgggagaatttattaggcaatttttagtattatttgtagattaattttagtgtatttttaatttagttttacagatatccctgatcttaagaagtccattttgattgaggcccataggtccaagtttgttgtacatcctagaagtacaaagatgtaccaagatttgaagagacaatattggtgggaaggtatgaaaagagatgtggctagctttgtagttaagtgtgtagtttgtcagcaagttaaggctaaaca

SEQ ID NO: 353683 - DNA, 819 bp, Cannabis indica
taagaaagaagaaccaaagaagatcatcaattagaatccagggcgtttgttcactatgactcaggctgacgatgatggtagtccatcagtggtgacatgtcagttttctattagcggttgttcttatttagtactatttgatttgggagctactcattcttacttatcaagtagagtaatagaaagtttttataacctgtttgatgtgtatgcttcggggtttgggaccctgttagcctctggagacctaattgtatctacttgatggattaggcctttgtctttttggattgatggttatgaatttactgccaacctaattgagttacaattatctaattttcatataattttggcaatggatttcttgtctaagtacggggcaatgattgatttcaagtggaagatggtagtgttcgaacctgatagtgcaaagccatcggtgtttgtgggtaaggtacaaggatcacgcatacccagaattataatcccaaaagctagagacctaatgcgcagaggttgcataggattcctagttacaatagtggatactagctagcttatttcgcctaaacctgaaaatacgagattggtgtgtgaatttttagatgtatttccaagggatctacctggactactaccttctcgagagattgaatttgttatagaactagtcgtaggagtagaaccggtatcaaaagcaccttatcgaatggcttcagcggagttaagggaattaaaggttcaacttcaagaattaattaacttgggatttaccagacggagttttttcctggggtgctctagtgttatttgtga

SEQ ID NO: 353684 - DNA, 602 bp, Cannabis indica
gtgccaagtgggtgagccctccaaccaagggtactgaggcacgcctgcaggatctcgaccaggatggctacctgggcgaattagactgttacattcccgcccacaataggtgagccacaaaccctgaaaagggaatgtgcgcctggtcgggtgctcatgcccagcaaggggcattgttgcctttacacccgtactttaggaatgtggcaaacttcttccgcctctacccgacccaatgtactcccaagggcattaaatatttgtctgccctcttcgttctttatgcctcccagaagtgggatatgccttctcctcacgaagttagctcgttttttgattttatgtccacccctaagcaaggcaggtcaaggtacttatatttctctcaaccgaacttcaattggttgatgggcaccggggataagccatcagcaaaattgggcatttggttgatgagtacttcatggtggatggcatgggcaccacccgtactcggttccaatagatccccacatatcaccgccctcccttcactctttcttttagagatggagctcaagagcttgctcagctgccgggggatgaccgaaatatcattcagt

SEQ ID NO: 353685 - DNA, 596 bp, Cannabis indica
tctagctatgtgagggcctccaataatgacttgcagatgtccatctactggtggtggtagcaagtcttggttgttatcgcccctctgattttgattggccttgacatacttctgtatgtgtgggttatttttccttattaagaattcaattttccaattcagattgttgcattcattggtgtcgtggtcgtagtctccatgaaatcgacaaaacttggtcatgtctcgcttgctgacatcttttttcatgggtgcgggcttcttgtacggggctagtgattgagtagcgatgtaaacactttctatgtcttccgtcaagatggtaactgctgtatacttagcaggattctcccagggagcttgttcgctcttggcggtgaactttccctttttcccattcccttgcctattattgttgctagaacatttaccatttaaacttgaattgcttgggtaatgggggagctggacggatgttccagtagaaggagcttttgacttgccaggtttttgttcaccttctactcgctggatagcctcttcaagtttgataaaaccttctacacgattcaaggaaatcactcattgagtcgact

SEQ ID NO: 353686 - DNA, 599 bp, Cannabis indica
atgatttttattaaaaaaatagtttgttagtttttttagtgtgttttattttttaaataacaattccatgtattaattttttaattctattaatagttttatctattttaggaatatagacaataacaaaatcaaaaaaagaagtggcaaaatagaaaatattaattttttaatatttaattaatgattataaatatcaactattagatatttgatccaatggtcaagaataaaacaaccatacataggtaatacccattaagagcatacccatatatagccatcgataaagtggtaggcactgaagccaataacacagaaaacaccaatcaaaacatatatatatatatatatatacatattagtacaacatataaaataaaattctaataaatgtatatatatatgtaataaaaaaacagatatatattattaaagaacttaaatggagattataaatgacataagctaaaagaaccttgaaatcgggtctttacaaaatcaacacttagtgattatatcttagtattataaaagtgtggtgttgtgtgataatttaatgacaataatgtccttatattttatatgttatcactcac

SEQ ID NO: 353687 - DNA, 857 bp, Cannabis indica
gcgatacttcctaaaaagtattatattaaattatatgggacccgatacttagttggaccaatagcgatattgacatgtaggagggtgctagacaccactagtactctttaacatttctctaaattttatatttacttttgtataattattattatttatatttttaattaaatttttagtatgagcattaaatgagatattaaattttacatcaagatttataattatgtattgaagcataatagtaaaaattgatacaaaaatattatttgtacaaaataatgaaaatgtagattaacttttacatcttcctattagaaatggtttaaaaatatgtatatatataaattcccttacttagtactaactatgtatcatgcatgtattttttgttagaacacttaaattgtggtagattaatattacattagagctatattagaaattatttgaaaaaaaaaaattaacaaaatttaactaaaaaaaaaatcgcgaccatttttaacaatattttttttttgaaaaaaaaaataaaagaaaaaaaaataaaaaaaaaaaattttttttttttttaaattggaaccacaagttgtttaaagttagggtaatgtccatatatgtactagtgatgcacatggactccattggttaagttagagatgttttgacgggccaactcaataattgcagtttgaagaagctataaactattaaaaaaaattatttacaacacaaccctacttagtagatggaattttactgtttgcacagaatgagtgaagagctcggggacagagaccttatattcataggtgagatacttcgttagtatctgcgccacattaattgtcagaata

SEQ ID NO: 353688 - DNA, 843 bp, Cannabis indica
agactggagaacctttcccgtctggtgataaaaaaggatctgtaccaagaaactacagccgttgtggcaattcaggccacaacagagcaacatgcaaagctcgcatttgaggcgtagtatacttattagttgtaataacatgttatgtatttgttattcaaaactgctttaaaataaggttgaggttgataattttttgttgtgaattaaagacaatgttaaatatttttacaaaactaagaataagtatgttaaatctactaggaagaattgagacaccgttagactttacaaaactaaataccaaaaaaaatatttttaagtaaacataatatataactgtatttttaattacacaaaacatacaatgtcaccataattacacatataatcagccgacattctggtaaaacaaatcaacacaccaccgttcacgaaacaacttcatccagccttgcgtgacatcagttaatccacatcgcatcatgagatgctccacatactcaatgcaataaatgccacaatcaccgctaaataaaatataaagttagtacaatgtaaagcatattttaatactatagtacttttttattgctatgtacctaattgttgccttcggaactaagtcgtgagtggctcgactcgcatgcatattcaaaagcacgttgatctccttatttgttaacgccatgatctgtttattaagtggaaaatccacagttgcatggattagtgagggcaacagttcttcctaagtcttcaagatgggtgccatggcagtctaatgacaaatgctggaatcacagtcgtacaaattaattttccacagctctatgtcaactt

SEQ ID NO: 353689 - DNA, 625 bp, Cannabis indica
tgaatccactatcgttggccaaatctaaggtcaacagtttactcctttcattgagagcgagttgatatcatatctgatcaaatgccatggataacacgaggagaaatctagttgcaccatctacatcatcgagtcctcctcaagatcctttgactgtaaatcctgatgtccatgtcctagccacaactagaattcccatgaacactacaaatgtggttaatctttccatcttggcaggcactacaaatttggccactacagctagccaaagtgacacaaacatcctggtggatctgaacaatcggcccttgcctccaagggaggaccctccactggcgccttccacttaaggaaggacccttggggaacaactcctagaaacaacaactagacctcgtccctagtactatgctagagagaaggggacaagaattggcaagcatgctattggtgagccccatgtggacttgggagaagatcttgagttagccaaacttagagaggtcgtctgccgagctatccaaactgaagaaccatgcactgctgattgcaatggattcgctcagtagagacgtgaattcctaagatggatggatgaccaagagtacatcctctgatctcacca

SEQ ID NO: 353690 - DNA, 547 bp, Cannabis indica
aacatgagcggtttaatagcctagagttattaccctagtgatatatgttgtataaatactatgccatgttaaaaaaatgtatatattgagattatgaattatgcactgaaggcataattaagctagactcggtaagctggtaccttaagttaattttaatgcggtctagggttattaccctagaatgttatgaatccagtgaaagcatgagttagggttaacactcttagtaaatgttatataagtatatagaagagtattgtatgagtagttactcagtatgtaagttagggttattaccgtaagattgtatatgttgttattagtgttgaatacatgcatgtatgttaaaagttatgtatatgagacataactgggttagacctggtatatatcaccaggataaaccatcgaaagaacgtaatgtatggattacgtatatataagaatagggttatgcaagcaaggcataatcaggttaggctcggtaatcaaaaccgaggtaaaccctactaaggccttattgtatttagacgtgtgagagcaa

SEQ ID NO: 353691 - DNA, 1128 bp, Cannabis indica
taatgtcctgacttcaattttcatatcccaaacaatccaactcaaatataatccaaaaaaaattacatcaatatagtaaaatatttatcctggtgtattttcgttattttctaaatttctaatggtgaatttgttcatattaaattatgaagagacatgtagatagagttacatatgtggaaatacagttctgatttttaatgtttcataacagttgcattacagttgcataaatattttgctaatagttattttgtctcattgaaaccttcgtctgatgcaacctttggctaaccacccacaaccatcatctgattgaaacattcgtctgatgcaacctttggccaaccaccctacaactatcgtctgattgaaacctttgtctaatgcaaccatcatgcaaccacgcatcaaccaccctgcaaccatcgtctgattgtataagtgatagtgtaagaggtattttggtaattaaaattacatgaaaggtataaatgttgtccacaccttatggagttatttttgtaaataaagtatcaatttatatttttcatgtacagtagaacctctacctaagaatactctattcaagaataaattctaatttgttataaaattaattatcaagtcctaatttgggccaattataaataagaataacctctaaattataattagttatacatttttttagtcttgtattaacaaaatatacctctatataagaataattacattttaataaaaatatatacatatattttataaatttatttatgtaaaattaataattttattccaaattataatacatgtataatattatatttactctaaaataattttattatgatatagtactaatgattattattattattgtcacatggatattttttggtattttaattctttttttttagtgtaactctatttagttattacatcttaattagaatataattttcttgtgccaaaatatatttttggataaaaattcaactgtaataattcctaatcaatttaatagtttaaatatatctattctatataaagtgtgcctatataactgaattcttggtttatgagaaattcatgggtgactttttatttatatttaataaaata

SEQ ID NO: 353692 - DNA, 951 bp, Cannabis indica
atattcctctcatattaatacattttatgtatttagatatatgagtagcacaagcttggaactttacaaaatggtgatgagttactcgctctagcttctggctccgattacttagcaacattttacgaaggttgtgtggtgaatggtgttcggtttattgcgtctaagagagaccaaaagcgaaagacacaaaatagtggtgttactgttgctagaactgaagggtttaattactatggcacacttgaagatgtaatcactatatcttatactggtgcatatacagtgacattgtttgaatgtaaatggtataacactaatccattaagaaagaagacaatcactgaaaataatataaccagtataaatatacgtggattttggtatcaagatgaaccgtacatccttgctaaccaggccaagcaagttttctatcttgaagatccactcagaggtcgcgattggaaggttgttgaagatattagccatcgacaaatttgggagattaatgacaatgaagatgagacagatgttgatgttgttaatgattctaactcttcaaattttgtgttgacggttgatcttggagagttgattttacaatcgaatgaacctccagtaattcttgaatcgtccaatcagttagtggattctgagatagagaataatgaacttgatgaaaattatgttgccgaagaagtatatgatttactagttgagcatgtggaggataaaaatgaaaacttggtgaatgatgaaaatgatagtgattcgtccgtgtaactttaattttactaatgtttgttacaaaactttttacaattaaatgactttttaatttctttcgtattaatatttgtgtcaactttcaattatgtgtttcactatttttgtgaaaatttttttacatttttttattatttcatcttcaaagtaaagtacaatgtcagc

SEQ ID NO: 353693 - DNA, 811 bp, Cannabis indica
tcaagatccttagtcagctcagcgatctactttggggcggtaaaaagcttcttgttggcttcacccagctccatccaaatagatccaagttctaccctggcgtcatcagcgtccttcttggccaagtccacctccgccctcacggtgttggacagagtcgtgttcctggaagcggcagacttagcccgggagtaggtgtaggccaacttcagactagcctgcacagaaaaataaactttagtatttgagccaagtaaagaggcttaaagaaaagtgtcaaggaagacttaccatggtgaattccttcaaaactccgcccatcaacagctccaaagaagagtcgttgtcagcaccggccagttgctcactaacttcaggaaccaaccgtttcatatagtgggcaagcatctctttgcccttcttggcctctagaagcatcggcaaaggtggagtaggggcccgcatcttttcgagtccactcttagtcagcttagacccactcctcagttgttcaagcgtgtccgaactccctccttgagactccttggatttggcaacttttggagtagaggggtttgcaaccgttagctcctcagaaagatcaatgacctccctgataggcacctttcccttggaagaagacccctcaccgcctttagacttcttggctggaggagatgcgctggaacttccgccaattctcttcttcagagagtcaagcatcttttaagagatgtctatatggaataaaaaacaacatagttagagaaaacagacatcagaaacgcaaggcataatggtcaagaagctt

SEQ ID NO: 353694 - DNA, 653 bp, Cannabis indica
tccataccgcccttgggcggaaaaaagtacaccatccacattaactttgacaaaagggaaatcgggtgctgtccattgctccacaggtagtgcagtcggcccgtttaagcttgcatctgtgacattaagttttttagcattaaatcaatcaacataatttaactgagccattgccactgcctcactcgcatcagggtgtttggagttccagaccaaatcgttacgatgagtccaaattgaccaacaaaaccataccagcctcaagagcctcggtcgtattccacgataccaaacccgcttcgaaccaacttgagaacaacattgcatcaggcgccacagcagtaattggagccctgcttcaacaactttgagaaaaagagcaccgcaccagcacatgcagcgtcgtctcaggagcagcaagacaaaacggacatgttgcagcaattggaacatgttttgtggaaagatgaaaccgagttaggagactgttggtagaagctctccatagaaaatcaagaacctttggagggagctgtaactgccacaagagccgccagaacccagagctatctgggatatctctgttggatttcattgattgaagcagagaatatgcactcttaacagtgaaaacccctgacgcatcatgtaac

SEQ ID NO: 353695 - DNA, 476 bp, Cannabis indica
gatctctatccaaaataatggactttgggacaccatgaagacaaacaatttctctagcatatcactcaacatactgatcaacggagaaattcgtccgaactggtaaaaagtgcattgacttagtaaacctgtcaactatgacccacacagagtcgtactatcctatggttctaagcaatcctaccacgaagtccatattaatgtcttctcatttctactctggaatattcagtggctgcagcaaccctgcaggcctctgatattcagctttcgcttgctgacaagtaagacacttagcaacatatcagcaatatcattcttcatgactagctaccagaacatagccttgaggtcttgatacatctttgttgaccctagatgaactgaataaggagtcgtatgggacttaatcatgatctctcttttaatgtcatcattcataggcacacaaacacaatgttgggttttatgcccta

SEQ ID NO: 353696 - DNA, 528 bp, Cannabis indica
tgcgccggtaaaagttcttttaaaaatttgacctaagtcaaaacgcgcgtttcatttacaccttttaccggcgcacttgtgcgccggtaaaagtatccccacttgccacgtcaaaatccacgcgtttcatttacaacttttaccggcgcaatggtgcgccggtaaaagtatccccacctaccaaggaaatccacgcgagaagttttcctctcttttttagggacttttaccggggcatatatctgccggtaaaagtgtacaagcgccagaataaatgaaatgaaaggcggcaaacttttcgcgcctattggcgcttcatttcatcccttttaccggcgcatattcattattgcgccggcaaaacatagtaataccggcgcaatattgtgccggcaaaaataaagcgaaaatgtaaatgggttttcagtttttcttttacgtcgacaacttttaccggcgcatttgacgaactgcaccggtaaaaaggtcttttcttgtagtgtaatactaatttcctacactacacca

SEQ ID NO: 353697 - DNA, 546 bp, Cannabis indica
ggggccggacagtatgtccgttctcttttttaaacactactgggactcggttggtgatgacttttgtgaggcagttagcgattttttcgaagaaggtaatatgcatagaggaatcaatacaacgaatgtggtgctcatccccaaagttcagaatccgaagcggcctaaccactacagacctatttctctatgcaacgtcgtttataaggtcatatccaaaatagttgcaaacagaattagacctatccttccttctctgatatgccctactcaagctgctttcgttccgggtaggaatatccaggataacaatgtgatcgttcaggagattatccacaccttcaaaaggaaaaaaggcaaagagggatattttgcaattaaaattgatcttgttaaagcctatgataggctaagctggagcttcattgaccatgttcttgattgctttgatttccctcaaaagtttcggcggtgggtttctcagtgtatctcaaccacttctctcaacgtgtgccttaatggaggtcaggttggcaggattttgcc

SEQ ID NO: 353698 - DNA, 777 bp, Cannabis indica
gattttttgatcttgtctccttcctcatcagtaacaataggaggtgaccagccttcggcaacagccatccagactcgttcatccgcagctttcaagaaagctctcatcttcgtcttccagtagggatagttagatccttccattatggggggtctggaagttgatcctccttctctaaacatttccatttcaagtagatctgcacacactcagcaaagaactttgttgcacaacgagatgagactcgtagtgggtcagttttctagaaaatcacagaaagaacaaattgacaaagaaacttaatagatgtacagaaaataggacaaatccaagatcacaatttctttacatgaaaagttagctctgataccaattgaaagtcctaattactcaagttctaattgatgattcttaacagattaattctaggttatgaacagaacttaaaatcaaggaacacagaatttacaagcttcctctgcattggaaacgcattccaaccgagtagtgcttgggttcccttgaaccgggtacagtaactttcactaaacaatcaattcaattacaaattccagttctgattcttcaaatcaaacaatgtaatctaaattgacttttgtacaaagttacctaacacttgaacaacctcaagctttgagatctaaactcatttagatctcagtacacaagaacacttagcatacacacagctgaaccaccttcagcaaagtaatctgaactcccttcagatcaagcagattcgaactccatcttcaa

SEQ ID NO: 353699 - DNA, 593 bp, Cannabis indica
aaatatttaaaattggaaaaaattacaaattgaaaatattttaaaattagaaatatttcaaattggaaaaataaattttgggaaacaatcccatgaaaaatttgatttttggggaaaaaaccccaaaaatcgcaatcttttggtaggctgccaggacaggctgcatgtgcagcctggtatgcgcgcggaggaggtgatcacaccgaggatcttcggcgcctgcagcatgcctgacggagaaaactcggtcagctgcatggtgcgtctgggcgagtcacgcgcgcgcggatgcctggcttgtccgagtgcctggtgcactcgatgcacccactcgacaaccatggctcccaaattttagaaattcataacttttcaattttttatcggaatcgtgatccgtaaaaacgaaaattgcttaatttttcacaaggaatggaaataaaatatttttaaaaatagaaaaaatatttttcatggaaaaaggtactgtacaacatatacattcatcagctaatacataaactacatgaaaccatccaaatcaacacaaaacatataaaacatcgttttaattcatataacatgaaagtaaa

SEQ ID NO: 353700 - DNA, 737 bp, Cannabis indica
aaatttcaaaattaaccataaggctatttttgtgaaaaatcaaaatttcaaaaatcaaagcctactaacatctaaaactaattttaattaattaaaaaaataaaaattaatttttatttgataattagacttttaattgaaaatttggattctacacaaaattctaccaaaatttgaattttgtttcaatgaaaaacaatttttgaatcaaaagatatccagtggaggcattgcccttattacacttaggggcaacaactgcacgaggcaatcaagtttggttttaatgcctccaacaatgagacttgatacaaatctctgattgttggccttaggctagcacatgaagtacgggtcgaccacttagatatgtacaatgattttcaactagttgtaaagcaagtcctaggtgagtatacagcaagaggtgaaagaatgatagcctatttgagcaaaatctaagacttattaagttggctcaaaggctataccataaggcaagtccctagagaagataatgcaataaccaatgcactcgcttgcctagcaagcaacaccataactgacaagggaaattttgtgcccatacagttctataaagaaccaagcattaccattccacaagaggttgacatgttggatgatagtccaacctagatgacgcccatagcagcatacctccaaactggagtcttgtctgagaacaaaaatgaggcaagaaaaatgaggagaaaagc

SEQ ID NO: 353701 - DNA, 804 bp, Cannabis indica
tcattttggtatgaattttgaaagttcttttgatagtgtaaattctttgttagagtctacaccattaataaacacggaagaatggaacaacaaagttgaatcaactgaaccttttctccagttagaaccacagtcactcccgaaaccactaaagttagatataaaaggttttacccgaagatctaaaatatgcattcctaggagagtcagaaactttccttgttatcatcgcatctggtttagacaagaaacaagaaaagaaattggtacaagttcttaagagtcacaaagaagccatagggtggaccatggctgacatcaaaggaattagtccttcagtatgcatgcatcgaatccatttagaaaaaaatgcaaagccatcccgcgagtgttaaaaaaggctaaatccaaacatgaaagaggtagttagagatgagatacttaaatcattagatgtgggtattatataccctatttttgatagttcatgggtcagtttgatccatgttgttcctaagaagtctggaattactatagtcaagaatgcaaacaatgaattaattcccactaaaatccaaactggagggagagtgtgcattgactacaaaaaactgaatagcctcaccaaaaaagatcatttcctgttatctttcattgaccaaatgcttgaaagattagttggtcacgaaagctactattttctcgatggttattcgagatacaaccaaatcctaattgcaccttaggatcaagaaaagaccacttttacatgtgttgggttttatgccctaaataaaactcttt

SEQ ID NO: 353702 - DNA, 661 bp, Cannabis indica
gtgagagcaacacgtaggtctacgccacgtagacataaatagatgtgtgagctcaatacatagatctactccacgtagacataaataggcatgtgagtgtaacatgcaggcctgtgacacacaaacatatatgaatgacattattgtttaaatagtataatgagcatattaatattgttatgttatatactgccttgctgggcttggctcatgggtgctctactgtgcaagaaagggtaaggcattagctgatctaccatgagtttaggagctgggcaaagaatgtacgtgtccgagccatatcagaccaagcgagttaagggtctaccagcgatgtattttgaaactctattttgccgcgtaggccggctaaaagaaaaagagttgtaataaagtttgtaaatatattttgggatcccaaatgttaaaaagtttaaattattacaagttttatttccattccttttattacaaaagtttaaattatgtgctattttgattagtaatcccgcttaggggattagggtttcctagataactcgggtaacgtgcctaattatttacggtgttacaattttggtatcagagcgccaaggttttaaacttcctgtagaccggccgaacatgtacattcatcgtcagagacaagctcgactcgtgg

SEQ ID NO: 353703 - DNA, 1335 bp, Cannabis indica
aatatcggtcccttctaatgtatagtccatacagctgatacttgtaaattttgccaatgccctgcaaaggacataacacttatccaaggtgtaagtatacctaacgctgattatcatgccagtctaaatccagtgaattgacaaattagggaattaaactttttgaacatataatcatgattatatttcactgtgctaacaacactataatcatgaacaaatacatacgttctggacttaatagaatttatacattaaacataatcatgaaataaatcatttgaaccgtgcaacataaaagcgatttctgatctttattaattagtaaatctgattatattgaaataggttttatttagggcacaaaacccaacatgaactccctgaccgccactggatatgaccaagttaccctgattcctggtgtttcgcctagcgtccatactactagaaccacccgcgtaaccaagagctagtctggtaagattgcgatcaagaataacttactaattaccgcttatttggaaattcaaaaaacacgcgtttattcagctatcaggctactaacatgcttactgaactgtgagaggagctgatcgctgatgatgattgtacatatcgtgaagatcttcagaagacaacctggccgctctgatacaaaattgtaacgccctactagtttaggcatcttcacgtgatttttaactaactgtgcagctcgttgctaatcaattagtttattgaaaatcgtgattaattaaaattttacttaattaattaaaaacactaaaataatatacttatattaaactgggatcccgtttacaaaagtatttacaaaagtttcaccttgcgtatacaaaagtttattgcctagcaactatacaaaagaagccctgatgtcccaaagaccgtacgctccaagcctaaccgccccgacatgtacaatctctatctgctcgctctaacaactgctcaaccttagccttgcccttacctacacatgcaacaatatctgtgagtcgacaaactcagtaagaaaaatataaataataacatagcaattacccggattataatcaggcgcccatacacccaatcataaccctaactgagttaggaacgttcttgacaaagtatgactaactacgaatgtagtgtatactcagtactctagtcatactgatgtggtagcagataactcatactatctgatagcctagcatatatctattggcatctcggtgcaactctatgtacacctcaccgacaccttgatatactaatctgatggctataaatttgcctattttgatgacaactaacatgtacgct

SEQ ID NO: 353704 - DNA, 667 bp, Cannabis indica
aaataattgaaactagtttcatcaataaccaaatagagaaaaaaaaaatacaaaaaaaaattaccaagaaactggtttcttcatcaagaaattggtttcttgatgaagaaaaaaaattggtaatttttctggcgactatgccaattctgatgacttttccaaagtttgctgtcggtgccggaaaagtcgtcggagtaactgctagtgtcagagaagtcgtcagaattggcattatcaatgaaaaaatcaccaagaaggtagtttctttatcaagaaaccggtttcttgaagaagaagatgaagaaatcggtttcttggtaattttttcagtgatttttctggcgacaatgccaattccgacaaattttctggcaccgacaacaactccgacgacttcccgacaccgatcgctgctccggcgacttttccagcaccgggagcaaactccggtgacttttccggcatcgatgataaatgaaacttcctaaacaaataaaaacattaaatatatgatttgaaaacttaattacacatatatggcatatcgaataccataaaaagacctaattaaaaacaaaaaaaataccatataaattggtcaaacttaaatgtaccatatttatcataagaacttttaaaatccaatagtaaatgtaattttctcttt

SEQ ID NO: 353705 - DNA, 1013 bp, Cannabis indica
agagagagagagagagtcaacaaattaatataaaaggccaaatttaaaatgactaaccacaaagagataaatgagggagacgattaagctctctgttgcctgtttttgtgcggcggagtaacctgaaggtgacttgcaaagttccatcatccggtgagggagaagcttggctcaaggtaaagaagggtgcatccttgttgagatatttatgccctaaaatcaagtaattaatggataatatattagagaatatgtgaaatactattataagataaatgatacattaattataaaagtataattaataattataaaagtataatcttttaaggacgtacaagagaattaagattatatgatataaacaaaacaagtcggcagtgaattaaaatattgagaatctttaatatggaactactaagtacagtttactatacactatacttatagtgtgtgtgattttgattcaaatcacatatgtagatagacatgtagtaaatgtgatgtgtataatttgattatgcatgactggatgatatgtaataaacatatttcattaacctgtcatttaccatgaaatagttattcatatcacaacgatgattattagtagatcatcctgaattctgagtatacgtgaacttgtgttcattgagttttttgattcatttgtttaagtttctcagagaagataattcttacaacatctgttttgggagctcaataacataagtggttgggaacatgtcatacaaattcaagcttttttaacagatcaaatgttagttcttatatagtgttaattctgggagtactaacagttggatctaaatctataataaattatagattaactgttcacattgaattaatgaccagtgccggacccagaatttaattggagggtgggcgtaaatttttttcatatataaaaatattccaaaaataaaacaagtaaatataaagaaaaacacaattcattatttcaattcccaactaaaaagatattaaat

SEQ ID NO: 353706 - DNA, 1379 bp, Cannabis indica
ctttgcctttcagttagtcttgtttatgttgtttatacaagactttttcttcaaaaaaaaaaaaaaagaataatcattgattattaaaagaagttataatatagttcccactaccttatccaacatccacaagtgatttacacgtgtataattttgtccagtacaatacttgtttttttttgttttttttttttttttttttctttagatttttctaaatctaaagattttttagaaaattttatccagattctcccaaaaaaaaaaaatatctaaagtttttaaggctttatcgtttaattttgaggtgtgtggtctctactggtcccaaactaaaatgaatatttcttctcaccatttctgggcttcttcttcttctttttctagttgtattgtttgctcagttgagagaggaagatcagtcccaacaaatacacttcgagagtcctaaatcaaaggtgaaaattactgcttaatatatattttgaattgtatgacagcttaatatataaagcaaaatcattcaatggaatctccggagcccttaagcgaatgggagcaaatcgactcaccttcccctcgctcccctcctccacaccaatccgttttttcttctcacatggccgatactcaaattcaacaacaaaaccactctcctgattcctcatcatcttcttcgccgacgccggcgttgtcttcgtcatcctcgaccaatttggagtctaacgaagaggacgctcaagctcaacggcggcggcctgaattatcagactctcggctcgcggcggtgaaagaattcaagaagcaattgagattgcgaatggggatcctgaagaccgatgttcttggcgcggctaccaagatttgtaattacagattggtagcggtgtggagattttggtcgattgtttcggtggccggagcgattacggcggtgttgctctctctgctctacgccaagatgaggcgtccgcgatggagaccgactgttcttcgccgccggcgcggcgaaaataacgagcctctgctccttctgcttaaagagaaagatgaggttagttatgattgtcgtttttctctttccaagctatgattgtcgtttactgttctaattcaattgtcgtttggtgttggaattgaggtgcagaaaatcagccagttgcttgttcagattgctcatatgaatgaagctttatcggctcggcgaagggttcctgtaattcgagttggttgagctgagaggccatggaaggaactcaaaggggcttttttttcttagtgcaaaacccataatcgtacgtatatattttgtatgtattttatgtcgtagtgttatttattcaaaagtcgatatagcttttttgtttttgttttttttt

SEQ ID NO: 353707 - DNA, 1786 bp, Cannabis indica
aatatagataaattcacaatcaaaaaaagagaaataacaattatcattaacttaaggaataatattaatcaatattcatcatctccccaaataggagtttagttcataaaatccacaatcaaattcataattaaatttaaaacagaaattaacatagaaattaagagtttaagaaagaactagttggtgatcgtgctcccagtcacaacaagtgcttcctctgcctccttcttcaactttagggtacaatttatgagtatctttcttctaaaatacgagccccttaaatagaaattaggatagctacctctgaatggcgaaattccaaaactacccaaaattcccttatttagcttatagttgcgactacataaagtctagtcgcgaccataggaaaaaattaaaaatcaagctttctgcctatgcctcgtagttgcgaccatagtcgcaaccatggataatggtggtcgtgactactgaagcatacttgtcaacttcagtagatttttctccagtttgccccgtcttttctacaattgatataatttgaactctaatacctcaagaatctgaaacaaagaaaatcaagcataaaactatgccaaaaaataacattaacaaagaaaacaactgtaaaatcgacccgaaacttaggctaaaaatagcctaacaaaattctctcaaactaaattcttactcaccctcgagtaagactaagacaaacactaaaactcgattaactaagctattagataattataatactactggctcatgtgaaatttccttccattaactaaactagaattttaattctaaaaactctagcaattaattaggattctcatcttatccaacaatgtacagatgcaaattaactttagtaatgaaataatatcataattatacagatggcatcatcgctaactccgttcaaattgaatgtttgacataactccatataattagacagatacatatttggatcttccgaggggagtccactaaactggactgaagattgtatcatttggagtatggcttgctttatctcgaagttattggcctctacggcgggtggtcttatacaagactgaacccctatcaatgttggaaggacatagtccctcagactacggtcaggtggattacgaccgtttgcctggtcttctactacaaccccattgtttccattgttgtcattattggcgttgtcagccatgactatttctggttcagccctcaatgtagctttgtctaacctcttgttttttctattctgtctacatgcactcttgaactagctccttgacgtcgcatataccaaaagcacctgagataggataaaaaaaattaagacaaaatagttagcgagaagtaaagaagaaaaaccaaaacaaaatttagtctaatttttgtaatgtcaatttttgaacaactccccggtaacggctgccaaaaacttgttacgaaaaaaaatatgaacaactacgcaagtgcacgtaatcaagtagtactcacacatgtgaggtcgaacccacaggaaattgaactgaataccactaaatcagacttataattctatttggtaaccaataattttgatgaaaataaaaataaagaataacacgaaaataaaattacgcaataaaagtatttaatcaatgatgagaaattagggaaaagaatcatgttgatttaattatccaattgttaattctaattattattctctttcttaaggtgaaagacaaattataaattaacctaactcttttcagatctt

SEQ ID NO: 353708 - DNA, 787 bp, Cannabis indica
agagagagagagagcccttggggcgtgtagaagagagttagggttgttagacatatagtagagagcttagggagctcagaggcttaatgacttagggttttagagatagactaattgtctttatataatagagcttacatgcctaatatccttagagataggtcaaatatgttactatttacatattaaattaataaacaataaatgactaaattattctttcaaaatagggaagttgttgatattttttgttgtgctttcgtggtctgttaaggactaactcgtagcttggcttgctatccatgaacgagggctgtacatcaatgtcctaccagggaaaagttggctggccatgcacctataggatgcgacctagccagccatacaatgcctgcaggttgaggtctgtccggccatgctcctgccagggtctcgtaggtcatgttcctgccaactttgtcgagttgggaagttctttgcatgtgatggccaaccattgtgatggccagccttgggaggtgggggaaagcctttgtaggtgatggctagcctttgtacacatttttcttgtagaggtaaggcttccttggtcacacaaacccttccttggtctgaaagtcaccttttggccggccaacttgtgcccaagccttttttggccatacatgctcatcctagccgacctatagattccccttggttggctagacatggtggtactgttggaaatattttactaggatcttgatttactaacaagtatgtttcgttaacatcctaatatgaa

SEQ ID NO: 353709 - DNA, 1063 bp, Cannabis indica
catgatttatcagtgtactagatctacactaacgtgataatcagcgataaagtttacttacaccttggataagtggtatgttcgttctaaggcattggtaaagtatactagtatcagatgtatggagtatatattagactggaccgatattgaacttggaaaagatacaataaacttaccgttatatctttctaagtcaatatcacttagttgatcttagatcaaaagatcttaattttgagatggttaggttcgagcttaactgtattatttatgttcttcgacttattcgttaaagctgacaaaatggattggcccaatacttatatcttgggaacatggtagtccaattgagtgggagcactaatcatggataagaaatctatagcttctataatgacatagaagtgaaatgatgattttcttggagcttggcttaatagagataaatggaagagctcttatttcagtaattatattagtttacagaaatatcatttataggaagctaagtgttttaaggataaaatacattgaagggtacaatgataaatttttccttactcgatgtaaatcatctatagatgatctttgattatttggattataacaatggatatttaatagtgtatctatatttggaaaatatagagtgttatatgtaaccaagagtgcaattccaaatctataatggagttaggaggcattaataagttaagaaatttactcggtaaattctagaactacttattggaagcttgattatataggctcatggtccccgcactagttgagataatattggcttgtagactcagttaattggttttaattaaccaattaaaattctaaattagactaagtcttgtttatgaattttcactaagcaaaggctaaattgagaagaaataaggttttagggtttatttgttaattaagaaacattgtaaggccatgtgcgtgcggggagtgttcatactcccctgatttcaccattttttttttgccatttttcaactttttaaacttatttttcaatgaaataaaatttaaatttggtaga

SEQ ID NO: 353710 - DNA, 641 bp, Cannabis indica
cataaatgcaattcattaccaaatgaaaactttattataatattctctaaaaaaatgaattgtctgcaataatataaaaaatagggaataaaaagcccaaaccaataattgaaatcaaattgttcataaattaaaacaatttattcaaaaattataataaagaagatttcgagcttcatcttcaatcttggataatctccacccatctgtccaaccatccgactcaactcgctaggatagcaatccaagtttaaccagctagagctgaaagaagaagaaaaacaaacatggtcagtaggtcctgaattaataacccaaggggataatgattctctaagacacatgagtttatagcataaaagaaataccttgtttctttgctagaaacttagagcattggggtttccagtcccttttcattgtaatagaagcattttccttttggcttatctctgggattagtagcctttttctttttaactttttccacaacttgaacatgcttattgctattcttccactttttcttgttgttgggttgggaagtagaggcaatgtttgcctcaaccttagccgccccattagcattcccagaattaggagctttagctcctcctttccgtggtcctccaatcaaattt

SEQ ID NO: 353711 - DNA, 514 bp, Cannabis indica
gggaatagggttattaccctaacatgagcggtttaatagcctagggttattaccctagtgatatatgttgtgttaattttatggcatgtcggatatatgtatatattgagattatgaattatgcgcttaaggcataattaaactagactcggtaaactagtaccttgagtttaattttaatgcggtctagggttattaccctagaatattatgaatccagtgaaagcatgagttagggttaacactcttagtaaatgttatctcagtatatagaaatgtattataagagtgattacatagtatgcaagttagggttattaccctaagagtatatatgttgtagtaaatattaaatacacgcatgtatgttaagagttatgtgtataagacagaactgggttagacctggtatatatcccaggataaaccaccgaaagaacgtaatgcatggattatgtatatacatgaataggtatgcgagcaaggcataacaaggtgaggctcggtaaccaaa

SEQ ID NO: 353712 - DNA, 758 bp, Cannabis indica
tcctaaatcataataatcacaacactattaagtgacacgctaaatcacttctcggggacttaaactcgaaactagaagtttccctatcgataaataacatggcaataccctaaataacacaaaaatgggacgaactagggttcccaaatttgccccaaccagtagaccggttcctcaaccggaattccggttctgggaagacaggttcctacaggcctccctgaaccggaattccggttcagtgcaggaatgggtcaaaatttcatatctcgaccaaaataaccccaaaccacatgagactctcaagacctgttctaaatatcccaaagaacaatttcaaagcaacaaaacaaccttacgcacacagaatcaaaatccaccatgtgagctccaagtttgagcttcaaagctcaaagcttggctaacaccacaaccagccactacaaccagcttaattcaacctaaaacaacatgaataacatccagaaaccacaaacaaaagtcacagcagcaaaaacaccattttaccattaaaattcaaagttttgagtttaaagctttacacatggttaaaaccaactaactaacaataaaaccaacttgaatccactcaattaaacatatctaaacttcagaaaacaacaacaaacatacacaacagctacaatcatcaaaattaccaagcacgcaaccattttcttccttaaattacaacaaactaaagagagggtgcaagagctatacctagggcttagatt

SEQ ID NO: 353713 - DNA, 921 bp, Cannabis indica
gtttaattatgaaacttgcataatatttatgatttatcattttatggagatttatttgagttcagaatgcattatatatgctatatatgaaattttatgtttttgcatattttgtgcctgacaacatcagaacgcgacgtttggccattacaataatattttagtatttttagtatggcaggacaatatagtgagacattaggaatgtcgagaattttcaagattttggaattgaccaaattacccttaggtggttttgagactttttggttaagtggggggcaaaatagtcttttcccctaattgaagttttgtctttagtgaattattagtaaacatattaaatctgattttatcccttgttttatttagataatacctcattttactttattattcaaaaataagaaaaaaagataataagagaaaagctatacctttctctccctctctctcgagttccttagaagaacaagctagggttttgtatttttctgccaattcaagaagtttccagcaagttttgattatgtccaactcaaggtaattcttagcatcttttctcttgctttgcttaatctttaagtattaaattttgcatgagttgttctttggggtatattaagcagctctggaaggtttggttaagtttggggttgagttgagagtgttgttaatttttatgtgaatcctgtactgaattggaattctgtttcagggggacctgtaggaaccggaatttcgattggtccccaagaaaccccacagaaccgaaattccggttgaggaaccggtcttccatttggggcattttcgggaaccctagtttttcccatttttgcaatatctagggtattgccatgtttttttatcaatggggaaacttttagtttcaagtgtaagtccccgaaaagtgattta

SEQ ID NO: 353714 - DNA, 747 bp, Cannabis indica
gtcattacatgatactctattcccctctaatttgatttgcgctcaaaaaaaaaatactgctagtacccatcgagatcgtcaaagtttagcttccaattgttgtgcgctccaactccaatgattagaaacccccattttagccatttgcgtactgtactgtcgtgggcttcaaaggttcagaggtagaagaaggtaactagacacgccaaagctaatttatttattttatctatttgtgtttcttctctcatgaactgatcagaaaaaggagtttctttcagatttaactctaaaatctctcctctgccattaccaacacataggtatacctaaaatttattatgattatatatgtgtgtgaaatctggtttgattcatagtgcaaaatctgctatgaatacatataatattcaaatggccgtatgcgacctgttttcctttgaaattaagaagaaaaaaaacattaatggaggcctaacttttctgtgatgagttgtattgtttgcatttctctgatttgggttttttttccagtaagacaccaagataatgttttcttctccaaccaaacttttatttgataagctcatagttctttttgaataaaaaaaaaaattatttgataagctcttgataaagaacaaatgtttacttgatgagctgataaattatcattaataatttatcattaattgtttgatgagctatggaggaataggagtctcctgcaaactcaattaatcaaag

SEQ ID NO: 353715 - DNA, 950 bp, Cannabis indica
ttccacatatagctcatattacattcacacattctatataaatctccgtaatttataaattacgcttatttactcacttatagtaaaatttaaattttatgctgaaataaattagtaggatcataatcccacttattacctgattaacacataatataaatataaaccctaattaattaccattagacttatcgggatattacagtacctactctcggtacccatcatatatcactgacgcccatatttacgcccagtacgtcgccaagaaaattgcatcacctaatcaagtgagcccgtacctactctcggtactcatcatatatcaactgacgcttgtagttacgcccagtacgtcatcaggaaaatcgcatcacttaatcaagtgagatcatatatcacatgtataatatcatcgcattatcgattctcaaccaattaatcttttcattatataacaatattaactatatctcaatattaatcaattcatttcaatactaattgtattacatacaacgtactatgtagtacaatacacttttcttacctttaattcaagttcatacatttcgaccaacccaagtggagaactatccccaatgatctcagccctatgtcacaaaaacggtaaaccaataaatgttttatcccaaaacactacttaatattcacataagacaatcgagggttttctaccaaaccctatggtataagtacactaaaataaaacttatattttgtctttaaaacatacaccatattgtagaactcgttgcaagcttcgaaacaatatatagaacgtccaaaacggacacccaagtcaaaagttacgacaaaaatacgatttctaatctcctaataatttctaaaaactatgaaactcaaaaattttaatttttgcactcaccgaaacactaccaaaactaatccaaatcactccaaaattc

SEQ ID NO: 353716 - DNA, 1482 bp, Cannabis indica
taattattaaataattagtttggcatttattggattgaattggagatatggtattattgaaagaagaataagttgttgaaaaagttgcaaaattgtaactagagattggcactttaagtggccggccctagtgttatttttgctcaatctttttttcttttttaatccatataattcagccctaagccctagttgaagcactacaaaaggaacatgatgctctcatctcatcctctggtcaacttgactattcaaccaacctagatgagagagttccttccttagtgatttcagcctccttcattgttcttccatatttgaaacccttagtgaaagagtgccatgcccacaaatagaaaatcaagtactcattcatagtgagtaagacagtgataaccaaacctaaaggagagaaagagatccaggttcaaatcttcataattctatgctacagaaagtcatcaagggctagagatcttgaatggaaggagtcattatattctgctacaatcaatgtatggttttcttaaacccttatgtgtttatttcattgtttaagagaattcatatttacgatgttatttcaacatacttgttagtaaatctagatcctggtaaaatattcccaacattatcatggtaggtggccagctctagggtttcaccctataaagcttgtcggttcatgcttgggtttggtgaccctggccagttcttgactaagtcatgggaccctagctgacaatttcaaggctcaggaaccctggccggcttgggccttggttccaagcgggtggccagctttctgtcctctattgactttagcaagaatcctgtcatggccttgtaggcatatacaaccttagtctcatgcgtcgtttccttagaaactctctatgaaacttaatggtgagtctattatagtcgaatgttcaacttaaaactcaacatttgtccaagttgttacacttgagacttgtactttgctaatacccagccttgtacaatgacatgatatggaaagtactgttgggtgcggttgtccagagttttatgtatggcttggaacctgcaaggaactgtgccttttggcttggaatttgccacgaactgtgccttagccttagctcggtacgtgattcctataggaactctatctggttcttctcggcctatatggttcttgcagggccttggcgttatgcatgtgaagcgatcttttattcatatttgatctcaagcactactagaaaatcgggttttagtgacacacattgagtaactctaaaagtgtatagtgacacttcaatgcgcgtcactaatgagggtgactggaaaaacaacttttaatgaaacttcacacgtgtcattgaaaccttttgcattcattttccgcgtgtcactataggcgtatagagtcagattttgtcagactgaaaaggtaacagccacacacatgaagtgtcactatatcattttttt

SEQ ID NO: 353717 - DNA, 573 bp, Cannabis indica
aaaaatatattttaaaaaattaaataatattataacaaaatagtaaaatatataattataattttatttaaaatatatataaataattttgataacaattaagcatttacagaacaaaaatcataggtccctcacaagcaccaattagtcacttgataatgctcacaaaagtgtgaacacattttcttatatatgtttttgcctaacccttcgtttaatcttgattcttcagtcgtatattagaaagtaattattagttttatattttatttataccactaacaaactactaaagtggccatatttgggatattgttggtgttcttttaaattacgccatcagttagcttaaaacacattaatctagagtttgttgatgataagtactacatgacaatttcaaaattttaatttgactcaataagtagttcttaactttatattatatcttgatttaatgcaaagttgattaagtactcgagtagccctcgtgtccacattatatatatatatatatatatatatatatatatatattattctatcacagaagaacacatcttattatgagaa

SEQ ID NO: 353718 - DNA, 519 bp, Cannabis indica
agatggtggttactctgggggtggagaagttattctagaagagtgtaaaaacccatcaataatagttcaagctcaatcagtgaatatataactttgtaaattcgagattaccagaaagttattcaactgaagaaaattctacactgtattatctctatttcattctttaaagaatgagagatatgtcttttgtttattcagttgtacttaataagaagtaaggatttaagtaacccttgagtaatgcatatagtaaaggatgttgcataatgttttatgaacatggttcgaaaaatttgggttgagtcaaatatcctacacttgatctgaagatcaagacaacagattgtttggaatgcacaacttgttttatgtcagtgcaagtgggagtttgttgggattttatgccctaaataaaacccattacaatctaatctgatttgttatcaataagagattagaagtgatttatgttaacatgtagttttcatgtttttggtttaaatatatgtacaaaat

SEQ ID NO: 353719 - DNA, 745 bp, Cannabis indica
agaaccatagtcgatcaacacgaggaggagtgagtactcattgtaataatgattgagagagtacaggcacaagtaaaactgaaagttactcaaggatgagatccatgagcagtatgaggtccatgagtaggagaaattccatgagtagaatgaggtccgctagcaactataaccaaccagatctacgcgatcacttaaaccagaaaaaatcggatctttcccaacaactcggtccaaagtaagaggatcctatccaattgcgaatagatgagttggaggataatttcaggataattgaactgccttatcaagtcacgagattctttattacgatagtatagttctgcctgatgagatcagaggatgtactcttggtcatccatccatcttctttgttgtgtgagtgcattgtaaccaacatcgtgtggttcttcaatttggctgacttagcaaacaactctctaagtctggctaagtcgagatcttctcccaagtctacatgaggctcgtcaatggctggctcgctaatggctagctcaccaatccctggccatatctctcaaacttaatattgggactagatctagttgtggtgctcaagggttactccatgttggccattccttcaatacaagggtcgagggtcctccctgggcagtaaaggttatccactgagactaaccgggttggtagtgtccacctgacctgtaatacccagaattaagaaaaggattagcaaaaccct

SEQ ID NO: 353720 - DNA, 516 bp, Cannabis indica
taaatagtaaaagattagaatagttgaaaacatcaattacaggcacacacataaattatttttataattttcttttgcaaaagaaaacattaaacaaataaaataaaaataaagaatcaaaagctcagatgcacatacatattaatcttattattatatcagatgacagagatggacccctccatctaattagtgcagaaatcataacagctaacttggattcgaacccttgaccaaatgattttaactatgtcaaacaaccacaatactggccaattcttggtggtttagtcctatattatttactagactcctaccaatgtcaccaacataagtgttgatgttttcaacactctctcttctcttgaaaaatgccattgagattcaaagcaatcgatgattatatacttcacaaaaactaggatcttcacctaaccatacaatatttggactttggagaccaataaactatagcaattgctgttgggcaccaccttatggtgcccaacaccatac

SEQ ID NO: 353721 - DNA, 691 bp, Cannabis indica
aatatttatatatatgccttttctagaaacagctttccaccaatgatatgatatttgtactaagcctcatgacgccacgtgtcatgtcgtgtgtgccagggaaatggcatgtgacccctgagcctttgacaatccagggatcctataatatgaatctcacgtagttatgtcccaaccaaaggaatagtctaaaacagtacaatatatagtatatctcaatctcatctcataaaaattaagatttaaaattttaaaaataaagtgctataatattatttaaagacttttaacataattattattatatatataaagtcttgtttatgttttttattttattttattaatataattatatatagtgttgtgattctgtgaagtgatgatgaaatttcagttttaagactctttgccgctccgttctatctatcctttcccccaatcagggaatgccatgtcggaagttcggagtcaaagtcaaaaccttgaaacgtgggactatgaaagtatagtggaatctcttgataacgaaaagaaaaaagatgtgagcaggattgttattaggcacatttttggtacccaacactatacccacaccctaatattttagtggacgcaatttttttttacgcattaataaataatataattgttagtattctaaataattttttagtcaaattttttctca

SEQ ID NO: 353722 - DNA, 610 bp, Cannabis indica
ttgaggtcagggacatacctcacttcttgtagagtccttttggtgccatcaaacatctttatcatgacagaaccagtgccaagaacattacaggccttgtttttgcccagcaacactgtccctcctgagatttcttcgacttattggaacatctccttcttaggatacatatggaaggagcatcctgaatccaggatccactcatcattaattccttcctttgacactaccaaaacccctacagattcatagcaatcaaaaactacatcagcttctcctcgattcttgcttttctctctgttaggattggctttcaatgcactgtgtcacgggctgcctatttggacaccctcaaataggtgggacgtacggcacgtgctggcacaccgagctagcaagtcagcctaaacgcgcgtgcaggcaaacaagttcaaaggttaggcacgatacatgtctcgtacatgttgagtgcaaacaagaagcatgagcaagcaaacataaagcgtccccaaggaccaatctcacacaacccacaagcaaacatatagacaaatggcacgcaatggtccaataaaggcaacaaacaggcatcacaaagaccatatagaag

SEQ ID NO: 353723 - DNA, 510 bp, Cannabis indica
aattgctgaggaggccgagcagcaagtaatgaaagagcaggctgcaaaggatgttgtcatggcatcaaaccctcctgctagtagtaatgtcagtaatgggaccgacaatagcaaccctgagcacaaacggaaggctgaggcttccggagcttcagggggaaataggaagtttaagggaacagaggttgccgtcaaggtcgtcggtcctcattccggtcatatcctgagtgccctaaatgaaagaagcatcatcctggtgagtgctgagccaaggcatgtttccagtgtggcatggtgggccactttatcagagactgtccccaagccaggaaagaagagcctaagaagaattttgctcagaaccaagccgactttttactataacttaggcagatgctgatgctagtgcgtcagttgtgacatgtcagttatctattaatggttttgcatatactgtgttatttgattcgggagctactcattcatatgtatcgagtagagtgatagaaa

SEQ ID NO: 353724 - DNA, 589 bp, Cannabis indica
agatcctggtaaaataaattccaacatcgacttcatacattcccgtaacctttttaggtgggcctctctctgttgaccattgttggttagttatggacatcttttcaagtaattcaaaggcctcattagcacttttcctcataaaagctccaccagctgcgacatctatcaatgtacaggtgttgctcaataatccagtataaaagttatgcacttgcaaccacttcccaatcccatggtttgagcacttcctcaataagtccttgaatctttcccaagcttcataaagagattcgttgtcatgctgtgtgaagttgttgatgtcagctctcaggttggcaatcttcgtaggaggaaagaatttggaaagaaatttcagggtcaattctattgggttttgtgccctaaataaaatccattacaatctgagtagttatcaatttagaattttgaagtgaattatgattacatgtatgttacatgtttatggtttaatatatatacttgatctatgcacaaaatcagttaaatccagaacatatagttattcacaattatagtattgtcaatacagtggaatgtgattgtg

SEQ ID NO: 353725 - DNA, 682 bp, Cannabis indica
tcaatttaacaaagttaaatgattcttcagccattcaagagcgtggtaagcttctcgctcagcctctaatcactcccaaagggcaacatatggcacaaacctccacatctttagagtctaatctaaaaggggttaatgccataactactcgaagtggtcaaagtacagtaccattacctaagaccactagtgtaccaatgcctgctccagatgctaatatgccacagaaccctccagtgaaggtgcccttccctcaggctttgaaatcttttaggaaggtactggaaaatcatgggaaaatcctagaaaatttaaaacaagtgaagatcaacctgcctctcttgcatgtgatcaaacaagtaccagcatatgccaaggtcatcaaggatttatgcagcatgaaaataaaacaccatgtcaagaaaaatgtattcttgacagaacaagtaagtgcggtgattgaacaaaagataccgatcaaatacaaagatcctggttgtcctacaatcagttgccaaattgggacccaaggatttggtcaagctttcctagacttaggcgcaagtgttaatctaatgctttattcaatttacttgcaactaggcttaggagaaatcaagcccacatttgtggtgctacaattggctgactgctcaattaaaaagccacgacgaatagttga

SEQ ID NO: 353726 - DNA, 899 bp, Cannabis indica
aattccagtatttttgtagatttcccttataaatatgtagagaaaaaaatagtatttcagttaaattttgtgaaataggcccactaatacccaaacccacacctacccaaagtcatttccatatttacatataacacaatttttaggcctattttctgcttgggccgaccccggtggtggtggtaaaggtcaactgctgttgatggtggttcaatgtgagtttagaatagaaagatgtgaaagaagaagaaagaactaaagattgaaaaaattaggagaatttaaaatgagaggggtatctcagaaaaaaggagaaagattagcataattttgtaatggagtcggaattcaatgattggttaattttgttgtttgttccccatttgaagcatagaaaatctaattttccaatttaaaacttataaactttgtcatatatacaataattctataaatatatatgtacttttttaatgtactagtgggagacacacgtgctccgcacgtgtatcaaattaaatgtaaatttatatataaattttaataattttaaagatttataagtctggttttttttatataataaataaaagacacttgtataagcaaatgtgtatttttttagagtaaataccattttaaaccctatgttttgtaaaagttattaattactctctgttttgttaaatgataaaacagaccctgtattttctaaaattgtacaaataagatcatgaactgattttttatcaaaataaatcttaatattaatctgatctatagatgttatgaaaaaactggttacattttttgtatccattcgtgttagaaattgtcttaaagttagttatattaaaaaataaaattgttaaaaaattgagcttagggtcctattttta

SEQ ID NO: 353727 - DNA, 965 bp, Cannabis indica
gccaggcgaaatactaggagccagggaaactcggtttgattaaatgaaggtcagggagctcagtttcccccaaatgttcggggccgaggtagaggtcccaaaggtagggcacgtggtcggggtgatgctaacccgccacaggttgcccaagctacccaagctgctcaggatgctcgaaattggaaaaataggtttgcagcaatgcaagtcagaatcgaggaacaagataatgaaatccaacgattgagacatcagggtgatcctacagtgcctgctccagaaattccagtggcacctacccctgctgtccaagccgaactagtggttgcggtgaatcggatagaacctctgtatcaaaggttccgcaagcaagcaccttcagtttttctgggaggttcggatgttatgaaagccgagcaatggctaatagtgattactagaatcttgaattttatggccgtcactagtaatgatagggtggtctgtgccaccttccaatttaaaggagacgcactggtctggtgggacaaggtgtccgtgattcatgatgtcacgacgatgacctgggaaaagttccaagaacttttcaatgcgaagtattataatggggcagctagatattccaagagaaaagaattcacccatttgactcagaaagaaaacatgagcgttacttagtatacgactcagtttgatcgtttggtgaggttggcctcgggcattgtgccaaccaatttcagtaaaaaggagaagtacctaatgtgttaaatgcaaaaatctgacatgatttaatgattactactgacaacagaaccacctatgttgaaatggtggataagggactgcgagctgagggcgcagtgggatgcatgatagagtcttgtgggacttcagctgttggcggggctcctaccctcctgcatcaggttttagcaggggaggtactggctcgaccatggaccaga

SEQ ID NO: 353728 - DNA, 803 bp, Cannabis indica
ttatgcatgttttatcatttatttaaaaagatagaaaattggaaattaaagaagttcttcctctcaagctgtgtctctctctctctctcggctttgcttgagttgctagggctgggagtttttcttagcaattcaagtattttcagccattctaagtgtaattcaagctaaggtataagttctagtaaccttcttgatgttttcttgagttttaagaaaaagatgatagtttgcatgcttagtttttggttgttgttgctgctgtaattatgtgttgtgttctgtagttcaaatgtgtttaattgagtggattgaaataggtgtgatgcatgatagatgggttaaccaagtttgttttctagtgttataatatggttatatatggtgaattgagcaggttttgttagctaattagttggatgagcaagctttgagttttgaactcaagcttgactcatcaatggtggtttttgattctgagggtgtagggttgttttgatgctttgagaatgttctttggggtatttagaacaggcctggaaggttgcatgaagtttggagttgatttgattgagaaaagaatttttaaagtttcctgcactgaaccggaattcttgttcagtatggcctgtaggaaccggaattccggttggtgttctgggttcctccaagaaccggaatttcagttgtagaaccggtctaccggttggggaaaaattgggaaccttagttcttcccatttttgtgttgtttagggtattgccatgctttttatcaatagggaaacttttagtttctagttt

SEQ ID NO: 353729 - DNA, 556 bp, Cannabis indica
acgcatcaaataacgaggctgaatatgaagccctgatcgccggcttaaagatagtagaggccttgaaagttaaaaatcttatttgtcatagtgattcacagttgatcgtgaaccaggtcctcggggaataccaggcaaaaggcttgaaaatggcaaagtatttagagaaagtttggaagaacttggaaagattcgattactttaaaattgaacaaattttgagagaacaaaaatccaatgtcgatgccttggtaaagctggcctcgcagaatgatctggatgaactaaatttggttccggtataaatgctgagcgagccaagtatatgtgaaactgaagacgtcgagatgatagatagctctccaacatgcatgacgcctaatatcaactatttactcgacggaaacttccaaatgcaaaaaacgaggcgcgaaaactattgtatacggtgcctcgctacacaatgattgaaggaaaactatataaaagagggtattcaatgcccctacttcggtgtgttcctccgacagaagcaaacgaaatcattagagaaatt

SEQ ID NO: 353730 - DNA, 906 bp, Cannabis indica
gtttggagtgatttggataagttttggtagtgtttcaatgagtgcgaaaattaggattttcgagttttaccgtttttagaaattcctaggagatcaaaaatgttatttttgtcataagttttcacttatggtgtccgttttggacgttctatatactgatttgaagcttgcgacgagctctaaaatatggtacatgttttagagctaaatataagttttattttagtgtatttatatcgcagtatttggtaaaaaaatcctagattgtcttatgtgaatattaagcagtattttaagataaacacttattggtttaccgttgttgtgacataaggccgagatcatcggggatagttcttcacttgggttggccgacatgtatgaacctagattaaaggtaagaaaagtatattgtactgcgtagtacgttgtatggtaataaaattaatattgttatataatgaaaagattgattggttgagtatcgataatgtgatgatattatgcatgtgatatatgggttcacatgattaggtggtgcgattttcctagcgacgtactgggcataagtacgaacgtcagtgatatatgatgagtaccgaacgtaggtacgagctcgcttgtgcaccgttaatggccatgtgcaacatctacttcatgaactctctagagaataactcctaattctcataagaggtgacaccacttctagtccatatatataggtagaatttagtatctcacaactctctttccattaaaaaatctttcggtttcaaccctccaaatttcatcactaggactcgttcatagatgggacaacttgaatactactcttttcattctattgacttgttattacctattgaacttaagattagatttttactagtgttaagataggtt

SEQ ID NO: 353731 - DNA, 735 bp, Cannabis indica
aagagcttgatgatgaaaacagagagatgggttcttgaaataaagccaagttaacaaaccagattattgaaaatggaaaagctgaatataacatcactagatcgaaatacattaaagaacaacacacacaaatataaaatacctctctaattgcttatgcaattcccattcaaactcaaattaaaactctaaaattagagaaatacaagaaattaaacacatcccataaaccaaaatcccatggaatcatcaaatgattgacaaaagagatcataaacaataaaagataaatataaataatagaaatcagataatgcaaaatcatgtaaacccaaacgtgtatatatatacatataaatccaaatattttaaaaatataatcataccttcaatggtagaaaattttccactctaaaaacctattttactgtcatgctattatcagatctgagattgaaggaagagagggagagagtaaaataaaaaaaaagttttacctgatgaagaaattcgagtcatcagagtcaatcaaccacatccatggaagagttcaagggagaagagaactgcagagaagaaggactcatggtgccgtacgaaagagaaaaataattttaagtttttttaaaagtgaacccaacacaaagtaaattacccaaatctcatctcagagattaagacctaaatctcattttagagattaaacccaaaatcttactgtaaagcccgcttagt

SEQ ID NO: 353732 - DNA, 256 bp, Cannabis indica
tgaacctggatctctttcttttctccgggtttggttaccaccgtcatactcactatgattgagtacttgacttggtatgtgtgggcatgacactcactcagtataggccgaagtaagaagaaaaatgaaggaggtgaaatctctatagaaggaactctgtcatctaggtttggttgaatagtcaggtcgacattaatttcaactagggcttagggttgaattatatggattaaaaagaataaaacagtgggcgaaa

SEQ ID NO: 353733 - DNA, 847 bp, Cannabis indica
aaaatattttttaacacataagtacctgtaaattaaagttagcagaaaaaataacaactccccctgagtaacacaatcaaaaatcaaaaataacaaaataaacatgctaacttttaaaccaaaatagttcacaagtaccaaacacaactccccctagagaaagggtccagagttgataaaaacagcagttaaaaccaaatattactccccctttttgtttatgtaagggccaaagataacaaacaagaaagtatagaaataagtccaacaaaatcaaaaagaaagaaaaacttatgccctataaagcttgatcaatgaggagcaaaacttgagcttgcaccagcagcagcatcagcagcacgattggagcagcaagaggagcattcgaggggggcttgttcagattccaccatcttgcttggatgccctaggttcttagtcttagctatgaatttctgaaagaagaattaaaaacaaagaacaagaacactaggaagaaggaatcgggtaggcggtgaaaataaatgacaagtaacaattggtttaaataaacatgggagagttgagcaaaaaggaaatcaatttcaaaattttgagtaactaccagcccacaaacacaaaaaggaaaccacccactctttttccaaaattattttttaacaaaaataaaaggaaacaagaattaccaagatattttccgaaaatagccaattcaagatcaaagacaaaatacaatggatatgatattaaactttaaaaggaaacatatcaaaataaatcaatgaagagtaaatattgaaacttagcaattaagcacaaatttccttagcccatgattcaagtcacc

SEQ ID NO: 353734 - DNA, 597 bp, Cannabis indica
tacccagaccggaactcagacccggacctagacgaaaatgtgggacccgatcccaaacatagacttggacctagatagagatcaggatacgaacctggactaggaccaagacccagactaggatcgaaatgccggaccaagatcttgacccagaccaaaacttggacccacactcgggacacaaactcggaccagaactcaaacatggacacaaaccgggacagagactcggacccgaactcaaatccacacctagaatcagacccaaagctagacccggactaagacgcaaagtcgaacccagactaggatcagaaccaaggacttatacccggaactgaatcaagattatgatggggatgggaactagggactcagacccaacctagaccaagtcccaggacccaaatccacacccggagcctgatttggacctagactgaaatccagacccgaaccgaaacgcagagccggactcgaactccgacccgaactcaaacccaaagtcgaactgagaattgcaaatggacatagaatcgaactaggactaggactaagaccaggacctaaacccaaacccgaacccagatcaaaacc

SEQ ID NO: 353735 - DNA, 903 bp, Cannabis indica
agagagagagagaggaaaggcgaagaggtagctctggtgaaccattgaccaagagagaggaaaggcgaggaggtgagccaaccacgcttcaatgggtttcagtttcaggctttagagggaaggagagagagttaattgggtttttgggggaagatgagtggactacggcctgggcttggtgtctaaagcccattaatagtacagcccaattttgagcctatttaaatgggttggtatttttctaaacccataagtttttggcacaataattttagggattatttcacaaatacataaaaatgacaaaaaaaaattacaaaagtacgattgtaaagaattttaaatattttcacgtttttttataattttattaacaaaaaatacagttttttgacgtaattttatgttgtactcttatgaatttgttattgattttttgttatttgtatgtaattttcttgttactttaatgtagttttcgtattgttttcatagatcattgtaaaaatatataaaaaaaaagtaaattctattttggaccatgcattttgtaaaagttacaaattggcccctctattttgttaaatgataaaatagacccattattttttaaaatagtacaaataggaccctgagtttaatttttgacaatttttttaatataatcaacttgaagataatttctaacacgaacaaatgtagaaaatttaacaagttttgtcataacacctctaggtcaagttattattaacttttattttcataaaaaatcacttcaaagtccaatttgtaccattttagaaaatataacaaaatagagggtccaatctgtaactttagggtttggagtttggggtttggggtttggggtttggggtttagggtttggggtttggggtttgg

SEQ ID NO: 353736 - DNA, 597 bp, Cannabis indica
ttttgtaatcgggatcccgagtcgttttgtaattatattttacaagtttaattaaaaagcaaaaattttaattaatcacgttttccataaacctcattgattagcaacgagctgcacagcatgtttaaaaatcatgtaatacgcctatgttagttagggtgttacagttagtctcctctcgctcctcaaaatccacgttgactcttgagggcacttcctcatcttcagggttttgggcgtcttgaggaggacggggctgacgtgtgttgcgagtctcaaccattgttgctttatcttataaggttgttgcctacttgcagatgcttccttcagctctcaatgaaagcaccaaaatgttgaccgaggttttcggcaaccaatttaataatatatatatgagaaagatgtaggaagtttagtgcatgagatttttacgtggtgggggcgttaatgagccttagtccacgagtctttcttatttatgagagtattaattacagagaatgttcttggtatttttctctcttagttgctctctttaattcttatgaacctagaattctcgacccctatttcagtgtatttggggggtattta

SEQ ID NO: 353737 - DNA, 501 bp, Cannabis indica
ctaactctccgccaggtaatagggttccaaaccctgattcataactatcacacggtctatccaatttactaaagattatggctgccacataagaatgtgtggcccaaggatcaaacaatactgaataaaaagagttgttaactgagagttgacctgtcaccactgaagggctggcttctgcatcagcctgcgtaatggcgaacaccctagctggagtgggtctcgccaaagcccttggtgcctctgttatgagctggggacaaccccttttgtaatgtacaagcatgccacactgaaagcatccctgacctctacactcatccagatggtgccttttacaactagggcactctgggtaggaaaaacgggtctcagcactaccctgacggccgcctcgattctggttcccccgaaacatcttgttctgccacgagccaccggatgcagtggaagttttcctcttctggtccatggccgaaccactacctcccctgctaaagc

SEQ ID NO: 353738 - DNA, 504 bp, Cannabis indica
agtgtgatatttcttcttaaatatccacttacacccaattactttgcatccttgtggaagattcaaaatatcataggtgtcattagagagaattgacttcatctcatcatcaagtgcttctctccaaaatgcactatctctagattgcatggcttctagaaaagtcttaggatcatcctcaataagaattattaaaggaatttttcttattatttcttctctagtcccttctaccacgtagaaagaaattagttgagaatatatttcatccttatttagacttttctctttctcgccctttgacctctcctaggttcaatgggttattctacaactttagtaatgttctccgcttgatatcctcttttagaagtaaaagcttgagaattattttcatataaaatattctcacttaaaggtgtggaactttgagagttgtcctcatacaacttattctcaaaaaattctacttctctagattcaatcacaacattggattccaca

SEQ ID NO: 353739 - DNA, 633 bp, Cannabis indica
tccaaatttagttctatcagatcaaccaataactcccttccttccacaaatactagaagggatcgaacccacctgttggagataaccagctctcctgtaggcagtaaagttttgaagcctctagaaagtacatcactaggtctattcaacttttcagttattctacttgaaatataagaatgtgtcgcaccagaatcaatcagaacagttaataaagtatcgtcaaaagaaagctgacctgtcatagtggaagggccagcatcaacctcggcttgagttagggcaaacacccgggcaggagtaggtttatcatccttcttttgttctggtagcagcaactgtgggaaattcctcttcatgtgacccactagcccacattgaaaataggccctggccttcacccaggtagcttcttttacatctcgggcattcaggaaaagtcttccagttttcctttccattacgacgaaaaccttggttaccctggaaccgttttggcctgcagctgatggttcattaggccttttgttgcgatcactagggtcagtacccctaccagaaccacaccagatgtctgcttccatgaatctcttctggcaatatttttctttcgtatctgatcttttgcaccct

SEQ ID NO: 353740 - DNA, 234 bp, Cannabis indica
aaacttttaagtgggataaatctggtggtttgtcggaccatctctcttcaggggtcttaaactccacaacatttgatagacttcagtttatcaaataagctactatgagtactgccttcccccaaaatccagtagctaaccctgcttggaatagcatgcacttgttggaatttattttaccaggatcttagatctactcacaagtatgttgattgacaccctaaatatgaactt

SEQ ID NO: 353741 - DNA, 603 bp, Cannabis indica
tgaccctcaagtggctcggcacggcactttgccaagcggcgaataggatccagccgtctaggaggagggggatcatgaaggagaagctgaggctcaggagattgaagagcaggaagacgtacgtcctagcagtccctctgaggcagaggaagaggaggaggctgaacccccaaactacgagggatacaatgaggctgggaagctagtcgatgctgatggagacgtcctggttgagggcatggactacgttagtgcggaactcaccgctacggttcctcacagaaggcaaggtgccttgcgtgccaggtgagtgagtcctgcgtctagggttactgaggcgcacctcgggactctcgaccagggtggctacctgggcgaattggactgctacattcccgcccacaataatcgtggcacaaacccttaaagggggatgtgcgcttggtcgggtgcccatgctcagcaaggagcatttttgcgttggcactagtactttaagaatgtggcagactttttcggcctctgcccggcccagttcactccaaaaggcattaagtatctgtctgccctcttcgttctttatgcctcccagaagtgggatat

SEQ ID NO: 353742 - DNA, 719 bp, Cannabis indica
tgctcaaagagggttgcgccaaggggatcctatatcaccatatttgtttattctttgcgttgaaggtttctctaatttgttgcggagttatgaaaaaagtggcttactcatggtgtgtaaaattgctcgaggtgcgccggtaatctctcatatgctctttgctgtgacaactacatttactataagacaactgaggaagaagcgtacaatgtgaaggagttgctgcatacttacgaggtggcttcggggcaaataatcaatttctccaagtcttccgtgttttttagcaataatactggaattgaggcgcgggattccatttgtgctatgttggaaatttatgaggccgatgaaaatggttattacctgggtctaccgtgttcggttgggagaaataagaatgttattcttggtttccttaaggataagcttcggaagagaattcaagggtgggaagggcgtatcttatctcgtgcgggaaaggaggtattgttgaaatctattgctcaagtcttgccgagttatgctatgaatgttttcctcttgctgtcagatacttgcaaggagttagagcgtgtgtgtgtgagattaaacaatcttgtctcaattacaatgtgtcatgagttgactacacactataatacttaaattaatttatccaaatatgatctaatagcccactctattcctgtgtgttgatgctgttggaaattatttta

SEQ ID NO: 353743 - DNA, 509 bp, Cannabis indica
cagtttttttttttttgaaaaaaacatttttctaaacctattactttcatctcctatcatcttcaaaattttcttcagctttttaagcttctttttcagtcttattttttttatttatgcatgttcagtcttaaatatcaatttgagattttgttcatcactctctgattttgttaaatatatattttattgttctgtatgtgctattcgatatttattattatatacttaatttttatattttttaacggttattttttagttgttccgaattattcttttactgtatttagggtaagggaaaattttccaagattatggttccctctcgtaatgttatggtagtccctactggcaaaagagttagtgaggcatagtttttttttttgtgattttatttagttatattgttttgtaaatttactgttattttagtaattttttatgttattgttccaagattggaattttaaatacttacgttcatactggaaaaataattattttct

SEQ ID NO: 353744 - DNA, 751 bp, Cannabis indica
aggatgatgacctcgccctacccattcactatatggggaattgacttaattggggcattacccacttggcgaggaggagttaagtatgcggtagtagcagtcgacttcttcaccaaatggaatgaggccgagcttcttgtttccataacctgcaagaaagtcctcgactttgtcgttaaaaacattatttgtaggttttgattccaataaagatagtatccgagaatggaacccaatttgatggcaacttgttcactgagttttgcgagaggaacaagattatcaagagcttctcgtcagtatccaggcctgaggcgaatggacaagtggaagctgttaacaaaaccttaaaggatactatcaagaagaagttagacgctgccaaaggcaagtgggtcgacgagctaccttaggttctctgggctcacagaactaccgaaaagacggcaacgggacacattcctttcttgttagcatttggctcggaagcaatgctgcttgttgaagtgaacatataacctcacagaagagagttttataatcaagaagagaaccaggaacttctaaaattgtccttggatctgcttgatgaaaaacgaactgagtcgcaaatcaccaacacagcgtatcaacaccgagttacaagatatttcaacaaaagattcaagaaaagactattcaatgttggagacttggtgctaaggcgagtattcgcaaatacgagagatgcatctgcaggagtgctcaaccc

SEQ ID NO: 353745 - DNA, 500 bp, Cannabis indica
gatactctgataggcttcaagagtgtattatctcgataagcctaatcgtaaataattagggtttataattatattatgggttaattaggtaataagtgggattatgatcctactaatctaattcaacataaattttaaatttgctataagtggataaataagcataatttataaattacgaaactttatatggtatatgtgaatgtaatatgagttaccggtgtaacaaaaatatttttaggtttggtgattttggagactcgatcgggggccacaaatgtcataacgggtttaattgatagaattggtgagaatattgtgataagttgataatatagatattggggtaattaggagtatgtgggatttgacttaacgctctaagatgtcatttgattaggaggaatgaaaacatatgaatgggaatttgaatgggaatgagaatgggaataggaacaggaatggaatggaataaaatttaaaattaataaaaaattatt

SEQ ID NO: 353746 - DNA, 2048 bp, Cannabis indica
tattaagcttcatggacgcttctcggggtacaatcaaatcaaaatgcatccatcagaccaagaacatacaagtttccgaacagatatgggtctatattgctacaaagtcatgccatttggtctcaaaaacgctagagccacatacgaaagattggtaaacaagatgtttaaagaccagatcgggtgaaacatggaagtatatgttgatgacatgcttctcaaatccaggaaggctgggggcacatagatgacatggatgaatgctttaaagtcctcaggaagtacaacatgaaactaaatcccttaaagtgctcctttggagtcagctcgggaaagtttttgggctttatagtcaatgcccgaggaattgaagccaatccagagaagattcaagccctcctagatatgaaatcgccaacaagaaccaaggaactacaaagtttgactggtcggatcgccgcgctcagcagatttgtttcaaaatgaacagacaagtgtgttccatttttcaatatcctgcgaggaaataaacaatttgagttgatagaggagtgtgaaaaaaaaatttaggagctaaaaacgcaactcgcaaaccctctcgtactctcaaaacctttggacggagaagagcttgggatatacttagctgtcccagagcatgctgtgagtgctgtgctgatcagagaagaaaacaacatataacactcggtctattacattagtaaaagactcattgaggtcgaaggccagtacccattaatggagaaactcacttactgcctgattctagcaacaagaaagttaaggccctattttcaagctcatcctgttcgagtgtacactgacaaaccattacgccaaatgttgcaaaaggcggatgcatctaggcgattacttaaatgggtagtggagctgggtcaatacgaaataactttcaaaccccgaacaacaatcaaaggggaagccctaacagactttgtggtagaatgcataggaaaagaagaaagcatatcgaaaggcaaccccgagccagtgcaaatacctcggccaagtgacagtgaatacaagccgacttcgaaaatacacgtggacggatcagctacaaatcaactatccggtgcaagaatcacccttcttacacctgggggcaacacctgcacgctgtagtcaagtttggattcaaggcatccaagaacgaagccgaatatgaagccttgatcgttggcctaaaactagcacaagagatgaaagtcgaagacatcaaaatctgcaatgattcacagcttgtggtaaatcacatatttggagaatacgaggctcagggagaaaaaatgatagcatatctcagaaaaatacatgacctgctcgcacagttcagacggtacggtcttagacaaattctgagggaagaaaacacaactgcagacgcgttagcttgattggcaagcagtaatgtaagtgataaagcaaactcggttcttatccagttccttgaagagcctagcattactcgcacggaagagatcaaaatgattgatacttccccaaacttgatgacgccaatagcagcctacctcaacactggggaactccgaaataatcgaaatgaagctcgaaagatgagaaggaaggctgcacggtacatcatatgtatagacgaggattctccatgctaaagctcaaatgtattactcaatgattgaagattcaaaggcctatgttaaaaattgtgacaaatgccagagatttttgaagatacctcgagctctgcccaacgaattaactcagataaaaaatccgtgaccttttgccatttggggaattgacctgatcggacaattacccaagggctaaggtggagtgcagtatgcaatggttacggtcgattacttcactaagtggacggaagtcgaaccactggcaaccattacatccaaaaaagttcaagactttgttgtgaaccatggaaaacagtttgacagccagtccttcactgatttttttgcgaaccatggtatcatcaaaagtttctccgtagtggcgcatcc

SEQ ID NO: 353747 - DNA, 715 bp, Cannabis indica
gttcgtactgaacaattgagaaaacggcaaccgaacagattccatttgccatggcatatgaatatgaagctatgctgcccgcagagctcgagccaccatcccacagaagattgacgtacaaccaagaagtaaatcatgtactccttgccgaatcacttgatgaaatcgaagagaaaggaaccacgacaaacttaaagttgatggaccatcaataaaaagtagctcggtatttgaacaaacaagtgaagacttagaaattctttgtgggagatatgggtctaagaagagtatttctaaacaccaaagacagtacggtgggtgtactcggacctaactgggaagaaccacatcaggtggtcgaagttctcgaatcaggagcatacaaatcgggtaagtacgatgaaaaaatgcaacttgttctagtacaacggtattggaatggggaacatttaagaaaatactaccaatagaagtaccaggttggatgaccacgtcaagtactaaacaaaaagaacattgactcttaagtgaatggccttctaggcgtaccacgcccaaaggttcggataaaattacaaagtactcaggtcagatgaccatcatttaaagtacaatttctcgtttatgcaatttgttttatttcatgttaagctaaaagatcagattagatcaaatagctatgatataagtgttggaatttattttaccaggatct

SEQ ID NO: 353748 - DNA, 616 bp, Cannabis indica
ccggcgacctcaccccccaagccccgccgctcctttcgccaccgttaactcgggatcgcaagtcaaagtttggggtttcaaactttgaacggattttctggtcacctccggcgtccgtttgacgaatcgtcttcaccactaaactcagcttgtcgaggaaaacaacctacactaaaccatttttcccggttcgctactttttccggtgacatttttgtagctccgcccctttccgacgactttccggtgacattgtgtactgttttgagaaacggttggcatgggtgtgatctactcgtcgaggtggtcattttgatatatactactcctattttcggtgacatttccggtacaccaatttttaccgccaccgattgttaatgtgcaccgcgtaggtgaggcttcggaaccccaaattttaaatatagtcatattatatgtcgttggactcggttttgaatgtagaatacgataatgataattatttcaccatttggtagtataggtgagagtaatatgtaagtttggaccaaacaattagagctcgcgacttaagagcttacgatcgtcttttggaaaaaaattaacgactcgggagatgtagggactcaacttg

SEQ ID NO: 353749 - DNA, 556 bp, Cannabis indica
aaatattggatatcacccccacattttctcacatttcactatcaagataatatcttgattttaaaatatagaagaccactttgtctttatagtttctctttaatttccttccataatattatttttactaaattttgacatcaaaatatgtcaaaatttgcgtatatgcacatagccaaaattgatttagaatttgaattctaaatcaaataaactaatcaacgatgtctcatcatattttgattaagtttgtggctcacccccacgattctatcataaagtgtatatgaaatatcacttttgtgtatttttcttttgaaatgactttttaaggtcactttaaaaacaaatactatttgacatttttagttttctcaacaaaacttaaatatcaaagttacattatcacttacaaatacagtagaacctctattcaagaatacacttgggaccaagtaaattatattctaattaagaggttataactaaatagagttacactagaaaaaaaaaattaaaaattaaaaaatatcaatataataataataacaataaa

SEQ ID NO: 353750 - DNA, 896 bp, Cannabis indica
atttttttagtgtgagttaatttgtttaatgtgagttaatttaaaagtaggtagacagcatgatttaaaaaatttatttattttgaaaaatctgtgtgcttggtgatgttatacttgtgactaatttcaatttcatacttaaaagaacatggaatcatattaggtagttttctagtaattgaattgatttatgtatgctaaatttggttgtttgaaaaattctagaacttgcttgcttgctatttgaggcgaaataataaattatgcatgaataggaaagtgatttaggcattttttagatcgattgtacctttcaagccatccctataattttatcctaattatcgtttttgagcattaacctattctttgttctacacatattgagcataaaaaagataaacccatgaatatctaaaaatttaaccctaattataccataagtagatctttagtttgggggaatgtggatggaaaatttgttgtatgtgtaacagaaagagtgtaaaaattgagagaatatgaaaaaaatttagattgacagtaacttgaaaaaaaaaaagataaatataaagttgttgcaatcttgttaaaaaaaaatatctctcatgtacttggaaaaaagagtattgggattgtgtgaaaaatattttggggagacatgattagaaaagcttatggtataggaaagcctaaatgaccattttaactacctttaccctaagcctaacattacaagcctaaaaagaccttctgattcttggttgtgaattaatttatactagtggagaataataagtgttgcaagcatatggaattttgggttagtggattgatgattgtgattggcatacataaaagtggttcaattgctagttaattgtattctatggttt

SEQ ID NO: 353751 - DNA, 745 bp, Cannabis indica
atataagtgtgaaaaccagtttcaaacctagaaacaaaataataaaaagaaacttaaaataaaaaatatacaataacatcataaaatagagcaacctcattacagaacccttaaaacctgtaaaaccaatttcgaacttatgaaccctgtgaaaccagattcgacactatgaaaaatcataacgaaatataaatgctaaacaataaagttaactgaaacaagttatcaaaattggcatagtcggtggagttgcttccgacatcgggaaagtcaccggagttgctaccagtgcttaaaaagtcatcgaaattggcattattgctggaaaaatcacaaaaaaattaccaagaaactggtttcttcatcaagaaattggtttcttgatgaagaaaagaaaccagtttcttagtgatttttcggtaattttttcggcaacaatgccaattctgataaatttcccagagtttactatcagtactgaaaagtcaccggagaagttgatggtgtattagttgtcagatttgctaccaacgccaaaaaattcgttagaattgccatagtcgtcagaaaaaatcaccagaaaaattaccaagaaaccaatttcttggtaatttttccagcaactatgccgattctgatgacttttctgaagtttgctgtcggtgccggaaaagtcgtcggagtagctgctagcgtcaaaaaagtaatcagaattggcattatcaacggaaaaatcaccaagaaa

SEQ ID NO: 353752 - DNA, 893 bp, Cannabis indica
cttggaaaaaatgcatcctttgattctggcagttgtacggtttcgagagtcattatgaatcgtctcttcatattttgcacaacttccaaccgttatatttcccaatctttagctttcttgtcactggacttcgtgtataaaagggcggctcaagcttgtcatttttcacaaacctctgctctttactgagatccatttttagaatggatcatctctttcttgccaaaatttcccttctgagttaagaagttcattcttccaaactcataataccaggatgcaccaaccatttgccatttgttcctaaaggcttcaagcctcaatcggagctggaaacgatggattccaaggctgaggagcttttgaccaatccaaaccgagggacccctgtagcttgccatgggcgatcctcacaagtgatcatagatctcgtgggcgatttaaaaggtccacctcaagctgataaagaattccaacggaaggttggcatggttgcagatgaatctaggaaggaagttggcgtggtttctatcagagaatccagccaacccaagacccaaacctgtgccacaaaatctttgcatcaacctctttccggtatcgaggaatttcctaaggcagggaaagggatctaagggatctcggtttcaagaaatgagatcttctgatgatgaggagaatgaggtttgtgcagagatcaaagctctctacatgtagccggtctttctcaagctatgtgaagacggtctttcttgagttcatcggcttctcctctcatttttgtttaggaagatgacttaatggtttgcccctattggtatttttgtaaagacaagtttgtaacccaacttggattttttttttatcttgaaagccttgtactattttcattt

SEQ ID NO: 353753 - DNA, 799 bp, Cannabis indica
tatgattgtgagatctttaccatcctgtagtggtcgatgccctgagcaggagaggtcacaggcaagtaactagtatggttcaaatttcacctcaattagcagaagacatggtcagatcaagcatcgagtttgttgtaggcaaacttcataatttgtcgctgcaatctgatctgttggagcgaattaaaggttctaagttaactcatccagagttagtaaagattagagaaaaggtttcagctggtcaagcaagagactttacaatgttagatagtgggatgttattattcaagactagggtttgtgttcctagtagtgcggaacttagaaatgaaattcttgaagaggctcataccactccatattccctgcatcccggtaccaccaagatgtatcaagatcttaaaacctacttcaggtggagcagaattaagaagaatgtggtagaattcgtattgcgatgcctaacttgtcagcagatcaaggctgaaaatcagagaacggcagggttgttgctgttggaattttatgccctaaataaaacccattacaatctactctgatttgttatcaataagagatgagaagtgatttatgtttacatgttattttcatgtttatggtttaatgtatatatatacacaaaatctattaagtccagaacatatagtcattcacaattatagtgatgtcaacacagtggaatgtgattgtgattttatgattcgaaagacaaagtccctgtttcatcagtgtattggacttacactaatgtgataatcagcgatgaagtgtactt

SEQ ID NO: 353754 - DNA, 743 bp, Cannabis indica
aaaaaaaaaaaaaacacttatcattttactgttaatgtgatttaggattctcgaaaatatattccactcatgtcatttagcacactcatttggatatgcaagtaagacaagtataatataccacatggaatgacaggttttaaaattattaattgtctgattaggcaataaaaatgtgatgatactatgaacataatatacgggctcacctgattaggtgatgcgatatatctggcgtagatacgggcgttaataacatatgagtaccgagagtaggtacgggttcacctgattaggtgatgcgatattcctgacgacgtatcgggcgtagatacgggcgtcggtgatatgaaatttcctagttatggcatagattgaaactattgttgggtttcttcctagcgacgtatcgagcgtaagtacggacgtcagtgacatatgagtaccaggcgtaggtacgggctcgtctgatcaggcgatgcgatatattggtgccaggttgtggcacaggctcacctgattaggtggtgcaacgatattatgtatgatattgaattatgatacgggcttgcctgattaggcaatgcaaatatatgagcatatctatttctctacatatggttggttatattacctattattaaatgttatggtttaaacaattaattagttatttaatgtatccctctttattacttttcttgctgagtctatgtgactcacgggtgctctgtggtgcaggt

SEQ ID NO: 353755 - DNA, 1196 bp, Cannabis indica
ttaatagaaacgggtttagcggattttgacattgtacttggaatggatttctcatccaagtattcagctagtattgactgtaaacagaagatgttgaccttccaacccgaggttgaggaaccgtttatttttgaaggatcggttcagtgatctcatactccagtgtttttggtattaacagctagagatttattacaagacggtatttagggtttctggtcgtggtattggataccacatgacctgagaaagttagaccagaggatatcaaggtaattcaggaatttcttgatgtttttcctgatgaacttctgggtttaccaccgcagagagaaattgatttcatcatcgatttagcacctagagcagaaccggtttctaaggcaccttacagaatggctccgatagaacttaaagaattgaaattcaacttaaggagttgcttgaccaagggtttacacgacctagtatgtcaccctggggagctctcgtattgtttgttaagaagaaagacagatctttacctatgtgtattgattaccgagaattaaataaaatgactatcaagaacaagtattctttatcgggaattaaagatcgatgatcttttagatcagctttaggggaagaccgtcttctcaaagattgatctctgaacgggctattatcagttgagaattcgagaggagggcattctaaagactattttttgcactaggtatgggcactatgaatatctggttatctctttttgactaaccaacgctcttgcagcttttatggatttgatgaatagggttttcaagggttttctcgatatctgtgttattgtattaatcaacaatatctttgtgtactctcaatcagaagaggagcatgagaaacactttcggatgcttctacaacgactacgagaacataaactgtatgccaaatttaagaagtgtgagttttggctatcttaggtatcttttcttggatacattgtcagtaaagatggaatcaaggtggatttagggaagaattaatctgtcagggattggctaagaccaaagacagttacagaagttagaagtttcctaggtatggctggttattaccgtcagtttgtagaaggattctctaagatttaaacacctttaactgagctcactaaaaagaatcagcaatttttgtggacagataagtgtgaagca

SEQ ID NO: 353756 - DNA, 601 bp, Cannabis indica
ctttttttggttaaaactggaaaaagccctatctaataaattgtttgagaaaaaatgagtagaatgtaattgttttttaaaaaatgagtagaatataattggaggggaatttttgcaacaatttatatagtttgagaaaaaatttcaaccaaaaaaaaaaaacggaagcaacactccacaagcatcataattcagggaacaaaaatggttgcgaaaactaaaaaatttatagaaagaaataaaagaaacttaaacaatttataaacaaaaaatttcaaaaactggactatacaaatagttcatataaaattaaacaattagaaaaattaaacttaagcacactgatccccaataacgatgctgatatataatatattgataatcacattttaattaatcccaattgattaatgaaaagaaaagaaaaaatcacaaaacaaaacaaaaatcaaaattttaaattaagggtaaataccattttggatattgtgttttgcataagttagcaattggaccctctgttttattaaatgataaaatagactctatattctaaaatagtaaaaataggaccatgagctcgattttcaataattttatt

SEQ ID NO: 353757 - DNA, 493 bp, Cannabis indica
aaaatcaagaaaatcgaaaaaattgtgagttgtacggatggtatgcgttgcatactcatccgctcgcacccatagagtgatcagccgagaaaactcggcgccaggggctgctggcatgatttctgcacgcgcagagggggatttcagacatccctgggtgtgtcgctcggacagatccttgtccgaacacgctcttgaccgagagaaacttggttccgttcacgtgagggtgagtgatcactctatcttttttcaaaacttcaaaaaatcataactaattcaaataaaattgaaattaagttctgtaaaaaagtaaattgcttaattttttctaaactatccaacaaaaataatttcagaaacgaaaattcaattattttttataaaatttcacaagtatcaatcaacaatcaaataacacacagatcaacatgaaaccatccaaatcatacaaaaatcgtttcaagtccaaatttcttgaaagtaaatcaat

SEQ ID NO: 353758 - DNA, 669 bp, Cannabis indica
aagtcataatataatattatgtttaaatcatcaataatttaggaaaatttacatggtatactaacttttgccattttttgataaaaatactgtgaggcggtattatttacttttttactgtatttttttataagtttcatactgcagtatactgtgttaagtttttactggtgttctactggtgttctactgttgttttgagttgttctgctttgtgttttactggtgttttataaaaacacagtatttttgaaaaggtttccgtatgatagtattttgtaaaagttaacccaaattctagtatttttgtaagttttccataatttaagtaaaagcgcatgtgtgagtgtgaagtgtgaagtgtgaactgtgaaggtggtggctaatatagaaaaagacttgaatttgaatggttaacttgactaagtcctctccatatgaagagaagatgtatttatatgccatcaaagtggatttcaggtaccgtttatatttttgtatctgtgtgtaaaatatatataattattttctctataaataccatcattatattactttcttagtagttttttacttaatcggtgagtttttttatctcattacattttttccattatttctatttgtttttatattttttattgatttaacgatgaaatcaaacgtctt

SEQ ID NO: 353759 - DNA, 724 bp, Cannabis indica
gttcaacaggcctaggcagggcttggagtttcttcttccttttcagtggagtcacctactcttcttcagcctcatcttcatgattcaagggctcctgagcatactgctttgcccttgcaccacccttcaacttagcctctcgcttcagttgaatcaactcatcctccgaatgagctcgttcggtccagccagcaccagatttcttcttcttccccgtcacggacttaggagtaaagtccttgggatagagcccgtacctcacaaagttatcttcggaggtcaactggataatattccagtcttcccccagaagccgggcaagtttttgagctctatccctaagagcaagagtgaggggagggcggtgataggtcggaatctgctagagccgagtgcgagtaatgcccgtgccatccaccatgaagtactcatcagcaaagcgcccaatcttgcttatggctgtatcgtccgtgcccgtcaaccacttgaagcctggttgagagaagtagaagtaccccaacctgccttgctcgggggtggacttcaaattaagaaccaagcaacctcgtggggagagggcatacctcatttctgggaggcatagaggacgaagagggcagacagatacttgatgcccttaggagtgaattgggccgagcagaggccgaagaagtccgccacattctaagtattgatgcaaaggcatcaacgctccttactgacc

SEQ ID NO: 353760 - DNA, 718 bp, Cannabis indica
attatcctttagttttttctcttagctttttccttaagaaattgtttaaattaatgtatcattggacaagaaagtttataaatcatatgcttatgatgtcactctattttcttttataaagatgagtgatgcagatgactatattctaaatattctatcttgtaatgatattcctcgatcttagaaacatctcctacttatatatgcttagtaaaactacttaaacttagagctgaataagtattttaatggaggtccaagatagaataattactcaagaaatatttggtataaatttatttccttcactttaaattttagactccaaattaaaattttaaatttcagtttctagaatacattggacactacaatataactttcacaagctgttaatatctattttctatcaatggatccaaactgtatgttaaatgtatggattatgagttttatattatgtgactagaatccacttgatctattctaagaactctttgttgtcactagacataggaatcatcaaaagaccacaactaaaatattaaatctatggcatttgcatcttgtccatagtgtttttgacaagattattctctatgaagagaaaacataccaatatccacttggaagtatgtttatttttattcgaacatatggatgtacattcaggggtggatatgagttatcgttaaattcttagacgattactatagat

SEQ ID NO: 353761 - DNA, 586 bp, Cannabis indica
aggctaggattgggaaaagcaaatcccacaatagtgactttacaactagcagatcattctttgactcatcctcgtgttataattgaagatgtattggtaaaagttggtaagtttatcttccctgctgatttcctaattcttgatatggaggaagattcaactattctcattattttgggaagaccattcttagccacgggggcagcattaatagatgttcaaaagggggagttaaagttgcgagtgcaagatgaagatgtcaattttaatgtttctaccccaaccgacattccaacttattgcaagattgagatggtgaagggttcttttgttaaagttgataaaaagagagcaaagcctaaacagcgacttcgaacgattcaacgtcattggaaaagattgatgtgtggtagttctgaaggtgaacttactcttgggcaaaactttgaaattaacaatattggaggtcaattttcttcattcggtacgagggctcttttggatgtaaggggtggacttgatgcaatctgatgggggtctcaggtaagtctctttccctttatttttaatagcacattggggacaa

SEQ ID NO: 353762 - DNA, 495 bp, Cannabis indica
gttcggcgattcttgttcaggttctaattttgggtcccaagtcttggtctgttttcgggtttggttctacgtctgtgttctgatactagtctgagttccagtctagacaccgactacttgtctgttccaggccccgttacccgaatcgtgagtcaagatctggaacactatcacgggtctcagtctggctctatttcatgtcccaagtcccatttctgagtttgggttcgcgatcgagactggggtgcggttctagctctcgactgtggttttgtgtccctactctggttccatgtttgggtctgagttcaggtttgggttcgggtcctgagtctaggtttgggtggggatccgtgttcggctcccaattaaggtttaggtctgatttggagtccgagtcctcgtccagttacggttctggatctaggtcaaatttcagttatgattccaagtccaagtcctagttactgtcccggactgttgggttttatgccc

SEQ ID NO: 353763 - DNA, 557 bp, Cannabis indica
ggcccgatggttgtccgatatgggattgaggactttgatttttgatgggcccaatattggccctattagggccagatgttgtgtctgatatgggtttggggactttgatttttaatgggcccgatattggcctgatcgaggcccgatgttgtgtctgatggtttacagatttatggcatttccaataatttgtgtcacttttttgtgatatttttgttctaaattgtaattgtattttttaatatatgtgacaggttcaactgttaatgcactttttatgtataatggtgtttgggagcttgagggtggagattgagtttataactagactgaaatttaacatttgagattgatacaaacgtaaactactcatgtgtggttgatattttgtacgaagaacctgatgttgacaaagtgcagtatgacttgaaattggaagtaaattacaagtatatgaaagacttaatgtatcgctctgaagttgttggaaatgataagagtgcaaggttctttttgtctacacttacgaaaaagttagatgaatttactcccttatt

SEQ ID NO: 353764 - DNA, 504 bp, Cannabis indica
actagcattgtgcccccaaaccttgtcatcaagaacgtgccgtcgatactaatcacaagacgacaaaacttaaatcccctcctacaagcagcagtgaccagaaatagtacttgaacctgttgtcctctgtgataatatctgtaatagtaactggattcttttgttccaacacgttaaagtaaccaggtaactaactataagctgctgctggcgtacccctcgaatacataagtgccttctctcgacacctccaagccttctcataactcatcttgatcccatactcctgagacatattcctttgtatgtctttagctttgtacttagttccatctgatctgaactttttcttaatgaggtggccagcaacccacagtgtttcttgacagttatcagcatgtctagaatccaggctacatgtgtgttcgttgtggaatacactaacctcaaacatgtcacaacctgccctcttcctccccctcactcctccatttgcaatttgaa

SEQ ID NO: 353765 - DNA, 1852 bp, Cannabis indica
atccatattccttagtttgacacgtgtccttttaaacgatggctgaatttcgggtataacaattgccccttaaaaaatgctttttaaacgcttactgagggtacttcgccacaatcactttcttcgagatcacgcatgccctcaactttaaagctccacagtttcgagggtcattattaacattaatgaaccgtctttttatcttctaccttattcccaaccgttagatttcccaacctttggccttaccgttactgggttcttagtataaaatggtggctcattctagccatgttccataaacttttggtttttggtgaatttcatctagaaattggattgtcactctcctacggaaatgtcccatccaggctcataaatttatccctcaaaacttataacgctggaatatagcaaccgcctttcctctccatatattcccaaaaacttcaaacctcaatttaaattggaaacgaaagattccaagactgaagatcatctgattattccaaaccaaggagatacagtcgataagcatcatcctttaatggtggtctgatctgaattcatcgatcgtttttttaccactattgcttcattgattttttctatctttgtccctatagggatggacgtagattttgagagcatgttcgaaggtcctccttgtcccaacgagaaatccaggaaaaaggtaactcaagccgatgaaatttcggattccaccagagaacccaaatggctcaagaataaagcttacacgaggaaacctccaaaccagccaatcactggtgtttatgaatttcttgaggtttggaatgaggtcttggtcacagtgaatgagatctcttctgcaggaaatgggatcttctaatgcgaggaataaaggtcttctactgcagagaatgaggtctatgcagaggtcgagtccttttacgtgtagacggtctttctcgagctctcccgccctctataaataaccttgtagtctttgtttaggaaaatgacttaatggtttgcccctaggggcatttttgtacagacaagtttgtaaaccaacttatcttaaatgccttgtacttctttattcgaacttaatatatttgtgtttgcttgcgttttcattcacaatgtaaacaattatattttgatcaaatgcagagtacttttggtcttttcattgctcgtaattttcctatttaagtagttagtaatctatcagacttttgatttttgagcagttaccgattctgcctcgcaatgatagttataatctgtcttaagcaaacttgaatatacgtttaatgattttatcactttgtacatttttgattgcttgtacgaatagttagattatctatccatacactaggtttaagtacttttatcaagacatctcgatgtctcgtttaatactttcctatcttgcgcgaaccgttaatattcagctttgtatgcaatttatgagttatatctcatttataacttttgattttcctttctcgtcagacaggtttaaatcaaaaagttatgatggtttgattcccttcttgtcagaaaggtttgatcaaaaaccttaaataaatataaagttatgggtttgcattatatcatgtatctccaaatgaatcccgattaatcatacacaaatgccccttaagtaattttaaagagtaaggctttgttattacttaaataaaagaaatgattctctttattcataactgaagttaaaatattacatcagcaatgtgagttacatcattaatttactggtggtagggttgcaaatgttccacgttccagtagttctttattagcgaaccatttagccgagccaattttcaaactt

SEQ ID NO: 353766 - DNA, 543 bp, Cannabis indica
cttgattgctttttgctaagtgtgtgttgctctcacggatgatctaacacttattttcttgttgcagcagccacacccatggacaaaaatcttggccactattgctggagcctacagtcctgatgcttccccacctcctgcttcttctcagttggtcactcccgggaggtcttccactattgtcttggtggacgaggaggaggttcttgaggaacttgaagaaggtgaaaaagagcaagaggccgccctcctgcgcaagcgcaagggcaagatggtggaggaggagccttctaagcgcccccggagggctgacactccggccctgagccatgactctgggattccctccgaggtggaggaatacacagtgcctcatggcatagtgttgactccgatccctggagatgaggagaggcagaatctttggatagccaaatacaactacgccctcgacgagtacagccaggggcatgctgaggtggaggctttgaagagggtcttacgagaggagcagcaaaacactctcaacgaggaggccttccg

SEQ ID NO: 353767 - DNA, 655 bp, Cannabis indica
aggcaaagccgaacaaacccctaaagaaaatgcttccaaattcactgccttttctatcttaactgacgacctagagacaatcaacatgcaacccaatctgtgatcccgtacaaaaaacctgctcccatgaaaaaggacataagcaagcaggatatgtctaaattttgtcattttcatggagactatggccacgacacaaatgagtgaaacaacctaaagcaggaaattgaatacctgataaggaaaaataacccgcacgtgcaaaagtaagtcaaggaggatcagaatcagcgggccgcccaagcagacaacaaccaagacctactaatgccaccaccagtggacaggcatttacaagtcatcattgggggcccacacatcactagagattcgagcaaagctcgggagaggtatgtccgaactttacaacactaacaaaaggaagtagttttggtcgtaggagaaagggagccaaaaattccatgggtaggggtgttgggttttatgccctaaataaaactctgtttcaatgtaatccagattattctatatcaataaagtaacagaagtaatttttcattcacttgtgtatgttttggttcacttaatcaattgcttgtctatttgatttataaattcatccaaacccctttca

SEQ ID NO: 353768 - DNA, 805 bp, Cannabis indica
gctccaaaagacaccaatagacgagaaaatgctaactttaaagacccgaaacataggctacttataacataacagcctccacactttggagtatataatgaggttgggaagccagtattcgagcaggatgacgtcttggtcgagggggaagactatgtcaccgaggagcataccgtggtggtccctcacaggtggcaaagtgccttatgggccagatgggtgtgccctctgtccaacataaccgagggtcgtttgagggacctagacaaagctggatacctaggcggacttgagtgttatctcccttccccaaatcaccgagcaactaacccaaagaaagggttctgtgactggtcgggtgctcacactaagcaaggggcgatgctgcctttgctttcgtacttcaagagggtggcagactatttccgcctctgtcagacccagttgacacccaagggcatcaagtacttatctaccttgttcatcctctacgccactcaaggatggggtgtgtcgtccccacacgacatcaacaagctttttgatctgaagtctactactaagcagagcaggtcggggtacttctatttctctcagccagactacaagtggctgacaggcaccatggacatagaggtttacaagaatgggggtttttattgatgtgtactacttcgtggaaggcatggattgttggaatttattttaccaggatcttagatctactcacaagtttgttgtttaacatcctaaatatgaactttctaaaacgataataaacagatataaagttaaggaaacctta

SEQ ID NO: 353769 - DNA, 535 bp, Cannabis indica
attttaatataatattttaaataaaaaggcaaagttatcttttaaattcaaaatatcttaaatatcaaaatatgtaatcttataattaaataataaataaatattaaagaagttaacaaatttttaaatctgaccataataggaaatagttaaaattggaaacattccaaaatagaaatatttaaaattggaaaaattccaaattgaaaatatttaaaattggaaacaattcaatttagaaatatttaaaaaaggaaaatgaattttgggaaacaatccatgaaaaaattggattttgggaaaaatcccaaaaatcgcaacttttgggaaaatcagcccaggaggctgcacgtgcagcccaggaaggctgcacgcagcctcctacgcgcgcggacacaaggcacccagccgaggtttctcggcgtcagcagggtgcatgagcggcattactcggcgtctgcaggattttcgtgggcggactcagcgtgcgtgcggacaagggatttcccttgtcacgcgcacggatcctgagtgc

SEQ ID NO: 353770 - DNA, 616 bp, Cannabis indica
cccgagacctgggacccaagaccaggactggactcgggacccgagatcaggacccaaacctggacccgagactcagacccgaagtcgagactcgagatcaggacctggaccctaacccgggacccgaacttggaccaaaaccgagacccggacccggacccaggaccttaacactgacccaaacttggatccggatccaaacttggacctgaacccagacccgtaccaagacccgaacccggacccgaacccaggaccctaactcggacctggacccaagaccctgactcgaacccaaactcagacccggacccaacccgtagttggtgctggggtcgattttattgcaaaaatatattatctttacacaatctattaatacatgtcaataccacacatagtattgtattaaataatactaatacatagaattaaaatggacataaaattataagttaatattaaaattctttaaaaaaaaaaagagtggggtcggatcagatccaatccgaataagtctggtcggatccaatccgatccgagtacgtatctgatctagcggggcggggcaagacagatccttacatgatttggatcaggtcggatcataaccgga

SEQ ID NO: 353771 - DNA, 793 bp, Cannabis indica
aagcttgagccgcccttttatacaaaaagtccagtgacaagaaagctaagtattgaaaaatccaacggttgggagaagtgcagaatatgaagagacgattcataatgaccctcgaaattgtacaaccgccagaatcaaacgatgcatattttccaagaaaagatcttgacaaaaatgccctctgtaattattaaaatgctctttttactaaaaaagatatttttaaggcgcaattgttatacctgaaattcggctggaggacacgtgccaagataaagggaatgtgaatcgatgccattgctttttatggacattaattacgtaagtatcagagtatacttgtaacgctgactgtaaggtctaaggcgaggaatcaatgtacaaactagcacatagtatattagcaagaaaccatgtgtcgctaaatgcaccaaagaatgcgacatgtatcaatcgtgagagaccttagctaagtgtaaaagttagattagttgaagaacaagtaaagcaaggtgaccgtcttgctatgggaacacttcctatagcttcatccaattgacggtaacaaggctaacaaccctggcgagtcagaatgactcgttaaaaataagaatcgcaattgacaccagcaaccttagaaagaagaatggccccagctcgttattggaaacactgtaaccaagtttctgtcgagacatctccagatacaacagttaaagacatgtttaatacatgattgttttgacccagcaaaagcgggaaaatcacagctacacgattttcaaatcataaa

SEQ ID NO: 353772 - DNA, 582 bp, Cannabis indica
ggtgaatttagacccgaacaattccattaagtgtgtttatattgggaaaagtttgggggaagaactaaaatagcaattaatacacttttctgaaggcaaaccaagatcaatccgcttggagccattcagacatctttgagataaactgaatgtgatttgcaatcaccttaatattgaccctaattatcctacaaaatgtcaaaaacgacgaccactggatcctaagagacaaaacgtgctcaaagaagagtttgataagttgttaaccaataacttcatatgagaatcctttttgtaacactctactagtttaggcgtggttttgtgattttatattaattgtgcagttcgttactaatcaacagatttattaaaaattgtgtttaatgaaaacttttcttaaattaacctttactaaaaataaaataaactttacaagctgggatcccgcatttcaaaagttataaccaaaatacaacatactagtacaaaatttgtcgcctagccactaaataaaatgcagcctattgtcccgaagaccgaaaactctaggtctaaccgccccaatatgtacaatcttca

SEQ ID NO: 353773 - DNA, 676 bp, Cannabis indica
tctcagctctctctctctctctctctctctctctctctctttcggtttggcttggggctgctaggtctgggatttttctttgtaaatcaagaatttttcagaaattctaagtgttgttcaagctaaggtacaagttctagtaaccttcttgatgtgttcttgaattttgaagaaaaataagtgcatgcttggtgattttaatgtttgtagctgctgtgcaggtttgttgttattttctatagtttaaatatgtttacttaaggtgatctaagctagttttgttgttagttggtgggatttaaccttgtgtaaagctttagactcaaaatctttaatttcaatggtgaaatgttgaaatagcttgctttgcttgtggtatttgattgctgttgttttcagaggcttatttatgtatatttgagtagattcaaggaggttttgatgcatgtgaatgcggtttaaccaagcttgagttttgaactgaaagcttggcgctttaatggcagtttttgtatttttgcatgaagctttgttttccttctttggatatgctctttgggatgtatagagcaggtctggaaagtttgatatggtttggggttgttttggttgagatataaattttttatggtttcctgcactgaaccggaattccagttcagtatggcctgtagga

SEQ ID NO: 353774 - DNA, 955 bp, Cannabis indica
agcaggctgagctcgctgctctctcaattctctgatttgctcaccctgctgccgaatagtctcttgcattgaagcatataactcttcccagtttggtggtggtggagggttctcgccctcaccaggagctctgagcccagctagctcgcggttacccctaccagtccgcctcgggtgcataactatacacctgcggtcacattccaggtaataacaatacttataagtatttccatatattatagtactgcccacaccattccaatatcaacacaattcagataatcaggcaatcagaaatttaacaaactatcttttaactaaaagcttactgaaccatgagtcgatcaagtccttgcagccaatgtacatatcaaacaagtcttcaagatctaaaaaccttggcgctctgataccatgttgtaacgccctgtccaacagggacgccacgtgtgtgcaatttaataaaattcttatatagatactatataattataccaaaagtgtgggtaattaaatttttttgtaattaaaaccaagcatgtaaaaacttctttatagcagaagataagtaatgagaactatggggaccccctgtattcaaaatattacaaattagtttattagtacattgctgggccgaaacactgcggctgacatgtacattgctgctacgaccccgaactcatcgctgcacaacctttgctttccccttacctgcaccataaagtacccatgagtcacaaagactcagcaagaaaagtgaaatagacaataactgaaaatgatcatcaattaatctcatgtcatcatgcttacacattacataatatcatagacacacaatcttggtactttataaagtatccctttaccactcattaatcacgagctatatatgtcactatcgttgcccgatgaagcaaatgataagtaagaaacctaaccgcggttt

SEQ ID NO: 353775 - DNA, 581 bp, Cannabis indica
ggatacatgatttaccaccagctgtgaatcactgcagatctcaatgtgttcggccttcatttccttcgctagtttaagtccagcgattagggcttcgtattcggcttcgttgttaaaggctttgaatctgaatttgaccgcagcgtgcaggtgttgcccccaggtttgacaagggaaattcctacggcagatagttgatctattgccgacccatccacatgtagcttccaggtcggtttgtcttcaatattacttggctgtggtattggctcgggatcgctttctgttatgctttctgttttgcctgtgcattccaccacaaagtcgaccaaggcttggcccttgatagcaatttggggttggaaattgacttcgtactgacccaattctactgcccacttgagtaaccgtccagaggcatctggcttctatagtatttgtcgtagtggttggtcgctatacacccgaacaagatgagcttaaaaataaggcctcagcttccttgttgctaacatgaggcagtaggcgagcttttctatcaacggatatcggccttcggcctcgacgagtcttttactgat

SEQ ID NO: 353776 - DNA, 1495 bp, Cannabis indica
aattttcaaatttaaaggctactcatagctaaaattaattttaattaattaaaaattaattttattctgataattagatttttatttgtaaatttagattctacacgaaattctaccaaaatttgaattttatttcaatgacaaatgatttttaatcaaaagatatcacaaaaacaagattgcacaagggagtatgcaatgcatactccccgcacgcgcataagggggcattgggcgtgaaaagaggctgctggcagccttcttggccgagctagcttggtcagctcgggcttaggacagcttttgtccgagtaaactcggtcatgggctgtctgaagccgtgtgcatgccgagtgaggcccctcgtccgcgcgcgtgtgtgcaaccctttgagatatttttattcaaagttcaaaaaatcataactaattcataaaaaatccaaattaagttctgtacaagcctaaatttattaattttttatctactttctatgaaaaatcttttcagaacgaaataattaaattttattgtcgtaaattgcaattttcatacaattatcaaacatgcacataaaacaacatgaacacatccaaatcaacataaatatcattttaaaatccatatttcatgaaagtaaatcattaacatggctatgaggccagttgttgaggattattttaccaagatctagatttactaccatgtatgttatttaacatcttatatatgaatttctaaaacaatagaatttaaacacatataaagttcaagaaaccttacattgattgcagagaaaattaaatgactcattccactcagatcactaacccgtgtatccttcctgtaacagagtataatcaagatctgagcccgatactccttcagttgtttggattcttcacagtcttacacattatgattgaggactaacttgctataggtgggcatcaactcaatcactaaggctcgaattttgatggtgaagaacactaagaattttgaaatagtagagagaaaagaagaagaaaaagtcttaaaacactagctgtctaatagaatgaaaactaggtttaaaagcattagcaacattagttgaataatgagacctttcttttcttcttatactaatttacttagggttaagattgaattatttggaataaaaaaatgataaaataatagcaaaaataagacttagtgaccggcccctatgtgggtccatcgctagttagatttttgctatttttctcaaccatttatctatttttttacaaataccacttttcgcaatttcaatcctataaatgccaaaactatttatttaataattaaaattaattatcaaataaaatatcatttatattatttattaattagactccataaagtctcttaattaacaaataaaccttaaaattctattacttcacaatcaagcaagaacttagtgaaattcataaacaagatatagtctaactttagaattataatt

SEQ ID NO: 353777 - DNA, 742 bp, Cannabis indica
aaaggtttctactagatatgcctaaaggtaaggggtgatttgaattgtagcattgacaaatgccagctatgtgataggaaaaggtacaactattaatattgacaattttcaactaaagctgacatgtgatatatttgagtctgagcacgtggttaattgtgagttcagctcaaaagagattttgggtcatgggttaattaagaaagaaattttgaaccataattttatgaagtcattgggccgtgtgactaatattgtgggggtgttgggccatgacttgcatttattgaagccaatgggccgtgggttcaaggcatatggggagatgggccatggctttaatgatgatgggaagttgggccatgatcttaagtatttaaatggttatgggatatcttcactttgtttgggccgtgggtgcaattcttggagtaaggaagctttggtggggcatggggtcaacttttatggtgatcctattttcgtacaatatttggatgatgggccttttaccatcaatgataaagctatggaggtaagtaaagtctttatttttgtgggaccgagccaagaaaatctatgggcccatctgttcactctgttcactctcaaacccttgtggaggagaatgtcttatctcctccacaggagccatgagaggtgtagcgtggaactgtagagggttagggaagacctctacagttctggagttgaaagttctgattcggtcgtgcaatcctga

SEQ ID NO: 353778 - DNA, 788 bp, Cannabis indica
catggtagtaaatctaaatcctgtaaatatatgcaacagtagactacgccattgaggaacttattgtcgcggtccctcatagatggtaaggtaccttgggtgctaggtgggtgagcccttcgtccaaggttactgaggcgcgcctacgcgggatctcgaccaggatggctactaaggcgaattggactgttacattcccgccaacaataaccgagccacaaaccctgagaggggaatgtgcgcttggtcgagtgctcatgcccagtaaggggtgttgttgcctttgcacccgtattttaggaatgtggcagacttcttccgcctctgtctgacccaatttactcccaagggcattaaataccagtctgccctcttcgtcctctatgcctcccaaaagtgggatatgccttctacccacgaggttagctggtgttttgaattgtattccacctctaagcaaggcaggtcggggtacctctatgtctcttaaccagacttcaagtggttaacgggcaccggggataaggccattagaaaaattaggcattttgttgatgagtacttcatggtggatggcatgggcaccacccatactcggttccagcagatccccacatatcaccgccctcctattactcttgctcttaaagatagagctcaatggcttgctcaactgccggggatgaccggaatatcatccagttgacctccgaggacaactttgtgaagtacaaggtcaatccgaaggatttcattcctaagcgagtgaagggaggaagaggaaatct

SEQ ID NO: 353779 - DNA, 517 bp, Cannabis indica
gtacatgaaaggcaatatgataccgccgaaagttttagtgaaagatagtcaagtaagattattcttaagaatgaaggcaaaaatgagtgtggaaaacttgatgtcactgtttgcgactaaggttaaaagcatgcaattttggggcatactccgccaactatccccctaagaagtgttattgggagttttgtcccagaaacagatccaacggtaggtttgaatgagcaggcccttactaatatagatgaggatcgggttgacaatgtatttgaccagtttgatgagtttgatgcttccttttacaacaatgatcctgtggtaaatttgaacgaggatggtgatgcggagttgcaagttgataaagttataaaggtacctactttgaggttagaactacctccaccacctccaaggaaccaaaggacagagcaagaaagaagaacccctcgtagtgaaaatcaccaaacaccaagcaccagtagtagtcggccaggtcctcctcgtagtactgtaccat

SEQ ID NO: 353780 - DNA, 598 bp, Cannabis indica
ttttatttaagtcgggtctaagtacggggtcagattcgagttcgggtcagaaggcaggttcatgccaaggccgtgggaaggggatttgggtccgggtctggtcagagtccaaaatattgattaagaaaaaaaagtgatttcttttgtttttaaaattgtgatctctaattaaaaaattgaaaaagtaaaaacagttttatagaacatgttttttaaaaatagtttcacttttccaattttaaaaacagaaaattgattaaaaaagtgttaccaaatgccaccttaatttttaaaaaccaatttttaaaaatttttaccaaacgactcctaatagtttttaaaaactgttttctgttttaaactgtaaagccaaacaacttctaataaacccattaattcaagcaaacccacgtgtacatgcacacaaattattaaggataattaaatcacatattgaaatttttaattttttacaattatattgtggggagaaatttttttcaaaaatactgtggaagtttcatactgtgtagtgtgtactgtgttaagttttcactgttgttttacagttattttttaattgttctactgttatttt

SEQ ID NO: 353781 - DNA, 576 bp, Cannabis indica
gcacacaatatactaagttgtataaaatgtctaatagtttgttattaaatgattttttgatctaaaagtagcgagaacagggtaagccctaagataagacagtgtaggcccatccttagggcagcgtaaagtcacaaacgttcgctgattaaattaattataaaattaaataattcatggcaatcattgagtaattccagtatggtgacattccatcatatttgactttccaaatatgttgagcattaaatcataattagatattataattgtggtgatttaaataaattaatatgatgttaagaagaatattttaattttaaaaaaatagttgtagcagaattgtagaaaagaactgagctgagtattttgtaaaattctaaattttaaagtgctgcgagttattaagattctataataataatattaatattttaatctatttcattaaaatcataaatatgtatatacaaaaaatatgttatatatataaaaaaaattctatatatctttaattttttttttctatagtataaatttatatgcatttgataaaaataatttttaatattatta

SEQ ID NO: 353782 - DNA, 516 bp, Cannabis indica
ggagctacataccaaacattggtcaacaagatgtttaaagaccagattggtagaaatatggaagtgtacgtggatgatatgttcgtcaatccagaaaggctgcggtgcacgtagacgacctggatgaatgtttcattgtcctcaagaaatataacatgaaactaaatcccctaaaatgctcctttggagtcagctcgggaaagtttctaggcttcatcgtcaatgctcaaggaattgaagccaatccagaagaaatccaagccctcctggatatgaactcaccaacaaaaacaaaagaggtgcaaagcctaactagtcgaatcgtcggacttagcagattcgtgtcaaaatcaacggataaatgtgtcccattcttcaacatcctgggaggaaacaaaaagttcgaatggacagaagaatgtgaaagagcttttcaagatctaaaggcacagctcgcaaaacctcccgtcctttctaaacctttttacggtgaggaactggggatatacctagcag

SEQ ID NO: 353783 - DNA, 499 bp, Cannabis indica
ctaaatatcgatcccaacttccgcccaactcaacaaaaacaaaggctgttggacaaagaacaagtagtagccctgaaggattaagtagaaaagttgcgcaacaacaacttcataaatgaagctttttacccgacttgggtcacgaatcccgtactagtgcccaagacgaacaagaaatggtgagtctgtattgattttatagaccacaacaaggcgtgccctaaagactgttttccacttccgagaatcgatcagcttgtagatgcaatagcagggcacgaaatattaagcttcatggacgcttactcaagcttcattcaaatcaaaatgcatccaccagaccaagaacatacaagtttctgaacagatatgggtctctattgctacaaagtcatgccgtttggtctaaaatatgctggggctacgtaccaaagattggtaaacaaaatgtttaaagatcagatcgggcaaaaatatggaagtatacgtggatgatatg

SEQ ID NO: 353784 - DNA, 550 bp, Cannabis indica
acttcatcgcttatcacatcagtgtaaaatccaacacactgatgaaatagggactttgtctttcgaagcatataatcacaatcacattctactgtgttgacatcacagtaattgtaaatgactatatgttctggacttaacagatttcgtacatatactaaaccacaaacatgaaaactacatgcaaacataaatgacttctaagcttttattgtaacaaatcagattagattggaatgggttttatttagggcataaaatccgaacacattgttccaacccaaaatacgattaatctggcatgctacatgagcccctagcagtttaccggataaattaataagttgggcattctcggcccaccaagaaaaatcggtagtttcttggtcacgaccaactaaagctaaagttccattaaagagtatttccacgaggtagaacctcctcaagggatataaatttttcatgaggttgatcttgagccgtcatccaaacacgaataccgtcgtttaagagaatatttttggtgtagaaagtctcaaattcagga

SEQ ID NO: 353785 - DNA, 405 bp, Cannabis indica
ctaaccaattctagatgcttaaactctctcaaggtgttagctattctagaaactcaaagtacggtgggataacacaagcacacaactgttgaaagcattcctcatagactagcatttagacaagaataacacttaaaattagcattttcaacacacaaactaaggcacttcacaaatggaggaaactggatatttttcgtcatcgagcgctaccctaaaccaagctgaaaatacatgcactatttttctcaattgcaagccaaaacagaacataactaacctgacaacaataaaattaaactaattaaacaatcaaacacaaccaacaataacaattaaactaaggaaaaagaaaactccctcaagattcggtctcgtccccactagagtccctgcttcaaaatg

SEQ ID NO: 353786 - DNA, 498 bp, Cannabis indica
tgttggcttcaccagctccatccaaacagctccaagttctgcaatggcgtcgttagcatccttcttggccaagtccacctcgaccctcatggtgttggacagagccgtgttcctagaagtagtagacttagcccgggagtaagtgtaggccaacttcagaccatcctgtacagagaaaaaactttagcatttgagctaagtaaagaaattaaaggaaagtgtcaagaaagacttaccctggtgaattcgttcaagactccgcccgtcaatagctctaaagaagagtcattgttagcaccagccagttgctcactaacctcaggaatcagccggttcatatagtgggcaagcatctctttgcccttcttggcctctagaagcaccggcaaaggtggagtaagggcccgctcagatcccccccacctttggtggttcagacctgtccgagcttcctccccgagactccttggactttgcagcttttggggtagaggagtt

SEQ ID NO: 353787 - DNA, 801 bp, Cannabis indica
catggcatatggacatgaagctatgctacctgtagaactcgagccaccatcccacaggagattgacgtacaaccaagataccaatcacgtactcctggccgaatcacttgatgaaattgaaaagaagcgaaccacaataaacttaaagttgatagcccatcaacaaaaagtagctcggtatttcaataaacaagtgaaggtttggaaattctttgtgggagatatggtcctaagaagggtacttctaaacaccaaagtcagtacgataggtgtactcggacctaattgggaaggaccatatcaggtggtcgaagtcctcgaatccggagcatacaaattaggtaagtatgatgaaaaaatacaactttttctagtaccatggtattggaatggggaacatttaagaaaatactaccaataaggtaccaggtcggacgaacatactaagtactgaaagaacatttacttttaagtaaatggcctgagggggggactacgctcaaaggtttcgacaaaaatgaaaaagtactcaggtcggatgaccaccatttaaagtacaatttctaatttctgcagtttgttttatttcatgttaagctaaaagatcagattagatgaaatagctctaatgtaagttactacggtaacaaacacattttcgatcaataaatgaataaagatgtttatttcaaaatttgaattgagttgaaattactaacatgttgctaatttaccatccagcgcgtacaaaaggtttggtcgaacctaagaccccgatcagataaaaaagtatacttgaaa

SEQ ID NO: 353788 - DNA, 872 bp, Cannabis indica
acctccactcttttggcccctacggctttcgctagcctcaaccctgctatcaaggcctcgtatttcgcctcattgtttgaagctgagaagtcgaaccgtagggctgcctggagtcgcagtccggtaggggatatcattgccactcctgctccggatccattttcattggaggctccgtccacaaacactctccatgtggggaccgatggtgttggcatttgcagttgcctcggccttttatggagattcggggaacgtagtgtaagtcgaactgacttaactccattgcccacttgaggagccttccggatgcttctagctttttgaggacttgccggagcgggtggttggtcagtaccttgatcggatgtgcttggaaatatggccttaattttcttgaggccatcaggaggcagaaaactagtttctcgatgatggggtaccttgtttccgctcctatcatgcgcttgctaacatagtacacgggatgttgagttttctcttcttcccggactagggcagcgctgaccgcgtgctcggagacggccaaatataggaataggtcctctccgagaacgggttttgacaggatgggaggcttggccatatgttctttcagctttttgaatgcctcctcgcactcgtccgaccactcaaacttttgacacttcttcagtatgttgaagaaggggatgcacttgtctgtagaccgtgagatgaaacggctcagggcagcaacctttccggttaggctctgcacatctttatgctttttgggggatggcatgctcaggagagcttggattttctctgggtttgcctcaatccccctctggctgacgatgaagcccaggaacttccctgacttgacc

SEQ ID NO: 353789 - DNA, 1737 bp, Cannabis indica
cataagagtttagaaaaccttatattgacgcaacataatagtaatgactcattccgctcagatctcttactcttgttcctttctatcacagagtaataacaagatctgagcttggatctctttctctccttcaggtttttaccaccatcttccacactatgattgagtacttgatttgctatgtgtgggaatggtactctattactatggctcgaatcggtgaagaacaatcaataaggtgtgaaatcaccatagaaaaggagtctctcatctactagttgacaaaaaatgaaaactaggtttactaggttgaaaagtgttgggtgagaatgagagcatcatgttccttttatagtatttcaactagggtttaggatttaattatatggattaaaaaagaataaataatggacaaaaatcacactaagtggccgaccattatgtgtgtctcactagttacaattttgccactttatttcaacctcttattcttctttcaataatacaacattttctaatttcaatcctataatgtcaaaactatttatttaataattataataaattatcaaataaaattgccatttattttatttattaattagctatacaaagtctcttaattaacaaataaactccaaaacctcttttcttcacattaaagcccttgcttagtgaaaattcatatataagacatagtctaattttagaattataatttattaattaaagccaattaactgagtctataagcagtattatctcaactagtgtctggaccatgggcctatataatcaagcttccaataagtagaattagaattcactaagtaaattctctaacttattaatccctccttgcgccactatagattcaaaattgcactcttaattatatagaacgctctatatgtaccaagatatagatacgttatgaataatctattgttacaatctaaatagtcaaagatcctctatagatgatctacattgaataaggtaaaatttactgttctacccttcaatgtattttatccttaaattacttagctatctataaatgatattttagtaaactaatataattactgaaataagatgtcgatcatttatctctatcaagccaagctcgaagaaaatcatcgtttcacttctaaatacttatagaagctgtagattctatatttatgattagcgctcccactcaactacactatcatgttcctaagatgtaagtattcaaccgactagactttacgaataactttaagaacacaaacaatacaattgagatcgaacctaaccatctcaagattaagatctatatagacctaagatcaaccaacaatattgacttaaaaagatataacaataagtttatgatatcttatccaagttcaatattggtccaatctaatgtatactccatacatccgatattgatatactttgccaataccctggaaagaacataacacttatccaatgtgtaaatataccttattgctgattatcatgtctgtctaaattcagtgtactgacaaatcatggaacttaaacttttgaacatataatcatgattatattccactgtgctgacaacactataatcatgaataaatatatgttttggacataatagaattcatacattaaacatataatcataaaataaatcatgtgaaccatgcgacataaaataatttctgatcttttattaattagtaaatatgatta

SEQ ID NO: 353790 - DNA, 553 bp, Cannabis indica
ttttatttttttaatttaattttcaaattaatcacaaccatttaatagtgatccaatgactaaaaaaaatgtaaccatgatggttacaataaaaatgtaactattggaacctcctccatatatatatatatatgaatctacatatctatatatctatatatctatgcatctatgtatatatatatttatatatatatatagaaaagtatgaggacgtgacggtctaaaatccctccaaagttatttttctttttttttccttaatcctctcaattttttttatattttattaaagtataaatttacaaattaatattttacttttattttaataaattttctataaaaatatctacttaaattaattatgttttaaaaaatacataataataaatttaaattaacttaataatattaaattaaataattattcaattatttatatatatttatttataattgataactatatatatatgtgtgtgaagttctttttaatttgcagaatataagaaaagtgtttttttatagaaataatttattatgaattgaa

SEQ ID NO: 353791 - DNA, 504 bp, Cannabis indica
accacaaatgtgttgtgtgttcctcgagtgaagagagtgtagtcaacttgcgattgagtgaatccctcttcaagaagagcatcagtgagtttcttataccattgtcttaaggattggtgaagtccatagatagatttatggagtttacacacaagattgtcacccgtgattgatgaagggagttggagaccttgtgggattttcatgtaaacttcttcgtctaagtcaccatttaggaaagcattattgatgtcgagttgtaaagtgtaccattgcttgatagtgacgatggcaagtaggagtttgaaagcaaccatctttgccacgggggagaaagtgtcaaaaaaaatccaagccttcatgttgagtgtatccttgtgctacaaggcgtgctttgagcctttctacacttccatcgctgttgtacttaattttgtacacccaatgacatccttgttaggttataatttagcatatgtttcgggtctgaaaagtaagcatttt

SEQ ID NO: 353792 - DNA, 819 bp, Cannabis indica
cgcaattggaagatcctgagctaaaaaaattgagatgaagtattggcaggtcgacctaaggacttttcaatctcgaataacaaaatgttattgtataaagctcgggtttgtgttcctaatattggtgagcttaagaaggaaatcctcgatgaaacccacaccacaccttattcgttgcatccgggaaccaccaaaatgtaccaggatctaaaaccctattttcggtggtatgggatgaaaagagatgtggtagaatatgtgtccaagtgttttacctaccaacaaatcaaagctgaacatcagaggtcggcatggttattgcagccattagcccttcctgagtggaagtgggaggatattgcaatggatttcgtggttggtttgcctagaaccacgggaatgtttgattcagtatgggtcattgtggaccgttttataaagtcagctcattttctgcctgtaaagattacctatacaatggatcagtatactgagctgtatgtgaaggagatagttcgtcttcatggagcccctaaatccattgtttctaacagagatccaaagtttacatcaaaattctaggtaagtcttcaaagagctatgggcacaaagctgaagtttagtacagctttccatcctcagactgatgggcagtcagaaagaacaatgcagatattagaagatttactacgagcctgtgtcatggactttgagggttcacggagtaagtacttggctttctattgagttctcctacaacaacaacttccaaagtataatagggatgactccttatgagatgttgttggaaattatttt

SEQ ID NO: 353793 - DNA, 796 bp, Cannabis indica
atactagcacatcgtatatatggccaaatctatgccttatttggacgattcatgaaaaaattacctctccatcctaacggacagtacagactccaaagagttctgctgacagggcatcttgaaaatataaatgatgatcgacagtcattatgaaaacctcgataaggtaaaactaaagatcacctgcaatgtgacagatcaaatgtccctcgagaaaagttcaacgattagacagcaacatgtcatcgcaagaactaggggcatgataagagagcaattcccacagtatttccttgcatgatcgaaacttgcgagaaggtgcgaccgagatagggtctagtcgcacactatgcatcgcatagtaaaaagaataaaagcgggacgtagagagaagttagcacagtcgagacatatatcgagtatatgtgatgacccggtgtttctccctcaagcctatgtaaagactgcatctttaccagcatttggtccggatgaccaatgtgcacgacaactcgaccagaacccgcgagttctatgttgtcagcacacgaatgcccgatacgcgacccgtttagtcgcaggcattcatgaaataagaaccccgagaggttcatacatgaatgcccgatacgcgacccgtttagtcgcaggcattccatgagttaagaaccccgagaggttcatacatgaatgctcgatacgcgacccgtttagtcgcaggcattccatgaggtaagaaccccgagaggttcacatgaatgctcgatacgcgacccgtttagtcgcaggcattcca

SEQ ID NO: 353794 - DNA, 459 bp, Cannabis indica
gctaagtgttgctcattatgcacggctcattgagtattccattatcgacatgccagcgaggcatcctgctcggcatgttgatccgaccaggtactctaagtagatgccacatgtcaccattctcgtgatgccacgtcagagttacaatttggggataacaatttcgatacctcaaatatgtctgtgacatgtctaattcatgtcccagttcaaagtttaacccatttgcactaagacaatcccaaaaactgaaatgctagttgggttgtcaacctgggcgctgggtgaaaccctaggcacctgagttgacttttgaggtactatttcatgtgtttttagctctcgggccttagacttgtattcttcatgtattcatggtacataatattaaaagatagtgagttaaaaactgttgggttttctaccctaaataaaactcacttcaatataatcagattt

SEQ ID NO: 353795 - DNA, 703 bp, Cannabis indica
ttataactacacgttcttagtgggtatatatatatgggtcaatttagcaactctattctcatacgtaagcaatgttaaatgattggtttggtctaattaatatttatatgtattggaggttttaatatatagttgtattgaaggttatatagttaatactgtatgtaattatgagcattgctattaggtatcagtggtatgtagcaccttcttaacatatcacgttgcgattggttagcgatgctccttaaaagttattatattaaactatatgggatccgatatttaattggaccaataatgatactgacacataggagggtgctagacaccactagtaccaattaacatttctcatatataattataatggttatatttattttttagctgttagattattattagaccattataattaatttaaaattttactaaaaataattaataaattacatgtaatttaatattaatttgattttatttatttctttaaaataaaaaaattataaaaattaattattttaagtatataattaatttaggtctaaaaataaaaatttatttgttcctattataggaagtcataaaaaatataatgtaacttaccattttaatgtaaccattaaatacatatataactataaatacttattttaattatgattgattatgaatgaaggttatggatccattaaaaaaa

SEQ ID NO: 353796 - DNA, 704 bp, Cannabis indica
tagggcacaaaacccaaaaaactcccacttgcacacatccccctctccgggtttgtggctcgattgttacaggcgggaatgtaatagtctaactcgcccaggtagccatcttggtcgagatcccgtaaacgtgccttgatgaccttagacggagggcttacccacctagagcccaaagcaccctgcctcctctgaggaactgcagtagtaagttcctcaatgacgtaatccactcgattgaccaggacgtcgccatctgcgtcaactggctccccagcctcattatatctcccaaagtttgggggtgtaacctcctcctcttcctcctcctcagaaggactaccaggacagacatcgccccgttcatctatctcttggacctcagcgtccccttcatgatccccctcctcctccacgggtggatcctgtttaacgctgggcaaggtggcgtgctgggccacgtgaggatcagacgcgtcgactttaggcattgtttgtttaatacgagccatcatcctgtggcaggacatgaactttgaatcaaaatgtctgtcccttgaagagggtagtctagaacaaagatgaggatgatcctcgtgcatgagttgaagcaggtcttggtcgatccggtgtttgcttccccaaaactcacctgggttcatctacaaaggacaacacgcaagatgagtgtttagatgagatat

SEQ ID NO: 353797 - DNA, 1255 bp, Cannabis indica
tttctgtaaatcaaaattgcctcctccactttcctttgagtgaacccctatacataagaataggatgatggttacttaatcttatcttggtaaaaagttacaaatgatgagtggttaataaccatgtttcacgtataactgaatatttggataagtataaataattatttatatttaaaatacaaagaaatggtctttgacttggtcagaacatgttgtttgtgagtaggtgcataacgagtgtaatacgagaaggtacattgtgtattacaaggagatacattgatgagcatgtattgcgaggagatgcattggtgattatgtaatacgaggagatgcattgttgactgtgtattacgaggagatgtattgttgactgtgtaatacgaggagatgtattgttgactgtgtaatacgaggagatatattgatgaccatgtattacgaggagatatcaatgagcatgtaatacgaggagatacactatataattgtgtaatatgaggagatggtattggtgactgtgaaatacgaggagcagcattagtgactgtgtaatatgaggagatgcaagattcttgtattacgaccagctacaagatccttgtattacgaccagctacaagttcctttgtattatgaccagctataagatcctttgtattatgataatccacaaggtccttgtattacgaccaactataagttccttgtattacgactaactacaagtttcttattgcgagatgataaatgtttatcaaaataatatcccaacaatattgagatatctcagttcatgaaacttgtaatccttatttagatgaagttacttcacaggttgaatcctaaaattttaaaaaaatttcacctgtcccacaatgtgtttattgcgagaattttaagccatgtgccatataatttgacttttttattgaatagtttaaatataataattattattgggtgattctacaatgcacccccttaaaagggatgtactgatgcacccttaacttgtttcggcatccagaagaattttttagtctatttttttttcatattcatgtacgttatagctatttaagatatcctacaaaattttaaaaaattcggaataatttacaatatagaaaacaatgttcaaacagtctattttacacgcgtataaaataaaatagtcacgcgtgcaacacactgtttgaacatagttttcggcgtgttaaacttttccgaatttcttaaaattttgcag

SEQ ID NO: 353798 - DNA, 1024 bp, Cannabis indica
  modified_base (91)..(91): a, c, t, g, unknown or other
tatatacatatacatatatgtatatcactatattgatctacatgtgtactggtttggttttgttggactttcttcaaatacatgttaaaangctgagtttaatgctgctacatacaacttcaaacatattttatgtatttaattacatccatatataatatagtttcattataagttcacttatgttagtaattatgaaaaatatgctctcatcatggaagattattttttggctgcaaaagtttgtaatatttattacttttttcttttttgcagtaaaattaggggaaaaaaatttgatattaagtaagcagatttaatcacactatacaacaaattttatttttataaacacactacaaatttaatcacagaaaaaaattatgactaataaatgagaaaaaattatgattctttataaattatcatatttctatatatgttgtcattaaaatgtccctaattgaaagtattagttacaaaaattataatttattatgactaattaaatatatttttaataccatatttgactaaaattaaattagtaacaacttgtatatatatctaattatcactagataagtttttttttttgttttttttttttttttttttgtagtgccactaaaagaataatcaagtacttaagtgctaaaagaataatagtatttttgatgctaataaaataataatttgaatacttaaatactaaaaacataatataatttaaatattattgttgtaaataatattgattataatgattatttagttgttgtttttgttgttgcatgatgttccttccttgtcccttcttttaagttttattattactataaatcaatatataatgatattttattaggagaattttattttattttctaaagcaccatcatcactactctctcacaaatcttttggattatttagatttgatttttaagttccctaaacatcctatgccgtaccaaaatttgtaataatgttgcatgagaagatacatatgtttaatttttat

SEQ ID NO: 353799 - DNA, 544 bp, Cannabis indica
ttggatagtttggaaaaaattaagcaattcactttttttacagaactcaatttcgattttatttgaattagttatgattttttgaagatttgagaaaggataaggtgatcaccctatcccacgcgtgcgcggatggcccattcactcggccagatgcgtgttcggacatgattttgtccgagcaacacgcacaggggtgtctcataccccattccgcgtgcggaaatcatgcaagggacactccagcgccgagaaacctcgactgatcaccttgtggcacgcacggatgagtatgcaactgcataccatccgtagagcccacaaatttttaacttttcttcattttttcatactatttcatggaattaacttccgattttttgtgtagttttgtatttagatatttactattcctatttcaattctaattatcaaattaaattaattggattttttaaaattaatttaagatattagtgtattttgaactcgaaaatatgtaaatatctattattttttttttttgcttaattatttatcttat

SEQ ID NO: 353800 - DNA, 738 bp, Cannabis indica
attttaatatggtgatctatgttaaccgaaggcaaagcttttctcggtgcaagaccctcagtagtcttcttttcctttggtgtctgtgtttgtgcccgttgatcttgaaacccatcttcaactagttgcttgccactaggttcctcataactctttccactcctcaaggaaattgcttgaaattgctctttttcctttgcctcactagtgctaggtgaattctcttgagtacggttgcccattttagcagtcaactgtcccatttgagtttccatggttttaattggggctctagtctccataatgaattggagcaataaatcagcttggataattgagcctccactaagactttattgttgcggctgttgttggttttgttggggttgatttctctgctggtagaacccctattacttgtgctcataattattgtttgagaatagttttcaatggcttttgcttaatccattggtaaattgttcacatcatccgggcatatgtcatatgtgtgagggcccccatatagctcacaagtaacttgagcctgtttcacttgagcagtcatcaacttcgtcaaggcctccacttgggttgtcaacttggtgatggtatctacctcatgtatactagcaactttgtttgtttggcttctttcagttggccattgttggttattcatagccatttcttcgagcagatcataagcctcgtttgcactttttttcataaataccc

SEQ ID NO: 353801 - DNA, 584 bp, Cannabis indica
aagatcgtactggcgattactgtgtacgacgaccaagctgcgagaacaccagctgattccagagaacgcaagtcttcaaagagagccagtatacaaagaaccgtctgagaggcaacaagagcggatagacaaacgcctctccaagcaaacttctcgaccaacctcaggtaatttatctcttgttataaactgatgtcttgagttttatttatacttatctttcatttatcctcgcagagatgactttttgaagtccgcgcccgtccttaagatcaagccgaagggtggagtaacgacgaccttgcctgttgtcgccctgaagaggaagagcgatgtggtggctactcttgtcgcagattcttccaagaagctggccaagaccacgcagtacaaggggaagaaagtcctgatcgagccaactgtccgagctcgcgactttctggccatgcaagagaagttcgtgggcgaggagttcatgtccaaggcggagaagatcccttctgaggagcttgtttcgcgctctgtggagttagcctcgcagtcgataaccctgttcataaaagctgctgttgctggttcgaagg

SEQ ID NO: 353802 - DNA, 642 bp, Cannabis indica
aaaaaagaagaatgaatcaatgaaatgttgcttgatcttctttaggaacttgagtaaggagtagattattgggggttttatagaatttgaaagtgaaaaccccctttttagctttatttagtgtaactacttgagccggatgaaaggaaactttcacgtccgattttgaaagggggagatcctataggatcctatccgaatttttcttttgctaggcccatagctaaaaaacctactttcttacgattacgaggttcattcgaatatgaaatccaatcctggaaatatagcattccccttttttttactactcatggcttcatatcaaagctaacagtataatccggatcacaaatttgactaatgctacgaagattaacctttagtccatctaccaacatgacattcttcagtttaggaagcccttcaaaattgagagttcctatccctatgacttttccaacaaggccgttactaaacgtaacttctccacactgcattggtctaatgttcacaagatattcttttctacctgtcatgtgtctagaacaaccactatcaaagtaccacatgttagtagcaatagttttaaaacaagaagaacgtaccaagcatttatttttgacaacctatttttgtttt

SEQ ID NO: 353803 - DNA, 430 bp, Cannabis indica
aaataaaggacatattttttttcttgattccaaaaatgttctatcatcttattatgtataagatggtcccactgcctctgttgtcttgacacaaccgaagaggacaatgccatttatattcttagacaaaaaagtcacggtaccttgtcgtagtgggagagtttcaaggaactcaccctgttatgacttggaaaatacttgttattaaaatccattgttagtttaaacgagtaatggattgtcagaataaggaactaagtaaagccaagagaactatagttaaaaccattcatatggagctaccaaaaattttttattacaaggaccagaaaggaaattttcgttagtaagtctattaattggatttaacaaaacttcctgttcctggtattataggtttgagattatctaaacctatggcttatggtat

SEQ ID NO: 353804 - DNA, 613 bp, Cannabis indica
gctaatcactgtcttacctgttgtcctgcaataataaagattctaaatacccgagtgctcttgatcaggtgccggtaatcctagtcacacaaatctgggagttcacaaatagggttaacccctgatttcacattcataaattattcaaaagacatttaaaatttatatatttagatagagctcgaaaagagctttccgactgtatatagaactcccaaatcgaagttcggatcataaagttatggctatttaaagtttgcaaatggatctgcctagaaagaaatgagcgtgtcatggcatgctaaataacaagccgcgacatgataaataccatgtcgcggcatctgggttcaaaacacagaaaaatagcagcaagaacacgaaaatcagctccaaaactcaaacaaatcaccccaattcacaaccaaaactcccaaaccataaaataggtttttaatcatcatatagggagtttaaaacacatactccatgcataaaattcacaattttggattgtataaaacacataattcttgcttcaaactagcaatactcaagctcaagagcttgagctaagaaatccatcaaactcaactattttccaggagccaca

SEQ ID NO: 353805 - DNA, 1041 bp, Cannabis indica
tcatagtccaattgtcaatagatcttgttattcttattttttgcactttgacgtggcatcgcataatggtgacacgtggaattcacttggagtatctgctcggagggtacagtctgagcaggatgcctcgctgacatgacaagagtcaaagtaattagcaatctgtgcagggcaaccaacacttagcgaattcacctttcgcattgtgagttcatcaacaaaagtcctataacttggggattagattacagagatatggcacacccacgaccccacgatcagtgtattctgtagttatcccacgatcaatgtatttcgcatatatctcacgatcattgtatactatatggattgtgcaatctttctgcttatatccattgtaacgagaggggtaacacttcctctccaagttcatagccctataaatagtgatgcatgttcactgggaaaaggtcgcaaacagtttagtcgagactataccctaaagatattatctaagaatacatattcaaagatactcttgtaagagctataagaaaaggaacctttctccttgttcttaagtcaatacaagtaatgaggattaggctattaccgaactgcacaacctctataaaattaacagctgccaaacgtggggaatggtgtaacaactcctatagatgaaatcgcgcctggtgtgcaagagattaggaataacagttctgcacccaaccagtgcattcataatacaactgttccgcctggaagcaacacccagacgaccatcggagatgctactgagttgcaaaatctccacgacgctcttggactcatgcagggtcataacaataccctgcatcatgatcaggacaaactctgcactgcgttaaatctcgcgttcgaagaacaaaggcgtatgtttagcgagtggaccgatagagatatggaactgttacgggctcatcatacaaagattgaaaatcgtagtcggaaagttaccgtgctgatacgaaaattctaccaaactgtaggtcaacaacctccgaatgtcattcccct

SEQ ID NO: 353806 - DNA, 699 bp, Cannabis indica
gcaagctgacagagtcatagcctatacctctcgtcaactaaaagattatgagcagcgctatccaactcctgacttagagcttggtactgtggttttggctctaaagatgtggcgacattatctttacggtgagaagtgtgagatttatactgatcataagagtctcaaatactttttcacccagaaggatttgaacatgcagcagagaagatgactggaattggttaaggactatgactatggaattctatatcaccccgggaaggccaatgttgtggccgatgctttgagtagcaagggtcccgggaagatttgtactacggttctgatagcccctcaactagcctttgaaatggttagtgcaaagattgagtttgtagttgggaaaatacacagtttaacacttcaatctgatctattagaaagaatcagaaaagcgcaattggaagatcccgagctagttgaggttcgagacgatgtaatggctggtcggcctagagactttttagtctcgaacagtggaatgttgttatttaaagttcgagtttttattcctaatgttgaagagttcaagaaggatgtacttgatgaagctcataccacaccttattcactgcatccgggaaccaccaaaatgtatcaggatttgaaaccctacttctggtggtatgggaggaaaagagatgtggtggactacgt

SEQ ID NO: 353807 - DNA, 685 bp, Cannabis indica
gcccaatagaaattttcccaaggtggggacgaagacatggatccctgacttggggaatgaaatgcaaatgttgggccaatacaagagttagaagaagtggagatcaatccagccatccagccaggaagctcaaaattggtaaaggtttgttgcttgaaataaaattagccttaataaaatttcttagagaaaaccttgaaatttttgcctggtcacatgggtatatggtcgacattgatcccactgtcatgtctcatgccctaaatattgatccagacttttttcctgtccaacaaaagagaaggttactggacaaagaacgtgcgcaagtactaaaagaagaggtagaaaagttccgcacaaacaagtttattactaaagctttctacccagcttgggtggcaaaccccgtactagtgcccaagttatcaaaaaaaatgtgagtatgtattgacttcaccgacctcaataaggcgtctccaaaagcctattttctactcccaagaattgaatacttatggatgcaacaaccagacatgaaatcctaagttttatggatgcctatttggggtataatcagatcagaatgcatccacctaacaaagaacacacaagctttcaaacatacatgggtctataatactataaagtaatgtcctttggtcttaaaaatgctagatatgtt

SEQ ID NO: 353808 - DNA, 727 bp, Cannabis indica
aaacaaccgagcatctgttcctccattgcacatacactcaaaaaatttggtcattactttataaagaacttagtttggactgggttatgccttgtttggtgacacagaccctaataagcaaaccggtgggaagtaaaagtttagctttggagaactacaacgttagcactgttatgggcggtgtggaatgagagaaatagcagaatttttgaagggcaagagagatataattcatttgattcttacaattatgtactatggttttcctccgtcacaagtgaggctttaatattatagggagagaccagccatatgacctttttttttcaaaaaaaataaaggaaagaaaaagaaacagtgtcttgaagggttgtccaatgttttaaccattactagagtgagaccattttgatcaaatttatagtgatagaacttttctttttctcgattcttcctcttaaagttgataatgtatttttttttggtttcttttctgaccccctctaggtgaatcctccctttattttatgtactttaatttaaaaaatttatgctgtaggaaatgacaaataagccaaagttcaatataaaaaccagaaaaagcaaatcttctacaggttcgtacaagaagaaaacaagtagcactaagccttatgtgtgaaatggaaacaaatatcataaaaaatagaaattgaaaataaaaacaacaaaatagaaacaatttaaa

SEQ ID NO: 353809 - DNA, 551 bp, Cannabis indica
taaccctaatgtgatcaatgaccctctaatagatgatctacattgaaaaggcctttaaacattcggttaaccattctttgataagttgcacccacgttttttaatctgaatggcatgaccaggtaacagtatacccccttgtcaatctagaagctagtacattcttgatctacgacatgcatctttatctggttgtatccggagtaggcgtccatgaaggatagtagcttgaatcctgaggtggcatccttcatttgattaatttgaggcaaagggaagcaatcttttgggtaggccttgttgagatcaatgaaatctatacaaacacgccacgtcccattcggtttgggtaccaacaccggattagccagccactccaggtagtacacatcccggattaggccattggttaacagcttatccacctccttctctaaggcgtctgcttttactggatcaagaggacttctcttttgctgcaccggaggcatgtctgggttaacgtttaagacatgggtgatcacatgggagcttattgttggaaattattt

SEQ ID NO: 353810 - DNA, 680 bp, Cannabis indica
tagtcttgatgactctatccgaggaagatggaccagtcttctttcctttagactttccctttcccgttcatttttgccttttttgccatagcttcggtgagacaccgaaagagagagaaggagcgggaaaagttatgaattatgtttagtttaattatggatttgattatgagctaaactttctatttagggatttgatgaatattgagtgagattactctatggattaatgttatttaattgttctttctttctttattattgagatttattcatatttgggcttattcacttttttgattggcgaccttatgcatgatctatgatcttaatacaaaatctgaaaagtgattattgagaatgctctaaatgaatagacatatgttttgatgtgaaacgagagtattcacatagcttatgtgacttttggattattgcttaatgtaaattgtatgttgttctatctcagagatgcagtagttgatatgcaatttaggacctttatgatctgaaaagagtttaggttaatttgtaacatgtcatcacataggagaaagaagaatggttaattagtgttaacaattgtgaaaatcatgtccctgattttacatccattgttaaactttttatttgtttgttttatttaattttgcttagtttatttagttcaaaatttattt

SEQ ID NO: 353811 - DNA, 515 bp, Cannabis indica
tcaacttgacttgatttcgatgaatgcatgatggatgccaaggtaccataccaatgggggaggaggaggtagtggccaaaaatgatttttataggcgtaggcttccatgactaatgactcactaggttgaggaatgtaaacattttgttgttgaattttgtcaaaatctgggtgactttgctgtgaaaatgttgcaacattatgagccacaacaaatattgacaaacttaaaatgcttgcttcctcatcgttttcttcactattttagattgaagtgggctcttgtaattgctcaaaagttttccccagcatctcctactcattaccactcctcaaaatgacattttcactttcttcttcctcccttgaatttccatatcactacccaaaatttcatagggtttattagggttgtacatcggtcggtttagtcggtttatactatatattttccaacccaacataaagatcgggttgtaaaattctgcatgcaaactgcccaatttaaaaaaaaa

SEQ ID NO: 353812 - DNA, 787 bp, Cannabis indica
tgttggtacgctgcattagtaatatgtgactcaatacgtttttcattaataagatccaaggacaattttaagagtacttggttttcttcttgattgtaaaattctcttctatgagtcaagatgtttacttccacaggtaacaccttcgagccaattgctagcgagaatggagtatgtcccattgctgtcttctcagtagttctatgagcccaaagtacttgaggtagttcgtcgacccatctacctttggcagcatctaacttcttcttgatagtatccttcaaggtcttgttaacaacttccacttgtccattcacccgagacctggataccgatgaaaagctcttaattattttattcctgtcgcaaaacttagtgaataaatcaccatcaaactgagtttcgttatcggatactatctttattggaattccaaacctgcagatgatatttttgacaataatgtcgaggaccttcttgcaggttatggagaccagagggtcagcctcggtccatttagtgaagaaatctactgccaccactgcatacttggctcctccttgccccgtggaaagtgccccaatcagatcaatcccccatatagaaaatgggtaaggtgaggtcatcatcctcagttccgtcggtggtacgcgaggtatatgtgaaaatctctcacactatcatattttttaacaaatttgtgggtgtccttgttgattgttggccagtaatatccttgtctattgatctttttagatagactttgccaacttgcatgatctccaca

SEQ ID NO: 353813 - DNA, 590 bp, Cannabis indica
catctgcatagccaataagttgtgacccacaattattagaatagaacaatcctttatcaatagtactctgtagataatgaagtttgagcttaatcccttttcaatgtctatatgttagagcagaactaaatcttgcaaacaaattgacagagaaaactatataaggtcttgtacaattagcaagatatattaatcctcctattgcactaagatatggtacttttggaccaaagagctcttcatgttcttctctaggccgaaaaagatctttttccacatcaagtgatctttttccaaaatcttttgactataagttgattgataaatgaaaatttcacattttaaatgctcaatttgtaaaccaagacaaaattttatttttcctaaacctttcattttgaactcttttttagatattccacagcttctgaaagtttttcaggagttccaatattattcaaatcatcaacataaacaacaataataacaaacttagaacttgaactctttataaaaatacatgaccaaataggatcattttatatccttcccttaataaatattcactaagtcaattgtaccgcatgcgt

SEQ ID NO: 353814 - DNA, 517 bp, Cannabis indica
ttattaattttttattatttattttcttattttcatttgttttagtagttaatttttagagttaaaaaactataacaaaatttctactaagtttcttattatattttttctgtaaattttatgttgaataatgagcataatgacctaattttttcttagaagattagggcgattttatatgcaatgtgagattattttgtatctttaattcattttttgttgtaatatttatttgactaatacaagttcattcttcacttttatttttattttcttcatccatctatgctactatatatgttattatatactaaatatgtatatagacttagtcatgctatttttatttagtgattatagtaatggtagtattgctcatttctatcttttatgttcatttttatttactttttgttaaatgatatataggtttagtcatgctctccctatgtgtctaaaaattaataaaagtaatattaatgttcatttccttcactatcacctccatctccatctc

SEQ ID NO: 353815 - DNA, 1454 bp, Cannabis indica
tactaatattcatttatattcatgtatttttattactaactagttactaattggtaataaattaacttattactaactagttactcataatttatataagtagtaagtagctaaataaaaaaattggtaattttgtagtatttctttacgttgtaggttgtgaggtcaatttgcaaggatccgacttatttggtgttgatcggtttcaaggtagctcgaggtatacatttactaacttttattataataattatgaatgcttagtagagtttgaatatcttaaatattcatccgtagtgaagtaggttctgtgaatacatatactgcagtcggatgggtggtaaacttttatattgctaaatgttgttgtgattattttatattgtttattaataggtttgaatttttttagaaatgtttaattatagccttgctgccgaaatttcggtagaattaagataatatttgatttttttcctcttaaacttggctgttaggattttaccggaagtgactttatcagaagtcaagtacataatttttagcataaggtatgctttctttaacatgcttttataagaatatttttatatatatatttagataactcttaaatacttagagtaattttagaataatattgatgtaagacataggatggatatagtagggctaaaaaaaagaaatacaaaaaatggtctaatgagatttgaacttgtgaccaaaaagataaattgataagtctttaccaatataccaaaacacaatctttatataaattaactactatgattttatttaaatattagaagagatataaaagaaaattagtattgcacattcattgaagtagaattaacaaatacatcacaaacattgattctaatacttaatattagaattttattagtttattttaagtaaaatagcaaatgaaacacaaaaagttgggtgaaaggggtgcatataacatgattttagtatgcaaagtttagccctttctctaattttttccatttattttggtccttaaattattgttttattttattggtcttgaaaaatttaaatatataaaaatatgaaattacataaaaattaaaaaatattacacattatttattatttaatatactaattattatacaaaacataacttaaaaaatttataaaaaatatactaatatactaaaaaaatacaaacacataatgtcaaatataaaatattaataaaaagatagttaatatataaacacttagattaatgtaaatgtgtatttatttaacttttcaatttaatttttatttatgcttattatatataatttatacttaatttaattatattaataataaaataatatatatatatataaattatgctaaaagacaaaattgtaaagctggaaaataccaagaccctatggcgtcagttttttcataacaactgacgc

SEQ ID NO: 353816 - DNA, 631 bp, Cannabis indica
ctattaaatcgtattccctcaaagagcaaaaatgctacttattctttctattatatatgaaaccccttttcacatttcttccattttccttaagccatcttaatcatcccaatctattataattaagagcattttaggaagattggagtgacccgttcttgaatcccaatcatccagacgtgacaactaatggatacctagagttgactaagaccgaccttgatcaaagttaattatgttagtttttagggttcatatcagagtcccagcggaagagaagaatgtagtttttataaaaaaatatttgttgaattcgatatgaaccttaaaccctggatctcagcacaataatacattatacaaacctaactaattagtatagagatttacctcttgctgcctattaggattttcttgctacttttcgtataatcaaaacgaacatccaatccagtataagaactcgtcaaagacttcacaacagtgtctttcagatcagcctcaacaaaagatggcaaccccaagtatttttaaaataaatagtcatttcaccaaaatggtagaaagagtattccattggaatgtcattctaatactttaaaatgccaccaaataaagaagaatgaaaatt

SEQ ID NO: 353817 - DNA, 898 bp, Cannabis indica
tctgaattcttctctccataacaactactttagattatgtaatttggcaaatggatgtcaagacagcttttcttaacgaaattcttaaagaaaccatctatatggagcaactagaaggctatgttcttcgctatgttcttctaggacaggaaaagaaagtttgcaaactcaataggttcattcatggacttaagcaagcttctcgctcttggaataaaaggtttgatgaaataatcaagacctacaacttttaccagaatgaagatgaactttgtgtttaccaacacaaggataatcaagtggtagtattcttggtcctttatgttgacattttgattattggcaacaatatcaagaaaatgactgacatcaaggaatggcttgacacacaatttgaaatgaaagatttgggtgaagctgcttatgttcttggtattcagattatcagaaatcggaagaacagatcccttgctctctctcaaacaacttacattgataaggttttagagagattctcaatgacaaatgccaaaggggcatagctgccttctagatttggtattagtctatctaaggaacagtgtcccactgatcctcaagagatagaggacatgagaagggttccttatgcttcagcagttgggagtctaatgtatgcaatgtaattcactaaacgtaacatatgctatgcagtaggaattgtgagcaggtatcagacaaacctaggagaggaacattggactacagttaagcatattctgaaataattgaagtacaaggcattatgtgttagtctacaatggtggtgctttaaatcccgtaggctataccgactcaaatttctaggcttgtcttgatgatagaaagtctacatctgggatggtgtttactcttgggg

SEQ ID NO: 353818 - DNA, 505 bp, Cannabis indica
ctcgaccactgactagaaaagaaaggcacctactgcatctggtggctcaagtcaaaacaagaggttctagggaaccagggacaaggcaatcgtcagggtagttctgaaacctgatacacttacctagaatgccccagttgtaaaaagaatcacctgggagagtgtagagggcaagattgtttctagtgtggtatgccaaggcactataaagggactgcccacaacttaagaaataagaacagaagactttagcaaaacctgctctagctagggtatttgctctaactcaggcagatgcagaagctagcccctcagttttaacaggttagttatcggtcaacaactcttacttctttgtgttatttgattccggggccactcgttcctatgtggcagccagaatttttagtaaattgggtagacctcatgatagttatgatacagggtttggaaccctattgcctagcggagcattagtgatctccaaaaggtggattaggtctat

SEQ ID NO: 353819 - DNA, 361 bp, Cannabis indica
tatatttggctctaagaaccttgcaacaaaataattgattctcattgatcaacaaccaaccccacttagccataaaagctttattcatctctaccattttttgaaaaccaagccccctagatttgggaaggcacaatttgtcccaagccttcaagtataagcccttattacctttatcacctccccaccagaagtccctgatcatcccatcgaccttagacgccattcttttcaaattttttggcgtttgcattgcatatactaggagagtaagaccaactgatttaatcaaagtggcacgaccggctatcaagagggttttcactttccaaccctagagctttgtgttggaaattatttt

SEQ ID NO: 353820 - DNA, 630 bp, Cannabis indica
ttaattgttttagttttaaaacagtttgcatttcaattattagtttgggattttattccctattttttttcatattgttgcaaacaattcctttaattttggaagattttataataaagttttctattttggaaataaattgcaattatgaattgagcttcatttactttatcttgtgtaacctactaattatatttatatgttttaataattgtatgtgtatgtgattttttttttcatgaataaggaaatcttctattgctcaaactatcaattacatctcaagtttttgtacataaaccggctatttactgctataaatctagaattttacaaattacaaattcatcacccaattcttgtccacctcctttgttttgcttggccatacccctacaattcttctcttactctcctgctgtactcggttaacaattatcttgatttgccattgtttttggttccacaacacccccaaatctggtataccaaggcagccagcatatagttaacatcatgcttctccttcttgttgaaatccctttaagcttgctgatatgttgcagcagtttctgcaactctgttgctttcgtcccccattgcagcctcttcttccattctgcaagacac

SEQ ID NO: 353821 - DNA, 511 bp, Cannabis indica
caagacgtgaattcaaattgtctctttatttttttgcctaaactcaataatgtcccaaatatgcatcacatcgagattgtgtcgtaataaattatccttccagtaaggtaattcaaaaaatatactccttttcttccaactatatggcaactgaggattaacaactgtctttccaaatttaatttggtagccttctaacttatccagtatcattgaaccacttaatggtagggctgcacgtgggtgaggttgggcggtttttgggtggtttggagatttttttatttggcagtttttaaaaatcacaacccatacctgcctaataaaagtttgagttggatggctttttaggaggtagttttatgcgattttttgagcggtttgggttgcttaaaatcaaaacttctaaagttttatcacaaggaaaaaatattcaactaaaaatttgaacctgttaataacaatgcataaaagtccttaaaaattttatatcaatttttgtaaactccat

SEQ ID NO: 353822 - DNA, 644 bp, Cannabis indica
tttcaaagcgcgtttatcccgggaagactaatatctaacaatatcatggtttcctttgaagtcatgcattatttaaaaaggaaaacaagtggcaagcaaggatatatggcgctcaaactggatatgagcaaagcttacgacagagtggagtggcggtttttgaaggatatgttgaggaggatgggctttgccgagaagtgggtggatcttgtgttacaatgtgtggtttcggttcggtatcatatcatccatggaggtaggaagctggggccgattgtcccgtctagaggcattcgtcaaggcgatcctatgacgccttatttgttcattgtttgtgccgaaggtttctctgctcttgtgaggagatttgaacggaatcaattgttacatggctgccgtgttgctaatggggccccgagggtttctcacatgttgttcgcggatgatagttacttgtattgtcaagctttgattgaagaagctagccgtgttatggagctactccgaatgtttgaattggcttctggtcaagtggttaacaaagcgaagtcatctgttttctttagctcaaacacaaggggggatgtccgtcagctcatatgttcggtattgggcatgatcgaagcagatgaaaatagctctta

SEQ ID NO: 353823 - DNA, 982 bp, Cannabis indica
tcactcttgtctttgttattgctataagaattcttgtgccccatgtagtctttcttttgaaatcttccttttgcaatgaacaaaccatcaccactgttatctgctcgatcatcattcctttgaatctcttatgaacacaatgcagccttgacttctgtcattgtcaaggtgtcctttccatataagatggtgtcaacaaagtttttatacagttttggcaatgaactaagtaggataattgcttggtccttttcttcaatctatactccaagattattcagatcaagaataatcttgttttaatcatcaagatgtcttcgaagctccttggattcatccattctaagagtatacaaacttcttcttgagatacaatttattggccagagatcttttcatgtaaatgatagccaatttattccataatccaagagccttttcttcacttgacacttctctcaagacttcatctctaagattgagaagtatggcactgtgagccttagtttcaatcttcgctttcctcttgttgtcatctatctccttcatagcttcatcatccaaagcctttgaaatcccctaatgaacaagaaaagctttcattttaattctccacaaactgaagtcattggtgcctgtgaatttgtccacctcgaatttggtagaagccatcttgcatcaatcttgattttcttgcaaatgtttcttgaatttgatccctgatctccctagtgctctgatacaatttgttgtgcactcaagcacaaacaagaacacaatgcaagaaaggaaataggcttagaacattaaactagaaactataaaccagaaaagtaaattgacagcaagaaataacgaggttcagtcacaagttttggataaaacttagacctaatccccgggtagaaacaactctattggctgtgatgattttattattgaatggcaaagattacaacttacaacaatggagaatcaagaa

SEQ ID NO: 353824 - DNA, 998 bp, Cannabis indica
gaagctttttgccgctcagaaaaaaataactgagttgactaaggatctcaaggcttctgaccgacttgaagacaccatcggcaccttatctgcaaaagttaatagccttcaagatgaaaggacggcccttcgagctttcttctgtcggctggaagaagagaagaagtttaaggatgaagagcttacagctaaggtggcgaggctggaagagaaagttcatgccttagagaaaccaggtctcgagctcttttatgatatttcgaaggctaaccctcaagcaaattttgattacttgggtgaagccaaatatgtgtatctcaagtattgcgcttccaaagtggcttatggtaaacctgaggcgactgcttctacctctagccaaaatgttgatgttccttccgcttagacaacaaatcctccagctcctacaagcctagaaggcccaaactgagagcctgcgacaccagctgtttaactacttctctttttatccttcttttttatatatattattcgaccataagacctttttgtaagacatcatcaccggccaagcggtctttaaacttggaattatttttttatttttacagacaacaggctgaccgggcagcttttaatcccgatattacgtgcttttgttatctttaatgaatttcattctctgtttataattatcgtgcaattgtggttgttttatctttaccaaatgctttgtacaggcataggtcgcccctaagtgaccgagcaaacttatgactcttggtcacttgttttttccaagtatacctttttatttgttcggggttttgggttcgaccaaaccttttgtacgcactggatggtaaattagcaacatgttagtaattttgactcaatttgaattttgaaataaacatctatattcatttattgatcaaaaatgtgtttgttaccgtagtaacttacatcagagctatttgatctaatttgatcttttagcttaacatgaaataaaa

SEQ ID NO: 353825 - DNA, 1303 bp, Cannabis indica
tttttgtatttttatattgtatagtttatgtgtacatacatcattactcaacaaatgtaagaagagtttatctatttgttaccttaaatgattgatatatctgaaatgaaatttacaggacggacgacagagtcagatcaaccttctgggtctggaagttcagaagagagtggaatttcttctaggaaacgtgctaggatggagggtccaggtggggccttttttggatttgaatttaccagcagacaacgttgacagaagtgagctctaaaatatggcaagcctcgtatagaaacaggtgtacagtcagtctctactctagtgtaactaggctctctttcggtatcttaaatcttaatggtggattaaaaacccaagtgctttacatactactgccattgctaattttaacacattgttgttaaaatatcttggatgacatttggggctcctctctacagaagatcacttatacttaccaatttgaacatccttactattttgtacatatgtatattctcccctcaaatttgggcaaacctttaatattactttacttggagtttgaggcatttctttctttctttcttttttttttttttttgagataattaacttttattttctcttccaaatggtaatttaatttttgggaaatagtagtaaatgtctctaaatccttttttactaacttaatgtccttttttaaaaataatatagtaaattttagtacttaaaatatccttagttatataaggttattattaacattatatttactttccaaatagaaacagaagctctgctctaaaatataaatgacaaaacttcctttttcttattttttttcgattagtttagattttttcaaatttttttggtaaattatcgtgatttctcccaaaaggtgatgaaatatttttctcttatctatttattcgattcattcgttggatctaatcatttttccttaattcctcacaatcgaaagcgacaaagctcgctcattttcttctttttttaattttctcacatctccaaattacaatgattacccccaaacaacaaccaaagtttcagtcaaatttttctgtcagtggtatatacattttgtattatgatatatatatatatattctacactatggtataccattcagaaaataaaataaaaaaacttggattgtatattaattttgttgtatagcatacatataattttaatcaaagaataccaatctttagttttttctttctttctttatttcattcgtcatataaagatatgtatttattcaaaaaa

SEQ ID NO: 353826 - DNA, 627 bp, Cannabis indica
tgcgtgggccacaccattcgcaacacgcggaatggcacaacaagaaccaccaccaacagcagctaaaagagaaacaatctcctcaacaataggtttatacataaaaatagaattcggagaagaaatccaagaattaacaatagaagaatccgtttcaactctcaccaccgaataccccaacgtggacgcccatctcaaccccacccgcatagccagaagctccgccaccgccacctgaaaatctccaaccccacccaccgcccaagcagcccacacctcaccatcacccccccgaatgacacccccaaacccgacaaagcccctacccggagtgactgccgcatccacagataagacaaactcacctctcagaggaggccgccacctaccgggcacgcccaaaccagcagacccacccctcacaaccgcccccccaccaatgacgcccaccctagccccttgaaactccaccaacgcctccctcgcaaactctaccaccccattcaaccgtgattgttttttcccgaacaagaccgaattccgatcataccacacccaccaccacaccatagaaaccaactcaaactcatccttgctaagcacctcaaataaataaacaagcaactc

SEQ ID NO: 353827 - DNA, 701 bp, Cannabis indica
gcggcattagtaagctctccttgaacatgacctgatatgccaactcttggtttcgcaggcggttccgactagatggacgccaggcggactaccaggagtcagggcaattcagtggggtcaaatcagggacagggagctcagtttcccccgcaagctaggggccgaggtagaggtcccaggggcagggctcgtggtcggggtgatgagaacccgccacaggcagcgcaggctacccaacccgatcagggagcccataattgggaagttaggtttgctgaaatgcaagccaggatagaggaacaagacttagagattcagagattgaggcagtagggggctcctgcagtgcatgtgccagtagttcaagtggcacccgcccatgttgctcaggccgaatttgtatagcggctaacataatggaacctttgtatgaaaggttccggaagcaagcacctccggtctttctgcgaggtccagatgtgatgaaggtcgaacagtggctaacggtgatcaccagaattctgaattttatgggtgtcaccgggaatgacagagttgtgtgtgccaccttccagttccaggaagacgctcttgtctggtgggacatggtgtctcagatccatgacgtcactactttgacctgggaaatgttccaggaactcttcaacgccaagtattataacgaggcggtcagaagcgcc

SEQ ID NO: 353828 - DNA, 868 bp, Cannabis indica
cactgtaaggttttctaactttacatgtgtttattttcattgttttagaattcatattagggtgttaatccaacatacttgttagtaaatctagatcctggtaaaataatttccaacaggtatttctatctatgctataaactcatgtgttttagagaattattatccccttgggttattaattctggatctactaaccgtgtttattttcttcttatttcagctccagcagcttaaacttggattgctatcttagcgagttgagtcggatgaatggacaaaagggtggagattgtccacgatgaagatgaagctcgaaatctacttttatttttgatttaattgtttcagtttatgaacaatttagtttcaattatttgtttgggattttattccctatttcatatttatgcagaaaattcattatgactttttttttgagattattaataagttttctctttaagaaatgaattgcaattatggatttagcttcgtgttttctttatcttgtgtatgtcaataccaattatacttatatgtttatcatgttttgtatgtatttgtattttattattgataccaaatatatggtatattcatctctgtaaagagataataccaaataaacacttggagtttaaaattcaatgtttatgaataattgttaattcttaagcttttgtttaataaaaaatcttttgatttgataggggtggaagaagttaaaaagcaatatatgcagttcaacgatcttttacatctattgaactctagattatattcataactccacaagatctctacacatagggggtggaaaaagctattgatatatgtactcaaaaaaaatttctttgaactctag

SEQ ID NO: 353829 - DNA, 690 bp, Cannabis indica
catcacaattaatcttaagaacaattatattttatttcatccactgctcagaaaatgcaatagtagaaactgttgcaacaagttttgtgtaagatgcgcaactgtactactagcaaccacttcagtcgcaaaaatttgttatttctaactactaacattgatttaatggagagtcattgaagaacatagaaaaaccaacaacgaaataaaaccatgtcacatagacaagactaaaacactcaaaatcatgtcacacagataagactaaaatactcaaaatcacgccataaagacaaggctaaaatacgcaaaagcatatcacagagacaaaactaattgcagtagcaaaaatcgaatggcagtagcaaaaacacaacactgatcaagccgcacttaagcctagggaagaccagcgagcctagccggagaataaaggcaacattcgatagctatagatttaggaacgagaaactttaatttttttttcttttagctagaatagataccaacaagtttattttcgttgctaactattttttttaggaaaacttacaaaaatactataaaatgggagaatttacaaaaatactatgatacaagtttttacatttttactgtaccgactttacaaaaatactgtgtttcagtaaaataaaaaaaataactaattaactgttagagatattatta

SEQ ID NO: 353830 - DNA, 665 bp, Cannabis indica
tagaacgaattacaacaggagggggcaaccaatctccaagacttctagaagagggtccaaaagtacatcaatttagaagaagcccagataatggcctatgggggatactatccgacaggagtgtcaggatatgtacccggagttcagctcccaggagccatgccctcggtcactcctcaaatgagcggcatacaattctccgctacaccaggatataatcagagcctatccttggctcccacatcatcacactttgggaatcccatacacaaccccttggggatgagtggtcaagctccgtctcagtccgcacctactgcaagcctgataggacctcctcaaagctcccggagcaagaggtcctcaaagggtagcaaccggacggaggataagtgacaacggaggggatacaccccttagtacactcaatacatggagctcatggacacacaggagtaggtatattttgccacaaggcaaaatacacattactggaagcctcctcccctgtatagggacaggttccgaagggatcctagcaagagatgcgaataccgcaacgacattggccatagtaccaatgaatgcaaaaacttgaaggacgacatcgaaaacttaatctgattgggtcatttatatgaatggattaagaatcgactacccca

SEQ ID NO: 353831 - DNA, 714 bp, Cannabis indica
taaattattccgaatttttcaaaattttgtaggacatcttaaatagttataacgtacatgaatattaaaaaaaattaagactaaaatttttttctggatgtcgaaacaagttaagggtgcaccagtacatcccttttaaggggtgcattatattatttattcaatatgatatttagtttctatttaaatatatataaattttttgttatgtattcatattttaatagtggtatatataattttgttagcatgatatatatatattttttgaagcattaatttagtattattataatttctttgtggtagataattttattactacggtatattaattttctgtactacgatatatctaatactgctgtatatatttaaatgatctaatatatttatttatttttgttacaatatcataatatgcaatactaaaaaaaaattatgtaacttaattttgttatcatatatattttttaaaaaataatatgtgataaatctatttttataatttttattatctaatttattagatttgactattttcttaatttttttaaaaagtggacatttactaacttagttaccaaattgagggccattttgcatctcaatttaaatcaaccaagggtacactacacattcactcacatctgattctcacatgctaaaaaccaaagggaaacttacaaaaatactggaatttgggttaacttt

SEQ ID NO: 353832 - DNA, 1081 bp, Cannabis indica
acatgaaatcaacattaagcaataatctacttgtcacataagtcatgtgaatactctcgtttcacatagaacatcgattatccaattttagcattctcaattctcacttttcagattttgaattgagatcatagaacatgtaaaaggtgatcaagcttacacatggaattaaacacaaatatagataatttcacaatcaagaatggaggaatgacaattattcattaactaggcaaaaactttaaacaacattcatcatcctccctaaatgggaaatttagttcataaacaaatccataaccattcctataacaatattcaacataaagaaattaaaaaggaatagagaaagaaattgttggtggaatgattcgggatcttcactttgctcctcttgtcgcttttcgctgtattttaggtctccaaatcgcttcccctaatttccaatcgcagttttctatttataactaatttccatctcgccgcgaccaagttgttgctcgccgcggccagataggcttctaaaaacaacgtttctatagtgccactatggctgcggcaagggtgtatctcgccgcggcgactggagcattgaaattcgagcattctgccttcgagttatagccgcgaccacaatgatctagccgcggccagaagtgcgtcatgcctaaaattggcatttttttcttggctccgcttgtcttttactgcacttttacatccctcctatctagtgctctcctggttagagcggtgatcggaaaaagattccatatagaggacactagttgccccctatgtggcttgagtgaggaatcctttgaacacctgttcctttcctgtgatgtggagtttcatttttggcgatcttctccctggagtatctttccggtgtgtgatacatgcatctgtgtctgggattggatcaaattcatttgcgatctaaataatagaggggtccgagttgatgatgttttcttttatgcctcgattgttgtggatactatttggagggtacacaatgagaaggtccataataactgtcctcctgacctaaaaaagtgtattgataatatttgta

SEQ ID NO: 353833 - DNA, 365 bp, Cannabis indica
acgcctaggttgactttgggaacgtcggcagaagttctaactttaataacttgtttctaactcactatcttttagtattctgtaccatgaagacatgaagcaatcaaatctaggttcgaggagctaaaattacatgaacttgcacgccagaagccaacctgggcacctagggtttcacccagtacccaagttgacatccttaactagggtttcggtttttgggacggtcttagtgtaaatgggtcaaacatttcattgggacatgaactcgacataccacagacatatttgaggcatcagaatcagatttagagaaatttcatgtttaaccacctagagcactcaatgctcgagcacccagcgcc

SEQ ID NO: 353834 - DNA, 577 bp, Cannabis indica
tatcggttagtgtttggaaaggcgtgtcatcttccggtggaattagaacataaggcctattgggctatgaagactcttaacatggatttgaaggctgcaagagagaaaagattactgcaattggatgaattggaggagtttcggaatgaggcttatgagaataccaagatttacaaggagagaactaaaaagtggcatgaccgaagcttagtcaggaaggagtttcaacctgggcaagaagtcttacttttcaattcaaggttgaaattgtttcctagtaagttaaagtcaaggtggtcggggccatttatagtggtcaaagtgtttccttatggagctgtggaactgaaaggtgaaagtcccgagactttcaaagttaaggggcagcggttaaagctctacttgggaggtcaatttgaccaagccaagtctgccatgattcaagcgccactatgaagaacgcggtcaacgtctagctgtgcgacgataaagatagcgctattgggaggcaacccaaattttcttgatgctttagttgaactttcttactttgctttaattatttttatttttattt

SEQ ID NO: 353835 - DNA, 505 bp, Cannabis indica
ataggtcgagaaatcgtacaactaggactccaaccataaaatccagttgcagtagtaccatcaaagagcgctttacagagatccggaaagggtaaaggagcacttttcaatggttttgcctttgggtgagcctatatccagtaccaaaagacaatgcattttaatatgtgcaacttaaatatctaaattataaaatagtgatatagagaaataaccttaatgtactcatcccactcggcattagacataagaatggtattagttgtaggatcataaacatttcctgttttcatagttattggcaaccatgtttgatatttatcctttagataatcaaaatgattcttcaattgcttttgtgttgcaaagaaagaatgagtagtctccaaaacttgtctaactttattccatgaatctggctttaaactacttccaagtcttccatgtagagattctaggtcttatttattaatcaagagactttactaagtctaattaataaata

SEQ ID NO: 353836 - DNA, 634 bp, Cannabis indica
tgcacttgattatttttaatttctcatattcgcttttatggagggaaactgaggcgtctgaggttcctctgagacgattacctcttttcgtgacttgcctataaataccaaacaacattggcacataaactcattttcatcacctttctttgctaagtaagcttcagagcgaaaagagagattcttgacttcaaagttgctgaagcgccttcatacaaactgcttgttggattgacgttgctcgcacccagacatctgaccctcgagtaagtctctggtttcctttatgcttatctttgcatgtttatatgtcaaatgcatcctctactttgctgtagaaaaatgtttaggaaaccctaggcccagaaacctctacgattcttctttatcatgtcttcgtgcgattttacagtcataacacttgtttctgaactgcgtaacgtctatctttcatcttgcttattctaagcttcatgaacttttttgccctaactcgagaaattttttgacttcttgagttctgacttttcttcaaacataatcgttctttaatctgttgggtactcctggtcggcatatttgcttgtttatcgttcgatattccgaccaaacactcatcttgtgcgttgtcttt

SEQ ID NO: 353837 - DNA, 1274 bp, Cannabis indica
ttgcggaagtctctatatggtttaaaataatctccgagatagtggaataggagatttgatgattatgtgaccaagataggtcttaagagaagtaagtttgatccttgtatatatttttgagagagaaatggagatactttgtatttgttgttgtacgtagatatattttgatagccagcaagagtgtacaagagatcaagcacttgaaactctagctaaagacagagtttgaaatgaaagaattgggtccgtctagtaagatcttaggaatgaatataagaaaggaaaggcagaaaagactactgtacttgaatcaggcgagctacatcaaaaatgttctagatacctttaaaatgagtaactctaaagctgtgagtactctgcttgcacaacacttcaaattgagtgttactcagatgccaaaagatgagattgagaagtcagagttgtcaagagttccatatgctagtcttgttggctccctaatgtatgtcatggtttgtactggaccggacataacatatgcactgatcacattgagtagactcatgggaaatcctagaaaggagcattgggaagccctgaaatggattctacgttatttgaatggaactgctgagaaggggctgttattggtatgaataaccagaatgaagacttggatgttatcaatggttatgtggagtctgattatgcagggtgtattgatacccagaattctttgactggatatgtgtttactatgtttagaataactattagttggaaagaaaaccttcagaaggttgtggcgatgtcgacaattgaagctgaatatatggccttgacagaagctatcaaggaagcactgtggttaactgggttgatggaggagctgaaactcaatcaaaaggttattattgttcattgtgattaggggtgttcataaaaaccgaaaaaccgaaaccgaccatcaaaccgaccagaccgtaaccgaattttcggttccacgtcatcaccgaatttggcggtcggtttcggtttcggtttttttgacacggcggtcggtttcggttcttgaaataaaaaaatagtttaaccaaaaaaccgtcaaaaccgccaaaaaccgcccaaaaccgccaaaaaccgcctaaaaccgccaaaaaccgcctaaaaccgccaaaccgaaaaccgccaaaaaccgtacggtcggttttatacggttataatttctaaacggtcggttacggttttcgtaaaataaaaaccgtaaccgaccggtcggttataaaatt

SEQ ID NO: 353838 - DNA, 749 bp, Cannabis indica
acttagtgttgtgaaaataattaatttattatgttatttgttggctaaagtaaaggttgttaattgcatttcactctcattattcaaagatttcaaaacttagaaaattagaaaatttcaagagctctttctctctctttctttcggccaagcttgggagctgctagggctgtgtttcttggtttaattcaagtgattttcagcaagtttaaagtaattctagtagaggtaaaccttgttctagcttcttttcttgtttcttggaaattttgggaagaaaatgatggtttgcatgcttagtttaggttgatgttgttgctgtgattttgttgttgtttctgaggtttaaagcatgattatttgagtagcttagagctgttgttgatgcatggttgttgctttggttcaagctaggaattttatactcaaaactatggttgtgcttgagttcagtttctgcagtttttatatgcatgaatatgtaattttaatcaaggtttgatgcatgatagtgttgtataatcaagtttgagtttggaactcaaagcttgatgctttaatggtgatttttgattgtatgcatgaagctcagttttgatgctttagaaatgttccttagggtctaaatagcaggtctggaaggtttggggtgaattggatttgatttaagtgagttatgattttttttggttgaatcctgcgaggaaccagaattccggttgtgcatccggaattccggatgagggttc

SEQ ID NO: 353839 - DNA, 700 bp, Cannabis indica
caaatctaactccaaaagcccatttcatccatacaatcttacatactagtgcccttcatacactttatctcaataattattaatatattattatttattatttattattaaggaaaaacccaaatcacatgcctcgaaattaagtccccttaaactagaaaacaaacacatatattttggaaaatattagtcaaacaaactatactctaatgattcattgccaccgctcccaatataaatacaccaaccttttaaatatttatttatgtattttaacaaattaaaattaaaataaaactccacctctttagggtgtatatgtttttcttttttaaaaaaaatacttgagagtagtaatgttacttagtattttttttaaatggtataatttagtattgaattatataatttaatataataatttttagaaaatatcattaaccaatcatagagtatcacttttagacagtgttggacactattggtgcctaagctcgtttttttagaaacactaaaaagtattagtggtgtctaataccctcttatttgttaatattgatattggtataattaagtatcaagttttatataattttataaaacattactattaggtactagtagtgcctagcaccttctcgacatgtcgcgttgtgattggctagcgatactttttaaaatctattatattaaactatat

SEQ ID NO: 353840 - DNA, 592 bp, Cannabis indica
tgtaaattattccgaatttttcaaaattttataggatatcttaaatagctataacgtacatgaatatgaaaaaaaaattagactaaaaaattttctagatgccgaaacaagtcaagggtgcatcagtacatcccttttaagggggtgcattgtagaatcacccataaagataaatgatatttttaaaattataaaaaaatgtatattttttaaaacatatttttttattcggggccctaaaatgagttggctctaggcaagggcctagcccaccttagcctagggccgaccttgaatgtatcaaatcgtgttcccgaactttgacatgtactaaaacatattctctttaacttataaaaattcttgaatccacaaatctaaagtgtttagattgcatttttaactgttgggatttactaactgataaaaaatcagaaattattttatgttgaatggttcacatcattaatttcatgattatatgtttaatatataaattctattaaatcccgaacatatagttattcatgattatagtgttgtctacacaatggaaaaaaaaatcatgatcatatgcttcaaactatttagt

SEQ ID NO: 353841 - DNA, 1134 bp, Cannabis indica
aatatacatggattgaattgtattggttatttttacatatcaagtaatgtacaaattttagattttttaatcacgcaagtacgaatatccacacattgcgaattgaattgaattggatattttgtgaacacccctaactacaagattgtcttacaaataattttttttttcataataactgttgaataaaaatatgtgagaactaatacttaattacaccaataacaaatacaacattttagtggtatcctttgatacttaagtatattaataataatagggtaaatagcggcataaatatttaaagttttaagtttgtaagcgacataaacttaataatttttttagcgacataagtactcaatgtttgtaaaactgtaatttttctctaatttcgtcaagacagactccgttttgaatttgttgtaaaagaagatttaaaagtaaccgatactacatgtttccgtccaaatccaatgatcactattaaaatcttacttttagtcacaacaaaacttgccactaaaaatgaaaaaattgtaactaattataaatcattattcatatattgtgattaaaaaatccgtggctaaagatattaattacaaaaatcacaattttttgactaaatgtggttttattaattacaataattgttgtgactaaaactaaattagtgacaacttgtatctaaatactatgttttagtcacaagtaacttttggtcgtgactaaaagtcacatttagtcacaaaacattatgttgtgactaaaaaattgtcacaaaagagaattttttttcgttagtggatctagaatctaggtcttatatgtgtgtcatgtttaagaactgtaatggcacaattagaagaaaaattacagttttacatatattgagtacttgccgctaaaataattatggataaattttggaccatgtattttgaaaaagttacatattggactttctattttgttactatgaataaaaaagaccctgcattttttaaaatggtaacaaatatgacactgaactgatttttatctaaaataaattaaataataactcgacctagagatgtatgacaaactaaacttaatttttagtcatctgttacgttttaggaattgtac

SEQ ID NO: 353842 - DNA, 997 bp, Cannabis indica
aggctcttggtttggttcttctgggctagtaggagctggaggatctgttgtttgaacgggaggtacatcagcagtttttgccggaggtagaagcagctgcctcagtttcaccgtaggccacttgggactcgtagaactcgaggtacatgtccttggcatcacccaagtagtcaaagttggcctgaggattagccttccaaaagtcaaagaagagctcaagactggctatctctagagcattaaccttctctttcaacctcgccacctcggccgaaagctcctcctccttagccttctcctcctcctccacccgatgaagaactgctcgaagagaattcctatcattctgaagactgttcacttcagcagataaggtctcgatggtgtcttcaagacggtcagaaacttagagatccttagtcagctcagttatcttcttctggggggtaaagagcttcttgtttgcttcacctagctccatccgaacagctacaagttctgccctggcgtcgacaacatcctttttggccaagtccacctctgccctcatggtgttggatagagccgtgttcctggaagcggtagacttagcctgggagtaagtgtaagccaacttcagaccggcctacacaaagaaaaaactttagcatttgaggtaagtacaaaagattaaagggaagtgttgagaaagacttaccctggtgaactccttcaagactctgcccaccaacagctccaaagaagagtcattgtcagcaccagccagttgctcactgacctcaggaacccccggttcatatagtggacaagcatctctttgcccttcttggcctttggaagcaccggcgaaggtggctcagaccgacctgttcggtggctcagacgcacctattcagtgcccttctttgccagcacctgttcgggttcacttctaaccagctcagacccacccttcggtggctcagacctgtccaagcttcctccccgagactccttg

SEQ ID NO: 353843 - DNA, 806 bp, Cannabis indica
gtgggagcgctaattatagatatagaatctataacttctatctggacatagaagtgaaatgatgatttccttcgagcttgcctgaataaaatataaccattgatagttttatttaggcccaactagtattgggcttattcaatgactaaaaattatttaatgaaaggttaaattcctctcctttgggccttgtgtgagagttagggggccattagtagtgggtacgacatacttgttggaatatgttttaccaggatctagatttactaccatgtatgttatttaacatcctaaatatgaatttctaaaacaatgtaaataaacacataaagtttcagaaaccttacagtgggtgcaggggaatatcaatggctccttccacttagatctctaacccttgtatcccgtctgtagcagggtatcaccatgatctgagcccgaatatccttctcttgattttggattcttcacaaccttacacactatgattgagttaccacttgatgtgtgtgggcactgagcccgaatgtccttctcttgattttggattcttcacaaccttacacactatgattgagttaccacttgatgtgtgtgggcacttattctatcactcaaggtatgaataatatgaagagaggaagcgaaggtttggttcaaaaataatagaagagaaggattaggaaaatttcactgaaggtgaattttcatcatcttttagtgtgagccatcgctatctatttataggcaaccaccttggtttaggttagaattaattaggcattaaaatattgaagaaattaaat

SEQ ID NO: 353844 - DNA, 509 bp, Cannabis indica
tttgtaaacgggatcccgaaatattttgtatgtaatattataagttttaattaaatagcaaaattttaattaatcacgattttcgttaacctcgttgattggcaacgagctgcacagtacgtttaaaatcacgtcaacacgcctatgctagttagggtgttacactagacaactcactaatcaggctattcgattgcccttacacttactgcataacttatcacacacttagtccacatcttctaagcatttagaatccagacagatatcaacatcaatatgcagataccatacacatattctaataataatcatcactatactactttttccaacataatttataatagtctaggcaggtaatcctatagcaaatgatataagcacttactataccatgagtcgacctgtcttcccaaaaatgtacatattcgaccaaccatgactgctctgatactaagttgtaatgccataatctatagggacgccacgtgtgtgattttataaac

SEQ ID NO: 353845 - DNA, 505 bp, Cannabis indica
aataatattttattttcatttttggatttaaaaattaaaaaatccaaaatttgggaaaaaatcccacaaaaattggattttggggtgcaaaacacgtttgttgggcacacaggaggcgcgcagcctcatccgcgcgcgcaggaggctgcaatgctgccttcgtgtgccggaaaatgggcgtgcgtgcgctatagacaaagaagttgtcccctatcacgcatgcggaacccgtcttgtccaacggcctcgtgcactcgatgcacctactcgacaacaatggcatccaatcttccaatattcataacttcctcaatttttatcggaactgagttccgtaaaaatgaaaattgcttaatttttcacaagcaaatacaaatataatattttcaaaaagaaaaaaaatattttcatggaaaaatttcttaaaacacatacattcatcaagtaaccacataaaccatcatcaaaccatccaaattaacaaaaacatcgttttaattcatat

SEQ ID NO: 353846 - DNA, 574 bp, Cannabis indica
ataattttataatgtgtattgtttttggtcaatggtcactactagtatttagtaccattattatgtcgtcttataattagctagtgatacttcttaaaaattattacataaaattatatggtactcgatacttaattatattaatagcgatattgacatgtaggagagtagtacgagtggtaggtaccactaatactttttagcaatacataattctaaatttgatgtaaaagtcaatactaattagtgctttgataataaaaaaaaatgtaaatgatttataacttataacactaaatataacaataaaatgagataaatgtaaaaaaataaaatcatatcttcaagattatttaatggagaaatatgatccgaaatcatgcaagaaaaccctatcaactttttggactttaacaaaaagggataatttcacaaaaagggataatttcacaaaaacaacaaaaatacggtttcaccaaattttaaatatttttacgatttttttgattttatttacataaaatacggtcttttatgttgaaattttgttcattttttgttatctctatgttat

SEQ ID NO: 353847 - DNA, 480 bp, Cannabis indica
tttgttgattcaagctctctgcctagtgaattcagaatttcttttctttgcctgaatctgctgaaatacctgatgttccttctcatttctcaccatctggtgcaagttctgcatcacagaaccattcccaacacaccagttcttctggtgtttctttgcccctcaacagacctgttagaaccacaacaaggccatcatatttgagtgattatcactgttttttatcatctaacaatctttctgttgcttctcaggacagtatgccagtcactgcatatcctttgcaccaggttcttgattattccaagctctctcccaagttcagatcaatggcttttgctatttccaccatccaagaacctacttcttttgaacaagcaaaaggtatccctgtttgggacaaggctatggattctgagattgaagctttagagaaaaatgacacttgggttgtggttcctcttgttgggttttatgccc

SEQ ID NO: 353848 - DNA, 784 bp, Cannabis indica
tgcgagcggtcaccttgcatttttctttactttttgagcttcttgactttcatgcctagtgttttctgatggctgttttctaaccacactatttttgttctgtgcagacatgtctcggcagatgctcgatgctctaaggaagagaatgggcggaagctccagcgcctctcctccggccaagaagtctaagggcggtgaggggtcctcggagaagagaccttctggagaggtcattgacctttccgaggagctgactgctgcaaacccttctacccccaaatctgccaagtccaaggagtctggaccaccaacggttgggtctgaactggtcaggagtgttcctgagcgggtgcaggctccaactccacctttgaccgtgctgccaaaggccgaaaagggcaaggagatgctggcccactatatgaaccggctagttcctgaggtcaatgagcaactggctggtgctgatagtgactcatctctggatgtgttgatgggcggagtcctaaagaagctcaccagggtaagtcttttttgatacttccctttaactttccacacttagctccatatgctgacttttttcctttgtgcaggtcggtttgaagttggcttacacttactcccgggctaaatctgttacttccaagagtgcggctctgtccgacaccttgagggcggaggcagacttggccaaaaaggaagctgaggaggccaggtggaagctgaagctgttcggctggaattaagcgaagccaacaagaagctattgttgggttttatg

SEQ ID NO: 353849 - DNA, 677 bp, Cannabis indica
  modified_base (22)..(22): a, c, t, g, unknown or other
tctattacatcagtaaaaggcncgtcgaggctgaaggccgatatccgttgatagaaaagctcgcctactgcctcattctagcaacaagaaagttgaggccttactttcaagcccatcctgttcgggtgtataccgaccaaccactacgaaaaatactgcagaagccagatgcctctagacggttactcaagtgggcagtagaattgggtcagtacgaaatcaatttccaaccccgaatagctatcaaaggccaagccttggccgactttgtagtggaatgcacaggcaaaacagaaagcataccagaaagcgatctcgagccaataccgcagccaagtaatattgaaaacaaactgacctggaagctacatgtggatgggtcggcaacagatcaactatctggtgcaggaattgcccttgtcacacctaggggcaacacctacacgcaacggtcaaattcggattcaaatcctctaacaacgaagccgaatacgaagccttaatcgctggacttaacctagcgaagggaatgaaggccgaacacattgagatctgcattgattcacagctggtggtaaatcatgtatttggagaatacgaggctcggggagaagaaatgatagcatatctgagcaaaatacatgatctgcttgcacaattcaaaagctacagcctca

SEQ ID NO: 353850 - DNA, 536 bp, Cannabis indica
ttcttgacaaaacacttgttaggacaaccttttctttttcatcctcactactctcagaatcatcactccaagtaacatttaatccctttttatttttctttaaggtattagcacattcggattgagtgtgaccaaaaccttcacattctctgcatttaataccttttttattgttagatgaaaaaggtttagagggaatattaccagaaatgttaccttttgggttctttgaaaagttctttttatttccagcagatttcatgaatttttggaaattttttgccaacagaaccatttcatcatcattttcatcatcagaaacaatattttcagaagcattaaaggcaatacctttacttttctcattcgagagactttgcttactctttttcttgatttgttgattcaactcaaaagttcttaaagaccccatgagttcctcaaccttcattttgccaaagtcttttgcctcttccattgcaagcaattttgtgtcaaacctgtcaggaagaactcgaacaatttttcgaaccaag

SEQ ID NO: 353851 - DNA, 871 bp, Cannabis indica
aactctttctcctcaagttttctaataaattgaggaatgttcactgggtaggggaccgagagattgaaagtcgatacgcagctaagctaagactatattattatctaagaattatatattcagagatactgttgtaagagctataagaaaaggaatcttcttccttgttcttaagtcaatacaaataacgaggattaggctattaccgaactgctcggggctgaacctctataaaattcatgtgtcttattattgctttattatatattaattacgacatatcgtttatcgcttatcaaaaagactcattgtcgttggctaaaagcgaagtcaacattttggtgctttcattgagagaaggatcacagatcactcttttcaacactcaacacgatggtccaaactcgtagagacctgtctgacccagcaaattcacagacgctggatccgacattgcaggacccaggaagttcaagggttccacatgctatcaatgctggacagatgggaagcgtggtgaatggtgtgcaagagaatgggaataacaattccgcacacagccagggcattcataacacgactattccgcctggaaccaacgctcagatgacaatcaaagacgcaaccgaattgcgaaatctccgtgccgcgctcggactcatgcagagtcatagcaacactctgcatcatgatcaggatgaactgagcgccgcagtaaatctcacgtttgacgaacagaggcgaatgttcactaaatggagagacaaagagatggaggcattaagggctcaccatacagaaatcgaagattcgtagtcgataagctaccgtgctgatacgaagagcctacctagattgtaggtcagctaaa

SEQ ID NO: 353852 - DNA, 774 bp, Cannabis indica
taagatcctggtaaaataacttccaacagtatcaggcgaagggtttaaagatggcaaaatatttggagaaagttcagaagagcttggagaagtttgattattttaagattgaacaaatttcaagagaacacaactcaaatattgatgcacttgccaaattggcctagcaaaattaacttgataagttaaatctggtactggtggaagttttgagcgacccaagtatatgtgaaaaggaagaagttgagatgattgatgcttcacctacatggatgacacccatactcaaacatctactcaacggagaactaactacagacaaaaacagggcacgcaaactcttgtattctataccttgctatatagtagttgagggaaagtcatataggaggggctattccatgtctctcttatggtgtgtattgccaacaaaagcatgcgagataatcaaggaaattcacaaaggcttttgtggagatcatgaaggttggtaaagtttatcaaagaaaattatccgtcaaggatattactagccaacaataaacaaagatacacacaaatttgtcaagagatgcgataaatgccagagatttttacatacacctcgtgtaccgccaacaaaattgagaatgatgacctcgccatacccatttacaatatggggaattgacctgattggggcattacccacagggcgaggaggagcgaagtacgcgatactagctgttgatttcttcacaaaatggacagaggccgaacctctagtttccataa

SEQ ID NO: 353853 - DNA, 808 bp, Cannabis indica
acacagttcttaccttctttccatattcaagtgtgttggttgacctgaacgaaaagtctcgtgctggatggataccctaatcacataacgaaattgggtaatcacatgctcataatcctaattcgggttgaacccataactctaggctctgttacattcaccagggattacactaactcaggaaatagggaaacacccaactaaggcacttgaatgatcgagaattgagaaaacgagttgctcggggaatctgccaaaaccagctaactagttttacaggccctggcaaaccggttagctggtttgcaccaggttttccccaacaattcatttcttgctcaaaactcatccaaatgccaccaaactttccagagtacctaaacaatgtatacacaacataatccaactagaaaatcctagaaaaagctactaaattcaaatatgccattaaagacccaagtttaggtttcgaagctcaaagttgcacaaatccaatcccatacaccaaaaccagctgctagaagctaaatctaactcaaataaactctacaattcgaactacacaaaaactaaaccctaacaacccctaattttcaaaatcatatactcaaccaaaccttaaaattcaagaactaagaaatagtgatgctagggcttaccttggcttgattctctctaaatttcttgctgaaaacaccaagaatcagcaacaatttcccccttgttataggctggttcgaagaaagagggaagggaagagagtgttttctatttttttttctttgattttctctaaatgaaaaaggat

SEQ ID NO: 353854 - DNA, 2111 bp, Cannabis indica
ataaatgtgtaatcaaacttaccatttttccctcaattttcataaataggaaagctagacaactttccttccaaatttagatacacaaaatatggacaccaatttaaacactcctgctgaaaatatacaataaataataaaatatttttctcaataaaatatgccaaaaatggaattaacgacctcccttttggtactttgattgacaaaatattttatttagaaaaaacctacatcaagtgttagaaacaaaaacaaaagagtatataaaataatgcccctacatgaaagcaccctaatacataaaacaaaataacttttttagacggaaaagcttacaaaccacaaacagtgcacaaaccacaagcaagacaactccccttaaaataagggtccagagttgtaacacacaatctaaaaataaaaactactaccactttttgtctatcaaggagccaaagataaccaaaaaatatgaacaaagtcataatagttcaatcacacagaaataaaaagcaagagataaaaaattgaccacttatttattaacgcagattttcgttaactaaatttgagcctcacggtaataatttcacacagaaataataaaagctatagaaaaataatatatgaacatagggttttttacttggttttgcagttaaagctctacatagtcaacgggtcaatcttattcagatttctaattgtgttttctctttaaggcctctcttgtatgagttttttttgtcccccttcttgatcttgtctgtcactatttataattacatagtgggcagtaatttacaaaagttgacaataatcgttacaacaattattctatcaaatcatgggatttgattacaaatcaagcttggtaaatgaggcttttataattcacacaactgtgagtatcccacttttattggggcgagatgaatgcgtaattaaagatctacggtaaaccttatcccatagggatgtgttgatgaaaatggaaccaacttaactttgaaggcgagcagttgcttgtcatctgacttcccgagactaatattgttttaactatgataaatatattttctaaggtggagatgatcttcctcgcatgcacgccatcttctagcaagataaacgcctcgatgtatgttatcttgactcgccaaactatctacacttagattgtataccgtgtaatatacgctaagtgtttttattgttatcttttctcttccacacagcgaggttgaggcctcgtcatgtacacgtgcacccacatggtttctcgccaatacataagttaacagttcgtacgtttctatcttgtacaaggctattcagccagccgagttataaacatactttgcgaattatgtttccaacgagttgttccttgctaagtgtactttcgtttgcgtgtttgagttcttcgttcttcccagctcgacatgtgtcttcctttaatgtgcttactgactttcaggtataacaattgccccttacaaagttctttttaatgattacatagcgtatttctgtcatgttcctcttttgtgaaaagacacatatcctttgattttggcggttgtgcgatttcgaggtacatcagaattaaatgaccatctttttcacttctgctttaaatcaagtccataggatcaaattttgctctaatctaacaaagccactatcatagatataaactaagaaaaaaggaaccacctttgcaccattttttccattacaaaaagtttgagaaaaacccttaaacttcttcgtcaaggatcaccattaaattcgtccgaagacttgcatgccatccttatccttgacctttttttgcgagtttcatctgacttcatcctctcaaagtgatccttgcttcgttcgaagattcacagacggaattactaggcattccccaagccctaactttaaacagtaagttactttcttctttctcatgtttgtcacattgtgttgattagttacttgatttgtttgtatcgttatcatctaatctagttttggtagttttttatgttgggttttatgcctaaataaactccatttcaatgtaatccattttatttaacatcaataaagaaaca

SEQ ID NO: 353855 - DNA, 905 bp, Cannabis indica
atagcgcttagaagcttgcccggagcccatttcacctgttcggccatcccatccttatgctggaaagggaaggccgttatggctgagataaagtcgatgtcaggtgatgatggacttctgactttctgggcggacaaccactcttcgcgttacttctttttcagcttcttgctttcatactttgtattttttgttggtttttgctaaccatgctgtttttgctctgtgcagacatgtctcggcagatgattgacaccttaaggaagaggatgagcggaggctctagtgcttctccctcggccaaaaagtccaaggccgttgaggggtcttcagagaataggccttccggaggtcattgatctttctgaggagctgaccactgcgaatccttgcactcccatatctgccaagtccaaggagtctggtgttcgaaatattttaccaggatctagatttactaacaagtatgtttgattaacaagtatgttttaccaggagctgaccacataagagtttaaaaaaccttacagtgggtgcagcggaatattatgactccttccattcagatttctagcctttgattcctttcggtagcagattataatcaagatctgaatctggatctctttctctcctttttgttggtgctaattttccatagtcttacatactaagattgaggtaccacttgatgtgtgtgggcactactcattcacatagggttaaggttaaattacttgattcatttctgtagcagagcataatcaagaatgagataccattgtctatgaaacctgatgcctttaccttatatttatagaataccacatagggttaaggttgaattacttggtatttaaaaatgaaaaataaaatgataaaagggaagcaaagtggccggccat

SEQ ID NO: 353856 - DNA, 956 bp, Cannabis indica
ggagccattcctattgtactctggtaactgttattatacgagaactctatcaatggtagatacttacttcaggagccctcaaaatccataacacatgctcgcaacatatcttccagtatctgaattgtcctttcggactgtccatcagtctgaggatggaaacttgtgctgaacttcaatttggtacccatagcctgttgcaaactttgccagaatttagaggtaaacttcaaatctctatccgaaattatggactttggtacaccatgtaatcttactatctccctgacatacaaatccgcatactgatccactaaaaaggttgttttaactggtagaaaatgtgcagacttcgtaaatcggtctaccataacctagatagaatcaaacaaacccgtggttctaggtaacccaactacgaagtctattgtgatatcttcccacttccactcaggtacggttaaaggcttcaacaaccctgctggtctctgatgttcagccttgatctgttaacaggttaggcatctcgatacgaattctaccacattctttttcattcccctccaccaaaagtaaggtttaagatcttgatacatcttggtggtgccgagatgcagggaatatggtgtggtgtgaactttttcgagaatttcatttctaaattttgtattatttggaacacaaaccctggtcttgaacaacagcattccactgtctgacactgtaaagtctcggtttgaccagctgaaacctcttctctgattttactaactctggatcagtcagctgagcaactttaattcgttctaatagatctgattgcagcgtcaagttatgaagttttcctacaacaaactcgatgcttgatttgaccatgtcctctactaattgaggtgaaatccgaaccattctagttacctgcctgggacccttcctgctcagggcatcagccacta

SEQ ID NO: 353857 - DNA, 538 bp, Cannabis indica
ttttcagtttctagtttcgggtcccgaattttggtcagggtctaggtttgggtcctgcttctcgttcggttccagtttcaagtcacagggtacgagttcgggttgagtttgggtctgagtatgggttcgagtcttgatttgggttcggggggaggtttaggtccgtatttcggtctcggctagggtctgaggttgggtacagtttttggttctgatctgggtcgaagccccggtccctttcaaagatccgagtcccgttccagttcaagtttcagttttggttctgatctgggtctgggtatctgtccgggtcttggtttgagttcgagtttgggttcgggttctgttctatgtcccagatccaaacactgactacgggtcaggtccaagcatcgaatcctgaatcccaagtcccgaggtgggtcctaggtcatgatttgggcctgggtcgggtccttgatcctaatccaagttctgaggcccaagttttggtcccaattttgggtttgggtcccccatctatgtccaggtcctaggt

SEQ ID NO: 353858 - DNA, 645 bp, Cannabis indica
aaaataatttccaacaagtatgttcttaacattatacaaaaacaaactaaaaatcttgcctcttacttctagaatgaaacattggattttccaaaaacttatctcaattattaaaaaaattgaaacctaagtactgtgtgttgggatttatgccctaagacaaataattaatggataatatattagaaaatatatgaaatataattataagataaataatacattaataaaataattcttaaatatctaaaaatttatttttttttatatggagaatgtataaacttgtaaggacgtacaagagaattaaggttatatgaagatgaataaaacaagtaaatagtgtattaaactgttaggaatctttaatatagaactgctaagtatgatttactatacactatacttttagtgtgtgtaattttaatttggatcacatgtgtagatagacatgtaataaaggtcctgagtataattcgattatacacgactggatcaatatgtaattaacatcttttattaacgtgtcatttactatgaaagagttattcatatcacaacgatgatcattagtagattagcctgaatcctgagtatacatgaactcctatttgttttcattgagttatttgattcactcgttaa

SEQ ID NO: 353859 - DNA, 1305 bp, Cannabis indica
ttttttcatgaattcgaaacagcaccggttttgattgattctggccagcttctaaggtgaagtcgccggaattaatggtggttctctttttggttgaattttcgtttcggtctcgttgagttgctgcgtgtttacgcgttgcccagaaagcatgaattttgagttgaaggtgtgtgtaaggggtatttgtaaattttttttatttgagctatatatttatttatttggccagctaaattatttttataatattattatttttttgggataaagtaaaaaaaaaatctttttaaatattaatttttataaattttaatttaatagataatatatataactactaattaattataaaataacacgtaattataatcttacaaatgtttaatagcaataatcaaaactaaaaatattaattattcaatttttaaataaataatttagagatagaatggcacatgcagcacgagtagaagttcttttataatatccagtccactccggtacacctgttgacaaattttaaaagaaatacaccttgggttagtggaaactcaacacctgttaaaccttttcttagaatagcgccacgtgtaaatgcatgcaagtatctcatttatagacacgtagcacaagcagtgtgtatcctcctctaccaacatatatatgaatggatcagtttagtacaatctcacaacaacccaaatttttctgtcaagagattgataactgagtgtatactatacactatatctttatatgtttaatatttctttgttgaatcgaaagaactcaagttgaggattcttttgatatcagatttgattagttcggtctctatttttttctgtgaagttagttgatttggtcttcaggaggtaagagatcattttattttttttctagattttgtgttaagttattaagttagtattttgatgattatttatttaggggttttggtcttgttatttctgttggaaaaattctcattacaagagagaataggaggattacaatcaaaatactcaaaatacaaataaaagtatttcatcaagattataagaaatctagaaaagaagaaggataacacacaaaaagcttgactaaggctcaaggacctttgtcctaaaagtcatttcctccctcatatggacacttagggaaactctagaaatgctcttaaggatttatcaagcctcatatgctcagcctagtatctaaggatgagcatatcctcacaaggttctaaccaaacaaatggtttcaaccacttctatgcaagtgaacaatatgacctttatt

SEQ ID NO: 353860 - DNA, 1199 bp, Cannabis indica
atacatcaggagattcatgacggtggcaaccaaagtttcaagggtaactaaagatggaaagttacgcgatactggggggcattgaagtcctcgatgaactttggaaggatataaggaacaataggccagtagactcaatgagtgattttcttgactgtgctgaaggcttcatcaagctcgaagaagccattcaacgagcggaaggtgaacaaaaccctagaaagtcgaaagctccttctactggatcatccgcccaactcccccattacccaaataattcaaactcaagtggtaaatgttccaacaaaaaccacacgcaagggaattagaagaagggaaagttcgccgacaaatccgaacaaactccccgggagaatcaagcaaagtacactgcattcactatcttgactgaagacgttgaaagtgtttacatggcaactcagtcgatggccccatataagaagcccaggcccatgaagaaagatgtcaagaagtgggacatgaaaaagttttgtcgattccacggagactatggccatgacactaatgactggaacaacctgaagcgagaaattgaatttctaataaggataaacaacccacacttgctgaagtatctcaagaccgattagggtcagagaaacgacaataaccaagatttattacctccactggtagatggacagctgcaagtcatcattggaggcccgcatattgcttgagattcgggtaaagctcgggagaggtatgactgaacagcgcatcacaaacaagaagaagttatcctggccatggaagaaaggaagcccgaagttccacgagcaggagggcctaccataactttcaacgatgaaaacgctgtcaaacttagatttccacacaacgacccgctggttgtggaagtctagatagccaataaaattgtggccaaaagcatgattgataatggagcctcttccaatatcttgttcaaaactacttatgaaaagatgggactccagctcaaggatctaaccccatgtctcctgcctgtctatggtttctccagtcaaggagtcgcacctctaggacaaatttgtctacctctcactgttggaaaagctccgacgagcatgaatatcatgggacagttcctgatattggatgttcctttagcttttaacgtaatgctaggcaggccttgtatgacttaaaggcta

SEQ ID NO: 353861 - DNA, 576 bp, Cannabis indica
aaattttctcaaagaagataattcatacaatttctgttttaggagcttaataacatgagatgccgggaacatgttatataatagtggaatctaaattttcctaatggatcgaatatttgtttccttatagtattaattttgggagtgcttacagttggatccaaatctataataagttatagattaactgttcacattgaattaagggtacataaggggttaagagataattagaagggtaaaacaataattgtgaacaactctaattattaactaataattggacgacaaactacttatattgattatatgaatggactacaagtaagaattctctagatataattctgtattatcaaagagtgcaattctatatttataatagagtaataatagaattaataaatcagattattctattgatgagatcgatagtaatcacgtatttattaaagcttcaaaatataggtccatggtcccacagtcacctctatacaacactatataggggaagattttatttgataaataaatttgagtgagaatcaatttttatgagaaataaattcttaaggg

SEQ ID NO: 353862 - DNA, 780 bp, Cannabis indica
attaataaagagcgggattgtgtgtgagttgtgagtgtggagtagtacgagtagtagtagtgttagtagtgtagtaattagaaggagaagaaggaagcttctattgtattcgttgaaatcaaaatattctctatttgccttttttttatttttttaaatggtttctttattattattattattattattattattattattagtagtagtagagtaatttattgtataaatatttaagtttaacttttgatggtaaataaataagtttaattttttcggcaataatacttaacttatatttttggaatatagattagagggacaaggattctaccattagcatttttcttttgccccctcaccaaaaaaattaccgtcccctcactttaaatcctaggcgcgtcattgtctgtaggtatttgattgttaagtactaagtaagttgtcatatgacaatctctaattggtccagttcatgaatttttttattaaaaaaaaattaaattaaatatatcaataaaaaaattacacgtggataatgacttgacatttaacggtcaggtacttacagaaaaaatttcaaaaatataacttaatattattactgtcaaaaattaaatttaagtatttatttacaactaaccagaattatttatgccgcaaattactctcactattataatttttattcttttagtaaattcattaaataaaccagtcacaactagggctgtacaaaaaaatttgtaaactgcctaaactgaataacccgcccaaacc

SEQ ID NO: 353863 - DNA, 649 bp, Cannabis indica
tttttttatcaagaaagataatttctattaatcaaaccgagtccattacatccataaagggattcctgattctccttcaaaatagaaacttacagctcttttacatttttaagaaaatttttatctatactagacaaattccttttctgtacaagattaaacatatttttttaggctctctttaatgctactatctatacaactcagattcatatacttttttcttatgagaattgttaaaaggcacccctgatgtctagcaccctcctcggtatcatactgctaatggtgtaattaagtatcgagtcccacctctgtaccacatgcactaagtagtcgtcccgaactagtgttggtagagctgaactgtacaccgagtaccgctgagtgttgtaccacatgcactacgtactcatcctgtactagtgttggtaacactagatcgtaccctttgaaaatcatatattatatcaatgcactctttactgctaccatactagtgttggtagtatacaaatcacataacatggaatgtaatttacatacatacatatacacatatacgtattttatactaatcttacctcgtttctgctgggttgtatgccctaaataaaactatttacaatctcattagttatcaatataa

SEQ ID NO: 353864 - DNA, 975 bp, Cannabis indica
gggaaacaatcagcacttctttattgattaatcaggaatgattacaagtgatttgatcacaacagaaaggatcaattacagaaggagtctagctcctaatcctctcaatcactcagtctcaattctctctcactctctgatcttgtgtctcaattagtgtcatgttcgaattgtcttggtttagagtttatataggtgtggtacataaagagaactttccctcctaaaccaactaacaaaactaacatttgaccttgtccaatccgagagtgccacatgactgaatattagacttaagtctaaaaatatcacaatttttattttcaattctagacatttcctttcacacatatatatatatatgtgaggttaaatacaagttgtttccatttcaatgttatgttatttcaatttcaatgctagttgtttctatttttttaggttaaattatttctattttcaacgtgagttgttactattttcttatgatatttgtctccatttcacatagatatatatgataattgaatgcaagttgttttcattttgaacttttatttttcatttcaatgtgatttgttttcattttcaatgtgtgttgttttcaattttaatgtgagtagtttctacttttgatgatatttttttcatttcaaactatagtttctattttgaggttaaattgtttccattttcaattagtgtttacaatttcattgtgagtcgtttttatttgagattttttctataataaactaaaaatagaacaaatttacatttatgacccaaaaaagggaaataaacaaaaatagaaactaaaagttgttaattacaaaaataccagccaaggaaaacggaagcctctatcttcttcgtgacccagccgacgaaccccaacaacccattctcaaccattttccttccaaaacaaggaaaatgagatctaaaaaaaaatgtagatctcaaggaaaaaca

SEQ ID NO: 353865 - DNA, 549 bp, Cannabis indica
agggcacaaaacccaacatgtggggaccggggtaagagtaatgccaagtggcacggtgtactcctctgcgtcgggaggaatccctgagtctgagctaacggacagggtgcccttcctcctaggcctcttggaagacttagcctcgaccattttacccttccgcttgcggtcaaggggagccacaatctcgccctcctcctcctcctcctcctccccttcctcatcgatcaagacgattgtgcctaagggggcactggaagacgacctctctggggtcatcagttgggtaggagccggaggtagagaagagtctgggctataggtctcggcaagatttgccagaaggtcttccattggcctggctgctgcgaaaagaaataaacaaagtgttagaatgactataagaaggcatgcgcccaacagcaaagcaataaagctagtcctaccctgactctctaactcagccccagcaaagtcttgaactacaatgctagcttcgtcatccccaagaaagctgtccgagggaagaaataagctagaagacaagta

SEQ ID NO: 353866 - DNA, 1164 bp, Cannabis indica
gaggcagatttgtcttttatcttcttagattatgacgacataataaatatttgtgagaatattagtttatttaattttttttttcaattattttaaattattacattttttttttttctatttagctttaatggatactcgatgggttctgaatggttcaattccaagtctagctagttttggatcgtagcttggccaatgaaaagattagtagtgtttttgtggtgggtgagaaaacttgggatgttgtcaaagagttgtttgatgaggaagtggcaaccaatattcttggtaatcccctttctatttggtttctaaggactactggtattggggttttgacttttttggcaagtataaagttaagagtgctttataattgttacagacaaattgaaatggtagtgtgttgggggaggttgtggcgttttggaagaagttttggcaactaaaacttcctccaaaggcaaaaaaatagtgtatggagggcgactagtgggtgtgtttcgacaagagttcagttgaatactaaatatgtggatgtttctttggtgtgtccgatttgtcatggggcaggtgaataaattttgcattggttagtttcctctggttttgcacggaattgttggtggtcgtgggtttggctatggttccaattaatgcagggttgtttggggactgattttttcatttgttttcacagctgggtgaggaacaaagtgttcaagcgatgatggtttgtgtaatttggttcacacggaatcaactcttgttgaaatgtgagaaatgtcgggtggagttcattgtcaaattggctcgtatcacttttgatcaatggagaaaagctcaagaaagaagcttgtttccttcatttggtaattggtatctttcggatgaggttgagctatactctaaactaggttacgaaaaaatcaaggtgaatattgatgttgcattgtttgacaaggagggaaggcatggttttggtagggttgttcgagatcaccacaatcagattgtggctggaattttgggtattggtacaagctgttagaaatttgaatattttgtcatccactttcggtggtgttgttgaggagtgtatcttcttttggtgatttttttttatattttgtcaaacgatctgctaatcgggttgctcat

SEQ ID NO: 353867 - DNA, 769 bp, Cannabis indica
tttgctgatcgtctaatgaaaaaataattaacatttgggaggatagataacaaaagttggcagtctttgattaaaaggccgaaagtggacttcattgcttggttgcttcgaatagcttgtactgaaacaagactgtccgtctcgatctaaacatgttgccaattattggtctttacccaactgagagcttctttaatccccatggcttcaatgaatccagctgcatatcttccaccatggcaaccggcccgtgctgcaacttgtaaaaattaaggtaacttgtatttaatagtttcctattttgtatttagtagtttcccatttagtctcatagctttgtatataaatatatactattttatggaatgcaacacacaatttttttcaccattctctacatggtatcagagcattagagttagaattataatttgtaattcgaaattagagttcataagaaaaaaaaagggagattagggtttgagcttaccgttatttttcgaaaaccttatttaaagtgaaagttttttctcaccgcccacatcgaaggactgccctgctgctgaactacaaaaccccaaatttcggtgtccagattcaccgcgtgtgggccccacacaacgccgtttgtcgctgcacagaatcccacgtgccagcgcgtgagggcgcgtccaacatcttctccggtgacagtcgacacccgtcacactcctggcccttctccgtctccttgtttctaacctaaaatcacctcagtttcagcaagaaa

SEQ ID NO: 353868 - DNA, 798 bp, Cannabis indica
ttgaagttgttcccattttccttgagggatcgggctagagcatggcttaatactcttcctcccgattcggtgactaattggaatgacttggctgaaaaattcttgagaaagtactttcctccaacaagaaatgcaaagtttcgaagcgagatcatgtcctttcaacaattggaagatgagactactagtgatgcatgggaaagattcaaggagttgttgaggaagtgcccacaccatggtattcctcattgtatccaacttgagacattttacaatggtctcaatgcggcctctaggatggtgttggacgcttccgctaatggagccattctttccaagtcttacaatgaagcttttgagattttggaaaggatagctagcaacaactatcaatggtcaactaatagagctcctacaagtgaaaaagtagcgagtgttcttgaagtagatgctttgactgctcaaatggcctcaatgaccaacattttgaagaacgtgaatatgggaggaagtgtacaaccagacgctgccattcaaaggacagaaatttcttgtgtgtattgtggtgatgggaatacttttcaaaatttcccttcaaatccagcttcgatttgctatttgggtaaccaaaacttcaaccggaacaacaatccatactcaaactcctacaattcggcatggaagcatcatctgaatttttcatggggaggtcaaggagcaagttcaagtggagtagaagcacaaggaaaacaatcattatacattcaggggtggatatgagttttcgttatattctta

SEQ ID NO: 353869 - DNA, 685 bp, Cannabis indica
gagtgagtatgaaaatgatttttaaatgagatgtgtataataagattattaagatattagaatccacaaaatgcaagttcaatagtatttataagtatattgacttccaagttcatatatataattgaaataaatcacattatattttccaaaatatattttctatttaagcacaagtttctttcaaaaaggtaggatttttcttcacttataaaatgtataatttctattaaatgtgttacaatttaatgaaaccacacaaaattaaaaaaaaaactatgtttaagcaaaatatgatacttatgttctaagaattagatgtaaacaacttaattaaagacatttaatcaaagagtattatatttttgcatgatgaagatctaagtaggaatatgctttaacaatcaaaaatacatgatattggagatgaaaagacatattttttttatagaaaaatccataactttataacacaaataggaaattaacatacaaaaataaacactatctagttacattttgcttcatcattatcttaataatcttgaaaaaagattagaagctcataaatagattgaaattacaaaagataaacatacttgacatgctcttcaaaatgtaaaaatggtagaaagaaaatggtaaaaatgaagagtgtggagtggagagtgaaaggtgtttgaga

SEQ ID NO: 353870 - DNA, 439 bp, Cannabis indica
tgaatagtctttcttgacttttttgttgaagtatcttgtaactcggtgctggtatgctgcgttggtgattagcgattcagttcgtctttcctcaagtaaatacaaggacaattttaaaagttcctggtattcttcttgattataaaattctcttttgtgagtcgatatgttcacttcaataggaagcattgcttccgagccaaatactagcgagaacggaatgtgtcccgtagctgtcttctcggtagttctgtgggcccaaagcacctgaggtagctcgtcaacccatctgcctttggctttggcagcgtctagcgttcttcttaatagtatcctttagagttttattaattgcttccacttgtccatttgcctgaggccttgatactgacgagaagcttttgataattttattcctctcacagaattcagtgaacaa

SEQ ID NO: 353871 - DNA, 630 bp, Cannabis indica
caagaaaacgattgagaaaaccctatctataagttcatggctggtctcaatgttgagtttaatgaagtgagggggaggattattggaagacagcccctacctccaattggtgtagtattcgctaaagttagaagagaggagagtcgaaggagtgttatgctgggaaagaggacacctacatctgttgttgagagttcagcgctagccaccatgggcgcaggatataacaacaccccatacgtgcagaaaactgatgagaagccacgtgattggtgtgatttttgtaataaacctcatcattctcgagagacctattagagaatccatggcaaaccagcaaactggaaaagcaaggcaaagagagaaaaggcaggtcgaaccccttctgcacatgaagctgagtccagccccttcactaaggagcagatgaatcactttcatgcattgttgaacactacctcgttctcacccggtattcctactgcctctattgcatatgcaggtaaacaaagtatcagaaataaatgcttaaattgttattaacaatcatccactccatggataataaattctgaagcttcaaatcatgtgacaaattcttctaaattttttgaatcatatataccttgt

SEQ ID NO: 353872 - DNA, 597 bp, Cannabis indica
ggcatatatttttggaggcagagtttaaaaaagaggtcgtaattaacactattatacattgttaatatttgtaatgtatcataaagtttcttaagtttttcttagaaaaaaaatcttaactttgtcactataaattaaattaaattattttgaataatctattaggttaataatggtagtggtctccaagaaacaagagtcattttattctcatcttctcccatcaagagagaaaattagagaacttaaatcttgtatttttggaagatcattactgaaaatcacaataaaagtcatctctacaagatagattaagatcatcagtatctatggattaaggtacgcttctactatttgtgttattctctttgaatcaacaaatgtattctttagatttatgtttatgcgcttataataatatgtaatatgtttatttatgaaatcgaatcttattattattgtatattttatgagtgaaaagaattctaatacattctcctaattatcttgaattggttggatatttgatcaagatttcaactgttgaaggtgtaggatttttacccttttaccctacaccaacaagatactttaata

SEQ ID NO: 353873 - DNA, 531 bp, Cannabis indica
tatggaaatcgtgattaattaaaatttttgctttttaattaaacttataaatatttcatacaaaatactgtgggaacccatttacaaaaaagctttacaaaggtaaattgtctaatacaaaatacttgacgcctagcatctaattacaaaaaacactattgtcccgaggatcgtatgctccaggcctaaccgcctcgagatgtacaatcttcaccggctcgctgtcacggttccttagccttggccttgcccttacctacacataaacatagcacggtgagtcgacagacttagtaagaaaagcataaatcataatcatacataaatcccgggttatgatcagacgcccatacccctgaccgtaaccctaactgtcgtgtcccacacgatactgagtcccgaacgttcataagacggtactattgacaagtaatagcctatactcagttcactggtcatactccagctgctagtcatactctagcctaactgatgtgttacggtatcagcctatactcggttcactggtca

SEQ ID NO: 353874 - DNA, 468 bp, Cannabis indica
tatgccattgcgaatggtgtctgtccggtttccatttctcagttgtgtgatatgaccatagaacttcaggaagctcttttgaccagtttcctttggcatctttgagattttcttcagtgaatccttcaaggtcttgttgactgcttcaaactgacaatttgcttgaggatgcgccattgcggaaaaacttttgatgataccatggttcgcacaaaaattagtgaaggattggctgtcgaactgctggccattatctgaaactatcttgtgcggcagtccaaaccggcagattatgttcttcacaagaaagtcttgaactttgtttgatgttatggttgcgagtggttcgggttcactccacttagtaaagtaatcaaccgctaccactgcatactgcactcctcctttacctttgggtaattttccgattaggtcaatcccccaaatggcaaagggccattgactttg

SEQ ID NO: 353875 - DNA, 735 bp, Cannabis indica
tataatttaatatttttatacatttaattttataatatgtgtttgtatttttttagtatactagtataatttttaaatttttttaagttatgttttgtataataattagtatattgaataatatataatgtgtaatattttaatttttatttaatttaacattcttagacatttaattttataatatgtctttgtatttttctagtatattagtgttgaccgcaaaaagtggccaaccgacagtaaagttgtatgaatcttatgtttgtcacgggttacactacaagaacaataaagcaaataagacaatgattttttaagaggttcggcccccgtagttagcgagtaatgacctacatactccccttttagttgtattgataccaagagataatactattaaaattactattggtggccacccgacagcgaagttgtatgaatctgatgtttgtcacgtgttacactacaagaacaataaactaaataatgcaaggattattatagaggtttgacctccttagttagcgggtaatgtcctactccccttttagttgtattcataccaagagataatactattaaaatcactataagtgggatctgatataggtctctataaggttacaaagaatggatcacgtaggccagtctctattgagagagagatattgccttggtgacgtgtgagacagaggaagatataaggccctttgggagagagagagagagaga

SEQ ID NO: 353876 - DNA, 671 bp, Cannabis indica
aatagactcaaacttgttctcgttaaatttagtttttacagaaattgaattttaatatatttttttatatctaaatgaattttttaacagtaaataaataattttttaaattgcttaattggttttaaaattttaatatatatttttttaattttcttaatcattcgaaatgatttttttaagatataatttttttttttttagatttactaaaagaaaatgttgaatttttctcatttttatttcgagagagtacgatttgttgtgataaatccaacacgcaagtatacgtatcgttttaacaggtaatactcaagtaagtgagattgttcccacgagaactatagttaagtaccaatcaattaatatcttttttttatttgggaatcgaataaataaattttgaactaaataaactcaacaaaattaaataaaacaaacaaataaaaggtttaacaatggatgtaaaattagtgatatgatttcaattgctttgattatccaaatgttaacactaattaaccgttcttcttcctcctatgtgatgacagattataaattaacccaaactcttttcaaatcataaaggtcctaaattgcatgtcaactactacatctctgagatagaacaacatacgattcgcattaagcaataatctagaagtcacata

SEQ ID NO: 353877 - DNA, 567 bp, Cannabis indica
gtcctgttcttgggtcccaatccgcttctggtttcagttgtagtttcaactcacggggtacgggtcgagtccaagcatctagtcccggatctcaagtcttgaggtgggtcttaggttcaggtttgggtctgggtcgggtcccaaatctcgatccaagttcaggtcccagtttggggcccaattcctgggtctgggtcccccatctatgttggggcctaggtcccaatccaggtctaagtttatgttccggttcaggttcaggtctcgggtctcgattcgagtccaggtcttggtttgggttcaggttcgagttcgggtcccagtactagtctgagtctgggttttgggtccaaggtccgagtttggttctttggtcctgggtctgatctcgatttttgggtttaggtttgggtccgggtcccggtcttggtttaggtcgcagtcttggtttatgtcccaggtcacaggtcccgttccaggtccaagtcctagtatggattttggtttgagtttgggtcctactacagtcccaggtctgggttcttgtcccagtgctggttagattct

SEQ ID NO: 353878 - DNA, 579 bp, Cannabis indica
tttttatttttatttaaataaattgtagtataagtattaaaattttaagtttgtaaggtgcataaatataataattttttttagcggtataagtatttaatgtttttaaaattataaatttctaattttatcagtatagattctgttttaaatttattaagaatatttaaaggtaactaatagtgtctaatactatttatatattttcgttcagaccaaataatttaaaatttgagtctatttaagataataataaagcttctactgaccgacagggacggagggactttagcccatgtgtgggctaaagccctcactcaaatatatacatcaaattttttatatgtagatatatacatatattaattcactttgctcaatttattaaagtccaattcacaaaagccctcactcaatattttaatcatgattcatgagcctactcttattctaatcaagcccattttaaaagtagtccaatacaaataataaaaaaaataatactttattaaaaaataaaataataccattgacaatattttattttatttttgtcaacagtattattttattttgttg

SEQ ID NO: 353879 - DNA, 708 bp, Cannabis indica
tcctaatcacatcaatcacaacatgcataagtgacacgctaaatcacaatcgggacttagttttaaaaaacctatctattgcaacttagcatggaaataccctaaactagcatggaattaaccaaccaaagctctgaaactaacacgaatcgacaacacgaatttttcagggaacccagcagcaaatctgggtaaccgattttacaagtcctgtaaaattggttaaccagtttacaccagataacccaaaaaaactccaaaacctaaccaaatcgattcaaatccatactaaaccttccaaacctacatattataccccaatagacatattccaagcaataaaatagctaccctagctcagaatcaaaaatcaccattaaagagccaagcttgagttctaaaactcaaagcttgctcaaacctaataacagcccacaaaacaagcttaattcaacatatctaaacatatttgaacttcaaaaatacaattcaaacatcaacatcaacaacagtagctcaattcacaaattcatgcaaaatccataacttgaaacttaagaaaactagagagggagtttcttagagacttaccttcacttagattatcttagaactgttggaaatcataggaattgatgaacaaaatcaaaaccctagctggtctagggggttcgaaaaagagagagtttggagagagagagagagaga

SEQ ID NO: 353880 - DNA, 672 bp, Cannabis indica
atgcagttcaacgatcttttatatctattgaactctggattatattcataactccacatgatctctatatcacttaggggtggattaagcaattgacatatgtagttcattttgaactctagactatactcaatacaccacagtatctctatggcacacatatttcaattgaacatggatgtaatataatgaacaaaattagcaaattatttagaacttattcttgatcttaatttatgttccaattaatatattactcttgtaatagaaattgataccaataaaagttcttggacaaataatcacaataccttatttgagtgggagaattttaaaattctaagcccatcttcatttagatgacacttgtgataggaactttaaaatacaactgagaaagtaaatctaaccattcatatggatagcaataacttatcacaattttgaggaaaacataggagaatttgcaagtctattcgaatgacttaggcaaaattcctagtcctcatgaaatgtttaatggtatctctaatgattacttaatcttaagcaagtattttacattaatgttaatactagattgatgtgttgatgacttagtctagaagaaatttctagtttcagactaagataatgttgggttttatgccctatataaaactcatttcaata

SEQ ID NO: 353881 - DNA, 654 bp, Cannabis indica
tccatgggtgtaaggacccaatggaggcttgaagcggggacgttacaatctcttctctacaaaacaaagacattttttccttaagatatgaatacaattttaaatgtatgaaagagatattaaacctagctgcaatagggtgtatttatatataatcaatttacaccttattcacaacttacacacggtctgaacaagaccctagcccactagaaaattccctaaaataattattcaatcagcccaggaatttccatttctgtacctacagaatcgtgggcagtaagtacaactttccttatatagaaaaataaagtttagctccgattttctcttcaagaattctgatctaagaaaatgggaaactcacacaagatcagaatataccagctggttagataaaaaagaaatgagtaaccaaacttgccattttacctttccaaaaataggaaagctaggcaactttccttccaagtttggatacacaaaataaggaaaccaaatcaaacatactagccgaaaataataataaataataaaatatttttgtcaattaaatatgctaaaaatggaattaacaatcttcccctttggcactttgattaacaaaatattttattattagaaaacctgcatcaagtgttagaaaccaaa

SEQ ID NO: 353882 - DNA, 680 bp, Cannabis indica
aaatgacccaagaaaaatagtattctttggcatgatacccccaccgggtggaagacatcctaaacttacaaaggcgctcatcgaatcctatgggcctacattgggtatactctcggacagaggggacatgatgaattactaaaggagacttaccggaacctgaagtactggcatctggagcaccagtgttaggaaccggaaccgaaggcttgggcatggagggcctccgctccggggcagcttccaggtgaagggtcctcccagctgcagcctgggccttaatgtaagccagctcctattccgtcctgaagagataattctgataccgctcctcagccgaagtaattatatctaccccgagcgcccttttcgcggtcagagtccttacgttcggacagattaccttggaaaggttaaagtcatccaccgactgactctcggatattagcttggctttttgacagttctctgtcgtgactaagtgcccaacgttgagggccttcctgtcgtaagtagagaaagtcttagcctgctggaggaatacttgagtaggtgcggtccgcaggtatggagggatcctaacccactccgtaagaagctctgggaggtccattgcctggaaactcgaggaaaagaagcggtggcggtactccttcacgtgcttctggtaattaaaaggg

SEQ ID NO: 353883 - DNA, 517 bp, Cannabis indica
gaatcgctcaataattaactattttacctaattaagcagtaaattcacgaagcatgcaatttatttagcttaaataaaaatttaattaagatttatagaaatagattaatcttggtaataaatcaaggaagcatataatttatttaacatagtttctattcttcatcacaattaagataccttcgacaatattaaaaataataatttatcacaaacacatagaatcttagactattaggtgaatagtaatcttaagatgatagtagattaaagtaaaatctaatctagtagtcatctaaacaagattaaaataataactatgaaattgaacatagaagaatataagcaatttgatataatgaaactagaaattaatatttaataatgaaattaagaattcatatccggattttgaaataaccttaactaaaagaaaactactcggaactagacattataatgataatcaaaataaatagtaagagtttaagaaaaaaaaagaactatgatgaagaac

SEQ ID NO: 353884 - DNA, 458 bp, Cannabis indica
aaaactaaaactactatttactctacacaaacaaaaaaaaaaaaaaaaaaaaaaactaaaaaacggtaatttgggtgattaattacaatttataattaaaagaagaaaaaatgaaagaggaaatttattttagatagattctcttctttttcacgtgatttgtagactagaatgtcgagccacatatagctcttgtcttgggaccatttaataaatatttcaattcattactagttattatgtaaattctaaattgatagttttaatttcgaatatgatattatatggaatttcatgcaccaataaaggctttttgactctacgtatgtctatatacagaaatatttatctttataattaatacatttttttttttgtaaaccattataatgaagacatttatcctaattataatatataaggaacactttttaatgggtattactcataaatagtta

SEQ ID NO: 353885 - DNA, 696 bp, Cannabis indica
gataactaatcagattgtaaagagttttatttagggcataaaacccaacagttatatccttgtgtaacattttagagctgtgcttgtaaattgtatacttgagcatgattggcataggaatatgtttgaacaggtttaaggattgattgcataaaatttggaagagttttgtgcactttattagagttcttgttaacctgggatttttgcttaagttttgctacagcaaaacgcacagtttctgctaatcatagggggattcaatagttcaaacctttcacatttcacaagcttacaactcatttttattttcatcttccatccacttttgagttagtttgctcattttcttgttcatttagttgaatcattaatcatttcattttagttcttaggcattttgtttggtaattaacttttgcaataggaattttatttttcaagtccttgtggagacaatacttattacttatcattgtttgtgactacgtgcacttgcgtatatctaattttagcacttgcggaaatgtcctcaccatgacattcttcattgcatccaaatggaattattttaattaattaaattttacttgcgtatatcacctatcttgattttcctttgactaattaattaaatttctaataatatattttacttcatttattttagttaatcattaaatgaaaaaatcattg

SEQ ID NO: 353886 - DNA, 585 bp, Cannabis indica
ttttgtaaatatcttcaatattgtctagaatgggacgggacttggtattcgccatttatttgggtctacaaatacaatgatgcaatcggattggagaaactctgtggtttgggttacggttcggtcgtttgtctacagagccaaaatcatgtatgttcgtggtagaaggctaaaagctcaaaatgctctttaagtgggtaccctggtgttagctctccaccacttctggtaccttggtgctaagtgagctactactagtcattagagctagtaggacgggcatatgagaaccaggaggggactcatatgcctccatgagttagagtactcatggacattatcgggccgacccggtagtgcgtttaagaagctaccagaggttaacgggtacgtttcccttggcttgccggtgtgctgcttgcacaagacgtggcctaaacttccaagagacgttgtggtgcgccttggccacgagtctcaacacgagatgacacgggtagtcattcgtgggctagtttgcatacgcgcatgggacggatgcaccatgctggaaagggacagaggtctaatgtatgcaactagttt

SEQ ID NO: 353887 - DNA, 896 bp, Cannabis indica
aataaaacttaatgtaagcccaaataaaaagtctaacagagtcttcatgatggagccgtcactagactcgtcgattatcgtctaatcgccgtaaaagaagcttacgtcatctgtcaaattctcttatggagattctgatacgttttccccatgcagtattaaatgcgaaatgactactcgaacgatctcttttcctcccggagatgcattgttatatttccaagagtaaaggcgtgcttaatgctcctctccgagaggctcactccgtgaggtgcacttctctgtctatgacttaactaatttttgtgagtgggtgttctttgagatctacgtgtcatacgcagtcgctgccacgtattttgagaaaaatccgaaacaacatatataaatagagatagtgagaaaaaaagatatattatagaaaaataaaaaaaaaattaaatttatatgtatatatataaaatggatcatattaatataatatatattatatataaaattaaagatgaattttagtcaaaaactatatatttttgtattttttggtagagtcgtgaactagtacaaattaattaagactaaaaagttttacaaattaattacatgttacactaaaattataacattatgaatcttttttctaaaacatatgtacgcgcgtaatcaaaaaaagttactaaaggataggaatcaaaaacctaatactataatgggcaagactatggtaggacctagcaaaagttctctaccggtagggaacttttttttaccattgattttagatcatgtggttattatgatgtaaggtatatactcttacgataagactgcttgtatacaattaaaagtttatacatattataataatatttattttttttaaaaaaataaaataa

SEQ ID NO: 353888 - DNA, 529 bp, Cannabis indica
gataaatatggcacatttaagtttgaccaatttatatagtatttttttgtgtttaggtttttttatggtatttgatatgccatatatatgtaattagatttttaaatcccatatttaatgtttttatttgtttaggaagttttatttgttattgatgccggaaagtcaccggagtttgctgtcggtgctggaaaagtcatcggagtagcggtcggtgctggaaaagtcaccggagttgctctaggcgccgaaaatttcgtcggaattgccattgtcgtcggaaaatcactgaaaaaatcaccaagaaaaagaaactggtttcttgattatttttccattgacaatgccaattctgacgctagcaactactccggcgacttttctagcaccgacagcatacttcggaaaagtcattagaattggcatagtcgccgaaaaaattaccaagaaactggtttctggtttcttgatgaagaaaccagttttttggtatttttccagtgatttctttgatgacaatggcaattct

SEQ ID NO: 353889 - DNA, 891 bp, Cannabis indica
gtttttaattttcgtcacacttttttcttttatctaacaaactgattttatctttaaattttctttgaatgatatatttgaagaggagtgctaatttcaacctcctattacaacctcttagtcaaccttcacacccgaaattacatgtcggaatatttttttcataacagtatttattttaattgcagtatcatacctataaattttttaagaattttaaataatttacaatgcctaaaataaagtttttgatatttttattttcggtactgtaaaccattcaaaaatttacaggaatgcagaaatagaagccagtgacatgttattctaaattggttttgttctactctatctatctccttaattctcttatatctccttaattctcttatttttttttttaattttttactaaatacataaatattaattgattaattaattaaaaaagatctaaataaacaaatttcacatatattatgtgttttatgggagctaatacaataggtattgtacattttacctattgatatgtataatgattttgatttaattaaatagcttaaattaactcttagaatctacaccataattaatattattttttatttataattaattttaaatattaataattaaatccaactaacaatactccaaagttaactccaaacttataatttttcttacttatttacgttataactttttataattttaatgaattatttttttaatttgaatttatatattaattttattttctactcaacaataattatagctaaaagagtacaaaatattcaagttatttaatcctaaaataatcaatacaatcaataatataatcatagagtaagcggtaaaattctcttacatcaactataatgt

SEQ ID NO: 353890 - DNA, 730 bp, Cannabis indica
aaaataaattaaaaaaattaatcatacataaatatatacaaatcataccatactcttcttcaactcataatcatgacaaacagcatccactttctctgatataattaacatctcagcagatgtaataccatcgtcagtgctctcactatcccttttagatgcttctataacattgtcatccccaacaatttttttatcttccaacaaatcttcaacattttcagaatgggccaacaaggaacctataatatcaaaacttggacaatcattaccaacctgaaaaagcaacatattaattactaaatcaacaaaacaaaatacaaaagcataataattgcaaaaaacaaaaataaataaaaaacaaaaccttatccatgcaatcctcagcaccttgatcaccagcctgatcagctacttcattaacaatagcatctgatatttgtcttatttcctgaaaaaaaaaaaacagcaaaaagatacaaatatataataaaacctaaaaacacaaataataatacatttcaaaacaaaaaaaaatatataaaaacaccttataaacttcagcaccatcatctttaacaccacccaaaacatcaacagttgcaccattacgctcaccatcatcctacaatgacaaacacgtacaaaaaaaattatacaaattacaaacaaaataaaaattgaaaatttattagaatggaaactaaacattatattatatactaaaata

SEQ ID NO: 353891 - DNA, 623 bp, Cannabis indica
agaccccttaggttatgtaaattatatgctagacttaagtagagagtgaggggggagagttgaaggttaattgtgatgctgctcttttctctggcgaaaggagtcatgggttgggttggattgctagagatcatgctgggttgtgctttgctgctactgcaatcaaactccgaggtgaaattgaccccgttgttgttgaggcgttgtccttgaaggaggctttgagttgggttaaatcctgctgggaagacggtaggattgttgaggacttttgtcctacatcggtgattttggagtcggattgtcttgtgttggttaatgctattaatagcaagagctatattctttctcctcttggtcttattgtttcggattgtattaatcttatacgatcattttctgattttcatatttcagttcagtttgttaaacgatctgggaactaagcgactaactggttagcttgttcttctggttcatgtcctgatcgtatttccagtagggagtctgtcccttctggttgggaagctattttgttagctgatttgctttaatgaaagttgcaatctttgtttcaaaaaaaaaagtagagagtgagggtatattaggcaatccactcgaaa

SEQ ID NO: 353892 - DNA, 659 bp, Cannabis indica
aaaaattttggcatgaaagatactataccaggtgataagcttgtagctaaagaaaataaggtgtctaaattattgccctaaaagcaaccttagaattcaagaaatatagaagatttttaatttacattggaatctaatatatgctcaagcatgtatgtatttgtacttatacatattaagaatgttggatagatatttaagtaaccatataaggaactttcggtatgcagccaaataagctataaggaatttaaggagaacaaaatactatatgttcacttatcagaaatcagaaaacagaaaatgttggagatcattaagatttctgattctgatcttataaagcttttagttgtgagattttttgtcacatatggctgaaaaattaagaatggtattgaaagctattaaagatatattttgtgacaataaatcaatcaggttgcattttagtaacaacatgaactctataaggtcaaaggcacattgactttgagctaattgttattaaaataaagttcagagtaataaggtgtctatagaacataataaggacaaacaccatattttgtgtgatctggatcattaagaatataccacttaaggcttttcaggagcttattgctcatataccacttaaagtttagtacagcctttca

SEQ ID NO: 353893 - DNA, 755 bp, Cannabis indica
tggagaaagaacttacagaaacttcgttgccaaatcagtccatgttgctatagaattctgtggcaaggagatcaaccaactcttggctcgctctctcagcgagaatggaaaaagccttaaacgaatggactcatcactaactccattgactttgaaagtctgacataactccatgaagttagacaagtgcaggtcggggtcttcagaggggagtccaccaaactggactgacgactgcaccttttggagtatggctggctttatctcgaagttattagcctccactgtaggtggtcttatacaagactgaacccccgtcaatgttggaagaatgtagtctctcagactacgaccgtttgactgatcttcaatggcacctccattattaccgttgttgccaccattattaccgtcattagcattatcagccatgacttcttctgtttcagggcttgctgaaattctttcttgcctttttcttctatttcttctataggtattttcgatttcaggatcaaccggcagtattacactttgtccttgacgtcgcatacacctttaattcctgaagtaaaataagacaatctaaaagaaacagattagcaataagcagaaagaactaaccaaagtagaatttaatttaattttgtaatatcaatttttaaacaattctccggcaacagcgccaaaaacttgttacgaaactatgaacaatacgcaagtgtacgtaatcaagtagtaaactcacacaggtg

SEQ ID NO: 353894 - DNA, 521 bp, Cannabis indica
tatcagagcgggacactaaactcttagtgtggtcctataacggttttgtgtaaaatgtcattttttgcagaaggaagttcgatttctagaccacctttgcttaataattctaattatccttattggaatgttaaaatgagggccttcatcaaatctcaaggtgagaaagcttggaggatggttttatcaggttggtcttctccagtagagacagattctgtaggtaattctacaattaaatatgaattggaatggtctattgaagatgataagctttctgcctataacagcaaagcattgcatgctatatttaatggtgtaggtgagggttatattaaacttatatcatcttgtgaatctgccaagaaagcttgggagatccttcaaactcagtttgaaggaacatctgatgttaagcgctctagatttattatgcttcaaacaaaatttgatgagcttatgatgtcagataatgaaaccctaactgaattctataaaaaactatctgatattgctaatga

SEQ ID NO: 353895 - DNA, 886 bp, Cannabis indica
gagatcttttatgatttttggaaggctaaccttcaggaaaatttcgattagttgggcgaacccaaatacatgtatctcgagtactgcgcttcccaagttgcttatggtgaacccgaggcgactacttctacctctggcatgaatgttgatgttccttccgcttagacaatagatcctccagatcctaccggcccagaagactcgaactgagagcctgggactccagctgtttaaatgcttctctttttatctttcttttttatatatatcttattcggccataaggcctttttctaagacatcacgaccgaccaagaggtctttaaacttggaattatttttcattttatggacaacaagctgaccggacaacttttaatcccggtattttgtgcttttgttatcttaatgaatttcattctctgtttataatcatcctgcaattgtgtttgttttatctttaccaaatgctttgtacaagtataggtgcccccaagtgaccgagcagacttatgacttttggtcacttgttttttacaagtatacatttttatctgttcggggtctttgaccaaaccttttgtacgcactggatggtaaattagcaacatgttagtaatttcgactcaatttgaattttgaaataaacatctttattcatttattgatcgaaaatgtgtttgttaccgtaatcacttacatcagagctatttgatctaatctgatcttttagcttaacatgaaataaaacaaactgcagaaattagaaattatactttaaatggtggtcaagccacctgagtactttttcatttttgtcgaaacctttgagcgtagtccgcccagcaggcccctaaaaagtaaatgttctttcagtacttagtat

SEQ ID NO: 353896 - DNA, 931 bp, Cannabis indica
gccgaactcccctcccacactacacacccatccataaattttttttctcttcactcattctccacacattttcttaacttcattacactataatatactacactacaagctattctacctattttctttaaaatttggagggagcatcatacacggagcaacattctacaagcaatgggtaattttttttgtttgtgtaatcttgtttgttgttgttatatttagcttagaatattgttttgatgcttgatttgtggattgttgctgttattttgctgtcttttgtgttaaaatgtttgctgcctgtgaaaactggatttttcatggtttctgcaattttttttcgtctggcccgatggggtctgatgctggtctgatggggggctcaatgccttgtcaaaatagttgaaaggggtgaatgcttgataggcccgatgtaggctcgatggggtgcctgatggtaccctaaaattttttagttttgttgcttttggggtcgggctagatgggtgcctgatggtacccctaaaattttttagatttattttttttgggggtcgggcccgatggggtgcccggtggtacccctaaaatttttcatttttgtttttttggtgggtcaggtccaatgggcctgatgggggcccgatggcaccccttaaattttttcagttttgtttttattgggggtcgattccgatgggcccgatgggggtccgatcaaccccaaaattttgttttttgtttaatttttgggatcgggcccaattttgtccgatggtagtgtccgattttgtccgattattttcataattattgcaatgaaagattttgggtaacttttcggtgagatttttgttttaaattgtaattgtatttttttttaaaatgtatgtgacaggttcaactgttaatacgtgtgttatgtata

SEQ ID NO: 353897 - DNA, 1187 bp, Cannabis indica
tataatcaataatgatgcaccctcccgaccgaaaaacatcattcatcactgaacgggggacatactgctacaaggtgatgcctttcggacttaaaaatgtcggggcaacgtatcaacgaatggtgaacaagatgttcgcccaacaattgggacttactatagaagcctatatcgacgacatgttagtgaaatccaaagatggcactgaccacgccgatcatctgcgagagtgtttccagatcctcctcgcccactcgatgaagctcaacccagccaaatgcgctttcgctgtcggatcgggaaagttcctaggtcatctagtaactcgacgaggggtagaagtgaacccagaccaaattgaagcatttcaagcgacaagacagccccgcaccgtaagagacatccaaaagttaacaggtaagatagccgccttaagccgcttcatctcaaaactctcagacagaagccttccattctacgacttactaaggggaaaccgcaaattcaattgggacgaaaagtgccagctggccttggaggcattgaaaaaatacttgacagcgcctcccgtcctttcaaagccagagcccggcgaaaccttgctcctctacctctccttatctaagtatgctgcaagctcggtactagtaagggagcaagggaagacgcagttaccgatttattacaccagtaaaactttctcgggggcagagggaagatacccaataatcgaaaaattagcatgggccttagtcacttcagcaagaaaacttcggccgtacttccaatgccatacaatctctgtcatgacgtctttcccactaaagcgggtcttgtacaagccagaggtatccggaagactaatgaagtgggcggtagaattaagcgagtttgatatatagtacttgccccggacggctattaaggggcaggcgctagcagattttttggtcgaaataaccccggagcctgtcccgcccgagaaggaatccgccggaaaggactggctactgaaggtagacggatcctcaaatgtcagaggaagcggagtgggaatagtactgctatcacccggcggggaaatgatggagcagtctttaaagttaggcttctgagctaccaacaacgacgctgagtatgaagctctgatccacgggataaaattggtaaaggaaatgggagccgag

SEQ ID NO: 353898 - DNA, 543 bp, Cannabis indica
ttatgcaatgtagaaaaaaaaaagatgcactcctcacttataaagaaagtgtcgccccatctcaacttaaatcctgggtccgccactctgtattgatatattttagaacacttcaaaaaaatactactccaatgatctaaaacgtgtgccaatttgacacatgctaaaaattgtgtaaaatttggcacaagatataacattgcgctaaatttggcccacaataaattttacattttttatttagtatagtgccactaattattatgattcattgacttttacataactttatcttctttatttactatagtaccattatttaagcaataaaaaaaaatatttgtatatcttcattaaaatattaaatattgatcaataataattatattttcttttatattttatattagagcaaaattataaataataaattaaatatagaataaatactatttttgaacttgtgttttgcaaaagttaataattagatcatctaaaatagtaaaaataggactctgagctcaatttttaacaatttatttt

SEQ ID NO: 353899 - DNA, 481 bp, Cannabis indica
aaacctcggtcaacaattactttgtttataatacagacattaaaatattatattttagattatatcactcaataaatataatatatatatatataatttacaaaagttgggcaacaccgcgcgaagcgcggcttagttgcctcgtttatcataaattatacaattagaatttaataaaatctctagaattgaaaaattataattcaaatgcctatttcttaaaaataaggcccatgtcagaatatatatttaattaatgctaattttctactaatcaatattctaagtatgcggtcattacaataattgagctatctttataaacacgtcgtttactataaaaacctaatcatatcataaggattatcaatagtagattgccctgaatcttaagtaatcatgaactttttgttgggttttatgccctaaataaaactctttacaatctgattagttatcaatataaggaatttgaagtgat

SEQ ID NO: 353900 - DNA, 531 bp, Cannabis indica
cgtgttatttttataaagtactgtaaaaatataaaaaatatatctttaaatataaaaatataaattttttacgaacaatatagtagattatgtaattatccctcatggaaccctatatttttctatgacaagttttctatatttataatgaatatttgtaaaattataattataataaatgcaattatgttcatgttcaacttcatagatatatatctcaaaaaaaaatcatagatatttccttcattaatctacaactaccattgcacggaatagataaatttagcatcaacttttgtagctgtaatttaaaagataataataataataataataataataataataataataataataataataataatatggggaattactaattatgaagtctctctatgtaaaagtttgtgaaaggttttttggagtaataaaattcagctggttcatcaaaataaaataaaataaggaaaattattttatatactatttttttttttttaaatttacggtttgagtttctaaagt

SEQ ID NO: 353901 - DNA, 1198 bp, Cannabis indica
ctctgatgttcagccttaatctgttgacaggttaggcatctcgatacgaattctaccaaattcttcttcatactgctccaccaaaagtaaggtttaagatcttgataccttggtggtgccgggatgcaaggaatatcgggtagtatgagcttcttcaaagaattcattcctgagttccacactattcggaacacaaatcgtagctttaaacaatagcatcccgttgtctgacactgaaaaatccttggctagaccagctgaaacctcttctctgattttcactaactctggatcagtcatctaagcgactttaattctttctaacagatcagattggagtgtcaagttgtgaagcttgcctaccacaaactcaatgctagatctgaccatgtcctctgctaactgggatgagaacataatcatgctagctacctgcccgggacctttttctgctcaaggcatcggccagtacattggccttcctggggtgataaagaatctcacaatcgtaatcctttactaactccaaccaacgtctctgtctcatattcaaatctttctgagtaaagaagtatgtgagacttttgtggtcggtgtaaatttcacacctttctccataaaggtaatgttgccagatcttcaagcaaaaactaccgcgcccaattctaggtcatgagtcgcgtagcgctgttcataatcctttaactgtcgggaggcataagcgataacccaattggcttacataagtacacaccgcagaccctgtctggatgcctcgcaataaacaaaaaacttttctttgtcagaaggcaaagctagcactggggctgtaatcaacctctgttttagctcctgaaagctagcctcacatttgtctgaccgcacaaactgctgattcttcttagtaagctcggttaagggtgttgagatcttagaaaacccttccacaaaccgacgataattcccagctaaacccaaaaagcttctaatttctctcactgtcttcggtctaggccaatccctgacggactctatcttccctagatccaccttaatcccatccttgctaacaatgtgccctaagaaagacacctgagatagccaaaattcacatttcttgaatttggcgtaaagcttgtgttcccgaagccattgcagaaccatccgaagatgtaactcatgctcctcttctgattga

SEQ ID NO: 353902 - DNA, 1387 bp, Cannabis indica
attttgaagcatttcgtgaggtccgtggtatgattcctagttttctctgactttaccaacatatcatcgacgtaaacctccatgttttgtccgatctgatttgcgaacatttcattcaccaatcgttgatatgttgccccagcattcttcagcccaaacggcatgaccttgtagcaataaagtcccatgttggttacgaagctcttatgttcctgatctgggacatgcatttttatctagttatatccagaatatgcatccatgaatgacataagctcgtgcccggcagttgcgtccactaactagtcaatcctaggtagtgggaaacagtcttttgggcacgccttattcagatcaaaaaaatcaatacaagttctccgagttccatcaggatttgggacgagaacaggattggctatccacgagtggtaaaacacctcgcgtataaagttgttgactaataacttgtacacttcctgttttagtgccccttgtctttcgaaatccaagggtctccttttctgcctctttcttgggtagtttggatcgacatttaaatgatggcaaataatattagggtcaatccctatcatatctccatggctccaggcgaactgatcttgatttgcccttaagaaatttattagctactattttaactgctcgtccagtttcttcccaatgtaaacacactttgtgggatttcctcggtcaaaaacaacttcttccaattcttcaattggttttaacaagtttctttcatcttgaattcaaggatcaagatctttatccttctttttgctttcttctaccaagaccaccattaactgatgaccgacttttctatgatgtagctctatgcgatagcaatcacgagctagcatctgatcgcctcgcaccactcccacacccttttctgtttgaaacttcagggataggtgcttgatcgaactaactgcccttagtctgatcaatgctggacaacccaataatatattgtaagtcgatggcaggtcgacaaccagaaagtcttgcataattgtggcagataggggtgcctctcccaaggttaatgcaagctcgattatgccctaaatggcgatactatcgccagcaaaactgcacatatttaccatgcaaggcctcagtttggccttttcgagccccatcttcttcagcctttccttgtaaaggatgttcactgaactcttgctatctatcaacacccactttatccttttattggcgagctggatagtaatcaccaatggatcgacgtgaggatgcctcacattcttctcgtcttcctccgagaatatgattggaggttcttcagtttttaccttcttggaaggttcaggtgttggaatttattttaccaggatct

SEQ ID NO: 353903 - DNA, 657 bp, Cannabis indica
aaaaattctaattagcctttgtattatagtgaatgcactacaagactaccatcaaattactttgataaaataataattcatttgtcataaaattattatgaatttgtcataaaattattatgaataatataaaataaataagatgaaaaaaaaactgaatgagaattttttaattatttatttcaataaactagatctttatttatataaaaatatgactagaataatgagaaataaaagaaaatataatagtatttatggtataattgatttgggtgattcggacattcatatatataatatttcataacactctcccttaaatgtccataatagctatcttataaaaaaccttgtcataaaacctaataggacaaaaactcagccaagaaaaaaagagtgcactatgaataaacttcccatgatttaggtatttgtggagatctttaaatcgatgaattccaatcttttgaaccatcttctcaaatattgatatttgtaacgcctactgcttaggcacgctacaatatcttttaaattactgtgcacacctttgctcatcaaagggtttctcgaaaaaatgtgtcaaatttaaacctttttacaaaaatttaaacatttataaatatgttatatatccgtacaaaaagcttggat

SEQ ID NO: 353904 - DNA, 392 bp, Cannabis indica
ggggtttgaggatatcagggatcagaaagggaagaaaaggagaaccaacccaggggtccctacaaacgtcgaggtggtgcctcctaaaaggcaaaggaaaaccactacccacaaaaagaagtcgatgtccgagcctattgacctcgaggtctctgataccgagacccaaggacaggttcctcctctagttgctcccaacaccaacgtgttggaattattttactaggatcttagatctactcacaagtatgttgatttaacaatctaaatatgaacttctaaaacgataataaattaaacacatataaagttaagaaaccttacattgggtgcagcagaataatatgtctcctccaactcagatctctaacccttgattcctttctgtcgca

SEQ ID NO: 353905 - DNA, 991 bp, Cannabis indica
aatttattgatttgaaaatattatggttagggtatctataaaaatatctcggttaatttcaaatttacaattattaatttaatcatataagataattttaatataatatttcaaattaaaaggataataatatcttttaattgaaaatatgcccaatattaatatatctaatcttataattaaataatctgtaaatttaaaaaaattaacaaattttctaaccataatgtcaaatataaaataacgaatttttaaattaaaacttcaaaatatcataaattaataataatttattaaaaaataaaatattattaattttaaacattgatatttaaatttaaatattaaaaattatattttatttagatatttaggataagaaaatcaaaaaaaaaaaaaatacaaaattggtggaaaaatcaccaaaaattcaaatttttggtgcataacatctatctgccgagggacaggctgcacgctaccttgtccgtgagcggatagtgtatcagcaaggtgacttagctgagatttctcggcgggtgcagggtccttatgcacgaaatcgtgtctaaacgcaggcgtgatccaggcttgaccgagaatcagacaaaacatgtctgaagtgcgtgcgcagaaccctgccttgtccgagggtctggtgcgatggtgcataaccctcgacaccatatgcacctaaattttcaaacttgcatatctcctttaatttttatcgaaatcgagttccgtaaaaagtaaattgcttaatttttcacaaggaatccaaataaattatttttggaacaaaataaatttttcatggaaatattttttaatttataaatattcatcaaatcacacataaaccaacatgaatacatcgaaatcaacaaattatcgttttaaatccatatttcatgaaagttaatcattaccatggctcttaggcgttggaatttattttacctaggatttagataaactgacatgtatg

SEQ ID NO: 353906 - DNA, 636 bp, Cannabis indica
taacttactaatatttgttagtgatctaatataatcaaagtgatcaaagtgataaagaatcacaaaaagattatttgaaaaacttcatgaagtagtcttacatacaattgctacttagagtagtaaaatatatttgtatgtacctaaatgtataacttctaactaattatgaaagtgataagaaataacttgttatatgtactggttgtacatttaaatacataatatatcaagtcatgataattagactgataaattgtaaagaccgcttagtttaatttagaaattagcagttaattatgatttaattatggaaaattatttatcgatatttaaataattatttatgctgttattattcgatacttgaatgcattttatgacatatagtgaaatttcataattttgcattttcggtgcccgacaacatggaactcggtgtttggctcagtagaatcacaatttagtatgttagtatagcgaggcagtttattagacattgggaatgtcgagattggtcgggaatttagaattttccaaaaataccctttagtgcccttgtaggtaattttagtgtggaggggcaaaatggtcattttgccccaatgatattttatcctttagtggactttatgt

SEQ ID NO: 353907 - DNA, 329 bp, Cannabis indica
ttaatcatgccaatacatccattcttgcatgggaacttcatgcataaatgtctgatggaagttattgccttaaagtctactagggttggccatcctaatattgtgttgtacgttgttgagcaatctaccaccacaaaagttgagttcttaaaggaacttgcgttgttttctcctttaagggtgataggtaacatgattttccctataggcattaggacgtctccattgaaacattgcagctcaatagggtaaggagttaagtcagcttctataagccctattgccaggaatgtgaatttgaagaggatgtttgtgttgggttttgtgcc

SEQ ID NO: 353908 - DNA, 721 bp, Cannabis indica
gatcgcttggctaagttagcctctggaattgtaccaacagattttagtaagaaggagaagtacttggctggattgaacgccaggattaaacatgacctggttattacaacgaatgataccacaacttatgcagaaatggttgataaggctcttcgagccgaaggagcagtaaaatttttgcatgaaacccgagagcctcctattgctggtggggttatttctatccctgtttctggtcctggaaaagaaagtggagattccacttttgagcaaaagaaaagaacttttccatctttgggaagttcaggacaaagtaaaaggtttcgaggaaaccagaacaaaggaggacgccagacttactcctatcctgagtgcccgcgttgtaagaagcatcaccccgagacttgtaaccggagagcctgttttcagtgtggttcagtgggacaccttaggaaagactgccctcaattaaagaaagaagaaacaaagcctgaaactaaacctgcgcctgcccctgctcgtgtttttgctataactcaggctgatgctgctgccagccattcagtagttacaggtcagcttctaatcaacaattctgtttacattgttttatttgattcaggtgctactcgatcttatgtgtcatcaagagttcttgaccagcttgatagacctggtgatattttgagacggggttcggaaccctgttgcctaatgggga

SEQ ID NO: 353909 - DNA, 1033 bp, Cannabis indica
ttttcctcgagtgttgccgcaagaatgcggcacttcgcaagttgcggtacctggtccacttccattatagtattgaacttttctaagtaatctaacgggttagaagtacctttatatttgagggattcggataaacgaaacccttttggaagttgggcctgccgcacctctgcagtaaaaggcgaagtgccatgcagcttgtatataggcttgcgctgctgctcgagcatcttcaaagcttgcagaagcatgctttggtcaattcctcctgtcgcaggggctggagtcgctgcgactgcggggctcgcaaccactgcggcaaggtttgctgggatattaatcccagtagtcgcgatcggcgcgataggcgggttattacctgcgttgacaccctgatcgcccgcatggggatcacggagcgtctcagtgttatgtgggccgcgggagcgtgccctgaaaactgcgttgagatgatcacgcagatcacctcggtgtacttgataacgtcctccctgttgtgtctgtacagagccggacctcgtatacctgctcggagtgcggccatgcgaggacgaagaggctgactctgcgtcgttgtctcgcgatggacgactgcgaggattgcggcgctcaggatcctcgtcgatttgtgcgctctggttaggaaaccttgcagattgatctcttgacatcgggtgattcaagtccagagcttcagggtcagttcttcgttccctgcgtacacggttagtatgacgtctggaaactgttacctgagggttttcgttgcgaatggcaggaactcgaggagggcgtcgagctcgactctgtccgtctacctcggcttgtagtgcccgcagttgatcctgaattgcagcatattgatcggtggtgagctggaccattccctcggatactaccgccggggtgacggggggaaaatgcatggttgctggtggtgtggacgtgtctccgacttgagggccagtcgtttctgggaataggttgagaggtctgatgttgctcctcccta

SEQ ID NO: 353910 - DNA, 1001 bp, Cannabis indica
  modified_base (49)..(49): a, c, t, g, unknown or other
aagactacttttcacatgtccttatggtacttttgcttttagaagaacngccattcggattgtgtaacgctcctgctacatttcaaaggtgtatgatggctatattttcggacttaattgaatcttgcattgagatctttatggatgatttctcggtctttggttcttcattcgatcattgcttagagaatttggagaaggtgcaatcagatgtgaaaagtcaaacttggttctaaactgggagaagtgtcactttatggtaacagaagggatagttctgggacacaaaatttcaaaagcagggattgaggtggacaaagctaaagtgtcaacaatagagaattttccacctccagtttctataaaaggagtaaggagtttcttgggacatgctggtttctaccgaaggtttattaaggacttctcaaagatctctaaaccattgtccagtttacttgttaatggcgtttcttttgagtttggagatgaatgtttgaaggcattccaagttcttaaagagaaattaatttcagcaccaatagtcacctcaccaaattgggagttgcccttcgaactaatgtgtgatgcaagtgactatgcaatcggagcagttttaggtcaaagggttgacagggtgtttcacacgatctactatgctagaagaaccctgaatgatgctcaactgaattatgctactacggagaaaaagatgctggcaattgtgtttgcttgtgataagttccaaccttatctaatgggaataaggttgttgtctacacatatcattcagcaattaaataccttatgaccaagaaggatgcaaaaccaagattgattcggtgggtacttttactccaggagtttgacatagagataaaaagacaaaaaagggcactaaaaatctggtagcagatcatctgtcaagactagagttggaagagagccagaatacgaaagatgtacaataaatgagcaattcctgatgaacaactctttagtgt

SEQ ID NO: 353911 - DNA, 695 bp, Cannabis indica
cttgagttagggcaaaaaagttaatgaagcttggaataagcaagatggaaaacagacgcaatgcagttcaaaaataagccctatggctgaaagccaacataaggacatggaaaagaagagtcgcagaagtttttaaccctagggtttcctaagcgttctttctacaacatagttacattcaatgagtagacatgcaaaggaaagcataaagggaatcagaaacttactcaaagattcaaatgtccgggttcaagcaagcaagcaatcgtctgtaggcactttggcaactctgaagccagaaaactctctcttttcgctctgaagtttacttaacaacgaagggtgataaaatgagtaatgtgccaataaaaggagtatttataggcaaaatggtaactgtacataaaggaaccttagacgcctcagcttcccgcctcaaaagcgaatatgggaaatcaaaagtaatcgagtgcaactgacagccgtggagagagaaattcagattttcaaaatattaattgtcagagcattaattagccgaaaaccgaagggacgcccagtcagcttcacatcgagtctcgaacggtcatgctcgacacgtgtccccatccaaaggtagagccagctcggaataagtctacacgcaacctcagaggtcccgcacagacttggggggcaaatgttatccaaaattt

SEQ ID NO: 353912 - DNA, 940 bp, Cannabis indica
agcttgaagaagccattcagcgggcagaggtggagcaaaaacctagccagccaaaagttccctctgctcggatatccgcccagctaccccaatacccaagaaattcgagctcgggtggtaaacagtcctaccataacagtaggaaggaaaatgggaaaaagggaaagttcgctaggtaaaaacgaataaactcccaaggaaaatcctaccaagtttactgcatttttctttcctgatagaagatatagaaagtgtgtacatggctactcagtcgttagccccgtacaagaagcctgcacccatgaaaaaagatgtaagtaagagagacatgaccaagttttgccgttttcatggggattacgaccatgaaaccaatgaatgcaacaatctgaagtgggaaattgaatttctgataacaaaaaataatccacatgtacagaagtatgtcaaggccgatcaaaattagaggggcgataataaccaagatttactaccaccaccaatagatggacacctgcaagtcattattggaggtccgcacatagctggagattcaagcaaagcccgggaaaggtatgcctgaactgtacagcatgagccaaaagaagtagttctggccgtcgaagaaaggaaaccgaaaataccacgggcaagggagcctaccataacatttagtgatgaagatgctatcaatatcaatttcccgcacaacgacttgttggtcgtggaagtccagatagccaacaagatggtggcctgaaccataatagaaatggagcctcttccaacatcttattcaagacaacatatgaaaagatggggctccagctcaaagattaaactccttgtctccagcctgtgtatggcttctctggccaaggtgtcacacctctagggaaaattcacctacccctcaatgttgggcaagctctgaagagca

SEQ ID NO: 353913 - DNA, 584 bp, Cannabis indica
gagctgcacagtatgtttaaaactcacgtaatacgcctatggtagttagggtgttacaaacaatatactcagccttggctgtggacaagaaaatagaattttgtttcttactatgccaagaaaccaaattgtttccaagaaagaaacaacttcctcgtgtactcttttgatcatcagcattgcctgcccaatatgcatcactaaaattagctcagttagaattactatctttagaataccagattccaaagtcaagagtactattaacatatcgaataatcctttttatagtagatacatgagattccataggattactttgatatctagcacaaactctcactctataactaatatcaggacggctagctgtcaaatataatagactaccaatcatactacgataaagagtagtgtcaaccttcactccattcttatcttttgttaatttcaaagtggtgctcataggagtacttacctgtttagccaactcaaggccaaattgctttgtcagctttgtcagcttctgctatttaacatcactcttgccatctcctgcaatgttcgattcttcctctcaacaa

SEQ ID NO: 353914 - DNA, 787 bp, Cannabis indica
tttttagtaaaagagctttttaataattaaaaggggatttttgccaaaatcctttcttggaaaaaatgcatcccttgattctggcggttgtacgattttgaggatcattatgaatcgtctcttcatattctgcccatcttccaatcgctagatttctcaatctttagctttcttgtcaatgaactttgtgtataaaagggcaaatcaagcttgtcatttttcataaacctttggctctttagtgagatccattttcagaatggatcatctctttcctgccaaaatgtcccttctgagttcagaagttcatccttctaaacttataatagccagatgcgtcaaccattttccatttgttcccaaagacttcaagcctcaactagagtcagaaacgatggattcgaaggctgaggagcttccgaccaatccaaaccaagggaaccctgtagcctgccatgggcgatccccacaaaggatctgcatagatcttgtgcgcgatcttaaaggtcctcctcaggctgataaagaattccagaggaaaattggcatggttcaagataaatctgggaaggaagttggcgtggtttttatcagagaatccagccaacccaagacccaaacttgcgccagaagacctttgcgccaacctcttttgggtatcgagggatttcctaaggctaggaaaaagatctcggcttcaggaaatggaatcttctgatggtgagggtgttagaaatattttaccaggatctagatttactaccatgtatgtttcattaacatccta

SEQ ID NO: 353915 - DNA, 1027 bp, Cannabis indica
ctcgccaattggcccgagcgtagaaatggggaagttaaggtgtggggtaagaaggttcccgctacagctgatgctttcaatgctatgttcgctgtcccggactactcaagagaagaacagcgcctccgaattattgaggaggaagaacagtttgacatggtggatgtggctgaaactgtgggatttctagggctgagattccatgacaatgatgggcaagacgggtcgcccaatattctgcaccgatgtgaaatcaacccggtgacaaaaacctagctatactttgtgagtgctcggttggtgccgagcaaacatttctctgatgtccgaatagataaacccaaatatgtatacgtcatcatgaaggggtacaatattaatattggacaagtcatccgagggaccatcgaatagattgttcaaggagccacgggtggtggccttggtttggcgggtgtcatcactgagctttgcggggcatatgatgtgccacaactggaatatgacaatattgtggtacctctaagaaaaatggacatcagtatggtcaacgggctaagagagcatcatccttatggacaacccctgctgatgagcaacaacaaggccgaaggcggcgaagagagcctagtgtcgaagaagaggaggacaatgcaggtgtactcatgcatagctgagttacataattcaacaaaataatcacatgcaaaactatatggtgtagaggagtattcatgatgaaggacaagttagccaactcaactctctcatcaacagaatgaacatcgggattgacgacccgaattacttggcgccacctcctcggttttattcgtaagatcagccgctgccaccgaaccctttttgaaagggcctcaggtaagtctctcacttttgcattttattgtacacattggggacaatgtgatatttagtttgggggagagatttaaaatttttaattatttttaatttcttctttaatttttattttttctgtttttagttaggaatgggcaataagcta

SEQ ID NO: 353916 - DNA, 583 bp, Cannabis indica
atgcgaggaggagatagacctcgctgttatgatgatcaagagagtatgagcaatacgaagagctatcaatctgagagttactcagatacgaggtctgtgagcaactatgaacgaagatagtaagattttcgtgaacatttgaatcgaagacaacctgatttacgagagcgcttaaatcaaaatgcacctgatttacgccaataactcaatgttaaccgacagcaagaggatccaatccaattgcgaatcattgagttggaagataaattcaggagataccaagatggggaatatgggaagttacccggttatgactcggacgaggagcctgagtttttccatccagacattatgaactttgaattcctctaggggttcaaaaaccctcacgtctcatagtatcatgggacttcagtcctagtcaccaccttaacaatttcaataccataatgtgagccagcaacgtctcaaataattacgttgtatttattcccaactcgctgactggagcagggagtagctagtttgataagcttacccatcattcaataactcttggaacagctgtccaaggatttcaagt

SEQ ID NO: 353917 - DNA, 719 bp, Cannabis indica
agatattggaagacatgttggcatgtgtaatagatttttgaaggatcttggagcaagttcctatccttgattgagttttcatataataacagttatcagagtaccaatggtatggcaccttacgagatgctgtatggtaggaaatgtcgatcacctatccattgggatgaggctggagagagacgttatcttggacctgaattggtccaaaggaccagtgaagccattgaaaagattcgatctcgtatgcttgcttcgcaaagtagacagaaaagctacgctgatccaaagcgtagggatatcgaatttcaagtgggagactctgtatttcttcgaatatcacctataaaagttgtacgtagatttggaaagaaaggaaaattgggccctagatacatcggtccttttgagatactggagcggataggtcaggtggcctatcgattagccttaccacccgcgctatccggagtgcataatgtcttccatatctctatgttgagaaagtacgtgtcagattcgacacatgttttgagttacgatgatattgagctccagacagacttatcttataatgaacaacctatccagatcttagatagaaaggagaaagtacttcgaaataaaacgatccctctggttaaagtcctatggagaaatagtaaagttgaggaagcgacttgggaattagagtcccagatgcgggagctgtatcccga

SEQ ID NO: 353918 - DNA, 828 bp, Cannabis indica
aacccttgttcctttctatcgcagagtattatcaagatctgagcttggatctttttctctcttttgggttagttaccaccgtcttcctcactatgattgagtacttaacttgttatgtgtgggcatgacgctctaccactaagggagaattggatgaagaacaattaaggaggtttcgaaatcagaatatagaaggtgtctctcatttagtagttgtcagagaatgaaaactaggcttggtttggttgaagtcattagttggatgagatgagagcatcatgttcattttatagtgttttaactagggcttagatttgaattatatggattaaaaaacaataaaatataaaacattgggcaaaaaaccactagagtggccgaccacttaaggaccaatctctaattacaattttgccactttatttcaaccagttatttgttggaaatatattttaccaggaacttagatctactcacaagtatgttgatttaacaacctaaaattgaacttctaaaacgatgaattaaacacataaaagttaagaataacttacagtgatggcagcggaattaagtgtctccttccactcagatctctaacccttgattcctgtctgtagcagagtataatcaagatctgagcccgaaaattcttcagttggatgtgatccttcacagtcttccaaactatgattgaggcactgagtgatgtgtgtgggcacttctctctcactaggattttcgaaattctctcttgttttctctcttgaattcgtgtgatacaatgcatgcaagagaagagagcaaagggctactatatataggaaa

SEQ ID NO: 353919 - DNA, 669 bp, Cannabis indica
aggtatacaaggtccggctctatacagacgcaacagggaggacattaccaggtacatcgaggtgatctgcgtgatcacctcaacgcagtttttagggcacgctctcgcgtcccacgtaatactgagacactctgcgatccccatgcggacgatcagggtgccaacactcataataacccacctaccgcaccgatcgcgaccaccgggatcactgtcccagcaaacctcgccgcagtagttgcgactcccgcagtcgtagcagccccggctcctgcgactggggggattgaccagagcatgcttctgcaggctttgaaaatgctcgagcaggaacggaagcccatatacaagttgcatggtacctcgcccttcactacagaagtgcgacaagctcagcttccaaaggggttttgtctatccgaatccctcaaatataaaggtattctaaccaaatagattaccttaaaaaatttaatactataatggaggtagatcaggtaccgtagctcgcaaagtgccgcattcttgcggcaacactcgaggaaaatgcccacgattggtttacccaattacctgaggcgtcgatatcgacgtgggaaaccttcgtcgacttattcctcacacatttccaggtcacaatgacgtataggccaccttatacgactttgg

SEQ ID NO: 353920 - DNA, 814 bp, Cannabis indica
gaaagaaataaaactaaaaaaggagtttcaactgggtgtactagtgaacaaagtaatgcagagatagagtttcttagctatagactgtatgtggacgcagcaatatcaactcctcaaaatgtgattggttttggagctgtcattttctcctcagacaaacaaatgaaggtagccttatctaaaccactacaaggtaaatcatttccaatttaataagtattatgtttttcttatagaaatgattgggataatacgtacaattttaaagtaatatagtaaatatcattttggtttatttagttttaagtttatgcttcaaatttacttatgaaggtataaaaagatgtaataataacaagtgtggttgcaccttaaataattttaactaaataattctaagtggattttatctggttaaactttaaagaattttaatagttatgttttttcaaaatagatatatgatctgctttagcgtgggggttatttaaatttatactattatattatcatgcttaaaagttaggtaaagagtcaaaccaaaggggtttccctttgggttttgactattacaattatattctaaaaattttgagttttaaaattaaaagtacttattgctttaactatctcatttgcaggttccttttcagttttccaggcagaagcaattgctttactagtaggtttgcgttgggctcaacatgtgggacttcccgtggaaagagttttttctgattcactttctttggtctcagttttggagggtcagacagtgtatttaaatgagctgagggttatcttttttgatatt

SEQ ID NO: 353921 - DNA, 1077 bp, Cannabis indica
gttttcttaaacccttatgtgcttatttcattgttttagagaattcatattttaggatatcaacagacttgttagtaaatctagatcctggtaaaatatttccaacacctccatgttcgtatctttggccataagccctttgtttttgaacactactagtacatggggatgttgcatttttatcatggattgtgtgaccgactaggcggtctttaatcctggctatcttttgatggccttaacaagtaagggtccaaatttactttgttaagccgaagtatgcctggatgacttagaggcaggtttagtagcttctactaagcgttaaaatttctctgcaaaagttctttgtgctagtttgatgcattgtacagtatgggtgcccccgaagtgaccatgtaaacaagtctcttggtcacttgctattcacaaagtttcacagactttgcctaggttttgtcttgtgagggtaccatagtatgcatgtggaactaaaagactaactttaaaaagttaatctgtgagcaagtagttcatagacacaataaatagaataacaaatttttaatttgataatattatggtaagtatatctataaaaaatatctatttaagtgccttgctaccttttgctggtaggcctgcagctttagggtggcttattctcttctttcttctactttgtcaagggactccgcctgtagggtgttgtttttcagttggtcataggttgttctcctgtgagacaatggcactagctctacatgcaacattgcatcgtagtcataagctagagtgaatggagttttccctgtggtcatcttctcggtagtcctatgcgaccataggaccttcaggagcagctcaggccagttgcctttttcttcctcaaggtacttcttcagggtgtccttgaggggtttgttgacagcttttaccttcccatttgcttgaggatgggccacggcagagaaactcttgatgatgccatgtctattgtagaaatcagtgaacatgttgttggaaatattttaccaggatctagatttactaccaagtatgttttattaacatcct

SEQ ID NO: 353922 - DNA, 421 bp, Cannabis indica
ttgatgtttgtgaattttcgtgaataataattgaaattctgtttttggaattatttttattagatagtattgaaaaaattaagcaatttacttttttacataactcaatttcgattttatttgaattagttatgattttttgaagatcggaaaaatatcagggtcgtgcaacccacccacgcgcgcggatgaggttgataccctcgtcatcacgcgcccaaacaacttgctcgaccaagctaccttggtcagacacgcatttttttgtctgaaaacatcccatgcgtgctcggaagaggctgcatgcagcctcctgcgccgaagggcgttggtcacgcctggctgcatgtgcgtgtggacagtatgcattacagtatgcaatgcatactgtccgtaccacttgcaattttttcgtttttct

SEQ ID NO: 353923 - DNA, 1276 bp, Cannabis indica
cgggttgggcggtttgtaaattttattgaacacccctagttaagtttgagttatttatgttgattcttactattttagtagaaattgtagagaaagatcaaagtttgagcttaaagatctttaatgatggattttaattatggggtttttcttgcaatttctaattgtattatgtttatggatgtttaataaggtattctagagagtttggtgtgatttgaaaaagttttgagctagtattgaagttttttgggttttctacagagaaacggttaactggtttcccaggcagaacccagaaaaatagtttaccattttggaaatctgatttaccagttttagcagttttgggaccctaatttttcatgtttatttaatatttagagtattgtcacgctatttattgataggaaaagttctagttttaagtttaagtcatcaaaaagtgatttagcgtatcacttatcatttttatgtatgttgtgacttaagggcttgtaaattgtcgagcaccagttttcacttaggttgaccgacacacctaaattcagaattaaggtaggattagtattataattgtatatgtacttacatgtttagcgtgcatgtttatgaatgcctgctagataacatatcagtaatagcagtattagtgtatatagagttgcactgaataccaacggatatatattttaacaaaaataacaaagatatttaataatatttaagtggtttgcttctaattttttattttttttttttgaaaaagatatatgaaaaaatatacatatagattaaacattagaaatgttataaccaagaaattttacgtgaataaatataatttaaataataaatagtataaaaagatcattttgtaaaataaaatatttacctacatatggaaaatttaattttttatgctcacatatacttaaatttttttccataaactcgtaatatatgatatttgtgggatatgacacattttataatattcctaaaataccccccatttacatcactctcctctctcttcttctctcttttatttcatagccatcgggccccatcgaccccattatcgggcccaccatcgggcccactatcaggctcacaatcgaccatatcaatttttttttacacaggcatcgggccccatcaggtctttgtcttcctcaatttttctgtgataccgtcggaccggtgtcgggcctgcatcgggcccgacgaaatcaaaccccaaacccatatttttcccaaatcacatctaacg

SEQ ID NO: 353924 - DNA, 597 bp, Cannabis indica
ttctatgacgaacaccatatctcgaaaggagtgcttcgaactgtttgttgcagaagtgactcccttcatcgcttatgattgctcggggagtaccaaaccgagtgaatatgttcttttgaaggaaccgaagaactgttttgccatcattggctggtgttgctgcagcttccacccattttgacacataatccacagctaataggatgtatagattgctaaaagatgaaggaaaaggacccatgaagtctatcccccacacatcaaacaattctacttctaagattcctgtcaaaggcatttcgtttctccttgagatgtttcctgtacgctgacaacgatcacatgccttcacaaaagtactagcgtctttgaaaagtgttggccaaaagaatccgctctgcaacaccttggcagctgttctagttccactgaagtgtcccccacatggtagagcatgacagtgatttagaatagagtacatctcctcttcaggcacacatcttcgtattatctgatctgcacagtgcttgtagaggattggctcttcccagtagtaatgtttcacctcagaaaaaaatttctttagttgttgtcgag

SEQ ID NO: 353925 - DNA, 892 bp, Cannabis indica
tcctgcgattatacctggatgtggtagtctcaatcccattcttcgatgtggggtatccatcccttttagccctttcattgaggccattctcaaatgttacgatgtgtctcctttccaattaaaccccaacagttatcgcacggccctagccttctatgcgatgtatatggaatacgtacatagggcagcaacagtagaagatttcagttacttctacgatataaagagcgtaggcctccacaatggtttctactgcttcagcaagtgggccacttctgagattaatggggtagaaggcatggtttccaacatgggagattggaaatcgaaatggttttatattttcaaagttccagggattaggactgattttaatcgtcgacctagtatgtcgcatgtttcctgacttagtcattttttgagttattttgagatttcatgctaactcgctcttcttattttcgcagatagaccagctcgacctacactcgactcgactcgtagagagacagctgaagttctcgggagccttcctgtacaagatcgcgactggcgattattgtgtacgactgccaagttgcgagaacacaagctgattccagagaatgcaagtctttggagagagccggtatacaaggaaccttctgaaaagcaacaagagcgaactgataaatgcctctctaagcaaacttctcgaccatcatcaggtagcatatacataaactagcgcgttagaacctcattcttattagcattaatcattattttttgttgttgttgcagaaatgactttcttgaagtccgcacccactcttaaccgcaagctgaaatctggaacagcggcaacttcccctgtcgttcctcagaagaggaagagcgatgtggtggttac

SEQ ID NO: 353926 - DNA, 601 bp, Cannabis indica
aatatgaaaatcgaatttctagggaggtaagtgtagatacaattcaaaaatttaacttaatgatctttgaactacatatccattaaatatttctccatccctatcagttcgcaagatctttaaccactaaccttaatgttttttacattactagaaattcttgaaagttctcaaatatttcaaatttctttgcgtaaggtaaaatctagagtaatcgtctaagaatttaacaataaattatatccacccctgaatgtacatccatattcgaatatagatgatcttactttcaagtggatattggcacatgttctctttgcagagaatgatcttgttaaaaccactatgaacaagatacaaatgtcatagatatatattatgtggttgcggtctttatgacttaggtctagttactgttgactgaggttttcggcaaccaataaaataatagaagattaaagagctgtaagaaattaagagagggatttttacgtggttggggcgttaatgagccttagtccacgagtctgtgtatttatgagtgtattaaatacagagaatgttcttggtgagtatttactcttcttgcacttatgcaacc

SEQ ID NO: 353927 - DNA, 791 bp, Cannabis indica
aaaagataaaataattgctaaaaatagacttaagtggttggccatacaatgggtcccactagtttcaattttgccattttatttcaaactttatcttttctttcacaaaaaccatattttaactttaaaccttttaaatatcaaatctatttatttaataattataattaattatcaaataaaaattgtcatttaacttatttattaattagaccttacaaagtctcttaataataaataaacatcaaaatctcttttcttctcaattaagctcttgcttagtgaaaatttataaataagacatagtctaattagaattctaattggttaattaaaaccaattaattgagtttacaaatcaatattatctcaactagtgtggggacaatgggcctatataatcaacttgacttgcctgttgaccagcctatgtcacttgtagaccttttagaacgttgttgggaaaatagttacttgtattgactggttggacattggggtgggatattctgtccgtcttatccccttcttcgatttagatcatctcttaggtcgtgtacggtgcctaatcagttaaagactggttcacctagaagccttcttgtcaagatgttatcagcagttggctggttcgatatatctatgtgacagtcaaagtctcgtggtccgaaagggaaagattgggagttgtacatcacacatcacctggagaaggtcatgtgtgatgattctgagactgtgtgggtatgggaatacatagttaaagagggcttaaattgattgattggtac

SEQ ID NO: 353928 - DNA, 597 bp, Cannabis indica
cacatataaagtttgagaaaccttatagtagttgcagcggaatgaaatgactccttccacttagatctctaacccttgtatcctttctgtagcagagtatcaccagatctgagcccgaaaatccttccttgtgtttggattcttcacaatcctacacactatgattgagtaccacttgatgtgtgtgggtacttactctatcactatatggtgcgaaattgaagagagaaagagaggtagaaagatttgaaattggtagagaagatggctcaagttttttgactgaaggaaagtattttcatcatctttttctttgaggccatcactacttatttataggaatccacctagggttaggttagaattatttggcattaaaataatgaaaaaataaatggtaaattgtccattaagtggccggccatggatatgggccccactttgcaattttgccatttttttttaactatttatcttattttctcaaaaatgctatttttccaattcaaccacttaaatgccataattagacttaatagagtctctcagttaacaaataaaccctagaatctcttttcttttcaattaagccctagc

SEQ ID NO: 353929 - DNA, 885 bp, Cannabis indica
ccaacaagaaccaaggaagtgcaaagtttgactggttggatcgccgcactcagcagatttgtttcaaaataaacttaccagtgtgtcccattcttcaagatcatgtgaggaaataagtaattcgagcggacggaggaatgtaaaaaaggttttcaggagctaaaaacgcaactcgccaaaccttctgtactctcgaaacctatggacggagaagaccttgggatatacttggctgtcacggagcacgctgtgagtgccgtactaatcaaagaagaaaacaacatacaacacccggtctattacatcagtaaaagactcattgaggccgaaggccagtacccattgatagagaaactcgcttactggcttattctagcaacaagaaagttaaggccctattttcaagctcatcctattcaagtatacactaaccaaccattacgccaaatattgcaaaagtcggacgcctctggacagttactcaagtgggcaatggagtagggtcagtacgaaattaccttccaaccccaaacagcaatcaaaggctaggccctagcagactttgtggtagaatgcataggaaaagaagaaagcatactagaaagcaaccccgagctgatacaaacacctcagccaagtaacagtgaagacaagccgccttggaaactacacattgacgggtcagctacagatcatctatctggtacaggcatcgcccttgtcacacctgggggcaacacatgcacgctacagtcaaatttggatgcaaggcatctaataacgaagccgagtatgaagctttaattgctagcctaaaattagaccaggagatgaaagccgagcacattgaaatctatagtgattcacagctggtggtaaaccacg

SEQ ID NO: 353930 - DNA, 523 bp, Cannabis indica
ctctctctctctctctctctctctctctctctctctctctctctctctctctctctctctctctctctgtttctcgtggacgacccaaacccagtcgaaactgttgccgccaccaccaccaaaccagttaaaccgccacgggccaccaccaaacccagtccgaaccctttccccactactagaaacctaatcgtcgacgtcaccacctgtgagaaccaagcccaaaaggtacaatttttcttataaaaggttagatttgaaaaagtatttgattgtcaatattttgattgctattgatttggatgtggatttgtcattgttctaatgagagaagtcaattttttgtggattttgtggcttgatattgttgtgttgttatttttacattgtgatcgataaaatatcgattatgtttcaattggaatgataacactactacaaattgccctatttgcgtcagtcaatgcgtctcactaaaatagttgaccgaggtaaaaaataggcaaagattctatgctttaga

SEQ ID NO: 353931 - DNA, 788 bp, Cannabis indica
aatgctcacgcggactgtctggctaaattagcttcagacagcgaaattgagaaactgggggtggtacctgtggaacgcttggcagagccaagcatcaaagtaaaaaatgccatagcaacagttgagcaagagcccagctggatggtccccatcatcgaatacataacaaaaggcgagttgccccaagagaaggcactatccagaaggatacaatatcaagcgcaccgttatgtgatgatggacaaaattctctatcgaagaggactcagcatgccttatttaaggtgtgtatcggaccctgaagctaagcaaattatgctagaggtccatgaggggttctgtggagatcatacaggaggcccaagtctctcaaagaaaatactgagacaagggtacttctggccaacaatgaaaaaagattgcatagactacgtccagaaatgtgattcgtgccaaaggttcgcgaacataccgagagctcctcccaatgagattaccctgatgactagtccctggccctttgcggtctggggaatagatcttattgggtccctgccaacaggaaagggaggagtaaagtatgcaatagtagcagtagactacttcaccaagtggacggaggctgagccaatgaagactataactgctaaaaaagcactagactttgttatcaaaaacatagtgtgtcgatacggcttgcctcacaaaatagtctctgacaatggaaagcagtttgactgcgaagagttcaccgacttctgcaaccaacacggagtcgttaaaagctt

SEQ ID NO: 353932 - DNA, 570 bp, Cannabis indica
actgggaagtcaactattggcctcggcgcaattcgcttcagagatttagctatgcagtatcacgcgccgaaaccaaacatacaagcaacacccaaacttggcatacagaaatcaaggggctggtactagtaattcatctatgcttcctagatccaactttccacctggtttttctcaacaagcctttcaacaaagacaacaacaaggtgtccaaacaagttctcttgagagtatgatgcgtgatttcatggccaagacagaaaatttcatgacaagaactgagagttatatggcgaagaatgacactgcgatccaaagtcaagcaacctccatgagaactctagaaaatcaagttgggcaactagctaatgagcttcgaaataggccacaaggtactttgcctagtgatactgaaaatccaagaagagatggaaaagagcattgcaaggcggtaatcttgaggagtggtaaagttctggagtcaaacgaggaagaagctaaggataaaaatgagcccacttcaatccaaagtcgagtagaaaaagagaaaaatgttgaacgttctaatat

SEQ ID NO: 353933 - DNA, 671 bp, Cannabis indica
agctctatcccggagagcaagagtgagaggaggtcggtgatatgtcagaatctgctggaaccgagtgcgagtgatgcccgtgtcgtccaccatgaagtactcatcagaaaaatgcccaattttgctgagggccgaatcatcagtgcctgtaaatcacttgaagtctgcttgagagaaatagaagtaccccgacctgccttgcttaggggtgtacttcaaatcaaaaaaccagctgacttcgtgaggagaaggcataccccacttttgggaagtgtagaggacaaagagggcagacagatatttaatgcccttaggagtgaactggaccgggcaaaggtcgaagaagtctgccacattcttgaagtattgatgcaaaggcatcaacgccccttgctgggcatgggcacccggccaggtgcacatccccctttcagggtttgtggtacgattgttgcgggcgggaatatagcaatctaattcgcccaggtatccgccctggttgagagtccgaaggcgcgcctcagtaaccctggaagaagggcttacccacctggcgcccaaggcaccttgccgtctatgaggaacctgttgggttttgtgccctaaataaaacccatttcaatataatcagatttacttatcaataaagatcagaaataacattttatgtt

SEQ ID NO: 353934 - DNA, 575 bp, Cannabis indica
ggtatattgagcaacccattcacaaaagtagatatatcttaataaaatataatatgagtatatttttaattaatgaatataaaaaattcctcaacttatctcatataaataccctaaaggaatgtggttaagatcatgttcatcggagactcgggcattgaaaaatccaacattctttcgaggtataccagaaacgagttttgtttgaatataaatctaccatcggctttgagtttgctactagaactctccaagtagaaggaaacatgtttaaggcacaaatatgggatacaataagtcttcttgcctgtacggcccaattggacagggatagcgtggggtggactagttggaggaggaggttgtgcgagattggctatcggatggccacttattgaggccttcggtaaaaattggtgacatttatttaattttatttttatttgttgaagaggtggttagtgacatcaattcttaattattattattattattattattaattaaactgcaatcgattttcagagcaatttttttacttttttttttagttatttaacttttattattatagt

SEQ ID NO: 353935 - DNA, 637 bp, Cannabis indica
aattattaatttatatgaggtagattttattataattattagcggtattgattttttggttattagtagagttgtaaagttattgagttattaaattattaaattgtttttcagtagtatgtagtatccaagatctaatggggtcatcatctgcatttgataagataagttttctctttttatatagaatgaatattgttaatttatcttttcgtagtttttttaagaattgatattatttttgctggtattttttttgcaggttatttttcagttgttcagggcagaatgtttgactttacttgtagcattggatttgactcttactatgggactttctttacattttgatgaatctgattgtttagcgattgtaaatgctttttctaaacgctcttctttcttcaatgaacttagttcctttttagaggatttagctagttttatgtccaattttcttggagtatccctaatccatgttcgtcggacagtcaatgaggttgcacatggattagctcgttatactcttcgggtggatagagatctagtatggttttttgagattccttattttattggggtttcttaagatttaaagtttgtatgacattataatttcttttttcaatgaagttat

SEQ ID NO: 353936 - DNA, 709 bp, Cannabis indica
attcacttcaagaaaaggatagcaattaggcattaacgattggtaaactaacaacaggattctcctccctattctctcatcttgattaatattcacttgttattttaagtttctgaattattgtactaaattcgtaaaaaatattgatttgccaaatagaatcataagtgtaatttagtggtaattaatctaattccctgtggttcgacctcacttgcgtgagtttactacgtgactacgtatacttgcgtagtgttcataagattcgtaacaataataaaaacatccatgattaattctgaaacaaaactaggcataaaaggtagatagagggtaaaagaaagaaactagatggtgatatcgctccgggtcttcaagattgcttcctctcctctttcattcacttttcaggtctgttcttgcttactttgaccttctgaattgtgttccttatataggaatgaaagatgtgcctccaattaggaaaaatcataattaggtcaaaaactgcgttttccgtacttggtcgcgaccaacttaaaggctggtcgcgactacaggcaaatctcgaaacaaaaaattcaaccaaaaagaaaaccaccattaattccagcgacttcacttcagaagacgaccagaatcaatcaaaacggggattgtttcaaattcatgataaaaaaatgtaaaaaaactactacgaaattaaaat

SEQ ID NO: 353937 - DNA, 789 bp, Cannabis indica
aaaagacaactttccaaaagagaattacttctcttttaagaagtttccaaacaaaggaaagttcagctgaaaagtgcaactttcccaacaaggaaaagagcaactataaaccgaataaacaaggtaagaaatctgtcatgaatgcacaagaatcttaccataaaagaaaaattattttgtcaactaacttgccaaaaaaaggactttacacctgtataaatattatagtgtaaatactcatcccaagatagtcatggcacccaaggaaagtgccatgcataaatcattagacaacccattcccaacaagccaacaactttcttaatgaattaatgtgtggcgtttggttgagaaaaatgaaaatataaaaatgagaataggaatgagaattagaatagaaattgaaaggaataaaacttaaaatgtataaaaaatagataaaaattattaaattttttcaaatcatgaattggaatggtttttcttttcatttcaaaataaaatagtcattccctcaaaatagtggaagatcattccattaaaatgatattctaatactttaaaatgcaactaaataaaagaatggaatgaaaattatttcctttccattttattttatttcattacctctaaccaaacgccacctacaggtcagccaaaaagaccactatatattcatgcatgctaattttatttttaattaatgatgtgtagtaataaagtaaaaagacgtaatgtaactctaaaaatgtttttttttttgggggcgattagttatgtgtttcttct

SEQ ID NO: 353938 - DNA, 1093 bp, Cannabis indica
aggtccggttctgtagagacgcagcagggatgacgatatcaagcacataggggcgatctgcgtgatcacctcaacgcggttttcagagcacgctcccgcgccccccgcaacgaggaaacaccccgtgatctccccgtgggcgatcaaggtgtaaacactcacactaacccgcctatcgcaccggcagcgactactggaggcaatatcccagcaaacctcgccgcagtagtcacgactcctacagtcgcagcagtcccaactcctatagctggaggaattgaccaaagcatgcttttgcaagctttgaaaatgctcgagcagcagagaaagcccatatacaagctgcatgggacctctcctttcactacggaagtgcgacaagctcaacttcccaagggatttcgactatccgaatccctaaaatataaaggtacctctaatcccatagattacctagaaaaattcaatactataatggaagtggatgaggtaccgaagttcgcgaaatgtcgcattctcgcggcaacgcttgaggaaaacgcccatgattggttcacccaattgcttgaggcctcgatatcgacatgagagacctttgtcaatttatttctcacgcactttcaggccacaatgagttatagccctccctacacaactctggccaacatcaaacaagaacccggtgagtctttgcggaagtaacaaaagtcaagaaggctcccaagtgttcgcttgtttgtatgttgataacaggtgttttgccgagaaccaattttcggaaggagttacaagctcgaagaccagaatcactagtcaaactcttcgctatggccgaacctcataagagaattgagaattctctagcagagttggaaaaaggcatggataagcgtaaatcgccagtgccgcgatcaaggtctcgcagtccccgacagaaaaattccagaggtcgaagcccgagaagacgcaacccacggagacagtgaagtccgaagttagccaaatctcctccaaagaaggagtcctcgctgaaaaggaagggtggaccgcgtttcattaactataccgaactcgcggtgccacgagaccacat

SEQ ID NO: 353939 - DNA, 490 bp, Cannabis indica
aaactattttgtacggcaattcgaaccggcagattatgttcttcacaataaagtcatgaactttcttggatgtaattgttgcgagtggttcggccttcgtccacttagtgaagtaatcaaccactagcactgcatacagcactcctcctttgcctttgggtaattgtctgatcagatcgattccccaaatggcgaagggccatggactttgcatctgagttaactcgttgggcggagctcgaggtatcttcgaaaatctctgcatttgtcacatttcttaacataggcctttgagtcttcaatcattttcgaccagaaataaccttgccttagaattttcttagatagactctgcctggcgacatgatttccacagaatccatcgtgtaccttagataggagtcgtgcagcttcttcttgagtaacacatctgagcaacggcatggagaaccctatcctgtacataattctctctactatgatataccgt

SEQ ID NO: 353940 - DNA, 576 bp, Cannabis indica
tgcaattaggctttgctccctttttttgcataactcctgatcaagtcctgacatatcatgatgttatgtgcaatatacctccctttaatgaatcccccatggtttaaagacactaaaccaggaagaatatgcttcaatctagagcaaatcagcttagtgtccaccttataaagcacattacaacaagatatgggcctaaaatcactcaccttattagggcatttgattttaggtattaaagtaatgactgtagagttgatctcctttagaatgttacctgagtgcagaaaagaagttactgcttcaaaaatgtctttcccaataagatcccagttttcttggaagaaataactcccaaccatcaggcccagggcttttgattccagggatgctaaatactgcattcttaacttcagattcagagaactcctgtaagagaaactcagcttgtgactctgataaaaccggcccctctgctatcactgtatgcttcacatgcaatctcccctgcatcttagttcccaaaaggccttggtaataatccaagaaagcttgtgtcacctgttcaggatcctc

SEQ ID NO: 353941 - DNA, 1012 bp, Cannabis indica
tcctactattgcctcgatcacatgaggaccctcacaatttgggttaaatactcctgcagatgcatctctcgtgtttacgaacactagcctcagcaccaaatcactgacatcaaagagcctttttttcactttttgttgaagtatctcgtaactcggtgttgataagctggattagtaatttgcgaattaatacgtttttcctcaagtagatccaaggacaatttcaagagttcttggttttcttcttggttcgtaatattaacttttattggcagcattgcttccgagccaaatggcagtgagaatggagaatgccctattactgttttctcagttgttctgtgagcccaaagtagttaaggtagttcatcgacccatttaccttttgcagtgtccaacttctttttgatagtatccttcaaggttttattaacagtttctacctgcccattcgcttgaggccttgatactcacgagaagctcttaataatcttgttcctctcgcagaactcaatgaataactctccatcaaactgagttccgttatcggatactatcttaatgggtataccaaacctataaattatgttcttgacgacaaagtcaagaactctcttgtaggttatggaaactagaggttcagcctccatcctccatccactatgtaaagaagtcgacagccaccactacgtactttgctcctcctcgccttgtggggagtgccccaatcaaatcaatcccccatattgcaaatgggtaaggcgaggtcatcattcttagctctgttggtggtacacgaggtatatgtgaaaatctttgatatttgtcgcattttttgacaaatttgcgtctgtctttatttattattggccaatagtatccttgtctaattatcttctttgacaagctttgccaacctgtatggtctccacaaaatccttcatggatttctttgataatcttgtttgcttctgtggggagaacacactgtaggagaggcattgagtagccc

SEQ ID NO: 353942 - DNA, 1320 bp, Cannabis indica
gtaaaataatttccaacagggagcccggtcgagaggagaagccacgtgatcgctgggaagccccttcgcattggggactcagctgagagaagggctcccaggccaacgccttcagctcaggtgccgaacactggggctcctggcgccagcacttccggctctggtaagtctcctttagcagtacattacgttccttctgttggcgtatatgccagtcttaggcctgtagggttcaatgagcgtgtccataggtttaggatgccctcgacccggtggggagaccatatgaaggaatattatttttccaacttaggagatttcctaggtcggtcctggatgggttctggccctccggagcccgttcccttagacccttcggcttacatttcttccagctggttccggccttcggacagctatctcggagacgatgctgccagcgttaaaattcggaactttgctagggccgaattagagagtcagggtaggactagcttgattgctttattcgagtgtttactgtttcccatggatattctaacacttgccttttttcttttgttgtagcaggtacttccatggatgccattttggccgagcttgccggggctcacactcctgatgctccccttcctttaacttcctcccagatggccacccccttgaaagcttcttccagtgcccctccagacactattgacttagtggatgaggaggaggtgcttccgggagaaggtcaagaaaagcaatggggcttttctgaggaagttgaagaaggtaaagaagagcaacgggctcttcctgaggaagttgaagaaagtgaagaagagcaagaagttgctctgattcgcaagcgcaagggcaagatggttgcccaggaagagcccaaacggcagcggagagctgatactccggcccctggtcttgatggcgggatctctcccgaggtagaggaacacacagcccctcccaacattgtgctgactccggttcctggagatgaggcgagacaggaactccggatagctaaacacaactacgccatggatgagtactcccgggggcatgctgacgtggaggctctgaggagggttttgcgagttgaaatgcaaaatacccttaacgatccgaactaccagaatccgtgggatctaaacttggaccccctgtcggattggttcggtcgtttcctcgggcccaccctagctccctttgccgcggagatgactggcgagtttgcgtctcagcttacccggtgtgcacccaagcggttcgctgcttgtgcatccttgaactccatcttccaagtccaggatctca

SEQ ID NO: 353943 - DNA, 542 bp, Cannabis indica
actaaatgatgacctccagatattgtgagattttattttaaatttacacatagtataaaaaggattaaccaaactatgtggacacatttatttaacagccactgtgaacgtttggtgaagaagttgtaaatactaaataatacattttgtatgtaccacaaaaaggttaatcttctcaccacatcgaatattttcacaatttttaattaattgggtgattataaagtgacctgttgtcctctcataatttatacttaccccattgtatctcctccctcacatcataattttaaatgcattaatttttatttttaatatgcaaaatattatgttattaaaataacatacttcgagctgttttaattatatatgtcacatcatatttcttttataaatgagatattaataatggaatttatttccattacacacattgtttaactataaaatggtcaaattaaaaaaaaattattattaagtgtacatgattttcattacgtgtacatcaacccacccaaccactatataagtaaaggtttgga

SEQ ID NO: 353944 - DNA, 651 bp, Cannabis indica
ttctcggaggaagataaaaaacaagttaggtatcctcatgttaacccactagtaatcaccatccagctcaccaattagagcaaaaagggtgtggtggacagaagttcagtgaacatcctttaaagggatacattgaagaaaatgggacttgaaaaagctaaactaaaaccttgcatggtaaatctgtgtggatttacaggccatagtgttgccagtcaaggaataattgagcttccatcaacattgggtgaagcaccttatccacaactataatgcaataatttttggttgtcgacctgctattagcctacaacatactactgggtcgaccatcattaatttgactaggggtaattagttcaattaagcacttatccctgaagtttcaaacaccaataggagtgggagtagtgcgaggtgactaaatgctagcttgcaaatgctatcgcatagagctgcaaaatagaaagaccggtcaccagctaatggcagtcttgactgaagaaggcgggaagaaggatgaagatcttaatcctcagattcaagatgaaagaaatttatcgaaaccgattaaggagttggaagaaattgttctagatctaggaaatcccacaaagtgtgtatacaatgggaagaacctggatgaacaat

SEQ ID NO: 353945 - DNA, 1199 bp, Cannabis indica
ttaagaaaccaagaataacatttttattctatcccaccgaatatggaagtcccaaatacgacccattctcatcagcctcataaatactctaacagctcacaaaatgatatccctttgagaggttactagtatttctgactattgaacactgacgactttgaaaaattgatctataggccagaagccatctcatacgtatacagtagctctttaactttatgagcttccttttatgttgctttacagtagatgtaactatcgtcagcaaacaacatatgcgaaataataggagctcttctaggaactttacaccctgtaattaatccactctgctcataactacgcaataaactagagaaaccctcaacacagataataaacaaatatggtgataaaggatcaccctggcgcagccccctttgtgcaaaaatagggcccaactcctttccccatgagagatcatgtacgagatagtgcccacacaatgtataattaatttaatccatctaccatcgaagcccattctttcaagcatagcccgaagatatccccattcaagacggtcgtaagccttgcttatgtcaagcttaagtgccataagaccatcacgacctcttctcttcctcttcaaataatgcattatctcataagaaatcataatattattcgatattaaatgaccttagagaaacgcactttgagtatccgatataattgaaggcataacaactttgagccgattagcaatgacctttgaaataatcttatatagaacattacaaagggcaataggtcttaagtctcccatgtccactggttgtttcttcttaggaattaatactaaactagtgttatttaaacctctagaaagttgccccgtttgaaagaaatttcaaaccaaagtaatgacatcactactcacaaccgaccaacatttttggaaaaatgctggagtcattccgtcaggtcccggagccttgtcagggtgcatatgaaacaaagccttgcgaacctcttcatcagtaactggctgtagcaagttgacattttgatcagctgaaactcgactttccacagtgctaataacttccagccaagaattatttgaagaagaaaaaagtgcagaaaaataatcaaccataacttgaggcaacctcgaactccaatcagcccaatcaccattattatctttgagttta

SEQ ID NO: 353946 - DNA, 813 bp, Cannabis indica
tcaatatcatcttctaatcttataatttaataaaattaaaataataaaataaactaattttaaaatagatgtggttagataattattattttaagaataaaataatagataaataataattatcctaattatatgtcaatgttgaccgaggttttcggcaaccaatataataataattaagagggctataaggaattaagagagagatttttacgtggttggggcattaatgagccttagtccacgagtctgtgtatttatgatagtatttattacagagaatgttcttggtggatttttcctcttctagttcttatgaaactcagaattctcgacccctgctttaatgaatttggggggtatttatagtgtttttgtggggtgatccctagaattgaggtacatgtatttctgtaattatcagtaaagccacacatccccaatgaatatatcataggtaatgcatcgtctaatccataggctttgtaggggttttatggatgtagtcctttatcctttttgactgatgtgagtcctcataaagtagccgtcactaggctcattaatcatagcatagtagctgtagagaggggcttgtgccgtcagactttaagacatatggcagttccaatacgccttctcccatgcgacattaaatgcgagatgactgtttagataggatctgacacctcccagagatacttagttgtagccttgctctccgggagcatgtgagacttacatgccttctccgggaggcatgtctaaggctaatccccgtggttaaagagacttagctgatttattcaaacg

SEQ ID NO: 353947 - DNA, 890 bp, Cannabis indica
acgactatattttttgaacttctgcattatttcgcgaacaatggctaagtatttaaccaatctcccgcctcttgctaggtattctccattcacctggcataccacgatttgggagtcgctaaaagcctgaagatactcgactttcatctcgagagcaagtttcaatcctgcgattaaagcctcatactcggcttcattgttagatgcagaaaattcaaaacgtaaagcagcgtgtaccttgaaattattgggactgattaacaagatcccactaccagaaccttcgctatttgaggctccatcgacgtacaatgtccacgtctctctgcttgctatagcaatgtcgcttctgtcctctatgagtgccacctcggtgctggggaattcaagtataaaatctgccaaggcttgccccttgatcgcagttcttggtttatacttgatgtcgaactgactcaactccatcgcccattttaacaatctccccgatgcttctggtttcgctagaacttgtcttaaggggtagttcgtcaaaacttcaatgctgtgagcctggaaataaggtcgcaattttcttgaggatattatcaaggcgaaagccaatttctccatttggggataacgcgtctcggcatccagtaatcgcttactgacgtaatacactgggtattggcgtccttggtcctcgcgtattagtaccgaactaatcgcatattctgagacggccaaatagatggacaagacttctccggacaatggctttgacaagatcggaggctgccccaagtgtgtttttaaagcttgaaaggcctgctcgcacttttcgttccaatggaactttttgttgcctttcaaaatctgaaaaaactccttgcacttatcagaggatc

SEQ ID NO: 353948 - DNA, 537 bp, Cannabis indica
ctctctctcatttgcatttaattttggcggccccttctaatcaacatttaatatccctggccaatatttcccctcttcgattttcgaatcgtttttttctttctaaatcaaccgtcatcttccttctcttcctctctaaaccaaagatcatcattactcttcagcgtcgattccagatcgtctctcccagctgtgaaatgatggttcagacgtttccatatctctttgcacatctgtctcaaactttgctgaaaacccatcttttcttacctaccactttgatatggcttcctcttcaaccaaccccaaccccatttctgctcttgatgatgaagatagtcttgttcatgatttcgatcacatttctatccactcctccacggatactgatgctttctgcttgattttcaagctcttatctcccaaaccagctaaaccttcctggattgaaaaagccatgactgaagcttggaccctacgttttccctgtcaaatttctgagtatcactctgggctttaccttgctactttccaatg

SEQ ID NO: 353949 - DNA, 533 bp, Cannabis indica
taatcttaccatcttattacaataatgccatcttaataaaattaatacactaattatttatttgtagttgaattattcttgttaaacataaataatgagcataatatatatttatatacggaataaaataggaaaaattaaaaaaaaaaaataggagtcaaaataacatttacacattcatttgccaatttaaatttattcaaaataacaataaaattatcaaaagataactacataagacataagtattatgaagtgatagagaagtgctttctaatcattcttgtctattttaaggtagtcatttgttagtatacataaatgattgactaattagaattttagccccctgaacttttaaagttgttgaaaatgctccttgaactattgagattgttggatttaaggacttttgtctaatttcattcaattttactatttcagttattgcttatgtattaaaccatgctccccagattttgatatctaccaaatcatgccccttgaactttgatatgtactaaattatgacc

SEQ ID NO: 353950 - DNA, 405 bp, Cannabis indica
aaaaaaaattacaaatatactataggccgaccctttaaatatttatacacatacaaatatttataagaataccacctcctctaaacctttagccgcacgaaacagaatgatcaagaacaacagccctcgatcgttcaaagcagcaacacaaccgaaatgaaactaaatcgtgagaaagaccaccattaattccgctaaaatccactagaaaagaagacatacgatctaaacggaaagtgatgaaaaacaaaccagaaaaactgtgaagaaaactgaaattacacatttggttttggttttattcgatcaaaacaactctccctaatatcgaagtctagattcatgaaatgtagatctctaacaaacagatttaaagctccccccgaatccaaaaccaggtatgat

SEQ ID NO: 353951 - DNA, 753 bp, Cannabis indica
ctacctctcccaagtcgttaaacttttttcaaaagacgatcttaagctttcaagtcccaagctccaattgttttgtccaatcttagatattactctcacctataccatcaaatagctaaattatcatcattgcattctacattcaaaaccgaatccaacgacatatgatatgactatatatatttaaagtttagagtttcgaaacctcacctaagcagtgcacaataactatcggtggcggtaaaaattagtgtactgaaaacacctccaaaaataggggtagtatatatcaaaacgaccacctcaacgaatggatcacaaccatgccaactgtttgtcaaagtagtacacaatatccttagaaagtcgctggaaagaggcaaagctacaaaatcgttactggaaaaagtagtgggctgggcaaaatggcttagtttatgttgttctcctcgacaagctgagtttactggtgaagacgactcgtcaaacggacaccagaggtggcaggaaaatccgctcaaagtttgaatctccaaactttgacttacaatcccggctaacgacggcgaaaggagcgccaccgcttgggggttgaggtcgccgacacctaaggattcgaatggtctggcatgtggggctggacggtggccggagaatggtcgccaaagctacgccagtgatgggtttgtggttttctcttgtggtctggaaagagagaagaagagaagagagaagagaagagagagagagaga

SEQ ID NO: 353952 - DNA, 526 bp, Cannabis indica
cataattttactatgagattgttcaaatcggctttattacaaaaatgtgtacctttcaacactaatgatagctcgtggtgtgccaaaacagaaaaaaatattttcttacaagaaatgaatcgccactttgtggtcgtttgtgtgatatgcgatagtttcgacccattttgaaacataatcaatcccaacaagaatataaaaatttccaaacgagttaggaaaaggtcccacaaaatcaatatcgcaaacatcaatacatcaacaataagaatagggtttaaaggcatgtttcttatggacgaacttcctaacttttcacaacgttcacaggtcttacagtatgcatatgtatcacgaaaaattatgggccaataaaaacaacattgtaaattttttgcagcagtatgcatatgcaacgtttgatcacaaattgggatacatatacgtactatttgatcacggcaatatttaaacaagtatggatcatcctagataaaaaatttcacctcagaataaaatttatttt

SEQ ID NO: 353953 - DNA, 850 bp, Cannabis indica
gaaaaaaatgtcatagtttttttgttggggagttatatttacaccccataaaattataaatgcaccccattattaaaaaaaatataaacttaaataatttttaaaaattacttttaatattttttaaaaaaatttctcctattattttatgttaattttaatacttattttgattttattttcataattttttctaactcatgtatattttctttttatttttttctaagaaaatttcatataattttttattttaattattttgtcataatttttaaaatataatttaattttgtttgataggtatatttttttaagaatataaattgaaagaaaaaagttaaaaatacgtactacaattaaagatataaattttatataaaataaaaattattaaaatggggtgtacttagaaatttttggggtgtaaataaaacttctctttttattttgaaaatttttggtttaataataattttttttaatttttaagtatataaaatcaaatttccctagtagaattctgagagagaatgaacacaggagatttaagtggtttatagactaatagtttatgagcgaattatattaagataagattcttgtagagcttaagggattcaataaactatcttgggatcttatacatgcttaatactaaaagttagatccttttttacaactgataccctaatccctaaccgtggtagcgatttcatatgggcccaatagagtggaccggttacacttaggtgccgtttggtaacacatttgttttttaatattttaatcacaaaatgaaagtaaaaattttgtttttgaaaacaaaatacgttctgtaaccactttt

SEQ ID NO: 353954 - DNA, 1085 bp, Cannabis indica
cgacccgctgccaaaaaaactgatcacctaaaaacccgtatagttgggtcgggttcaacccgaaaaagactataaacgggttttgggtttgggtcagctttactgatttttttctggtcgggttataacccgtgacccgaaatattaaaatgtttttttattaacaaatcaatactttaaataattaattactaatttaatacgataaaacttttagtaaatacctattcgtattcttcttctgtaataaatattattcgtattaattatgataaaagtcctataatgcctattcgtattctttttttgtagtaaatattattttaatcattttcaatttcaaacaagagctctcagcctgctgcctattcgtattcactagtcacttcagtgacagactcaaccactagaccgtctcacccacaccagttgactgacttgactcgtccaactcacccacaccaaaaaatattaattataaaaaaaaaggtcaaaacaatgttaaaaaaaaaaaatggtattttttaaaaattaaatttcctttcaacctagttaaacattcgggctcagcccaacaggacccgaacccgacaatgccaaactcgaagagcccgatctgatacccgacacatccgaacacctgaaaactgggttcagttgtgcatttccaagacccgaaccccgaaaacccgacccgtgtgcagccctacgcaagagggtttaatcgacccaacctgccccccgttaagacagatattgagggatgaggtatagatacattggaagacccaattgcaaaacttttgaggactaccataacaagaaagcacatggtcaaggaatctccaactcagcatgtcataagctttcatgaggtctattttaatggaaaagtacccttccttgcccttcttcctgttgaacgagtggataatttcttgcactataacattattgtcttggatattcctacccgacacaaaagcagcttaagtaggataaatgagaaatggtaaaataggttttattctatttgcaatgatcttcgagatgaccttgtacattattgggaattattttaccag

SEQ ID NO: 353955 - DNA, 877 bp, Cannabis indica
tcactcgttaaagtttctcaaagaatatgattcttgcaatttctatttttggaatctattaatatggatagctaggaaaatgatgattccctttaagtgttaattctggaactggaatgttgtgcataaattcagatgggatcttaaattatactaccactagtgaattaatggtactaaaggataaagaaataattagaagggtaaaatagtattttgaccaaaactaattacgaaccaacacatggagggctaatcactggaatgattatatcaatggacactgcagctaaactttgtttttttttgaaaatgcagttaaacttagtaaaataattctataattactaagagtgcaatttcatatttatagtggagtaatcatggaattaatatacatgagattatttggttgatgagactcaataaataatctagtttattggagctatgaattataggtccatggtccccgaattgccaccttaaaatactgtcaagggtagggataaatagttgtacaaagatgttcagaaaaatttattttgaattggaaatagaaaaatagtatatttttaataaataaataattttttcaaatttttaaatagggaaaagaaaaaaataggtaagacaaagtttgtcgagacatgagttgtgaggacaccaaccttatcctaaagataagtgtaggtgcctatagcattatgctaactctatggagtttatctttttgggttaattaattcaattagataaatatctaatttaaaaagttgttataaatatttcaaggtttttgagatattgtctcaagtggttgagagattccctcataaatatcagtaagcaaatttggttatagatatttatttat

SEQ ID NO: 353956 - DNA, 534 bp, Cannabis indica
aagatggcagtggtcggctaggattgtcttttggtaagaaatagtttctttcacttgtgttgcactccttggtgttgagggaacacattttgacaagtttcctttggttcttaatgagtggcgagcactaccattttcttgtgacaatgttctctaaaaactagagagcactgccatcttcatgtggcagtggttgcacaggctctattgcatgggattcttgtacaattttgaatttatgttcaagtctaagcctttttaagcctaaatgagttaagtccttgttaatttccttatcggattgaggtctctagggtgaaaatatttgtgcaggcccataaaccctagttcgggcacacttgggtgtgtgagtcccaacactaaatgattgattaatgttctcgagtcccctagaggtgtcatggggccctcaagaagaatgtcttaagttatttgacatttataagtcttggtcaaagtcacaagattgatattttttattttttgaaaattgggtataataagaatcaacaa

SEQ ID NO: 353957 - DNA, 728 bp, Cannabis indica
aaataaataaattaaataaagtagacctaaaaatttttttaataacaattaagcccccacataataaaaattctgggtccgtcattgatcatacccctaaatttttattgtcattaaaaattccctctaaactattgagattgttagatttaaagacttttaactaattttattcaattttactaattcggtgattgtccgtgtactaaatcatatttcccaaattttaatatctaccaaatcatattcatcgaactttaatatgtgtcaaatcatactcttgaacttttatttagattagattgttcttactaaaattagacaaaagtccttaaatctaatcattttaataattcaagaggaatttttaatggtcaaaaaaatttatacgacatgatttagtacatgttaaagtttcaagaataaaaatcctaattagcctaaaagatatgacaaattattattaatatttatttactaagaataggagctaaatagtaattttactctcacgctgttgaaaaaaaaaattaccaaacaaaaaagaaaatagtgatggatctataaatttaaagatatcaattcacaaaagagtaatttgcgtcaaaactcccataattatcaatttacttgcaaaaaactatccgacctcatattttggtgggaaaaccctccaaagtactgtccgtttacatttttaaggtgccgtctatccagcctcgtaagtc

SEQ ID NO: 353958 - DNA, 784 bp, Cannabis indica
agctgtgaaaacagttaaaaagaaaaaggctgctaatcccaatggaaagccaaaaggaaaatgcttctattgcgatgaaaagggccactggaaaccgcaatgccctaagtttctagcaaagaaattaggcatttctttctatgctataaactcatgtgttttagagaattattatccccgtgggttattaattctagatctactaaccatgtttgttttcttcttatttcagctctagctgcttaaacttggattgctatcctagcgagttgagtcggatggttgggcaggagggtggagattgtccaagattgaagatgaagctaggaatcttcttttaataatttttgaattaattgctttaatttatgaacaattcaatttcaattattggtttgagatattattccctattttttcatattattgcaaacaattcatttttttgagatattataataaagttttctcttttaagtaatggaatgcatttatgaattgagcttcatatttctttaccttgtgtatgccgatgccaattatttttagatgtttataatttttgtatgtgtttgtgttttattattgatacaaaatctatggtatattcttctctgcaaagagataataccacataaacacttagaattttcaattcaaagtttatgaataattgttaatttcttaaacaattattaagattttgtttaataaaaagatcttttgatctgataggggtggaagaagttaagaagtaatatatgcagttcaacgatctttatat

SEQ ID NO: 353959 - DNA, 1149 bp, Cannabis indica
aacaatttggatttcaattattggtttgggatttttattccctatttttcatattattgcagacaattcgttttattttagagaatatataataaagttttctcttttggaaatgaattgcatttatgaattgagcttcatttactttatcttgtgtatgccagtaccaattatatttatatgtttataatgtttgtatgtgtttgtgttttattattgatacaaattctatggtatattaaattctgcaaagaatgaatgacacataaacacttagaatttcaattctatgtttatgaataattgttaattctaaaacaattattaagaatttatttaataaaagatctattaatctgataggggtggaagaagttaagaataatatacagttcaacgatcttttatacgtattgaactctggattatattcataactccacatgatctctatatcacttagaggtggattatactattgaaatatgtagttcattttcattttgaactctagactatactcaatacatcacagtatctctatggcacacatatttctagattaaacatggatgaaatataaaaacataattagcaaattatttagaacattttcttgatcttaattcttgttccgatcaataaattaccgttgtaatagaaattgataccaataaaagttcttggacaaataatcataggaccttatttgagtgggagaattttaaaattctaagcccatcttcatttggatgacacttgtgatagaactttaaaatacagctgagaaagtaaatctaaccattcatatggatagaaataacttatcagaactttgagaattagatagtagaatttttgcatagtctattcgaatggcttaggcaaaaattcctaatcctcatgaaatattttatggtatctctaatgattacttatcttaagtaagtattttacattaatgtaaatactagattgctatgttgatgacttagtctagaaggaacttacagttccaaactaagataatatgtcacaacaagatatccctgaaaaacaatagtaagaggttaaatgtacttctatgtatgaatttaacctgactcctactattgaatgggagccatctaagatgtaatcaaacaagga

SEQ ID NO: 353960 - DNA, 626 bp, Cannabis indica
gggaaccatctttctttttcacaaacagaactggagctccccagggcgatacactgggtcgggtaaacccaatatcaagcatcccctgaagctgtaacttaagctcattgagttttgccagagccattgtatatggagctttagaaacaggttcacttccaagtgccaaatcaatcacaaagtcaatttctcgttgcggcggtaatcttggcaactcctcgggatacgtcgagaaaatctttaaccactctgattacattaggctcaaatgcttcgggtctgctggagtctatcaccactgctaaaaatcctacacatccactgtgtagtagatccctagtccttagcatagaaataattgggattcgagacccctgaactgatccaacataaacaaatggatcctcaccttctggctagaaagtcactattttccgtttacagtctatgctggctgaatacttggacagaaaatctatcccaagtatgatgtcaaactccgttaagtcctgttctataaggtcaacactcaactccctatcctcgatcctaactggcatagagctaatgcgtctattggagataattaactccccactaggcattagggttccaaaccctctttc

SEQ ID NO: 353961 - DNA, 905 bp, Cannabis indica
tatttctttcctcattatttttacctaagcctttcactcactcttactcctttttccagattcctgcagagaccggccgcctttccaaaaccataattaatcatggcttcgcttgttcgaatttggggggatagacgaggttgtgaagatcctgcaggacttgctgctgaaaggcggcgttccatgaggaggatgaacggaaggaggctcttgctaaggccaagttcgaggaagaggctaagcaaagggaagcccaggtagaggcgatgatccgagaggaggtccttcggagggataggctggaagcgaagcaccgggaagagttgagggcagagggcgaggctactgccaagccaaaacacgagcttcgggaggccaaggaggccttagacgagatggccgccaaggtgaggtccttagaggaattgcattaggcggacttggagtccagggctaacttggccgtggagctaaaggagctcaaggactttaaagaccgagcctcaaagaaggctaagaaagacgagatcctctcccctgtttcctgcagccgttgcattaagcgctttgatgacggcgtctacatggcctggtcgacaaatggccagagtatcaagcttgacttctacccaaaacctgctgagatgattgccaaatttcaagagaagaagaagaagcttgacgccatgcttgaggcgcgcattggtcctcgccttcctcctcgcattgattaggccgttctgaatccagctcatttcaattaagcttttccttatcttttttttttatttacagctattttgcttttgtttaagacaatctttattttaatagctgttttattttctaaggggagacaattattaaggcctgtccccgggcccattgtatatatatatatatat

SEQ ID NO: 353962 - DNA, 508 bp, Cannabis indica
gttttggatctcagtatcatcttgaatagtcatccgaacattggtggcagacgaaacgactgtgttatgaatgccctggttgagtggtgaacaggtattccaagtgtcttgcacactaggtgcgatttcatccacaggagtcatcgcaccatgacccacgttcgacggctgttcgggattaacagcaggcagaacccttgtgtttcctaggttctgcaatgcaagatccaccgccagtggatttgccagatcaaccatacccctacgagtctgtaccaccatcgtacttgtcgttagtttatgaatgaagaacgattcttgattctactctcaatgaaagcaccaaaatattgacctcgcttttagccaacgacagtgggtcgcttttacaacaatatctcttaatatgaattcttagataatatctcttaagttaaatctttcgaccctttgcctagtgaacatacataactttttatagggctatgagcttggagaggaagtattt

SEQ ID NO: 353963 - DNA, 682 bp, Cannabis indica
atgactctactctagttctagaataccatctaaatcttctttattgatcgagcaagaaacacaattacacgagatcaattctcagtttagattctcttttaatatttatctcttacactcttattcaagaatatttttcaattacagaaaattagtatttttttaattaaaatactattcaaaaatttagtataaaagtaaggattttttttaaaatattttagagattttcctacctattttcaattataagaagccaattttgtatgattagagctattgtttttttatctaagtatttgtattaatctttggtgcagagatatttaagtcaccatgagccatgacataagtaataataagaggtctgacattttaggaagactcgatcagaagagttttatatttcaataataagtggcaaaaccaccggtccatttggtgacttcttagtactaattagtggatagggaatttgaaataatatgacacacaaattaataatggaaacgatagacttctcatcctctgattccattttccttcttcgtaattattacttttcttttattatttttatgcatgtttgcatactgaataaagtcacatgcaaagaaaataaggaatactttacaaagtatacatgtaataatatacatatatatacacatttttttattaa

SEQ ID NO: 353964 - DNA, 919 bp, Cannabis indica
ggcgggttgaaaataggtccgactcgcccaattaaatcgaataagccgaccaaccttactttggattattatgtttttttacttcttaatttttattatatataacataaatggttaaatatataataatataaagttatatacttaattgttagtttcaaagttatatatattgtgttgtgatttggtagaatctaatatttttaatttatcttttttaatttttattgactttgattttgaaacaaaaaaaaaagtttggccagtttgggcaggttaacccgaccaaaccgcccaaactgttggtcgatttacagatttttttttttaaattggttgggttacacttaaattttagcaacccgaactttagattgggttagaaaatatatcagataaactgcccaaaccgaccgatgtacagctctactcaaaacacttttgggggaaaatgactggaaatatcccacgttgacaacatgttaacctgggctctgggcacaacactagtgtcaatcaacctggtgttgggtccaactttttgccaccagatggttccgttttattcccagcaaaacttgcatatttctgggtcccagttttggctcctagatgactttgttagttcccaaaaaacactcaaatcttaattattgataaaacaaagaatattcctagaagacttcttctaaactactattggaaatggcccaagttgaaaaaatgtcaacctgggcgcttggcccagcgcctaggtcaacgtgggcattgggtccctgctttggcctctaagtcgatccagttctttcctaaaagcacttttctcctcgttttggacagagacaaataaaatgctcgtgatacttcttcagtattgtgattggaagcgccctaggttgataatatgtcaacctgggtg

SEQ ID NO: 353965 - DNA, 1153 bp, Cannabis indica
taaataagatgtttaaagaccaggtcagacgaaacatggaagtgtacgtggatgacatgctcgtcaaatctataaaggttggggggcacatagatgacctggacgaatgcttcaaagtcctcatgaagtacaacatgaaactcaatcccataaagtgctcctttagagtcagctcgggtaagtttctaggctttattgtcaacgcccgaggaattgaagccaatccagagaagattcaagccctcctgtatataaaatcgccaacaagaaccaaggaagttcaaagtttgactggtcgggttgccgcacttagcagatttgtttcaaaatcaacagacaagtgtgttcagtttttcaacatcctgcgaggaaataaaaaatttgagtggacagaggaatgtgaaaaggcttttcaagagctaaaaatgcaactcgcaaaacctcttgtactctcgaaatctctagatgaagaagaacttgggatgtacctggctgtcacggagcatgatgtaagtgcctactgatgagagaggaaaacaacattcaacatccggtctattacattagtaaaagactcattgaggctgaagtccaatatccattgatagagaaactcacttactgcctaattctagcaacaagaaagctaaggtcctactttcaagctcaccctgttcgggtatacactgactaaccattacgccaaatattgtaaaaactggatgcctctagcggttactcaaatgggtagtggaattgggccaatatgagattatcttccaaccccgaacaataattaagggtcaagccttagcagactttgaagtagaatgcacgggcaaggaaaaaagcgtattagaaaataaccccgagccagtacaaataccagccaagtaacagtgaagacaagccgacttggaaactacatgtggatgggtcggctacaaatcagctatccggtgcaggaatcgcccttgtcacacctgggggcaacacctgcatgctgcagtcaagtttggatttaaggcatccaataatgaggctgaatatgaagctttgatatccagtctaatactagctcgggaaaggaaggccgaacatattgagatctggagtgattcacagctggtggtaaatcatgtatctatagaat

SEQ ID NO: 353966 - DNA, 684 bp, Cannabis indica
taagatagtgctagtgcatagggctatattgttttgtattttgacaaggatcacctgtgaagatttcctctctccctctcacttgctatatgcaaatttatatttgattgaaaaagtatgacactatttacttcggtttccatttgaaatatgtttatttcgatttatgtaccatttactatagtggatctacattatgtttgcaggtagagttttgctaatgttagggaaatcacaatttgaacttcaaaaacttgttgatagctatgtgagttcttgtaattttatttctttaattatttttggctattgaaatcatttatgggttgcttcaagtgtactttctcaagtccattttagtattttatctaatttacttctgtacttccagcgttctcatatatttctgacaatcacaaacccatctgagtctcttctcaatgaacttcgtacagttgaggtttgttcttgtagcttgctctttttttaatcatgtttagcctttagatggtatatatttctatttagtgctgtgttttctgttatcatcatagacatgcctttttaaaggtagttgtgtgatacacaatgtttcttcttctcttaaaatctttgcttttaaaggtagttgtgctgtacaatgcttttgcatttgataggttttcacctgcaaagttatcctga

SEQ ID NO: 353967 - DNA, 961 bp, Cannabis indica
ggagctttggatggatttttaggatatttcataggtttgatttcatgttataattggtatgtttctgctgaaaatttaatgggatacatgttgttgaagctctagttcaagagcttgaactttgctaagttaaagcatgattttgggttatttgtgcaatcttaattttgaaagttgttattgatgttgtatgctctctgttgttgtgatttttatctgtaagaagttgattttgggtatggtttgattaaggttcgaatatatagaaaagtgggcattttaagaccttaaaatctggttttttgggtttttcgaacccagtggccgcagccataaaacctagtagagagccatctttttcccgatgttgttttggccataacttttgactcgagacttcgttttggacgttctttatatcgttggaagctcattccgagctctatatgattatctgtattttgagtgccatgattatattctatgaaagtggaattagggattaaccctatctgtgaaatctcgagttgtgtgactaggattactgacacctgatcaggagaacccaggggtttggaatctctgttattgcagaacaacaggtaatacactagtttgcacgtagagtattcacggtggtgcttatgttgaatatgatatacgtgagtaattgtaaccaggattagggttattaccctaatatgagcggttaatagcctaaggttattaccctagtgatataagttgagtaaatcctatgtcgtgctaagtatatgattatattgagatttaagggttatgcgttcaaggcataatcgggttggactcggtaaccataactgagatgaaccattctaaggccttattgtatttagacttgtgagagcaacacgtaggtctacgcaacgtagacataaatagacgtgtgagagtaacacgtaggtttacgtcacgtaaacat

SEQ ID NO: 353968 - DNA, 579 bp, Cannabis indica
ctgctaaggaacatggaaccggtagctctcagttgccagctgatggtgtggttgcggcttctccactgaggggtgacaacgagttgtctattgaggagagtatgatcaacctgtccatctcttccaacatttcggcctactctgaccctgcttctatcgaaggtcatgttgaggctcttctccatccgagagatgaagagcgtttgaggggcatcggagttgcggggcgagcgaattacggtgtttctacgatttaccaagtaagtttggaaagaatttgtatgtacgcatatgtagttatttttgtgtgttactcgtggtaattcaacttgttttttgtaggctattcaagcagtcctctacttaaggcgtgacacaatttcgcttgatcaaaagaacagagctttgaacaaggagcattctagacttagaaaggaagtggagaacttgaaactggaaggagagactaccaaatcatcatatgacaagctaaaacaggattattcctcgttgaatactgagttggagcgtgtgcgtgccaaactcaaggaggaggaggctaagtatgtcgcattgtac

SEQ ID NO: 353969 - DNA, 654 bp, Cannabis indica
agcttctaccattgttttcataccttgtaactcctcttcttagcagccactatccagatggtcgttactaagaataaaacacttataataatatttatctttcgatatactatgacgttaaattgctaatgaacttctatctattaggaatgaatctcactaaaataagaactatgtagaaccaacaatggagatcaaatatctatttgattaaagcttattatttaaaatttatttttatctaatcacttattttaatctatatattttaataatgaaaattacttagtttaagttgatccaaaattaattaaaaattaatttttaactttaattaactttcaaaaaaaaaaatcgaaaaatctatttataaataaatatacaatttggaaattttattaaaatataataaaataaattcctaaaaaaatatctaatttaagttgttctaaaataacaaaattttcaacttaaataattttccaaaatttaattaaataacaaattaagtatcttgatctaatcaccttaatttgaaaaatattcctatttaagttgatctaaaattaacaaatttttcaaacttaaaaatatttttaaagaatatctgaataactaatttcttagaaaattctacttaattattaatttcaa

SEQ ID NO: 353970 - DNA, 938 bp, Cannabis indica
aaaggagtggcaagagagtgggcggtttcctttttgttcatgggctggcggttatttttcaaattttcaaaattggtttccttttctctcttagcttccatatctatttaaaccaatctttgtcatttatcccaacacctacccgaacctagtttcttgtttctcttgttgttactgttcatcttccctttcagatcaaaaatggtgagaactaagaacctagggcataccaaaaagttggtggaaaccgatgcaaccccttccactgcaccccctgctgcttcaacgttgcctcctgctgctgcaaaatcaggagattcatcgcttgcccagcgtgaatctcaacccgagaagccaaaacgcatccctaagcaagttgctcgaaaatctgtgcgcccttatcgaacctgttcttcttcgtcttcatcttcgaaggaatctcctccacctttagcagtccctcctcctgctgcatcagttcctgctaccactccaatcggtccttgtactcaaacccgagcttagcaagcatctatggagaaagaacttcgtgcatctcgaagtcgtgataaggcagtgactccagccaagaagaagcttaaagccaatccgccttcggcttcttcttcttcagaagaagaaaatccaacggaagtctcctctgacaaatccgcatctctgcattctgagaaggagatgctagaggacatgggagtttcctcagacagtgaggacactgaactcgagccagagcctccattgacaaaatctgctccaactcctgctcgttcttcttcagcagcaaaggcttctgctgctgccaaaggcaagcagccaatgaaggagtcttctcctggtaacgttctctcaactctttctcactgtcctcgattttattagcgtgataatgagcgagattggaatttgtatgctacccg

SEQ ID NO: 353971 - DNA, 1761 bp, Cannabis indica
tgccagtgaactttccctttttcccattcccttgcctattattgttgctggaccgttcaccatttgagctcgaattgcttgggtaatgggggagctggacggatgtcccagtagaaggagcttttgacttgccgagtttttattcaccttttacttgctgaatggcctcttcaagtttgataaaaccttctgcacggtcaaggaaatcgctcatcgagtctactggtctgttccttatgtccttccaaagctcaccaaggacttcaatgccccccagtgttgcggacaattttctgtccttggttacccatgcaaccttagtcgcctccgtcatgaatctgctaatgtaggcttagagcggctctcctggtcttttctttacttcgaccagatctcctaggtgcaacgaaagttggcgagaggaggagaattgtgcatggaactccgaggagaaagccttccatgagttgaactttccgggtgccaacttgaaataccattgttgggtggcttctgaaagggtggcaggaaaaactctgcaacatacatctcctcgtactccttgcaggtccatttgcatctcgaaatacttaaggtgggataagggatcttccttcccagtatacatcttgcaggttggcatcttaaacttgtgtggcaattccaggatattaatctcaggggagaaaggggttccacgtgctcaatccaactcgatatcgttgttcctctgactagtcaggtcttcgaacatattttttagttcgtccaactatgcctgcacggctggactaacctgttcggcctcttggccgatctgagttacattaacatctttttgagcgggattttgagcacgggtttcgggttgcacaattggcgcatcaagctgatcgtccactcctctcctcctattcagaccatttctgagatcatgagtcgtcctcaacctatcaaatacggaaatgcctggttgtctcagtgactgattggtttggccaattttctgaccagcaccattaaccttgttggaattattgggtatgacttctcccgatgaattactagacaaggtccatccccctaccacttggcccaaaggtgggacctgtgaccggggatttgacggctgaccatttatagtcttggaggtattcattgctggatcttcgtctgtttcgcccaagaggatgacggttacgggctgttgcccgacagtttgataggcttttcgtatcagcacagtggcttttcgactacgatcgtcaatgattgcttgctgagcgcttaacgtttccatctccttgtctctccattcggcgaacatgcgcatctgctcttcaaaagcgaggttcaccacagcacggagttcctcctgatcgtgatgcagagtgttggtatgaccttgcatgattccaagagcggcacagagattctgaatttgagtgtcatctccaatggttgtttgaacattggtagcgggcggaatggctgtgctatgaatgccctagttggctactgaactggtattcacagtctcttgcacactaggcgtgatttcatccacaggagttgtcacaccgtgactcgcagttgatggctgtctaggatttacggttggcaaaacccttgtgtttcctgggttctgcagtgcaggatccactgcctgtggatttgccggatcaaccacgccctacgagtctgcaccaccatcgtactagtgattagatttgaaataaagagcgatccttgattctgctc

SEQ ID NO: 353972 - DNA, 544 bp, Cannabis indica
attatttttttttttaaatgactgattaattgtactaccgagtgtgtggtctagttggctagaatgctttacaaaatattcctcatttgattgtttatcagagttcgagtccccatggtaacacttaccttgggccttaaaaaattgcgctattttagttataaaaaacttttgaagattcaagagaatagtcaatgtaataagaaaaaatttgaaactttacattaatgtatcaaatatgatgttgataatgccttatgtttttgttaatattttggataatgagttgctcattgcaaagaaagagacgttgttggttgttgttgtgttgatgaccatgttcacacaatggataccttatgaaggttcttttaattttacttgtatgtagaagaataggcttggatcgtcatttatcttcaacggttggtatcattctttcactcagtatttcagttgcagttgagtattttcttggttgcattccagcacctatttcaacttgtatactaattcttcatacatggccggccagagggtgggg

SEQ ID NO: 353973 - DNA, 836 bp, Cannabis indica
ttttatagtaggacttaatataatgttagattaaataattaagtttgaaagattattaattttgtcaaattgtaatatatattatggaattacaaaatgtgtatagaatgatcacaaaataagagttgcgaatcttttaatttgatgatgaattgaatatgttactcttacctttttcttacttttaaattagtaaaatatgttactaattgtttatgaatgtgaatgtatgatagctattaaaaatatagttgttggagacttgatttattcacttataaggtgtataaatgattccaaatcaagtgagagtagtttggaacactttggagaagaattggccaaaactaaaaaaatagtaacttagttactttttttagcatacaagtgaatacgtttttgaaagctgggagtctttctaatagtccaaattcttccaaattactcaattaataccataaatgcccaatttatgattggtaacatccaaagattttatggtagtcattcatgttcatatagaagtgaaactctataaatagatgtcatattattcacttgtgagagatgtagttgaaattatttattgtgattagaaccttgtgagaatatgctcatctttagacactagactgggcatataaggcttgaaatatctataagagcatctttagaatttttctaagtgtccatatgagagaaaaaatgacttttaagacaaagatcattgaaccttaatcaagcttattgtgtgttattctcctttttctctaaatttttgtaatcttcatgtaatttttttatttgaattttaagtattttgattgtaatcctcc

SEQ ID NO: 353974 - DNA, 954 bp, Cannabis indica
tttaagttctaattttgggtcccaggtgtaggtctgtgttcgggtttggttctttgtctgggttctggtcctagtctgagtccgagatctagacaccaactactggtctgttccagctcccgttacctgaatcccgagtcaagatctggatcactgtcacgggtctcggtctggtttttgttcaggtcccaggtcccatttctgagtttgggttcgggatcgagactggggtgcggttctaggtcccgaccctatatctgtttccagtctggttccttgtttgggtctgagttaaggttcgggttcaggtcccgagtccaggtttgggttgggatacgggtccggctcccaattcgggtctatgtctgatttggagtccgggtcctggtcccggtacagttccggatcaaggtccaatttcagttacgattttttagtccaagtgctaggtcaagtcccggtcaacttccaattttgggtcacagggtacgggttcgtgtccactttatggtttgggacttggttcaggtcagggtgtcggtacgggtccttgtcacggttagggtcttgggctgggtcccaaatccaaacaccgactacgggttttgtccaagccctgggtccagatccggatcccaatctcgggtcctagtctggttcaatttctggtgccgggtcacgagctgggtcctaggttcaagctcgggtctaggtcgggtactaggtccccgacctagttctgtttcccaggtccctatcttgattctgaatctaggtctcgattattgtgtgtgtttaagtcacggtctatgttcgggttcgagtccagtctcagttcgggtttaggtctctatctgggttttgatctaggttcgggtttgggtttaggtcctggtcctggtcctagtcctagttcggttctagttccatttgcgattttgagttcgagtttgg

SEQ ID NO: 353975 - DNA, 1001 bp, Cannabis indica
ttcagttcgtcaagctgggcctgtacagatgggctgacttcattggcattttggtcgggttgggctacgtcagcgtctttctgagcggggatttgagtatgggctccggactgcaccttcgttgtagtattctgctcgtctgttccccttcttctatttaggtcatcccttaggtcacggggtgttcccaatctttcgaacacagaagaacctggctaccttagcgattggttcgcttggttggcaggtggaatggctccattattttgcgtggatccatcgagcatgactcatcctgatgaattcccggacaaggtctgtctgcctacctcttggcccacgagtggaactcgtgaccggggattggacggctgaccgttggctgtctgggaagcattcaccgttgggtcatcctcggtttctccaaggggaatgaccctcagcgcctgctgacctacagtctgataggctcttcacatcagcacagtggcttgccgactacgatcttcgatttctgcatggcgagcccttaatgcctccatctctttgtccctccacttggcgaacatacgcctctgttcgtcaaacgcgaggtttactgcggcacgtaattgctcctgatcgtgatgcagggtattgttgtgaccctgcatgagtccaagcgcagcatggaggttttgcaattcagtttcatttccgatggtcgtctgggcattgatgcctggtagaacagtcatgttatgaacgtcctggctgtgtgcagaaccgtcgtttccggtctcttgcacaccaggcccagtttcagtgacaggagttgttccatcattcagcacgcttcccgtctgtccatgattgacagcgagtggaaccctcgaactcccttggtcccggcaacatcggatccagtggataacttatataattcttagatagccttagcttatagtgtttcggcgtataatccagcggatactggggggcattgaagtccttggcgaact

SEQ ID NO: 353976 - DNA, 459 bp, Cannabis indica
tcttgtttttaatctatcttgaacagcaatccaaaagataaaactgtgttttggtgtgtttaagcgcccccaaacttgtttactccaattcaccttatcccgttgtgtgcgaagaattttataacctgcagcaacactgtaaggggatatatttttaacctcagcaagctctttaaactggtttttgagtgtgaccagtctcctccaataccagcttccttgagtaggcggctggtattgccaccaatcttcattttggatatagacacaatgaatccatttcaaccaaaggctatcttccttgtttgaaatggcccatatgtactttcccatagctgccttgttccactcatgaacccttttaaaaccaagtcctccattagctttaggatgacaaagtgaatcccacgcaattaaccccgaaccagctgcaatagcatgccccttccacaagaaatt

SEQ ID NO: 353977 - DNA, 642 bp, Cannabis indica
atcgtaggtatattatttatttttatttttattttattaatttaatttattttttatttttagtttttttttactgcttattcatttcattttttatttatttattattatatatttttaattttaatttagtattatatttttattttaatttaagtgttttttttttcgaaaaggaaataaataaaatagtccagtctattcttaaaccaaacacaggattactttcagcataatccaatcttgtccagtccagtccaatccttttcagtccaatcctgcgtaccaaacaggccctaaaggataccattaagaagaagctagacgctgccaaaggaagatgggttgacgagttacctcaggtactctgtgcccacagaactaccgagaagacaaccacgagacacactccgttctcgctatagcatttggcttagaagcaatgccgcctgttgaagtgaacatatcgactcatagaagagagttttataatcaagaagaaaaccaggaacttttaaaattatccttggatctacttgaggaaaaacgaactgagtcgcaaatcaccaacgccgcataccaacaccgagttacaagatacttcaacaaaaaagtcaagaaaagactattcaatgttggaga

SEQ ID NO: 353978 - DNA, 961 bp, Cannabis indica
tattctttatcatgtgtaatctatactttacatctttttttaatatcatttacaatactgtaagctgatttagaaaaattatcaaagtgatatctatttttattccgccaaagatggtagatgacagcagcaagagtgatagagctaattcaatagttgcctaagtccttctaagagaataccctaatgataggaaaatttcagaatgatggaatggttgtgtacttagtgtaaactattactagattcatagatgtcttgatgtgaacttaagaaaatctagaactgttaaccaatgttttcatgtttgatagttattttaaagtaattaggggtggaccatcctatggtcattaagataagaaagtgtttgtttcaacaaatactacttttctaagaatatgactaaaatctaaaagtagcaaagtagaggagataaattttatttgattccaaaagtgttctatcaacttattctatataagatggtcccactgcctctgtaatcttgatacaaccgatgaggacaataccatttaggttcctgaatagaaagtcacggtaccttgtcgtagtgggagggtttcaaggaactcaccctgttatgacttggaaggcacttgtgataaaaatccattgtttgtctatacaggtaatggatagtcagaacaaggaactaagaagcaaaaccaagagaactatggttaaaaaccattcatatggaataacaaaaaattttctattacaaggacaaagaaaggaaattttgataataagtctattcaatggacttaacaatactttctgttcctagtattataggtttggaattatctaaacctatgacttatggtatacttggtaatttacttactctagtgcaagcaacttactttagtaagatgctggtgtattttttaatggctaaatctataggaaacttttcgacttctagacatag

SEQ ID NO: 353979 - DNA, 704 bp, Cannabis indica
caaatcatgtgaaccatgcaacgcaaaatgattgctgatcttttattaattagtaaatctgattacattaaaatgggtttatttagggcacaagccgagaaaactcccacttgcactaatataaaactaaaggtggatttcaatgaatctcaacaccttgatatccagatcaagtgtagtacgtagtattatctctgtaatagaatctgacaggttgtattcaatacaacccttttttttcatcattacatctccttaatcacaaaatccttaatattgtgaaattcctcactatatgtctactcctccaaggatattgaattctttactatttggcaactacatgtgtgttagtcaagaagtaacactagtagttaattcattattggtacaatgccaaaaactttatagaactttccttaggctgaataagtatccttcctgcaactttaacattcagtctcattggtagagttagagacttcagataagtttttacacttctccaaaatcaatgttccacccctagaataatcaccatctcattagtagactttctagcattaatgcaagtctagaagcatgatttggtgtaatctaagagtattaaaataccacccttatcaactaacatatagttcatctttttgatcttaagattcattagattgtcttcgaatgttccttccctggattaatctgat

SEQ ID NO: 353980 - DNA, 514 bp, Cannabis indica
agttcctggtaaaataacttccaacagataacccccatgaacatacttattcctgatcgaccacaagtgccaggaaacaacaagaataaactcaaaggtggaaggagaacaaaccttatgaagctgttggataactaacaacacatcacttgatcttagcttaaccacatgatcccagaaaccacatttcttccacacctccttactccaagaacaatctcacaacacatgagccccattctcaagccaccccctttacaccgaggacacgtaggcgccacctaaatgccccatttcgacaaagtataattcgttggaagctatttatgacatactttccaaacaaaatgcttgatttttggcggcacatttgctttccataaagcttaccaccaccgttccttctccttgtcattggattgatgggacgcctcccgcatatcatgagccaaccgatacccacttcgaaccgtatattcaccatttttagtgtaatgccacatcactttgtctt

SEQ ID NO: 353981 - DNA, 663 bp, Cannabis indica
gtaaaataatttccaacaggagctacataccaaagattggttaacaaaatatttaaagaccagattgggtgaaatatggaagtgtacgtggatgatatgctcgtcaaattcagaaaggctggggggcacatagacgacctggacgaatgcttcaaagtcctcagaaagtacaatatgaaactaaatcccttaaagtgttcctttagagtcaactcgagaaagtttctaggcttcatgatcaatgcctgaggaattgatgctaatacagagaagattcaagccctcctggatatgaacttgccaacaaaaaccaaagaagggcaaggcttgactggtcggattgccgcgctcaacagatatgtttcaaaatcaacagataagtgtgtcccattcttcaacatcctgcgaggaaacaagcagtttgagtggacagaggaatgtgaaaaagctttccaagacctaaaagcacaacctgcaaaacctcccgtactctcaaaacctctatacggagaagaactgggaatatacctagctgtcacggaacatgttgtgagtgtcgtgctaatcagagaagagaacaccatacaacacccagtctaatacatcagtaaaaaactcattgaggctgagggtcgatacccgttgatagaaaaactcgcttat

SEQ ID NO: 353982 - DNA, 663 bp, Cannabis indica
ccgggtttttttcagaagtgttggccgattgttaaggatgatgtcatcaatttggttaagcagttttttcataatggttgtcttcctacagacattaataaaaccatattggtcttaatccctaaaaagaggcagcctatggatatgagggatttaagacccattgcgttatgcaatgtgctgtacaagattgtacccaaagtggttgctaatagacttaagagtgttatgccgtctatcatatctgatactcaaagtgcgtttttgcaaggccggttgatctcggacaatatcatgattgcttatgagattatgcatcacttaaagaggaaacgaagagggagggatggttatatggcactcaaactagatgttagtaaagcctatggcaagcttgagtgggattatttctgggctatgatggtaaggatgggctttgatggtcgctggattaatttagttatgcaatgtgtatgttctgtttcctataccatttcacatggtgggaaggagttggggcccattgttggtcaaagaggatttcaccaaggggatcctttatcaccatatctgtttattctttgtgctgaagggatctctagtttgttgcggagttatgaataaagtggcgtactcacgcggtgtaaaattgctcgaggtgcg

SEQ ID NO: 353983 - DNA, 856 bp, Cannabis indica
gtgggtatgaaaattcaagaagacctctcagtcgcataatatttgttgattccactagatctccccctagattgttgatcctttctcgttggtttcatggatatctccccacggtgagctcgtttccatggtagaacatctaagcaaaacttcttgctggcgttaatggagatcaacccaaagttcttcgccggcgtttatggagattgcaaaaagcttctacatcattggtggttgatgatttcagatctccatctcttaataagtgttgtcgacgatggagagaaactcactgttttgctctgcaagaaggagaagttcttttggagaagaagtctttgtgtcgtatttttgaaaaaaaaaactttagttttcctaattttgtttattttgtcatatggtaataaaaaaaaaataaattttgacccaaataaagctatatatgaaaaaactcctttgtttagtaataaattacaaaaaaaaaattaattaatgcttataattaatttaattttaaataaaattaaaattaattaaagctttacaaggaaataaattgtaacaccctaactattttaggcatgttaacatgattttaaacttaactgtgcagctcgttgctaatcgacgattttattgaaaattgtgattaattaagattttacttaattaattataatattaaaataccatatttataataaatcgagatcccatttacaaaaatttcactatgcatatacaaaagtttgtcgcctagtgactatacaaaataagtcctgatgtcccaaagatcgtacgctccaggcctaactgccccgacatatacatgttggaatttattttaccaggatct

SEQ ID NO: 353984 - DNA, 710 bp, Cannabis indica
aaactagaaactaaaagtttccctatcgataaaaagcatggcaatagcctaaacaacacaaaaataggaagaactagggttcccaatttttccccaaccagtagaccggttctacaaccggaatttcggttctggaaaaattcctggaagctccaaccggtcgaccggttgctaatggcctccctgaaccggaattccgattcagtacaggaattttcaaaattccataactcgactaaattaaccccaaaccaattcaaactttccagacctgctctaaataccccaaataacagttccaatgcaataaaatcacccagcaagcacagatacaaaaaatgccattaaagctccaagctttgagttcaaaactcaagcttggctaaactccacaaacatgcatcaaaaccagcttgaatctactcaaatatacataaccaaacctctgaaaacaacagcaaacaaataccacaagcacaacaagctatttcaacatttcaccattaaaatcaagattttgagtcaaaattccaaacttgaacaaaacaactagcatgcatcccaaactattctattgcactccattaatcatatataaattatagaaaataacccataaacccagcaacaacaacatcaaattactaagcatgcaactcacaaacttttcttaaaatccaagaaacttagaagaaagctataagaatctt

SEQ ID NO: 353985 - DNA, 830 bp, Cannabis indica
aaaaaaatataaaaacagaaaaaaaaaagaattatttctaagataatggggccaaaaagaactaggcacgttgaagaaggttcgtcgtcaaacccgccagctacgggtttcgatagaacccgatttgtaaatgaggaggctcaaaatcgtttcatgaggctcaaaattaggccttacattgaagatcagggtattgaattccctgaaaatcccttgaggcgtcaacctaggttcgaagcaatttaggctcaaattgagaggatgaaatggggtagtttcgtggatgctcggggccgggctaatgtgactatggcatgtgaatttctcgccaattggcccgagcgcagaaaaggagaggtaaaggtgcgaggaaagaaggttcccgccattgctgatgcattcaacgttatgttctctgtgccggattattctagggaggaacaacgcctccgaattattgaggaggaagagcagtttgatttggtggacgtggctgaaacagtgggatttttggggttgaggttccacgataatgatggccaagacggatcgccaaacattctacacatgtgtgagataaacccggtggcaaagacatggttgtacttcgtgagtgctcgatttgtgccaagtaaacacttttcagatgtccaaatggatcaccttaaatatgtgtacgccattatgaaggggtacaacattaatattggacaagtcatcagaaacagcattgagcaaattgttcaaggagccacgggtggtggtcttggtttggcaggtgtgataactgaactctgcggggcatatgatgtgccacaactagagtatga

SEQ ID NO: 353986 - DNA, 1047 bp, Cannabis indica
gaattattaaattagcctaaaagtgcaaaattgatataatggtgcaaataaatataatcttaaattgagaattgtcatttagaaatttaacatgtcataatcattttctcaaagtatttatgttttgattctttaattaattagcatattcttgtgcccattaagttcaagaataccaatttaaacataattcatttaagttagaaaaggtaaataatatattcctaagtcatttacaaatcatacttttttaaggtaatattcatgcatcattcaagtaattctattatatccgaaattcagtggaggacgcgtgtcaagataaaaggaatatggatcgatgtaatcgcttttttatagaataactcattaataatgtaagtatcagagtatatttgtaacctgctgactgtaaggtcttaggagaggaatcgatctacaaaatggtgcttagtatattagcgagaaatcatatgtcgctgaatgcgaatagcgaggtatcaaggaaaatacacataggaagacgaaagcgacacatatcaattgcaaaagcccttagtgtataatctacaaactaagtgtaacagtcgaatcgacttgagaccaagtaagcgaggtgcccgtctcgctatgggaaggcttcctgtaacttcatctagttaacatcagcgaggcttacaaccctggcaagtcagaagctaacattcaagtgagcttcagagaactctttgcagataagaattgcgattgtcacaagacatggatcgtcgacctcgaaaggaaaatggctccagctcactattgagatcactggaatcaagcttttgtcgagacatctccagatacaacaattaaagacgtgtttaatacatgatcattttgacccagtaaaagtgagaaaatcacagctatatgattttcaaatcataaccgcattaacactacgtgatatgtaatcaaaccccgtgattttaggggatgattgttgtaaacagattatggtcaactttgtaattaactgctcgctcactatgtaattataaatag

SEQ ID NO: 353987 - DNA, 1267 bp, Cannabis indica
tactcattaattttgaaaataaacttaaaggttactcaaatgtatatgaaataataaaatgctataatataaacaaaaaacaactaactcattattaagatgtatacaaataaattttggaagaaaaaaatgtatctcaaattatatactcattagttaccattttacaatttttattagttaacaaataaatcttatttttaaaatacagaatacctatataatatagggaaatttgaaaaactatactttaaaaatcctaatattttattcataaaccaatacatttcaaacttaaaaatatatgacacttttatcaaaaacccaaaaacaaccctcacataactcaaccccatcttttcccaacccacacatgcatcggatccccccatcggacccgtcggacccccagcttgcaagcatcggacccccaccggtccccatcgggttcggtcgagatggtgcggggtcaagatggtgcggctgtgggtctccggtggtgttcggccagttttcgtggtttgtcgtgcgtggtggatcgacgtgcgtggttcgtgcgtggtgatctacgtgggtggtgaacgtcgtgcgtgggtggttcgaggaggaagagagggatcgacgttgatgacggtgggtgtggggtttcgggttgggtcggaggggttagggtcggactggggttgctccgatgggggtttcgggtggtggtgggatgtgggtgtggtgatttcgtggtcggcagagagagagagtttgagtttgagagggaaggagagagaaatggttagaaattatgaggagggtattttaggagtttttgtaaaagtgtcatgtttttaaaattacccttattattagttttcctccccaatttccccttataaaatgcataaaaagtcaaattttcctataatatatgagtgacgaaatgtatatcatatcgttttatttgaatattactatgaagtatactaaataaaattatttcatatatatacttgttatattatctgaagtatatttataggtttactagcgtatattattatgtttgattatagtttattctgtactgaaaaaaaaaaatattgttccaagaaacagaaattatcacttttgattatgtttcattatagtatcaataatgtcaatatatataaaggaaggtttgaggagagttgagttggctttctataaagatagtgttatcacttttctattttatggtgattttaaatttttttaattattttttataataaca

SEQ ID NO: 353988 - DNA, 564 bp, Cannabis indica
ccatttgtcctaaccaattcctccagctgtctaatccgctcttacatatcagctatgacatcagctctagcatatgcaccaacctgaggtggaggaggttgggtaaatgtaggtgggcctgctctcttgtgctaattagacgcccataacccttttggtgcccacgatgtcttccaaaaacagattgcacaagtgataaatcttcgtcttctatattaatgacattgcctgacacttcagtatttggaatggactgtgtttgttgtgtcccacgtacggcaatcattttttcctattaaacaataatatttaaattaattacaaaatttatttagacaaaaaatataaagataatatatgtttaaaatatacccatgtttctctagtagtgtcggtcacccatcctttgccctgcttatggtgagtggcctgccaagcatctgggattatgcttgtaaacatattacagtcaaatttgtaatttgctgaccactatggaattataaataatgacagacaagatcaaaaaagggggacgaaaaaactcatacgagagagttccta

SEQ ID NO: 353989 - DNA, 1186 bp, Cannabis indica
ctcccttcttttgaagaaaaaccacctccttcatggctgaaaattcagaaaatgttaataccccacatgaggaaactaatcatcgttctaggaaagagcccatgggctttagaaggtctaccaaccagcggtccagacgaaccacccgttcaaggaggactcaacctaagggtggccacaacactcgaaccacacgctctcagaggacccaacctgatgttggtcctagtgtgcagacaacacgctcgaggagaactcagcgtgggagtggctagaaccctgggacgagggatgaagagctcaatcgtggagttgcccagtctatgggagatggtacttatgaaacgaaaaattgccgcctgagacgccgtctagatttagagcatgatgcagccacgaccagggtggcacaggggacgaatgctcaaaatcaacctgaacctagagttagaagaccacgaggcaggcctcgtggctcacgaccaagagacaggaaaatgcccgggaagaataacccagggaaaatgagataccccttgaaaatcagaatgaacagccagatgggatgcaaccggaaactaatgaatgagaaattcctcatgacaatgaggaggatcttgggactcaatcaggagagcgaaggtcacctgcgagaaatcaccagcgttcttcccaaacccgtagagcgaggactcgtacagaacctaatgggggaaatatgatgaaccacactcagggggaaagaacaaagcatgaagaagcaagtgtgatgtcgaggcagtcaagaacccatagtcgatcaactcgaagaggagaaagtactcagcgagctaatgatcgagaaagtatgggaaccagtgaatccacgagtcactcaaagacaaagtctatgagtaggacgcgatctgtgagtaagacgaggtctgccagcaattactgccaaccagatttgcgagtacactttagttggaagaaacctaaccttcgccaacaacttggtccaaagtaagaagatcccatccaattgcggataaacgagctggaggacaagtttaggtgatattaagttgcagaactagggagacagtctagatacgactcagacgaggagcttgagccgtatcatccagatataatgaataccccttttccttcaggattcaaaaacccgcatgtctcgtcatat

SEQ ID NO: 353990 - DNA, 528 bp, Cannabis indica
actagaaccgaactaggactaggactaggacaaggacctaaacccaaacctgaacccagaccaaaacacaaacagagacctaaattcgaaccgagactaggactcaaacccgaacctagaccaggaccaaaacccacaaaataaccggggcctgtacccagaatcaggatagggaccacgaaaacagaactaggaccgagacctagttaccgacccaaacttgaacttgaaagtaggacccagctcgtgacccggctctagaaatggaaccaaactgggacccgagattgggatccggatctggacccaggggttggaccgaacccgtagtcggtgtctggatttaggacccagccctggaccggaaccctgtcaaggatccgaacacacacatggagctgaacccagtctcaaaccaaaaagtggacccgaacccgtaccctgtcagccgaaatttgaaccaaaatgggaagttgaccgggacttgaactaggacttggacttggaatcataactgaaattggccta

SEQ ID NO: 353991 - DNA, 685 bp, Cannabis indica
ttatgcattttggaaagcggggagagcaaagtccaagatttataggtctttttgagatattggacagagtggaacatgtagcttatcgactggcattaccactagtattagctgagacgcataatgtgtttcacgtttctatgctacgaaacacgtgtcggatccatcacacatgctgacctatgaaagaatggaactaaagcaggacttgagttatgaagtgcaaccagttcatattatagagagggaaacgaaggagttaaggtccaaaagtattcttctagtaaaagttctttggagcaaatgtttagaaagggaggcgacgtgggaaatggaggaagacatgaaagcataataccccgaactttttggtaaatttaatttcgagaacaaaattttctttaaggggagtaaaatgtaatacctcacaattaattttcattaatatatatgtataaatatgtatgaataataaatagtatttgggctatcttggtgtaaataattttttttaaaaattatataaaagtatatcgtttatattttattgcctaatagtagttattaagttttgatagtgtgctaatagtataggtgattatagtgcttgtataggtttgttcactaatagaatttattattaaaaattaattaaaatgcatagatgcattggtggagtggtcca

SEQ ID NO: 353992 - DNA, 1250 bp, Cannabis indica
tctgggttggagtctaggtcctggtccggctatggttccaggtctaggtccaagtctggtaacggttctaggtccaggtcgatgtcttggttccggtcctgttcttgggtcccggtctactttcgatttttgttccaatttcgagtcatagggtacaggttaaggtccaggtttggatctgggactgggttcgggtccgggtctaggttcgggtcttgatctaggttcaggtccgtggctggttcccagatccagagactgactacaggttaggtccaggccctgggtcccagtctagttccattttgggtgccaggtcatgagctgggtctaggttcaattccgtgtctggggtcgggtcttaggtcacggtcatagtttcgttcctaggtccctatcctaattttgggtacaggtcctccttctggtctggatttgggtcccggtctaggttcgggttgggtcctagtcccagtttgggtttgggtctcagtttgggtttttatttgggtttgggttcaggtcttggtccttgtcctggtcctggtcctaaacctagtccggttccagttgcagttgtgattccaagttcgagtttggggtagggttcaagtcatggtccgagtttgggtttgggttcggatctcggtctaggtctagatcgtgctctgggtgtgggttagggtcctgggtctgggtcaaggttcggatctgagtcccaggcttcgatctcgatctgagtctgggtttagtttctggtgtaagtcttgggttctgatcccagtctaatttcgaggttgggtccgggtgcaggtctaggtttgggtttgattccgggtctgggtctgagtttgagtctcgggcttgggtccaatttcgagtttgggtctgggtttgggttttttcctattatgggttcgtgtccgggttcttatcctattttgggtccagggtcgtgttcgggtcccgagtcttggttttagtccagttcctagtctgggttcgggtccaggtctcggtcccagtctttgtccggggtcaagtttgggtccttataagggtcttgatcctggtctcggtcgctggtctcaggtctcggcgaggtttaggattaggtcaagtctaggtcccggtttaggtttgggtcccaagtctcacgtcccaatcgtagtcaagatctcagtccaggttctcgtcttagtgggatatggtttgggttcagttctcgtctcaagtctgggtcctagtca

SEQ ID NO: 353993 - DNA, 895 bp, Cannabis indica
atgcgatggatggctagtttgatcacatgggtaagtttagaaccttatatcttaatgggaaatattttagagaaaataaaatatcgggattaagcgtggttatggaatttgaccattttaccccgagctttagaaataccctaattttaagtcaaagggcaatttagtcattttgtaaagtgggggttgaggtggcttcctagccttgtgacacctagcaactttatttttcagccaaggtttaattgattaaacccttatttcatttaggaagaaaattagagaaaataagaaaaaaatcaaaagattgaaaaacactctctcttttccctctcttttcgaaccagccaaatatagggggtatcattactggattttggtgtttgcagcaagggattcaaggaggatcaagcaaacgtaaccctagaaccatagtcttatgttttgaagcattaaattttagtttgaacttgtgattttgtgaaatgagggctgttagggttaggtttgtttagggttagaattttaaggttcatttgagttgattttaggtcctagcagctggtattgatggttggattaggttttgtgcaagtttgagctttgagttcaaagctttgatctctaatggcataatttgtttcattgagtttttctgtgaattactggctggaatatgttgtttatgcattgattaggtactctggaaagtttggtggcatttggtggaaaattgagcaagaggtgaaaggtttggggagaactggtgcaaaccggctagccagttttggcaggatccctacacacttcattttctcaattttcgtccatttcagtgtcgtggttgggtgtttccctaattccagagtttgagtaacctctagggagtataaca

SEQ ID NO: 353994 - DNA, 650 bp, Cannabis indica
agatgcattggtggagtggtccattgtataaaatttgatagcaaatttatatgtaaccaaattgagaaaagatatgataggttttttttttttttcaaatttgatttctattaatatttaattaacttttctaatacattaactaaatattagttcatattttgagatcacgtaccaatcaattatcctctactctctagaccctcatctgaagcctcatatccttggtctcaactatcatagttgcttcttcttatttcttgatacctatgaaaattttcaataaaaaaagggttaaaagtaaagcaacaattgaggttttgagagactcaagtttgttgattggaagcctttcacagtattcgatttctaaggtatgcaacttttccttgttgtgtaattttcttgaagtatgattttttttcgttttcagagaaagagtgttttgtaaaacaattgtatctctctgctcgtatgtccgtttttagtgatctcagtaccgttttaaaaataatttaatgatctacattttgtatgaagagccttttccctaattctaattatttcagtgtcataaattcatgttttcatgctggctgtcgagttacagttttttttagatttccttccaatattgcctcagtaaaagt

SEQ ID NO: 353995 - DNA, 872 bp, Cannabis indica
attttttgcggtgcagtttttaacggtttcttagtatcgcggtgcgggtgcggtttggaaaattggaaaaaccggatgtgcatcttaatttgaaaaaatgtttaaaagcctcaccacccgaaccgtgaacacccctaggaccgggacctagtactcgacccagacctgaactttaaccttggacccagctcgtgacccggcaccagaaatggaacgagactgggacccgagttttggatccagatctggacccacggcttggataaaacccctagtcagtgtttggatttaggacctagtagcccgaaccctgacaagaacccaaacccacacccaaacttgaacctagtcccaaacccaaaagtggacccaaacccgtaccctgtgaccaaaaattggaacaaaaactggaagttgaccgggactggaacaaggacttggacttggaatgatacctgaaattagacctagatccagaaccgtaaccggaccaaaacccagactccaaatcagacctacacccgaattgggagcgggacccagatcccaacccaaaattggactccggacccgaaccggaacttgaactcagacccaaacatggaactagactagggacaaagaaccaaggtcaagacctagaaccgcaccccagtctcgatcccgaactcaaactcagaaatgggacctgggacctgaaccagaaccagaccaagacccgtgacaatgatcctgatcttgactcgagattcgggtaacggggcgtggaacagaccagtagtccgtgtctagatctgggactcaaactaggaccagaacccagatgaagaaccaaacccgaacccagacctagacctgggaccaaaaattag

SEQ ID NO: 353996 - DNA, 613 bp, Cannabis indica
gtgttatataatgaatgtatgtgaattatgacatttttttatgaaaataattttattttcgttctgaaaataatttatctggattccttatgaaaaattaagtaattttggtttttacagaactcaattctgataaaattgaaaaagttatgaaagtttgaaaatcggggttcaatggtgtcgaaatttggtgcaccgcacgcacagaccttcagacaagatgaggttgtgcacgcagatctcagacatttttttgtctaaatgtgtcccttcttcaaacactgagcagtgcgcatacaccttgcagctgaccgagatttctcagttaaggaggctgcaactgctccttcccgcgcacaaagggcctactagcagcctctcgagggctgcacgtgcagcctcgacagccaacaccccttgtgcaatttttgtgggatttttccccaaatttcattttttttaattttgaaaccgtaaatttcaaaataaaatattatatttaatatatttaaacataaatatcaattttaaattaataaaatttaatttttaatagattattattaattctttaatattttgaggtttaaatttaaaaattgattattaaatt

SEQ ID NO: 353997 - DNA, 1075 bp, Cannabis indica
ttaatttgagttttttaggttagatatgaaaatagaattactttttaattttattttggtgttgatttggataaaaggaatagattgtggctgttggtcgatcatggatagtaatagagatgggcatttatagtgatgatggtggtcgactgtggatgatgatgtagacgatagttttggtgatgatggtggatgaacctgagatcgaagaagaagagaagaagaaaaagaaaaaaaaaataacttattttatttatttattttaattttaaaacaattttgtaatatttaattttatttatttatttattttgtaaatagttttgtaattttatttcttaaatatttatttacgtggaccaataaaatagtcacaacaaattataatttatgtgactaatacatctagccatggaccttttagtctcaacataggaataataatttataattagttcactaactttttacttttagtcacaagttttgtgtgactaaagtaagtatttttgtagtttttgtttgttaaatgacaaaatagaccctgtatttctaaaattgtacaaataagacccagaaataatttttcgttaaaataaaatttaataataatctgatctaaagatgttatgacgaaactgattagattttttgtatctgttcgtgttaaaaattgtcttaaagttagttatattaaaaaataaaattgttgaaaattgagctcatggtcttatttttactattttagaaaatataggctccatcatgtcatttaataaaacagagaggttaattgataacttttacaaaacacatgatctaaaatatttaccctaatatactacaaataaaaactgcgaagccacataatttacactgaaaaggttcaatgatttttgtgctttaattttagccttgcatagtaattaattaggatgatacatttttttttctgaaatttttaacaatacaatttttttttatattttatttataattttttggcctaaaatttttaattacaaaaatattcttttaaagttttcaaattacaaaaatacactttgttcagcaa

SEQ ID NO: 353998 - DNA, 848 bp, Cannabis indica
ataatagggttgattatggatttgaccagttcaatgagtttgatggtgcattttacaacaatgatcctatagtagatttgaacgaggatggtgatgcggagttggaagttcatgaacctatagaggtaccttctttaaggttagaactacctccaccatctccaccacgtccaagggagcaaaggaaagaccaagaaagaagaacccctcggagtgaaaatcacgaaacaccaggcaccagtagcagccgcccaggtcctcctcgtagtactgtaccatctgattttgaagtttgtacaaaattcaaacctattgtgtggacaagggaagacatagaggaaaataatgtttatacaacttcttttactggtacacattcaggggaaatatatgttggcaagctgtatacaaataagactgaattgaaaaatgtggttggaaggtttgcattgaaaatgaattttgagttcatggtgaagaagtctgggaccgatgttttttatgcaacttgcaggggttcagattgcaaatggagagtgagggggaggaagagggcacgttgtgacatgtttgaggttactgtattccacaacgaacacacatgtagcctggattctagacatgctgataaccgtcaagcagcaccgtgggttgttggccacctcattaagaacaagttcaaatcagatggaactaagtacaaagctaaagacatacaaagggatatgtttcaggagtatgggatcaagatgagctatgagaaggcttggaggtgccgagagaagggacttatgtattcgaggggtacgccagcagcagcttatagtcagttacctggttacttttac

SEQ ID NO: 353999 - DNA, 653 bp, Cannabis indica
tcaaagggatggaagagttttgttaactgtttgtttggattagtggattaaaaattacaatgcaaaaatcagggtgaaaatggaaggaggattcacaaacttggtgaaaaaatcattgaaacctcgaaaggaaaataaaaggattgctattaaagttatcaggggggaagaaatgtcagtaagtagctcagacagtgatgatatggaagagtcgggaggggtcgaagagaaagaagtcagtgaagaaatggaagatattctatgtgaaataaaagttttgtggcatgaggataacatcatggtgaatcgaggggatgaattgtggcatgaagaaagaggaaaagaatgtgttagtgaggcagaacagcaacataaactgcctataaagatagatagcagaaatgatggagttgataaaggggaatctaaattgagcaagtcctcttggcataatagtggcaactttgacaaacatgggaatgacaatagtatctaatgaggaagcagaggtagtggaggagggtaatgagaaggaagtgaaaaagaaaagcagggaattaaaaatttgaattttaacataaactatgataaaagtcagaagaagtccagggttccaaaaaaagattacaatgaagattcttacatggatatta

SEQ ID NO: 354000 - DNA, 1104 bp, Cannabis indica
atggcatgtctcggaagcttgggggtatatcttatccacaatttttgcaagcatgacatgtgggaattaatcaaaaaaggccaaggagtgattaagctgcccaaaggcctcgctccgcgatcttggaggaaaatggccctaaacatgcagaacaaacctccgcgaaagaagtcttcttgagtgtaggccacgaaggaaatgtcagtaagctagcgactctctcccttctagaaggcaggaccttttgctcccgcaaagattatggaccttccatcaagatgcattggtccggggtactctttcgacacgcaaaagctcggtccgtgcgtgccagcctacgagcccatagattgctcatttcctatgtaagatgtcagaggttgtctcccatgccacatagagcttatttgtccttgtgtaccgtgaaaaacaatccaacgactaggagcaggggtaattcaaataagaacagccttggaatgacacgtgtccaaagcactgccagtacagccagtacacattgaaaatatgccacctaccaatccaacgatgggggttcatccttatgaagatccatcaacggcggtccttgtaagggcattggcctataaatacccttgaagacacacaaggcagggggtccgatccaatccaaactttgacttcttctctttccatcctcttggctcttcacgtcaagaccgaacacaaatcctttgtaaacacattactatgactccattattaactctagagtattcatactaagcttccttttcttcaagaggagcacggtggatcggagtaaaagtccatcctttttgtatttgtatcaacaatcaccagccaaagagcctaataaaatggacacgtagactaaggataattaaggcctaaatcacataaaaatctcttgtgtattactgcattacttatgttttcattatttttctaagctctataattattcggttgctgaaaaactcggtaaataacttctttttgggctttgtgccccaagtaaaactctatttcaatgtaatcttttctattcaatatcaataaagaaatagattaatttcattacttgtttaatgtgttatt

SEQ ID NO: 354001 - DNA, 572 bp, Cannabis indica
tttatgtcaatttcctaataaagatattggtttgctttttctttccttattgggcttatttttttggtaaaaaaaagcataaaagaaagaaatgatgagtgggccacatgctagactttggaaagaaaattaagggcaagaggtcatattgatataaaaagaagaagaagagtgacgtgaagaagattgaagaggctgctggtctactccaacaaaatgaagaaaaaaaagaaaaagaaaaggagaaaaagagagagttttatttagggttttaatttagcatttttattttggagattggcaaaaatcaagaggaagaagaagaggattttggcaaagaaagcttggagtattgtgacaactccaatatgggtttttcttttcatccttctcttatttggaattttgtaatttttgcacaatctattatgagttaatttttcttttgctagaattattttattgacttgaattgtgatttgatattttattgctatgttttagtgaattgattttgttcattcaagtgtgtttattgtgcaattgcttacttttgcttgatcaccattagt

SEQ ID NO: 354002 - DNA, 479 bp, Cannabis indica
ttttttccttttctttgtttgttcgtaatgtcaccatctgtgggattcttgcacccgacttttgtcaaggaaaaccttctaaggcttccttgttgacaactgtccggagggggcctctttccagcagttaggggacccccattcccttttttgacatagggtatggtttggggcccgactgctggaattttcaatctttttcagagccaagatgtctgcatccaattccaaatcttcacagaaaggcgggaaacgtctggccaccttggaggaagtaatgaagggcctagtggcccaagaagggtataagccccgtgctaaggggtgggaagcggccgagcttaactctacccttacttgcccccaccagctggagcacattgtggtggtggcaggcattgcgacttctgggacttaccagcgagcgccccgagacgcggagacgcctaatcacaatatgggggcttcggagcttggag

SEQ ID NO: 354003 - DNA, 1185 bp, Cannabis indica
attaccaggactaccaccataacgagagatagatttcattattgacctagtacctgaggcagacctgtttcaaaggcaccctaccgtatggctcctgcagaattgaaaaagatgaagatacaacttcaagggatgcttgatctagggtttactcgacctagtgcgtcgctctggggagctctggttttgttataaagtagaaggatgggactctttaaatgtatattgactgtcgggagcaaattaagttaactattaaaaacaaatacccctttacctagaattgatgatctgtttgatcaacttcagggtaagatgattttctctaagattgacttgcagtctagctattatcaactaggaatccgagaagaagacattccaaaaatggctttttgatctaggcatggctattatgacatcctagttatgtcgtccgggttgacgaacgctccagcagcatttatagatctaatgagtagggtattcaatgatttcctcgataactttgtaattatatttattgatgatatccttgtgtactctcggtttgaaccagaacatgaacaacatcttcatatggttccgcaatggctctgagatcataaactctatgcaaaaattcaaaagtgtgagttctggctgtcacaggtgtcttttttgggacatgttatcagaaaagacggaattatgatagaaccagggaagattgaggcaataaaaaatttggcctaggccgaaagcagtcaccgaggtatgtagttttctcgacttagcgggttattatcgacattttgtggaaggactctctaagattgcaacacccttgtctgagttaaccgaaaagaatcaacggtcactgtggtcaaataaatgtgagaaaagcttccaagagttgaaacgacggttgattacagcttcagttttagccctaccatctgatcaagagaagttttattgtgatgcatccaaacaacgtttgggctgtgtgttaatgcaaggagacaaggtcatagcttatgactcacggcaactgaaagattatgagtagcgttatccaacatccaacacatgacttggaacttgcagcggtggtgtttgccttaaagatttggccacactacttatatagtggaaggtgtgaaagttatactgattacagaagtctcaagtacttcttcactc

SEQ ID NO: 354004 - DNA, 1107 bp, Cannabis indica
aatcagcgttcagtacatcgataaaaagaaggaaaatcctccatccaaactagctcaccatccaccctaagtgcgtgcacaactaattcatgagcagccatattggccgaccgacggacatgaatcaaggacacctcaggaaaattggatagtagactagaaatattatctaaaagagaaccaaggtcattacaaagagaagatcttttaggaaaagcagaaatcacagctagacaatcagactcgataggatggagagggagaccaattccaagcgaccaatccaacgccaccataatagctattgccttagcttaaataactgtaaaatttcctacaaaaccaacatagaaacataataagcttcaccccaagataataaactaaaataataataataataaaagctaataaaatataaaataaattaaataacgagtttattatggacagaagggaaaactcccttcatccttacaatccacataaacattaaacccaaacctcatcataccttaattggaagcatgagaaacaacataaaaaaatgtgcatttacttattttgggtgcatttagtaacacttttttttttaattttttaatcacaaaactaaaagtaaaatttgtgtactttaaaaaaaataaaaaatgtggtttctaactacttttgttttttgattttaaaaggagaaacaaaagtgtgtttgaaattttgaaaacaacacagttttctccttcaagtattgtacgcttgtagtggttgattgtccaacaacttacaatgtcattctaggacgaccttttctaattggctttggggtaataacatccattcgccatctgtgtttaatttccatgcgatactagaagtgttggaacaattagagacaactaaaagagtgcaagaagctgctacaatgttttaactagaattgtcctcatacggtccatgaaggaaatataacggtaagtcgaaacatcttctcaaccagcattgggggtggtccgagaagaggatgaactagatccacgggtaggcgtagaacgataatgaacctatggaagaggtagaagaagtgtgcatcagtgataaagatgccatcga

SEQ ID NO: 354005 - DNA, 577 bp, Cannabis indica
cagggttgttgcagcctttaaccctacctgagtggaagtgggaagatatcacaatggactttgtggttggattacctagaaccacgggtttatttgattcaatttgggtagtggtagaccgatttacaaagtctgcttactttctaccaattaaaacaaccttttcagtggattagtatgcggagttgtatgttaaagagattgtaagattgcatggtgtaccgaaattcatagtttcggacagagatctgaagtttacttcaaaattttggcagagtttacaacaagctataggtaccaagctaaaattcagtacagcgttccatcctcaaattgatggatagtccgaaaggacgattcagatacttgaagatatgttacgagcctgtgttatagactttgagggctccaggaataagtacctaccgttgatagagttttcatacaacaatagctaccaaagtacgatagggatggctccctatgaactgttatatggcagaaagtgtagatcttccatccattgggatgagataggggagacgaagtacttaggtccagaatcagtgcaacggac

SEQ ID NO: 354006 - DNA, 640 bp, Cannabis indica
  modified_base (515)..(515): a, c, t, g, unknown or other
taaaataatttccaacagcgagtggggacttagaaccaatcgagcttttaaatatattcaaaattacaggttgtagggattttagcgaatattatggtccttctactcctccatctagtgatagctcgccttctagtgattttggtaaatcccttaggtggaaaattatactcctcccctttttaatcggcgtttatgatgattgtaacgcctcgccttattttgcagacatgggttatgaagacatcatggatcgtaaggggaagaaaaaggacatccaaccctggagtccctactgctatcgaagcggttcctcccaaggcaaaggaaaaccaccgcccataagaagaaatcactggccgagcctatcgatcttgaggtttccaacaacgagatccaagagcaagttcctccaccagttgttcccaatgccaatgctcctcgtcccgaggcgacccctactactgcttcttcgagttaggccatcaaacccctgtcgatcgcagcaggggaanatgggtttgaatttgcccaggcatatggagtcgcttgttggcgcaaacttcaaactctctccccctgattcgggatattctcaatcttaggaatccaaaagagatgctttcaaggagcttggact

SEQ ID NO: 354007 - DNA, 840 bp, Cannabis indica
actaaaacttctgcgatataaccttttatcggacatgacatatcggttggctcgttgtcgtaactttcttgcttccacgttgtcatcaagtaaaacaccctttttccagttatgtgactattggagttatccaggtgacttcttgaatggtatctatttccatgatcacttcttgatttatagttgggtgagccaatacatctaccggaattacatcgagcaattcggcttctctagttgaggccaaacgggcctgtgcgtctgcgtgtgaattttgagcatgcggtactcgagacatgattactttcttgaatttttgcatcagctcgcatacaatggctaaatacctaaccaatctcccacctcttgccagatattctccattcacctggcacaccacgatttgggaatcactaaaagcctgtacatctcgagagagagcttcaaccatgcgattaaagcctcatactcggcttcattgttagatgcaaaaaattcaaaacgtaaagcagcgtgtaccttaaaattgctaggactgattaataagatcccgccaccagagccttcgctatttgaggctccgtcgtacaacgtccacatctctctattggttatagcaatgtcgattttgtcttctatgagtgccacttcggtgctggggaattcaaggataaaatctacgagggcttgctccttgatcgtagttcttggtttatacttgatgtcgaattggcttaactccattgcccatttcaacaacctccctgaggtctctagttttgctaagagttgcctcaaaggatagtttgtcaagacttcgatactgtgagcctggaaata

SEQ ID NO: 354008 - DNA, 1078 bp, Cannabis indica
cgggttaagtcagggaagtttttgggcttcatcgtcagtcagaggggagttgaggcaaatcgagaaaaaattcaagctctcctgagcattccttccccaaagaagcacaaaaacgtccagagcttgaccggaaaggttgccgccctgagccgttttatttctcggtccacagacaaatgcattcccttcttcaacatcttgaagaagtgtcagaaatttgaatggtccgacgagtgcgaggaggcattctgaaaactaaaagagcacatggtcaagccaccaatcctatcaaagcccgttctcggagaggacttattcctatacttagccgtctctgagcatgcggtcagcgcagccctagtccgggaagaggagaaaactcagcatcccgtgtactatgtcagcaagcgcatgataggagcggagacgcgatacccggtaattgaaaaactagttttttgcctcctgatggcctcgagaaagttgagaccctacttccaagctcacccaatcaaggtgttgaccaaccacccactccggaaagtcctgcaaaagccagaggcgtctggaaggctcctcaaatgggcaatggagttaagccaatttgatctacactacatcccccgcatttccataaagggacaagcgctagcagacttcatcacggagtgcaatgaagccgaagctaccgcggacatacccacaccatcagtcccagcatggaaagtatttgtagacggagcctccaacgagaatggatctggagcgggggtcgcaatgatatctccaagtggacttcgactccaagcagctctacggttcgacttctcagcttcaacaatgaggccgaatatgaagccttgatagtagggctgagattagcaaagactgtgggggctaaaagagtagaagtctacaacgattcccaactggtagtgaaccaggtgtcgggagagtatcaggcgcgtggagagagaatggtcgcgtacgtgacgatagtctgggagctgctccacgagttcacggactataaagtggaaagaatccccagagaaaagaatgctcacacggactgtct

SEQ ID NO: 354009 - DNA, 596 bp, Cannabis indica
tccaatccaatccaattgtaattggacatccaactttttgtaattggattggattggatcggttcggttcaattggattggattggatgatgcccacccctagttgtgaattgattgatattgagatattgttaatattattatataatgaaaagatttattggttgagtattgacaatgtggtgatattaaacatgtgatgtacgggctcacttgattaggtgatgcaattatgtaccaaacggaagtacgggctcgtctgattaggcgatacgataatattggtgccaggttgtggcacgggctcacttgatcagatgatgtaattatgtaccgagcataggtacaggctcgtctaattaggcgatgcgatatattagtgccacgttgtggcatggacttacctgattgggtgatgtaattatgtatcgggcgtacgtacgagctcatctgattaggcgatgtaatatattggtgtcaggttgtggcacgggctcacctgattagatgatgcaattatgtaccaggcgtaggtacgggctcgtctaattaggcgatgcgatatattggtgtcaggttgtggcacgggctcacct

SEQ ID NO: 354010 - DNA, 691 bp, Cannabis indica
tttcatgattatgtgtttaatgtgtacattctattaaatccagaacatatagttattcatgattatagtgttgtcaacacagtggaatataatcatgattatatgtttaaaagtttatgtcccatgatttgtgagtacattggatttagactaacatgataatcaacaataagagcttacttacaccttggataagtattatgtcctttccagggcattgacaaagtatgttaggatcgaatgtatggagtatacattagactggaccgatattgaacttggataagatatcataaacttactgttatatctatctaagtcaatattagttagttgatcttagatcaatagatcttaatcctgatttggttaggtttaacttaaatgtataatctatgttcttagagttgttcgttaaagctcagttagccaaatacttacatcttgggaacatgatagtgcaattgaatgggagcgctaatcatagatatagaatttgtagtttctatgagtatttagaagtgaaatgatattttcttcaagcttggcttaatagagataaatgattgtggcatcattttagtaattatattagtctactgaaatatcatttatagatagctaagtttcattgaaaggtagaacgataaatgtccatattcgatgtagataatctatagaggatctttga

SEQ ID NO: 354011 - DNA, 568 bp, Cannabis indica
agagtaaaccaggaagtgcgagctatgacatgaacattttttttacttggatgagtgtttaaaaactacatctcttgagatgtgtataacctaccagtaaaacttaagacatttgtatcctttatgagactcattataccctagattcacacatttagttaattggaattgaaacttgtgacttcggtaaggtcttagacagagatagcaagctagttgtatcaaaggttttaaggaaagagtaatctgttgattttaagtacagaacctcacatggtgtctcatgcaactacctttagtgacaatcttttaatcacaacataatttgttttggactaaacgtgacttttagtcacaacaaaatgttacttgtgactacaacatagcatttagatacaagttgtcgctaatttaattttatttataataagtattgtgactaaaaatacatttagtcacaacaaactgtaatttttgtgactttactttttagccattagactttttagtctacaacatagaatgatgatttataattagtcataacttttttatttttagtctacaa

SEQ ID NO: 354012 - DNA, 551 bp, Cannabis indica
aggatatgtataaaatattaataccatatgtttgaagtggataaaatatattaaaatatgcaaaaaaaaaaaactaaaatagagtagagaagttgatgagagtgctcttagtctaactattcttaacaacatgttgactttgaaatttagactagacttctaaattacatccgctcgctagattggtgagaataaaaaagtagttaagtaattataagagagacacaacaaatctatagtagttcactccctctatcgcgacagtaatagagctacgtctacgtacttcgagttttcatttctcacgagatggtattacagagatggtctaagtattagaagcttaaatttctagagacaaaaactagagagaaaagttctgaccttgtgggtagttttctaaacttgaaaataagctaagggggctctccttatataggtgaaggaggtccacaaaaatgagagaaaaataaaaattagatgttttgaccgtcgatgatgatctaacggtaaaaattagctcttggcggtgatagctattttttggagcc

SEQ ID NO: 354013 - DNA, 734 bp, Cannabis indica
gaaaatgaaaggcccggggaaccctgcaaaaaccggctagccggtttttttggcaatgcaaacaggctagtcggtttgcaccaggtttcccaaagctcttcatttgttgctcaattctccaacaattgccaggaaaccttccagagcacctaaaaaatgcataaacaatataatccatccagtaattcacagaacaaaccaccaaaacccaagttgccattaaagctcaaagctttgaactcaaagctcaaagttgcataaaacttaaaccattcatcaaaacctgctacgagggactaaaaccagctcaaataaaccctaaaattcgaaccctaaacctaacagcccctattactcaaaaacacaagctaaaaccaaagaaaaagcttaaaatcacatcttcaagagttctagggctttaccttttgttgaatcctccttgaattctagctaaatcccagaaaaaaggaagggaaaaaccaatccttgcccttgttttgccccagccgaaagaaagagagagagagttcaagaaataactctaatttctaattttcttctttcttgatttttcttcaaatgagaaataggatttaattaatcctttgctgaaagttaacttgctaggtgtcacgtactcaagaaagccacctaccactcaaccaaaccaaaagacaaaattgccctttagcccaatactaaggttcagatcttggtgatgctctgctatagaa

SEQ ID NO: 354014 - DNA, 978 bp, Cannabis indica
tcatagtatgtaagactgtgaagaatccaaacaataagaaggagaatcgagctcagatcttggtgatactctgctacagaaaggatataagggttagagctctgagcggaaagagtcatttcattccactgcaaccactgtaaggtttctcatactttttatgtgtttattttcatcgttttagaaattcatattaggatgttaataacatacttgttagtaaatctagatcctggtaaaagatattccaccagatgggtaggaatttaactggccaatttttttcttggtttggggttgtgttttggatgttgtttgacacttggttttgggtgatgggcaaggatttaattggcttgttcttccttgtgtttgggatctggtttttgttgatgttttgctagtttgggctttctctggtttggattgtgtttgaaagttgttctaattgctctaccacaacaaacaaaaatgggtcctcaaaggaggttgggtatgaatcttcgtctatcattaaatatcttgaacctagaactcgagatatatttacggtacgttttgccgattgtgattttgatgagacaagtttcttaactttagggggaggggaaaagaaattactttatatggaatgcacaatctgttgggattttatgccctaaataaaacccatttcaatataatttgatttgttatctatagaagattagaagtcatttatgtttacatgtagttttcatgtttatggtttaatgtatacaatttatgttaaattcagaacatatagttattcacaattacagtgatgtcaacacagtagaaggtaattgtgattatatgcttcaaaatataagtcccttgattcatcagtgtactggatttacactgatgtgatagtcagcgataaagcttacttacaccttggataagtgttatgttctttccagaacattggcaaagtatgctagtttcggatgt

SEQ ID NO: 354015 - DNA, 567 bp, Cannabis indica
atctcatggagtgagcctcccggaggagagcataagacacgcctttactctctggcaggctagaattgtaacaaggcatctctgggagggaaagagattgttcgaacagtcacttcgcatttaatgctgcatgtggggaaacatatcagaacctccataagaggatttgacagatggcataagtcctttttacggcgattacacgacaattaatgagtctagtgacggctacattatgaagactcacatcaatcaaaggaggataaaagataatattcacctaatctctaagagacctacgacataggtcatgtatttcctattttgtatctgctacgaatttgtgcccttaagggacaaacatagaaagacaagtgatccctttctagggattctcccgaaaaacactataaataccccatagatagaatgaaaaaggggtcgatcgattattaaggaatcgaagggagtaaagaagagagagagagagagagagagagattcaccaagagcattctttgtaaaaatactctgataaataacaaagacttgtggactaaggctcat

SEQ ID NO: 354016 - DNA, 617 bp, Cannabis indica
gtttgtgattgtgtacacttgcgcaattataaagcaatataattttcacaacaacagccctccgtcaaagcgacagtttcaaactcgccaagcctccttttctttgtcaaaatatcctttaaaaatttcacataggttgccatttgctccaaagcttccactaatggtatattaatgtggagctgctttagaacatcaaggaatctccggaattgaccatcgtcttgttgcttcttgaaccgttgaggaaatggtggctgtggcttttgcaaagacttttctgcagcagaatgctgactggatgctgtaactactgggagaatttcagcagctgaaattgctggtttttcttcatttccccctctttttggattgaagagggctctttactgcctgttgcagccacatttgactcaagaatttttccacttctcaaggttatcactttgcaatgctctttgtcatctcttcttgggttttcagtgtcactaggcaaagtgccttgtggtctattcttcaaatcattagccaattgccccaattgaacttcaagattccgaagagatgttgcttggctttgaattacaacgtcattcttggccatataatctctcatt

SEQ ID NO: 354017 - DNA, 800 bp, Cannabis indica
gttacccgaatcccgagtcaagatctggatcactatctcgggtctcggtctggttcttgtccaggtccctgatcccatttttgagtttgtgttcgggatctagactggggcacggttctaggtcccgaccctggttcagtgtccctagtctggttccatgtttgagtctgagttcaggttcaggtttgggtcccgagtccaggtttgggttgggatccgggtgcggctcacaatttgggtataggtctgatttggagtccgggtcctggtccagttacggttctggatctatgtccaatttcagttatgattccaagtccaattcctagttccagtcccggtcaacttcctgtttcagttacaattttgggtcacagggtacgagttcgggtccaccttcgggtttgggactgggttccgctccgggtgtgggttcgggtccttgtgaggcttcgtgtccagggctgggtgctaaatccaaacactaactacacgttttgtccaagccttgggtccagatccggaccccaatctcgggtcccagtcttgttccatttctagtgccgggtcacgagttgggtcctaggttcaagttcaggtctgggtcgggtactaggtcccgtacctagttctttttccgaggtccctatcctgattctgggtcaaggtccttgttattgtgtgggtttgggtccccgtctaggttcgggttcgagtcctagtctaggtttgggtttgggtttagttcctggtcctggtcctagtcgtagttcggttctagttccatttgcgattctgag

SEQ ID NO: 354018 - DNA, 519 bp, Cannabis indica
agcttcatcaagtatctctttcttaatctcatcaacattaggaacacaaactcaagctttgtataacaacattccactgttcgagactgaaaagcctctaggccgaccagccattacttcgtctcgaaccttaactagctcgggatcttctagttgtgcctttccgattctctccaataaattagactagagtgtcaaattgtgcaatttttcaactacaaactcaatccctgcactaaccatttcagaggctagttgaggggatatcatcattgtggtacaaacctgcccaggaccctttctactcaaagcattggccacaacattggccttccctgggtaatacagaatctcataatcgtaatctttaaccgattccagccacctcctctgcctcatattcaaatccttttgggtgaaaaagtacttgagacttttatgatcagtataaatctcacatttctcaccgtaaagataatgccgccatatctttaaagcaaaaaccacagctgcaagctc

SEQ ID NO: 354019 - DNA, 1385 bp, Cannabis indica
caattataattaaaatagaattagttctataacagtgttataatgaataaaaatcaataatacgaaataactcaaaaccgattataactaaaatagaaccggttatataacataatgaatataaacaagtaacacacaataatttaaaccaattacaattaaaaaaaataaaggataaattagttcctaaaacactgaaacataaatttaaaacaaaaccagttctacaataaaaaaaactcttaacacataatacctcataaaactgattataatgttttttaaaaggtgaggatcaatttgaaaaaatactaaggcataaatatgaaaagaaccaactccataacaaaataaatagggaaatttgaatttctatccatattttatacccaaattaattctctaaacatatacttataactattgaaaaaataggattacttttccctaaaccctaaaatacccctctcattattctcaaccatctctctctcttcctcctttctctctcaaatcaaacccaaaaccaacacataccataccggccgaatcaccacccacccacccaaatctcttcctcgtggaaccacccacgcacggcgttcatcacccacgcgatccctctcttccacgccgatccctctcttcctcctcgaaccacccacgcacaccgatcaccacccacgcccatccatcttcacccatctcgaccgaaccacgcacgctgatccaccacgcacggcgaaccacgaaaatcggccgaacaccaccggagacccacagtcgcaccatctcgatcgaaccgactagcgagttgggaaaaaaattgggttgggcccgatgggtccgatggggaccgatggggggtccaatgggggtctgacggggccgatggggacccgatgggggggggggaggggtctgatgcttgcaacctgggggtctgacgggtccgatgcggaggtccgacgggtccgatgggggttcgacggtccgatgggggtccgatgcatgtgcgggttgggaaaaataggattgagttatgtgagggttattttgggtttttgataaaagtgtcatatattttttagtttgaaatgtatggtttaagaataaaatattagggttttaaagtatagtttttcaaatttcccaataaataacacaaataataacacacaataactaaaatataactggttatatgaataaaaactaataactcaaccggttttaattgaaatataaccggttctgtaacataataaataaatataaataacataaaataactcaaactagttataattaaaatagaacggttctataagagtgttataatgaataaaacaaataacacgaaagaactcaaactggttataact

SEQ ID NO: 354020 - DNA, 824 bp, Cannabis indica
ttgccttcagtgaaaagaaaagtttgagccatctattctataccatattcgaaccactctcatattttcaaaccctatagtgttagagtaagtgcccacacacatcaaatggtactcaatcatagtgtgtaaggctgtgaagaatccaaactcgagagaaggagattcgggctcagatctttgtgatactctgctacagacaggatacaagggttagagatctgagtggaaggagccattataattccgctgcactcactgtaaggtttctgaaactttatatgtgtttatttacattgttttagaaattcatatttaggatgttaaacaacatacatggtagtaaatttagatcctggcaaaacatattccaccatccaacacgtccgagccttaaggcatctgtggccttctgcgcctgagagggcttaattacgggatttaaatttttctgaggaggtacgagagtgtaacgcccgtacttttataaaaatattagttttatttacaagcgttaatcgcggaaaatcataatgtcgcatttttatttaatacttgaaaatattcacaactggccagttttcgtacaaaagacataataaataataactaaaataattgcaacataaatttgataacgtaaataaataaatggagcgcctagaccgcccacagttatatggccctcagcgagttcacacacacaagcgtctaaagttctactcgccaccggcattctagactttcagttactttggtctgcacatggtaatttaataagggtgagctactaagctcagtaaggaaatgtgtgtcaggtagtc

SEQ ID NO: 354021 - DNA, 547 bp, Cannabis indica
aaattcacaaataactataaaaatatcaataatcaatcctaattgactttactaatccatataataaaatgcggtcattacaattattctcccgtttaaaggatttcgtcctcgaaatctaacttgaatagctctggatattgagttcttatgtcagactctaattccaaggtggcttcctccaccttgttgttcttcctgagtaccttgaccaaggctatggtcttgtttcgaagaaccttttcatttctatcaaggatatatactggctgttcttcgtcggataagtctgactgtagttcaagggcttcgtaactcaagacatgagtcgggtctgatacatatttcctcaacattgaaatatgaaatatgttatggtcagctgataacgttggtggtaaggctagccgtacctgcatgaccttcttgagtatctgaaatggcccaatgaacttaggacttatcttacccctcttcatgaagcgtctaatacccttcactggagaaacccgcaggaaaacatgttcccctacctgaaatgtaacat

SEQ ID NO: 354022 - DNA, 625 bp, Cannabis indica
cgattcccaactcactactcattctatatattacaataattatatataaaagagttagagagagcttggaaatgcaattaccgattctaatgttgttttcgattttcttttccatatttagaggcttgtagatcaaagctctacgaatcaataaatgaatgtattttgatcttattttcattacatttatatatgtgtttgatataaatttaattccgtatttcatatcgttaatatatatcatataaaattataatataattaagttttatatatttaaaaaatataatagaattcaatcggattttttcttaacaaatttattaaatgtatatcttagaatatctaaaataatttaatttttatttttttgtttattaaaatataaattttataattatttatttatattttaaatatggtagacattttttatagtctaaatttacattaaattttatatatttaataaatatagaattaaattaaattattttttcttattattatttaaattaataatttttatctttttatatatgaatatctattctatataaagtgtgtctatataaccgaattttagtttatgagaaattcatgggtgactttttatttatattaa

SEQ ID NO: 354023 - DNA, 532 bp, Cannabis indica
ataaaaatactaatttttatatttatttagatccaatatgtgaaggcccagcccaagctcactaactattgtattgtgaaacttgaaacttctttttcatatttatttttaagccttatggtatttttgacaagtattgttcaaattttattgtatttgtgatagtttaattatttggtgatagtccaaactgcagaaactacataaaccgtactgcaccacactgttttttgcacgtggtgcgatttctgaagttttttagttttaccgtacgagtgcggtgtgaaaaattaaaaaaaccacttgttcaagtttgtttaaaaaaaaataattaaaaactgcactacctagagaacactctacttgtacctaaaataataataataataatatatatatagggcaagactatggtaggacctagcaaaagttccctaccggtagggaactttttttgaccattgattttagatcatgtggttattatgatgtaaggtgtatactcttacgataagactgcttgtatacgatt

SEQ ID NO: 354024 - DNA, 639 bp, Cannabis indica
tgactgatcgtacttaactggttattttttttgtctgtttttatttttattaatttctttgcttttttcaatttttaactggttattgtttttgtttattgtgtgcagcatctgaatgtggcactttactatcttaggaagagcatattatatgatgccagtgttaataagagagtgaagacgacatgctcgtattttgatgcaactcttaagggagtgtatgctgaatttataaaggcaaaacgtgatccgagtgtcatcaggtacgacaacatggtcaccgattacattttggggcaatataacttttgcttccagccttggatcggtgttgacgatgttgtcggtccgtgtcatgtcggtgttcaacgccattggatatttcttcacttcagcattttaaggaggaagatcttcgtattcaattccatgaagaatacaaagacgaatcaaaagaagatcttgcctgatctcctagcgtactgtgagttactgccatacttccttgatttcttaaatttttatgatggtaggaacgacataagtttggagtcagacccttatgttgtgccgaagaatactcctattgaatacaagtttatggacaagctccccactcaaagcaacaggtaaataact

SEQ ID NO: 354025 - DNA, 694 bp, Cannabis indica
atttatgcttgaatataaaaaaacaaaaccaaagattcaacaccataattttacaagctttacctgccttagaaactcattctaggcggctaatgcttgggttcccaaaccagtgtaataactttcactatattcaaagatgtatcttacaaataccaacaatattgtaaacaacacactcttttacaaaatacagtgaatctatacccataccaaccaagaaccttgattggagacacaagatccccttgtgtgaatgatgagctctcttcaacacttttcttcaatctgaactcccttcagatttggtgatgaagatgatactaaaatccttttagtctgaattcaatatcttcaagctctaatctgctgctttggattaataccaccaagctcaaagatcaccttccttggaacataaagacgaaacaagaagaaagaaacgtaatccctcatctccaatcaaaaaggttaatcaacataacaccgcaaagttgtatttaatcctaggtaaagtaagaatatcgaaaatagacaggttttaccatctgaacaattaaaacccaaaatatctttgctgacgtgggctaacaatgatattacgaactccaaccaacacactacgtatcccagatgctactggacataatttgtcactacataaaacactggatcttacaatctcccccttgac

SEQ ID NO: 354026 - DNA, 600 bp, Cannabis indica
cttcatgattcaccaccctaacaactttgtaaacattatcaatcgaatcatgaccaaatcctagcaatatttcatttaatcttttgaatttcccccaataggggccaaaacatgaattggtaataagcttggactccctcagtgccgggttgcacaacagaatatcagtttggggaaaaaagccaatgcagaggatgccactacaaagagaggctacaaaagtgttgggtccgcccctttattggtgggctggaccaataagggcttaggcccattttatttgaatcaattaaagaaaaaaagaagaaaggaagcatgagtgcttcgtgagcagcaagaaagaaaaagagagaagaaagaaaaagagggggaaagaagagaaagaaagctagagagagaaaggggttttgccattttgcattgaagatcaagtggtggattcttatccattttagctcaaattttgggtggtgaatccttgcaagacgctctacccatctaccggttccgatttggcgattgtcctctctaaggtgctctcctacaatacccacttggtgagacccaaactttttctacttgtgtatccatcttttgaga

SEQ ID NO: 354027 - DNA, 644 bp, Cannabis indica
taaaaatatttaaaattttgtaaaatcgtatttctgtaattttttttaattgtttttgtgtatttgtgaaataatcccaataaaaaaaacctataatccttgaacaaattaacttactatggaattttaaaagtttttatgataaatatggcacatttaagtttgacctatttatatggtatttttttgtttttaggtctctttatggtatttgatatgccatatatatgtaattaggttttcaaatcccatatttaatgtttttatttgtttaaaaagttttatttgtcattgatgccggaaatatcagcggagttagctgccggtgccggaaaagtcaccggattagcggtcggtgccgaaaaagtcgccggagttgctgtcggcaccggaaaatttgtcagaattggcattgtcgccggaaaaattactgaaaaatcaccaagaaccagtttcttcttcaagaaatcgatttcttaggtgatttttctgttaacaatgccaagtctgacgaattttctgacgctagcagctactccgacgacttttccggcaccgacagcaaatttcggaaaagtttcagaattggcatagtcgccggaaaagttactaagaaactggtttctggtttcttgatgaagaaa

SEQ ID NO: 354028 - DNA, 691 bp, Cannabis indica
cgacaagatgttgttaaaaagaaagttcgtttttagttttttgtgtggttaatttagagagattatatattataagtgttgaaaggcactttattttgatgaatttttctgaatttatgatcggttttatatggttctcgataggttctcgaaagtattaattcatgtttggtgagtatttactgattatcgatgggttctcgacaggttctccatatgatttagtgttttttatcatgttttctcttacttttttttttaataattgtattctttaccttttacagatggctccaaaacttattattcccacttcagcccactttttaggccgtgtgacagatagaaggagtggaatattcacttcaatcgttccaaaatttaaaaaacatgaaagattaattgaaaggatgaagggaaccccttttggccaattttggaaggctgaaacttttgctttctcttcagtagattattgcaaggatgaagggaaccccttttggccaatgtagattgatagatgataacttcaacaaataaatattagatattagagctgatagcctaacactaataacaaagaaaaaaaaaatgaaactctgcaagttctcttttatacacccaattaaatccttcaacactctaagcatcatcataaaatacaaccggaaacacaagtgatcctgcaatt

SEQ ID NO: 354029 - DNA, 513 bp, Cannabis indica
gaagtggacttcaatagttttcaacaagcaatcaaggagtacgaattttagagagcgaaattgatattaaaggctttctcaccagggtttttaacattcttttcttctttatcttcttcttctattctaaattaatgcgtgaaattgttaagatgaacatgggtagctaaacagttcattagggtctagatggatattgtctgacattgatttttggcttcaatatgatttaatttcccctcaatttctatgtattttatttcatttcatacttaattacttttaattgacttgatcaccaattaaatgtttataattttgatgcgagatctgagaagtgagtgtcgattatgctatagtgaaatagaatcaaatttcgatataggacgagagtacctatatggtttggatagtttatagggtttctgtatttaatgcctgttacacgtttaatttattacgagagtaaaaaatttgcatgtaattgagatttatatatctgagtaagactat

SEQ ID NO: 354030 - DNA, 808 bp, Cannabis indica
taagtgtagaatatttgggctttagtgagtttatggactttaacatcatttctctcaatttggataataagtccaaaatgtacatttaatctttttacaaaaatacacaacattgagattaacacttataaaatggaaaactaaactaaattgataaaatattacaaaattaattaaaatttaatctaaaaatactaaaattaatatttatgcaaagctaaatcaaaccaaataaaagtcactaaaataaactaaaaatacttgagaacaaagctaatttaatgcccaaaaaaaatataaataactctattttcatagagttatcacccaacaacgtactatatttgaattatagttttaaatttcaaaaaattaagttgtgcaagcactctttgcacatttaattagtgatcatgtagaagttacaaaatatgagtaactccacctcttatattacaactattacatatatgtaactcctaatcacattatattgtgattattacatgtatataactctcaattatattatatattatattcataataatatatataatataagacgatataaaattttaggccccttaataaataaattaacctaataaaattatatgctacattccatgacataaaagtaaaaagaatattaaaaatctgaaataacatatttgtatttttaaattttctctatcatccataataatatttttatcttgccaaaatttcaacaatacaataaatcaaattcataaaagaaaaaataaaagaaaaaactatgaagtctatatttacttatagctaa

SEQ ID NO: 354031 - DNA, 753 bp, Cannabis indica
cagtgttgggaataagagcaatgccctgcctgcttttgtccctgtttcaattgggcttccttttctcggatcttctacatctgaagcattctctccataacgagttcatactcacacttctcatatgtgtgtctctcgttcttgcacttccatgggaggaagaactcggcttggcgacatttgttgagagggatcaacaagtgggcgcactgcgctgtgaacgtcttctcctctcctgtttggctccacataaaatccaatcattgcacatccaaaatcacacaaaataaaacaatcacatcccacatccaaaatcacataaaataaaataaaatctggaattttattctcaataacataacaattgaacctaaaacctaaaatcaaattaaaaatctgaccttgctcgttgtaggctatggaggtgacggtggaggctgaggaacggcttcgtgtggtggcgtagaatagagaaagctcgagcttcggtggtcgatggagtttggggctttaagaagaggagaaaggagaatgggtcgtaggctatggaggtgatggtggaggccggtcttcgaagagaacgaaaggggctcgagttggatgactttgaagaggacgaaggaaactccagatcccaattatataatcaaaacttcctatatattactctcgaataaagaagtaaagagggttgtgactctcgaataattagcatcaaatattagttcaaatattaatgagatttgttttatt

SEQ ID NO: 354032 - DNA, 666 bp, Cannabis indica
gctgggtgtatcccagtgacccaaggggcatgcgttttgtagcatgaccctaaagttactgggaaacacccaccgttttgagcaaatctactggtcgaagaatacacttatattggaacaggaaacactggcgtatgtcgcaaatggctgggcgtattgcagtacctcaaggaacataagatcgcacgtgtgagcattggaatacggcgacacgcccaccatttgaaagacttaaccaatgttcccacaacaaaatatacaaagaatataaagccctatgttctaaaacagcgactaggaatgataaagtctctgtaaaacctaaaggaagcaggtatgcgagtattcgaagtgttcatccgaatacccgcgtgtattcaagaaataagcaaataagaaaggtgcgactattcaaaattttcttcctaaagttcacggttatacaaatttcaggtctatttttctaagattatccagttctacacagaaaaaatacaaccctatgtatattccctacggacatacatgttcgaacctcccaaaatgtcacaaaaacccaaaaaagcaattttcatcttttcaaaaaaaccaagtacacaagtggattagaaattgacctttagcttttctgattgctccctgtaaattggttcggtctcttctgaa

SEQ ID NO: 354033 - DNA, 570 bp, Cannabis indica
ccgatggaggaggatcgtgagggggacgctgcggtccaggaagttgaagagctggacgaggcgcgtccgggcagtccttccgaggcggggggagagtaagaggttgaacccctaaactttaaggagtacaacgaggctggccagccagtcgatgctgataaagacgtcgtggttgagggtgtggactacgtcagtgaggagcttgctgaggcagttcctcataggaggcagggtgccttgggtgccaggtgggtaagtcctccgtccaagatttcggaggcacgccttcgaactctcgaccaggacgggtatctcggcaagctggactgctacattcccgcccatgacaatcgcgccacaaaccctgataaggggatgtgcacctggtcaggggcccacggcaagcaaggagcgctgatgcccttgcaaaaatacttcagggatgtggcagacttctttggtcactgcccggcccaaattactcctaaaagcttcaagtatttatccgccctcttcgtcctctacgcttcccaaggatggaatgctccttctccccacgaggtcgcttgg

SEQ ID NO: 354034 - DNA, 539 bp, Cannabis indica
atgaatcactatttatagggcaagggagggaagtatttcccttctaattacaatcgatataagttatagggatacagaatacactaattgtgggattcagacagcttgtcatatctctgtaatctgatcccaaagttatagggatttctttgatgactgctcgagtaagagtacctcatccgagggaatgtttgtggtgttctgtccggcatatttcttaggagcagaggcatagattagattccatgtgtcaccatcgcttagactgaatacagacttcgatcagtgagtaagttctcgattccttctccttttactttgcatatttagtttttgaatgcgatcttaaccttgctgtagaagataggtagaaaaccccaggtttagaaactttacgatttgtctttacaatggtctttccgacttcacggttcatgatgcttgcttcttttactgcacaatgtctgtctttcaccttggttattcaaagcttcgtgaagtttttgctctaaatctcaaaaatttcaaacttctgagtt

SEQ ID NO: 354035 - DNA, 507 bp, Cannabis indica
ccaaggtgggcccaaggaagcgacggaaccagtccgatagcgggtccaggttgaggtccctcggatcctggtactccgggtgattgatgctcgcctcaacctcggcccgcaaaaccctcctaagggcttccacctcagcgtacccccgggagtactcgtccatggcatagttatgcttggctatccgaagctcttgcctcacctcatctcccgggaccggagtaagcacgatgttgggaggagcaggattttcttccataggggagacaccgccgtcaagtctgtgggcgggagtgtcagctctccgaggcttcttgggctcgtcctaggcaatcattttgcccttgcgcttacgaatcagagccacctcaggctcctcttcgccctcttcagcttcctccggaagggctcggggctctcccgtaccctcaacaacttcctctgagaagtcccactgcttcccttggccttctcctggaagcacctcctcgtcatccactaagtcaa

SEQ ID NO: 354036 - DNA, 1048 bp, Cannabis indica
attaacatagaaaaaaactagcataaaatttaatatacgtgcctcgcacgtaactttttactagtatatatatataggtatagatatatagatagattgttgctctcatttcattgatgatctacttttgcttgaattggttattttctcatacagtttgtcgttttcttagcattaaattttcattttatttgttcttatatattgaatatttattttgtggaattttatttgcattcccatttaggtgtcaactcaaatttacgtttgtttattttttggtgaaattttactatttgcccctaataaaaatactccatatcaaaaattataccctccattaatttgtacaaatttagtccattgattacaaatacttcccattttaccctttttttaaaaaaaaaataaataaaatttttaaaaactgaaattgtctcttccctctctctcctgcaccactctctctctctagaaaaaactgaaaaatttccttttatcgtcccactctctcgtccttgtcttggtttaccattgaatggttgtttctcggtgggcgttggtggaaaatcggagcacaccaaaatatcactcaagaatcttacaccattacaatgggtaagttgtgttttaagcattttgttagacattatgtagtttgctttcgttatatgtgtcgtatttggtggaactggtatttttttggtctgaaatgtttgagatctggttttcagtcaaaatttgggtttttccagttgttatcgatgatatatcgatggaatatcgatggtttgtcgatattctgctaggaaaggtcagtgatgaccattatcgacatgttgtcgacggttgttgatagcatgtcgacgtaaagcaatgaacctattatttagaagttgtcgacattttgtcgacggtgtgtcgacagcatgtcgacgtaaagcaattaacctattatttagagcttgtcgacattttgtcgatagtatgtcggcaatatatcgatgcaattgaaaaaaacaagaaataaaacataaaataacattaa

SEQ ID NO: 354037 - DNA, 572 bp, Cannabis indica
aaatcctaaatttggtgaaaaaatacaaaaaattttgatttttgggggaaaacaccctggctgcccagacgaggctgcacgcagcctcttccgcgcgcggaagagaatgcgtacagggttttttggctgatgttcctcggcacttccagttcagatagccttttgtcccttacactcgcgcgcatcacctcgtcttgtccaagatgctagtgcgtgtgattgagccatatcacccgaaatttcaaaccttcataactttttcaatttttatcggaatcgagttccataaaaaccaaaattacttaatttttcacaaggaatctaaataaaataattttagattgaatataaaattattttcatggaaaaattttgtaattcacatacattcatcaaataacacataaaccaacatgaacacatccaaatcaacacacaaaaaatattcctcgttttaaatccatatttcattaaagtaaatcattgccatggctctgaggccagttgttggaatattttaccaggatctagctttactaaaaagtatgttgaattaacatcctaaatatgaa

SEQ ID NO: 354038 - DNA, 917 bp, Cannabis indica
aaattaccagagtataatgggacaggagacccctcggaatacgtatgtcagtctgagcaaaaaatgttaacggtctccgtcccactagaggacttggaggcgatcaagtgcaagaccttcacgcaaggattgagaggacccgctctgctttggttccacaacctaccatccggcacagtaaattcttaccaggatctcatcctaagattccaggccaattttgcgataagtgtgcgaaccgccaaggtggatacggacttaatgttaatacaccaacgcctcgacgaacccctggaacattttatcaacaggtttagcgaagaatacgtcagtatcccaaaatgcacctattcagtggcgacaaaaacattaatgcaaggattgatacatggttcagagttaaagaaggcgatcatagtggagcctggcctgtccctcacaagggccctgactatggcaagaggatatgtggccttggaagtagaagagaagcggcacaatgaggaagtgtcgcgcgaaacgttggcatcaggagatactttcctcttcaaatctaagaatcggacaccagctgcacggcctcataatagaactgacaaccgctcggccaacgaaaggaactctcgagggacagtaatggtgagtatgggcgaggcggggcagccgcatgcccagcggggagaagaggagctaccacggatgaccattaccctaactgagttgataaaacgactgcggggattgaaggaaacaaatggcccccaagaatgaccacggaccctgtcaagagagataaggggtgatatcgtgccttccacggagagcacggccacgcaacctacgagtgcaggcagttgaagatagaagtcaaccatctggtgaaagaaggattcttccgggactgcctcgtttcggac

SEQ ID NO: 354039 - DNA, 722 bp, Cannabis indica
tgaagaacacaaataatacaactcgaactagaacctaaacatctcaggattgaggtcatttgatctaagatcaactaggtgatattggattgaatagatattacagtaagtttatcatatctaatccaagttcaatatcggtccctttcaatgcatactccatacatgcaacccaagcttactttaactaatgccctggaaaagacgtagcacttatccaaggtgcaagtaaactacattgtagattatcctatcacttaaaccctgtgtactgataaattataggaatacatttaatcacacaatcttgattactttccactatgttgacaacacaataaacaagaatatcaatgtgataaggatttggatgagtttataaatcaaataagtaaataaatgatcacatgaaccaaataacacattaaacaagtaatgaaattaaatctgtttctttattggtaatagaatggaaaagattatattgaaatagagatttatttagggcgcaaagcttaacaaacgcaatcttgcactagcataaaataattagtacatttcaattaatcctaaattcagtctgtgcttttcaaatgtagttacagtcaaaaattttgtaaatggatcagctaagttgtcttcagtatctactttctccaccaatacctcccctcttgccacttattccctaatgatgtggtatttctgttgggttttatgcc

SEQ ID NO: 354040 - DNA, 562 bp, Cannabis indica
ctgcatatataaattggaagttttgcaatagacacatttgattttaaaaaaaaaattacataaaatattatttttaattttttttttacatttttacgtacacacaattttttttttatatttctacaatattttataaaaacaatacgaaaataataagaaatctatataaaagtaacatggaaataacatcaaatatcatcaaaatcataacatatatataacaaaaaattaacaagattacaatttaaaaatatattaaaagaccatatttttttgtaaataaaattataaaaatatttaaaattcaatattttttgttgtttttatgtatatgtgaaataattcaaatatatataggtaaaatgaataaatatacactatcctaaatatatatatatatatactagcaaaaactacgtgcgaggcacgtatactaaattttatgctagtttttttctatgtcatttgaaagtgatacaataaaaaattaaagaaaaaatattattagttattaggtgagattatttgaataaagaacaataaataatcacgtaaaaat

SEQ ID NO: 354041 - DNA, 557 bp, Cannabis indica
gagaacccattggctgcaaatgggtttatcgaatcaaagaaaatcctgatggtagtgtctctacacttaaagcaagacttgttgcaaaaggctttcatcaacaacccggtttcgacttcactgaaacttttagtccggttgttaaaccagtaactataagagtggttttgtctattgctctctccaatggatgggatatcaagcaattggatgtaaataatgcatttctcaatggggatttacaagaggaagtttacatgacacaaccacctgggtttgtcttgcccgatgctcctcatctagtgtgcaaacttaataaagctttatatggtctcaagcagcccctcgggcctggtttgacaaactgaacaatactctaactgatcttggcttctcatcatccaaatcagatagatctttgttcattcagcacactacatcagctacaactattatcctggtttatgttgatgacatagtcatcacaggcagcaacactcaaactattcacaacattgtaagcatcctcaattctaagttctctctcaaagatcttg

SEQ ID NO: 354042 - DNA, 610 bp, Cannabis indica
tgactgtattttttaacaaataaagttgtcattttgaaaaagcaacttagtagttgaattttcaactttaatttttttctttctaaaagtaacatggtacatgtaatgtacgttgtgctatggttgcacaaagtaacatgttaatttaaaaaagtaacttggttgttgaattttagacattatttttactttaaagaataacctgatgcttttacttttgattttagtagtaataattaattcatataaagaacctttatttacaagtatttacaataatctttcaataatttgtttttctagtaaggttagtatcaaaaagttaaagtagaataaaataatttaaataataggtcaaatatttatttttctcaattaaaaaaaaaactaacttgtgaaacataaatatatataaatattaaattataaattcaataataataattaagataaaataataaatttttcaaaaacataatacaaatctaagttgacaaataagatatggctttatttcataaaaacttaaaaatatgaaaatataattccacacaactaacttattaaaaaaaaagccataaattaagtaaaattataatttttccacatt

SEQ ID NO: 354043 - DNA, 661 bp, Cannabis indica
tctttcacaagtcgactctcatttgtagaagacgtaacttcatcggttgtgtgaatgatgatactggggagtgggttcgtgaccgtgcaggtattgggaagtatttccaggataagttctaagcactttttgaaaccacgggtaatctggcgggataggagcttgattctttgtttttggataaagtgtccgcgctggataatgatgaaattggtcgagttccttcagacgatgaagttcaagatacggtgttcaagatgcatcctctcaaggccccggggtcggatggctattgaggtattttctttcgaaaatactggaatattgttggggaggatgtcattgcaatggtgaggaattttttctctactgggattctagacaaagaggtgaatcgtacttttattttccttattcccaaaggtccaaacgctacaaagtttgagatttttcgacctatcagcctctgtaactttggttataagatcatctcctgtattattacggatcgcctcaaaggagttattgaacccttggtgtccccatttcaatttgccttcctccctggccgaagcattgctgagtgttccatagttgcccaagaagtgttgcatacgatcaaacacaagaaagggaaagggggacttatggctattaaaac

SEQ ID NO: 354044 - DNA, 517 bp, Cannabis indica
tagtggttttgacaagatcattctctgtaaatagtcaatatgccaatattcacttgaaagtaggatcatctaaattcgcatatatggatatatattcaggggtgggtatgagttatcattgaattctttatacgatcactctagattttaccttgtgcaaagaaatttgaaatgtttgagaaattttatgaatttctagcaatgttgaaaacattaaggtaagtggttaaagatcttacgaactgatagggttggagaaatatttggtagatatgcagttcaaagatcattaagttgaattttaaattgtatccaaacttaccttcccataaattcagattgtatattgttgaaagtaaaaagtctatgattagttactagaagttgcctaagtccttctacggattatagtatcttgtctgtagattaatgaaacttattttgttcataagggcattaatcttcagacgatgtttcttttaaattttcaaaatcatagttgacaaatcaactaggc

SEQ ID NO: 354045 - DNA, 1747 bp, Cannabis indica
tgtattatttgatacatatagttgtacaaagtttaggggacaaagttgttaatttataagacatctcgacatttaaacagaataatgagacgacatctaactaacataaagactaaatttttgtaaacgtaaaagttcaagaggaacctttaacaaactgtatattttaggggacggaatcagtattgtcaaaaattatgggacaaaattaatattattctgtaatttattatcggggttcactaatttaatttaatttattatttgtcattggatcaaaatttaatgatttaatattttaaaattagtatttataaaatttctttggactattgatggtgtcatgcgcatagctgtaaatgtgtgcgcgctaatccagctcatatttttggactttttaaaatacggctcgtaccgtatcgagccataaaaaaaactataggttgtatcatgttgtgtcataaaaaaaaaaaatatgagtcatatcatggcgtgcaacaattttatagggtaggcctgacatggcccgtaagtttaataattttttagggtgctcagattcgtggcatgtttagatttgtatcattttttattcaggtcaccccgtttttcttaaatagaccaaccagttttttatacgggctcaaattcatgctccatatttttattacatttaataagctaaatactaaaatatatatgtattttataattttaattacttttatattttttcaataattatacgcaattatataaaatatacttgtaatttttataatttgattattattattattattttaaatggataaataaatatttatcattgttattattattaaactaggaaacaaatcgcgcttcgtgtatggttatattttgttcagtgataattaagttataaaattatataaaaacttcaaatttttatatttttatataaatatatattaataaaaggctaattaggattttttttccccaaactttgacatgtaccaaatcatgtctcctgaatttttaaggtcgttaaaaatgccccctgaactattgagattgttggatttaaggttttttgtccaattttagtaaaaaaaagtctaacataaaaatgaaaagtttaggggagatttagtacgtgtcaaagttcgaaggacgtgatttggtagttatcaaagtttggggagcataatttagtacatataaagaatcactggaatagtaaaattgaataaaattagacaaaagtccttaaatctaacaatctcaatagttcaaggagaatttttaacggccagaaaagttcaagcggcatgatttggtgcatgttaaagttcaggggccaaaagttttaattagccttaataaaatgagtaactattttactaaattttcactttttacccttaataatgtaataaaaatgaattaatattgtaaaatgattttaaatttaagaacgtcgcttatagtatagagtacggtttaaaactgtcggctatacccttttatacgcgacagttttaaactgtcgtgaagtccacaaaaatcgtcgcttattttacccgttttgcgacagtcgtatagacgatggttatagaaaccgacaagaatactttaaacaattatttaaaaatatcgagaaaaaccatttctgttatagtgggtcatacttgtgtcttttgagtttgtaccaatttacaacactactatgcatgtggctattgtgcatggatgctctaag

SEQ ID NO: 354046 - DNA, 591 bp, Cannabis indica
tttttattattttttattattaaggtgtatatataaatttttgagatgtaaatataatgacttatattaaattgtatcagaataaaaatagttaaatataatagttagtttttaatgaataaatttatctataaaaacaaaagttataaagctaataagtttaaatcaatacttaaaaaatgaacaattttattttatttcatttatttattacagtgcttttctgtttgttaaattagtcataagattcaatatctatctatctatctatatatatatatatatattataaaagaaagcataaaatatgtttaggtggataataatattctatttcaccacacataagtgttggaatatattttaccaaaacttaaatttactaacaagcatgtttttaatatcctaaatatgaacttctaaaacgataaaaattattcacatataaagtatgagaaaccttacattggttgcagcgaaattaaatgactcattccgctcagatctctaacccttgttcttttctattgcagagtataatcaagatctgagctcgaaacaccttcagttgtttggattcttcacagtctt

SEQ ID NO: 354047 - DNA, 520 bp, Cannabis indica
tgtgctggtaaaagtgacattcttgtagtgagtaatagtgttggtaagattagtaacctgaataatcgttgtaccatatgcactaagtaccctgaaagtactagtgttggtaggattagtagcacgagtcatcgctataccatatgcactcactaccgtgaaagtactagtgttggtaggattaattcacacttcctgatagcacaaccaaccactataccatatgcactccgtactccgaaagtactagttggtaggattggttcgtactacatgaaacaagtttgctaaacatgtacacatgtatatatattatactatttgttaggaaaatatgagaaatcaatagaagaataacaataagatgaacaaagagatcaagaaaattacaactctatgcaacaaaattacaaagactatagattaaataaaagttacaatcccaaagcacaaaatataaataaagtgaaagaaataatgaagacaaagttacaactcaaagcaaaatatacacataaat

SEQ ID NO: 354048 - DNA, 1148 bp, Cannabis indica
aataacctcttccaattcttcaattggttgtagcaggtttctttcatcttgaactcgaggattaaaatcttcatctttcatctcatttttttctcctgccaagattgccattaactgatgaccgacctttctatgctgcaactctatgcgatagcaattgggagccaacacctggtcaccacacaccactcccatgccatctggtgtttggaattttaaagataggtgcttgatcgaactgactgcccatagtacgatcagtgctgaacgacccaacaatatgttgaaagctgagggcaggttgacaaccaagaagtcttccataacagtagcagttaaaggtgcctcgcctaaagttaatgtgagctcgattatgccaaggctagcgatgctgtgttcgatgaacccgcaaagcttcaccatacaaggtcttaatttggcctttttttcgagccccattttctttagagtctcctcataaatgatatttaccgagctcccactgtctactaacactctcttgatcctcttattggcgagttgaatggttatgaccagcggatcgacgtgaggatatctcacattcttctcgtcttcctctgtgaatgtaatggggggttgcttggttttcaccttcttggaaggttctggggcaaagactgactgctccttctttatctccttcacatatcttttctgagcgttattgctttcccctgcgatatgcgaccctcccgaaataaccaagatgtcttctccttccacaggaataggttgtaacccccgcttgtttgggttattaggctgactgggctggttgtatccctggccctgtcttttcacatattgtttgagatggcctcgagcgatgagactttctatctcatcttttaattggcaaaatttgccggtcgtatgcccaaatctttatggaatttacaatattgttaggatctattttctcctcgaattcctcataggctcaggtttaccgaaggctacctctcctcatgtgcgaggtaatatttctcgagtttcattaagctcggtgtaaatagtatacactggcacgtattgtcatgcttcttttgtttctttctatccttcgacggttccttaattctatcctttcttttcagaccagaagc

SEQ ID NO: 354049 - DNA, 727 bp, Cannabis indica
cccgttttatgtaatttatgatgttagcatcctatttatcgatagggttatccttagtttcaattttcagtccccgataggtgttttagcgtgtctcttattaagttttgaacgttatggtttagggccctgtaaaacgtcgagctgcggctgacaggcacacttgagcacggaacgaggtaagatagtataagaatgtatatatgaatatatgcttgttttaactatttacactactaacactgattgtttaggtgattttaagggtgttagtatagtgtaggatattgatgagattacggtgttaccaacacgagtaccaggggatacgtcgtgcatgtggtataacacttagtaattctcgggagtacatttaaggctctaccaccacgagtacagagttggtacctcggtgcatttggtacagaggtcgtacttcccttaagaacgttcttatccactcggtgagctcaatttctgagctcagtgcggtttaaacataaagccgacattgcattacttgtatatatatgtcttacttatcttactgagtctgttgactcatcagtttgctacctgatgtaggtaaaggaaaagcgaaactggaagagcagtgagatggagctcggcagagattgtacatatcgcggtagtgcaacctggagggtttcggtcttttactattttgtgtccgtgttttgagttgcctgttcacgaatttgtaaaa

SEQ ID NO: 354050 - DNA, 631 bp, Cannabis indica
tacgcgtataaattttaaattacaaaaatatacttgtctcggcaaaaagtaagaaaataaagaaaaaatcaatctcacgataactataaatcaattacaaaataacaagaaacaataaaaaaaattacattatgacatctataaaacaacaacaaataaaaaaatttaaagcataaaaataaaaaaaaaattctgtgttgatatattttttatatatatatatattttaatttttagtctattattgtgtaaattttcttgtaaaagcataattacaccgtgttaaagatttgtatatatactatatagatgttatgtgacaagtcacgtatgttaattttattttaatttttagttttttttaatatcataattttaaaattaataatattcaatatagtaataatcattaaaatttgaaagcataatagtgatttaaataaaaaaaaattactattatactttgtaatagtaattaaaaaaaaaattattattcgtcctaaatttatcttcgaaattaatgaaaacactcatctagttaaactatcaaaatattcaaatttaatttaaaataatattaaaatttaactaattttaaatattaaaatttgaaaataatttttaataaaaa

SEQ ID NO: 354051 - DNA, 611 bp, Cannabis indica
ggggatcaaattgcagagatatgacaaactgtctaaatcccacgatcagtgtattctgtatttattattcaatctttctgcttatatccattgtaacgagaagagaaatacttcctctccaagctcataacaatataaatagtgatgcatgttcactggacaaagggtcgaaaacattctagtcgggagatcttacttaaagagatattatctaagaattcatgttcagagatattgttgtaagggctataagaaaaagaatctttctccttgttcttaagttaatacaaataacaaggattaggctattaccgaactgctcgaggttgaacctctataaaattcctgtgtcttttatattactttatcatatattagtccttataaattacttatcgcttactaaatcagactcactgtcgttggctaaaagcgaggtcaacactagcaaattgccttcttgatagaaaacttctcttccaaatgagcacattagactcgtttatatagtgtttaggtgatcacacttagaattcaaacacaccatctcatttctctcatataatgagtattaatgtaattgtaacaactatatttcataatatttgaat

SEQ ID NO: 354052 - DNA, 640 bp, Cannabis indica
tatagaggatctttgatcaattgagattataacgatggttaaatgtgatagcgtatctatatggtggaacatatagagcgttctacataactgagagtgcaattccaagttctaagagtggattcaacaaggaattaataagtttgggaatttacttggtaaattcggttcggcttattggaagctcagtaatataggtccatggtccccattctagttgagaccatactgcttgtaagactcagataattgattttaacactactagaaaaatgagttttagtaactcatgttgagtgactgcaaatctatttagtggctcttcaccgcgtgttactaatgagggtgactggaaagataccttttagtgacagttcacaagtgtcactgaacccttttacagtcactctctacgcgtcactatagacgtttaaagtcaagttttatctgactgaaaaagcaacagcaacacataaaaagtgtcactatatcctttttttttctttttttaattctttattattatttttaattttttattaaaaaataatatattatttcttttaattcaaatttaaaaagtaacagcaactcaaaaatacctcactatatcttttttttttactttttaattttttaa

SEQ ID NO: 354053 - DNA, 736 bp, Cannabis indica
aaatcacgctaacataatttagttagggtgttacacatcagtttagaatccaagaggatgacattctaaagacaactttacgcactaggtataggcattatgaatttctggttatgtcttttggactaaccaatgctcccacaacttttatggacctgatgaatagggtattcaaggatttccttgatatttttattatcgtatttagcgatgacatccttgtgtactctcaatcaaaagaggagcatgagcagcacctccgaatggttctataacggcttcaacaagattagttgtacgccaaatttaagaaatgcaaattttggctatctcaggtgtcctttcttgggcatattgtcagaaaagacgtgatcaaggtggattcggggaagatagaatctgtcagggattggccgtgaccaaaaatagttacagaagttagaattttcttgggtctgactggttattatttttggttcttagaagggttctctaaaatttcaacacccttaaccgaacttactaaaaagaatcagcattttttggtggacgaataagtttgaagcaagttttttggagctaaaacagagattaatcacagctccagtgttagccctaccttctaataaagagaagttcgtggtttattgtgatgcatctagacagggtatggggtgtgtattgatgcaggccgatcaggttattgcctatgcctctcgttagttgaaagaatatg

SEQ ID NO: 354054 - DNA, 777 bp, Cannabis indica
ttttgggtttgggactgggttcaggtccgggtgtgggtttgggtccttgtcagggttcgggtccagggctgggtcccaaatctagacaccgacaacaggttttgtccaagccctaggtccagatctggatcccaatctcgagtcccagtctggttccatttctcgttctgggtcacgagctgggtcctaggttaaagtttgggtcagggtcaggtactaggtcccggtcctagttctgtttccaaggtccctatcctgattctgggtccaggtcacggttattctgtgggtttgggacctggtctaggttcaggttcgagtcctagtctcggttcgggtttaggcctctgtctgggttttgatctgggttcgggcttggctttagttccttgtcctggtcctagtcctagttcggttctagttccttttgcgattctgagttcgagtatgggtttgagttcgggtcggagttcgagtcctggtctgagtttgggttcgggtccggatttcagtctaggtccagatcaagcttcgggtgtggattcgcgtcctggttcttggtctaggttgggtccgagtcccaagttccaaacccgatctgagtctagattcagttcttggtctaagtccttggttctgctcgtggtctgggttcgagtttgggtcggggtccgagtctgtgtccaggtttttgaataggtctagaccccgatctgggtctaggttcgggtcccgcgtgcgggtccaagtttttgtccggctcaggatctcggtcca

SEQ ID NO: 354055 - DNA, 518 bp, Cannabis indica
ttgctctagttttagttttgtttcatcgatatatatttttgtttttttcttttgtttggttttttttttctttttgcaagtaaaattcgatatttactttagttttaatgtttcttttactaaacataagacgaggggtatggaattttgtaaaactgtgtaaaaaaaaatgaaaattgaagtgtgtaactgattggagtcccacatgggatagaaacactatattagaagtttatatatagtgtaaatttgagaattaggtataggtccaaagagttactagttttgtgcacatgggtgaggactctcacgttggaccacacacgcgcttgcagatcattgactgattgctttgtttgattgagtcgggagtgtgaggtgtcacttatgttttttaaaaaaattatttaataaaattttttatttatttatttaaatattatttttaatattaaatgaagtagtaaaaagcgatcagtcaatgatccgtttttcactgccatgatccaacaatataa

SEQ ID NO: 354056 - DNA, 978 bp, Cannabis indica
aaaccctaactcaactattcattccatataaataaacacttaacatatagcattttaagcatggcatcatatatcacataaatactctagatgctcacatattgcctaaaatggaaagcgataaataaatgatcatataagtagtaaagcatttactctcaacatttactgcaccatgagtcgagattgtctctgacgatgattgtacatgttcggtcggtctacagaaagtttaaaaatcttggcgctcagataccaaactgtaatgccctaacaattaggcacgctacccaaggtgattaagaaccctaatcccctaaacaagattactaagtagaaaaatgcgggaactttaaactttaaacaaaaatagaatgaaaataaaacttgcaataattttaactttacaatcaaaggttacatatttcgggatcccaaaaatatttttcaaaatattacaagtctttccactagccgacctaagcggcaaaacaaaattacaaaagttcacactggtagaccccaacctgcttggtctagtgtggcgcaaacatgtacatacatcgcccagctctcgcactcatagctgattagaggcagatttaccctttcctacacagtagagcactcgtgagccaagcccagcaagacagtataaaataccaaaaatcgtaaataacacatcatataaacattaatgctattttacctttatctgtatgacatagacctgcatgttacgctcacatgcctatttatgtctatgtggcatagacctacgttttacgctcacacgtctacatacaataaggccttagaaccgtgcatctcggttctagttaccgagtccaacctgattatgctttgaacgcataaccctaaatctcaatatacacatataattaatatggcatagcatttacacattattaatcactagggtaataaccctaggccattaaactgttgggttttatg

SEQ ID NO: 354057 - DNA, 628 bp, Cannabis indica
aaatgtaatttctcaatttttttggttttttgtgtgtgtgattaatttagatttttgctctctcaattttaaaattatatcttacgaattttatgtcgttagaaattcatttaaactattaaaattattaaatttaaagatttttgtctaattttattaaagaaagtctgacaaaatgtaagagtactattttgtatatgttaaagtttagagacatatattagtactagtaaaaacttacgtgcgaggcacgtatactaaattttatgctaggtattttttattatattaaaaggtaatacacttaaaaatgtttatctcatcttggttcaacccaattttatgttgttcccataggattgtgtgttagatatgagcttagaagaatagtattcgttagaatgggtgccagcaatggcggtgctgatgtgagttttatcttctgggaaaaatctagctactccgacattacaattacacctagcctttcaaaatgagcatcatcaaaaattcaaggattataaattgaaaaggatatcttgttacttttggtgtgcccaacaaactctctaacggatgacattatatttcgcatatcccaaagctgtttaaaagtaaaacaatatag

SEQ ID NO: 354058 - DNA, 796 bp, Cannabis indica
tcccatcctttagaaactgctatagcaagaataattcttactgttgaggctttaatgacaggactataagtctctccaaagtcaattcctagtctttgatgaaatcctttggcgaccagccgtgccttgagccgttggagagttccatctaagttgaacttttctctaaacacccacttgtttccaattaaattctgactaggtgcaggaggaacaagaacataagttttgttggtctttaaggctgcgatttcttcattcatagctttgttccaacctttctgagcaagagcttcagcaacacttgtcggttctctagagttggggttctaaatagcttgtccaatgaacaccttcggtttaaaaaagccagactttgctctggtgatcatcgggtgtcctgcagcagtagcaggttgttcaattgcagcagcagtaggagcaacaacaacttcatcagcaggttcaggatcaaggaaacttgctgcaattggactagaaggatgttgttcaagtaatcccctttcactacctgaaggagagtcagcagaggagtgagacatgataggagaatcaggagtgtttacctgaaaattgcgagactgaggtgttgaaggttctgcctcttgagagcttgaggatggattggcagatgtgaatcgagaacctgtagcaggtgaaacagatggtaaaacagaccatgtggaactttgaatgataacaagattttcagattgataattgttaagaaacttatttgaaatggaaattcgagttcattaaaaaccacatctcg

SEQ ID NO: 354059 - DNA, 932 bp, Cannabis indica
tgttaatcaacatacttgtgaattgatctaagatcctggtaaaataatttccaacacttaatacttacgcacgctacagtaattttccatttactgtgcacaccttttctaatcaaaaggtttctaaaaaatcgtgtcaaatttaaacgttttaattaaactttaaaattttataaatatttgtatataaaaaaaaattgggatcctgtctttaaaatttacaatcatattcaaaatacattttataaacatgtcacacagtgactacaaaataaaggcccaagtcgtcccgagaccgaactcttcaagtctaaccatcctgatatgtacaatcacccctaagctctaaactcactagtactcaaccttagtctttccttgacctacacatacaaacaatatctgtgagtcgacatactcagtaagaaaagcaaaaacatataatataatatcaacttgtatttaggcgcgtactcagatgcatcaaaacattcttaacagaagtacaatctctataccacatgcattaagtactcgtcccatactagtgttagaagggatgaaccgtaccccaattaccactgagtgttgtactacatgcactacgtactcgtattatactagtgttagtaacactagatcgttctctttaaacatcatatattgtactaatacactctataccgctactgtactaacacttgtagtatacgaatcccatacacaacatgcaatttatatacatacacatatacatatacatatcttatgctagtcttaccttgtttcttaattcaagtgtgacagtcaacttgaatggaaatccacgcgctgaatggaggccctatgtcacaatcacgtaaatcgggtaaacaacatgcgaaaaccttctcggggacataaaactaaaaactagaagtttctctatcgat

SEQ ID NO: 354060 - DNA, 1065 bp, Cannabis indica
ggcgggaccaatgcgcgcctccagcatggcgtcaagcttcttcttcttctgccggaatttagcaataatctccgcgggttttgggtagaagtcgagcttgatattctggccatttgttgaccaggccatgtaaacgccatcgtcaaagcgcttgatgcaccggctgcaagagacgggagaaaggagctcatctttcttagccttcttcaaggcttggtctttgaagtccttgagctccttcagctccacggccaaatttgccctagactccaagtccgcctggtgcacttcctctaaggacttcaccttggcggccatttcatctaaggcttccctagcctcccggagctcgcgtctagccttagcaacagcctcgccctccgccctcagctcctcctggtgcttggcctccagcttgtccctccgaaagggcctcctcccggatcatcgcctccgcttgggcttccctccacctggcctgttcctcgaacttggccttggcaagggcctcccatcgctcagcatcctcttggtacgtccgcctttcagcagacagatcctgcagggtcttcatgacttcgtctatgcccccaaattcggacaagacgaagccatggttgattaggttcttggaaaggcggccggcctctgcagcaagctggaaaggatgcaagagtgagtaaagtccttaagaaaaataatgaggaaaaaagtaaactacgaaatacttaccacagtcaaggagtggctgagatcctggacttgaaagatggagttcaaggatgcacaagcagcgaaccgcttgggcgcgcaccgagttagctgagacacaaactcgccggtcatctccgcggcaaaaggagccaaggtcggcccgaggaaacaattaaaccaatccgacagggggtccaagtttagatcccacgggttctggtagttctgatcattaagggtattttgcatttcatctcgcaaaaccctcctcaaggcctccacatcggcatgccgccaagagtactcgtccatggcgtagttatgttatgctattcggagctcctgcctcgc

SEQ ID NO: 354061 - DNA, 511 bp, Cannabis indica
tttggcccctaaaataggcgggccctaggcgcgggcctagcccgtcttaatctagggccgaccctaaatatgtgtcagcttgatagaacatctcaaatacaaactcccactaaacgagcacaatcttaaataataacacatccatatatgagcaacaagcttctgaaaagtcttaagtgatatatccttaatgatttggattacacaaaatatgaagtttgtccttattatgttctatagacaccttattactctaaacttcattttaataacaattaactcaaagtcaatgtgcctttgatcttgtatagcttatgttttagtaaaatccaactttattgatttattgtcacaacatatattcttaatagttttcaagaccattcttaatttttgcaaccatatatgacaaaaatctcactattcaaatctttataagatcaaaatcaaattttttaataatctccaaaaatttttgagttctgattagtgaacatgtagtcttttgttc

SEQ ID NO: 354062 - DNA, 667 bp, Cannabis indica
atagtgaatacgaatagtcaactggtgtggttgagtctgtcactgaagtgaatagtgaatatgaataggcagcaggctaagagcttttgtttgaaattgaaaatgattaaaataacatttactacacaaaaagaataggaataggcattataggagttttatcataattaatacgaatagtattttattacagaagaagaatacgaataggcatttactaaaaattttatgatattaaattagtaattaattatttgaattattgattttttaataaaaaaaaacattttaatatttcgggttacgggttattacccgaccagaaaaaaatcaattaagctgacccgaacccaaaacccgtttatagtctttttcgggttgaacccgacccgactatatgggtttttaggtggtcgatttttttggcagcgggtcggggcgggtggttgggtttttcgagtttgcgggtctaaatgtgcagccctacttgacgtctcataaactagttgaacctgagaaaggagaaaatttgaaaccaacaaaattagtactaaaattgaagaaaactaaattagaataaaatttaatttttattaatattaactaacaattcccggcaacggtgctaaaaacttgtgggatcgacctgttgggaattattttacca

SEQ ID NO: 354063 - DNA, 532 bp, Cannabis indica
ttgtaaacgataagtgcacttgcgtgtggaaaatatcacaacatgggtgcctaagaagaaaccaccagactgctcgggaatgttataaccttgccataaccaaggctaaaagggaagtatcctctagcctaagttcgaacaagggaaaaaacattactaagtagggaacctcccaaggcagggatgaagatgtggatcctcaacttggggactcaagcagcaatgttggaccagtggaagaattagaagagattgaaatcgactcgaatattccgaccagaatgcttaaaattagaaaaggtttgttactcgaagtaaaatcagcattgataaaatttctgagagcaagcttagaaatttttgcctggtcacatgaggatatggtcagaattgacccttctataatttcacacgtcctaaatatttatccaagcttccgacctgttcaacaaaagcgaagactgttagacaaggagcaagccctagccctaaaggaagaggtagataacctacgcaacaataatttcataat

SEQ ID NO: 354064 - DNA, 1207 bp, Cannabis indica
agacatgaaacacattatatactctagctaataggctacctagcctatttaatcaagtgcacaagtatttaatatttctcttgtaccacacttattaaggtatctaaccagtggtacattcaattatcacttataaataaacacctcgtcagagaagagattattctaagataatctaacctttatcaaatatgctcacgacatgtttctaatattccattgatcctctcaggttacccatccttcaggaataaaacatcatactatttttgctttaacctccatgattctcaataaccttctttaattcttaacatcaaagccaaagatattaatcttggaatttcacaagattagactattccttcgtatgaattccatatcctcatttattgtataaattgtctaatactaatagacagcatattaacacagtatgtcaaaccgttactattcggtcaaaatcataagatcccataatacataattcatcttgataccttgtaaatctttacttgttaacacattctttcctcttacaaatttcgtaaacgactatcgattatgcatcccaatatgaatatttcttgcgtactttgtcctcactcatacgctttccaagatgactccctgaaagagttcccatcttgagacccaagttaagtatgcttaactccaaggtaagctcatggtgggttatcagaaggtagatgcttctttgtcattcctaattatatttcttgctttcattctttaaaaaaaatcaagtcccatcactcccttcattcacctcttacaatccctcatcgattttgttcacttaaacttgaggaattctcatcttattgtcaacttgaatcctattcctctccacttattttaacttgcatcaatttcgaattgacacaattttaaaatttctcaatcacttacaattaactattgttgtaacgtgaattgatgtaacctatacggtagaggcaacattgctcataccaggtacccatactaaactggacgtacccatttcctgaattctcaactaaaaagaattaatcaaagattatgtgatcttgaaatttcttttttgtgtttggtagagatcttgataatcttttcaacacatctacaaatatacttacctcaagtatatatatatattttttgttttattgacaaccccttggtactgttgggttttgtgccc

SEQ ID NO: 354065 - DNA, 558 bp, Cannabis indica
ggggtttttctgggcagtgtgtaattttctgggctgggttcttcatgttcttcatagaagaacattgaagaagaagaaagtttttgttctctgctagggttgatttattggaggccgtgtatgtattctagagataaggaatatatatatgtgtaatgcttatttagggtttcagcaaattgaaaacaacctgtagctcaagaaaagagagctgtcgtttggttctattgctgtgagtcaaaagaaggtttgactggggtaataaaggtctcatttgaccattgcttttgaattgattactctctgttgtgtgtagggataaacagtaataaaatcctacatttttcttatctttgtgtatctattcgaatgtagttcacctcacttcactcactaccttaataataataataataataataataatgataataataataataataataatatataatttattattttttttcctggtaaggaaattatttttgcatcctataccgaaaagaaaatataggacttaaacacaaataatatacattgattaattaatta

SEQ ID NO: 354066 - DNA, 665 bp, Cannabis indica
ttcaggaagcaggcacctccagtgtttatgggacctgatgttctgaaagctgaacagtggttgaccgttatcaaaagaatattgaattttatgggagtggtcggaaatgacagagtggcatgtgccaggtttcaatttcaggaagatgctttgatttggtgggaaatgatatcccttacaaaggatgttgccagaatgatctgggaggaatttcgggaattgttcaatgctaaatactataatgaggcagtccgcagtgcaaagcggaaagaatttgttgagttggtacaaggagagggaatgtttgtaactgaatacacaaccaagtttgatcgcttggctaagttagcctttggaattgtaccaacggattttactaagaaggagaagtacttggctggactgaacgccaagattaaacatgacctggttattacaacgaatgataccacaacttacgcggcaatggttgataaggctcttcgagccgaaggagcagtaaaatttttgcatgaaatccgagagcctcctattgccggtggggttattactatccctatttctggtcctggaaaaaaaagtggagattccacttttgagcaaaagaaaagaacttttccatcttcgggaagttcaggacaaagtaaaaggtttcgaggaaacca

SEQ ID NO: 354067 - DNA, 619 bp, Cannabis indica
tgatttactttgatttaatgacatactttctttaacaaaaaaaaaaaaaactttcctatttttaaaacgtcattttttcttgtagaaaatttatttcttttcaattttcttttaacattgtgggagattgtgagagcaagagattaagactttaaaacattttaaaaattagagcattgctattggataagagtgttgtctaacatttttctttataagtaataccttttggttataatattttttaaaaattatttttttaaattctctaaaaattaatgtcaaattttgtattgaccctccaacttggccacttgaagggctgtgacaggccacctggctttcccttgttggaggtaggttaggaaggctggtggtgctgactaaaaatcatgtgagtcattagtatatgttagaataggtaatactatagtatattgtaggaaatttaagatagaaatttactatcttgtccctacaccaacaaaacaaacaaatcagaatttcaaggtcaatttcgacctttccctgttcactttgacttttcaaagttaaccccaaaacgaccccgttttgtctttgaacaaaacctaggaatggatcgagaaccttctcattt

SEQ ID NO: 354068 - DNA, 831 bp, Cannabis indica
ctatatcaataaggtgcatcttatttttcggtagctcatcacgaaagaactcaacagttaagcgtgcttgacttggaataatttcaagatgggtgatcttgtgaaaagtttttccaagaagtatgcgagtaaggacaaagtacgttggaaacactcgtgttggtttgtagggtcattcgtcactccacgaagcagccaaagtgacgtacctgtgtataagagccacattccatgggtgtaaagacccaataaagacttgaagcgggaactttacaaagtcctcccaaaatatctcctagaatatatttcgagttcttatttgcttctgctttcacagataaacaccaataagaaagtagaaataatattcaatcatttataaagaaagatatttaaataagttaaagtaaagataaatttaaatataaaatcacatttaataaagattctttgatttttaatgctgcatagcatgattcactgtgtttcaacatctgtcacctcctttaccaaattattaaagcaaagatgaataaattacactattggcttgttaagctaatggaatagaaaaactcaaatgacaattcatcatgattccaaacataactcaattacaaagcataggatgatagctcaaagttcaaactctaaaatgtgaattaaattaaaactaataaattgtattttttgtgactaatacttttagttacgaacattttaatcacaacgtaggaaatgttggactaagtctaatacactctcttcatgtttgggtctggaaagtgtgggtataacgaatgacttttaagagaccacaggaccgaacgt

SEQ ID NO: 354069 - DNA, 532 bp, Cannabis indica
attcgggtctaggtctgatttggagaccggatcctgggctggttaaggttctggatctaggtcaaatttcagttaggaatccaagtccaagtcctagttctagtcccggtcaacttccggttttggttccaattttgggtcacagggtacgagttcgggtccacttttgtgtttggtactaggttcaattcttggtgtgggttcgggttcttgttagggttcgggtcatgggctgggtctcaaatcgagacaccgactacttgttttatccaagccctgggtctagatccggatccaaatctcgggtcccaatctagttccattactggtgtcggttcacgagctgggtcctcgattcaatttcgggtctgggtcgggtactaggtgtcggtcctagttctgtttcccaggtccctgtcctaattttgggtgcaggtcccagttgttgggtgggtttgggtcccggtctaggtttgggttcgagtcctagtctcgattcgggtttaggtctctgtctgggttttgatctggg

SEQ ID NO: 354070 - DNA, 979 bp, Cannabis indica
actactgacacctgccctatagacatggccagcaaaagggtggggcaaccggggcctacgatggttgtgccgctatgatatcaagtcaatacattcacaaattacatacacatcatgcatatattatacatacccataatcacatatataatatattctatgctagtctgaccttgtttcagaattaagtgagttggccgacctgaacggaaaacctcatgctggatggattccctaagtcacatttacgtaaacgggtaaataacataccaaaacctaatccgagaacctaaactcataactataggtttcactatccataattaattgactataacctgaggaaacaataaacaaaggctctaaaaataacacgatttgacaaaatggacttttcaggaatcctgccccctgatcctgttaaccagtttacagggcctgtaaaactggttaacttgttttacaccagtttccctaaacaaaatcgaaattccctcaaatcaatcccaaacttcataaaactttctagaacacctgcaccaacatccaataataaaatccaaccaaaaacagtagccaaaaagcacaaaaactctatatgccattattgagccaagtttgagttccaagaactcaaaattgctcaaccctaaaattattcaccaacaatagcttaaacaaccctagaacatcaatactaaactactaaaacaattttaaacaaaaccctaacaaatcagagcctaaatcaatacttccatatgttggaattattttaccaggatctagatttactaacaagtatgtttttaacatcctatatatgaacttctaaaacgatatgaaataaacacatataaagtatcgagaaccttacagtggttgcagcggaatataatgtctccttccactcagatctctaacccctgtatcctttctgtagcagggtatcaccaagatctgagtccgaatctccttc

SEQ ID NO: 354071 - DNA, 657 bp, Cannabis indica
aaaatgggaaatttagttcataatcaaatccagaaccattcctataacaatattcagcataaataaattaaagaggaatagagaaagaaactgttggtggaatgattctggatcttcactttaatttactttgctcttcctgccgctctctgctgtgttttagggttaaaaatcgattctcctggatctccaatgcagttttctatttatatcttatttgtagggttcgtcggacaaaaataccctcagtcgcacggactctcgccacggccactagatacctcgccgcggccagatgagctcataaaaaccacggttctgtaatggactttatggccgcggcgatggtgatgctcgttgcggtgactggggcttctaaaaacctcatttctgccttcgagttatggccgcggcaacagtgatctagccgcggtcagaagtgcgtcaagctaaaaaatggcatttttattggctccgctcgttttttacagaacttttacatatctaggcctccattactccgaagaacttgaaaacatagaaaacccgcataattccgtcctaaaacaacaaaaagcgaacgtaaagttgatccaaaatataggctaaaaatagcctaacaaattcccccaaactgaatctttactcgccctcgag

SEQ ID NO: 354072 - DNA, 1034 bp, Cannabis indica
catgcagcctttccgcgcgtgcctggggtcgagtttcagacaatgctccccaacagaccgagaaaactcggacatcaggcctgtccgaagccgcatgcgcccgaaaaaagtgggatccgcgcgcatatgggtgtgtcaccacccttgatttttttctgattttcaaaaattcataactaattcaaataaaatcgaaatcatgttctttaaaaaagtgaattgcttaattgtttccaaactattcaacaaaaataattccaaaacgaaaattcaattatttttcataaaaatttcacaaacatcaatcaatcatcaaataacacaagatcaacatgaaaccatccaaatcacacacaaatcgttttaagtccaaatttcataaaagtgaatcaattaacatggctctaaggccagttgttggaattattttaccaggatcttagatttactaacaagtatcttataatatcctaaatataaacttctaaaatgatatgaaataaacacatataaaatatgagaaaccttacagtggttccagcggaatataatgtctcctttcactcagatctctaacccttgtatcctttttatagcagagtatcatcaagatctgagtccgaatatcattctgttgaaactggatttttcacagccttacacactatgatggagtactacttgatttgtgtgggcactcactctttcactataggctcggtttagaagagaagaagagagagagagtgttgtttcggctagggttaggaaggaggcttaaattttatctgaaggaatgagatgcatcatctttttcccttaagccatcactacaaatttataggaaaccacctagggttaggttagatttaattagaattaaaataatagaaaaataaagtagtaaaatccatacaaagtggctggccatggattggttattgggccccactttgtaattttactatttttctcattttccttttattttctcaaaagacaattttccaatttaaccacttaaatgccaattc

SEQ ID NO: 354073 - DNA, 1768 bp, Cannabis indica
acatccgaagagttccatctttcttcttcacaaatagaactggggctccccaaggtgacacactaggccgagtgaaccctagatccaacatcccttggagttgtatcttcagttcttttaattcagcaggtgccattcggtagggtgcctttgaaacaggttctgctccaggaattaaatcaatgatgaaatctatctcccgctgaggtggtaatccaggcaattcctctggaaacacatccaggaattccttaaccactttaacctcttcaggtccaagtaacacaggtttactggaatccactaccactgctaggaatccaacacatccactacgtaacaaatccctagctttcaacgctgagattcttggaacacgagaaccttggaccgaaccaacaaaaacaaaaggttcctcattctccggttcaaaagtcaccattttccgtttacaatcaatactagcagagtatttggacaaaaagtccataccaagtataatgtcaaactcggccaatggtaactccacaagatcagcgctcaattctctatcttcaattctaattaacactgatctaacccactttcttgaaataattaattctccattaggcaacagggttccaaaccccgtctcaagaatatcactaggtctatcaaactgatcaagaagtcttgatgacacataagaccgagtagcacccgaatcaaataaaacagtataaacaaaaccattgattagaagctgacctgtaactactgaagggctggcagcagcatcagcctgagttatagcaaatacacgagcaggtgcaggcacaggtttgacctcaggctttggttcctctttcttcaactgaggacagtctttcctgagatgtcccaccgaaccacactgaaagcaggctctccggttacaagtcccggggtgatgcttcttgcaacgcgggcactcaggataggagtaagtctgacgtcctcctttgctctggtttcctctaaaccttttaccttgccctgaacttcccgaagatgggaaagttcttttcttctgttcaaaagtagaatcaccactctcttctccaggactagacatagggagagtattgatcccaccaacacgaggaggctctcgggtttcttgcaaaaacttaactgctccttcagctcgaagagccttgtcaaccatttctgcataagttgtggtatcattcgttgtaataaccaggtcatgcctgattttggcattcagtccagccaaatacttttccttcttactaaagtctgtcggtacaattccagaggctaacttagccaggcgatcaaacttggttgtgtatttcactgacataccctcgccttgtaccaactcaacgaattccttccgctttgcactgcggaccgcctcattataatatttggcattaaacaattcccggaactcctcccaggtcattctggccacatccctggtgagggataccatgtcccaccaaatcaaggcatcctcttgaaattgaaacgtggcacatgccactctgtcattttcgaccactcccatgaaattcaatattctttcgataacggtcaaccactgttcagccttaagaacatcaggacctcccagaaatactagaggtgattgctttctgaatctctcatataaaggctccatacggttaccagcaacatgttgctcagctggcaccgcaggggctgcaggaactgcagcaggcggttgcgggggaagctcaacaggagcatcccg

SEQ ID NO: 354074 - DNA, 494 bp, Cannabis indica
ttctatttttgaaaatattttatttggattccttgtgaaaaattaagcaattttggtttttacagaacttaattccgataaaaattgaaagagttatgaattttggaaaaatcggggttcaatggtgtcgagggtggtgctcatgcgcaccagaccctcggacaagccccctatccgcgcgcgtgacacgctcgtgtgcaccctgccagcgccgagctcacccgctcatcccccctgcaatctccttgctccgcacgcgcccgaggctgcgtgcagccttcctgggctgcacgtgcagcctcctgggcagccagccccaaattgcgatttttttgggtttttccctaaaaatccgatattttatgtgattgtttcccaaaattcgatttttccaatttttaaatttttccaatttgaaatatttccatttttaaatatttccaattatggtaagatttaaaatttgttaacttctttaatatttatatattatt

SEQ ID NO: 354075 - DNA, 612 bp, Cannabis indica
ggaaggtatgcactgaaaaataattttgagtggatggtaagtaagtctggcactaatgtgttttacgttacttgtaaggatgaaaattgtaaatggagattaagggggaagaagaaggcactttgtgacatgtttgaggttactgtgtttcacaacgaacacacatgtaacttggattctagacattctgatcactggcaagcagcactgtgggttattggtcacattattaagaacaagtacacatcagatggattaactacaaggcaaaagacatatggagggatatgtttgatgaatatgacatcaagatgagttatgaaaaatcttggagatgcagagagaaggcagttatgtacaagaggggtactccagcaaaatcttatacgaagttatatggttacttctacatgctggaacagaagaatccgggtactattactgacattgtcagcgaggataaccggttcacttactgtttctggtcactcgatgcttgtaggaaggaatttaagttttgtcatcttgtaattagtattgacggaatattcttgaagacgaagtatggaggaacactgttagttgttgttgcgtacgatgcaaacaaccaat

SEQ ID NO: 354076 - DNA, 418 bp, Cannabis indica
gataaaaaatgagaaagttatggaggtttgaaaaattcgggtccaaggtgtgtcgagatggtgctcacgctcaccaggtactcgaacaaaccttgtccgtgcgcagagcttagacaaatcatgtttgtagctcgttgatgctgcacgttcagacacgatgcacgctgcacctcgcccatgaaatgttgcaatccccgagatagcttggcagatgaggctgcagatcactccttgtgcccgcataggaccctgccagcagcctattgcatggcacctaggtgcttgcacccaaaaatccgagtttttggtgattttttcaccaatttcaaatctcaaatatcaatataaaatatttttttatatttaaacctaaatattatttatttaaaaaattaataatatttaatttttaataaat

SEQ ID NO: 354077 - DNA, 489 bp, Cannabis indica
tttaccttacttgttttacagtgaccatatgaagctgttacaatcaatggttccaagaaatcataaaaataaacaaaaataggttgcagaccaacattgtcaaactttcattggatggttaaggaataacattatagcaaagttgaacgaaccgaatcatggagtatttgatgtgttgagtcgtattgcccttggaccaacttttgcggtagcaaagcatgaagcgtacattgtaaggggtaaactttttcatacaaagtcaagagatgatgctcgagaggttcaaaatagtggcatacgtatcgttgcagaaactatgcactttgctcccataatacttcaagatcgccttgagctcccatatttcttcaatgaccccatgatgcgtcgaaggggaaagctccgatgctttctccacaaggcggtggtgcacgggaagatgaattgttctcgaaaaagaagatggacttgatccctaaatcgctaaaa

SEQ ID NO: 354078 - DNA, 692 bp, Cannabis indica
cttagtttgtataccgtgtcatatacgctaagtatttttattattattatatcgcctccacgcgacgaggttaatgcctcgtcatgcacacttgtatttacatggtttctcgtcgatacacaagttaacaattagtatatttctgtctcgcacaacactgttctgttggaatatattttacctggatctagggttgaattatttggaataaaaatagagtgaaaaacccatctagtggccggccacatagtgggccctacactagtttgggttttgtcatttttctcaactattttatctatttttcacaaatactactttttgcactttcaaccctaaaaataccaaaactatttatttaacaattaaaataattatcaaatagaattgtcatttataatatttattaattagactccataaagtctcttaattaacaaacaaaccctaaaaatactatttcttcacaatcaagccatatcttagtgaaaaattcataaactagacatagtctaattttagaattataattgattaactaaaatcaattaactgagtcttataagcagtttgtcttaactagtatgggaccatgggcgtacataaccgagcttcgaataagtagatctagaatttaccaagtaaatccactaacttattaattcctcattagcatccactcatagaacttg

SEQ ID NO: 354079 - DNA, 597 bp, Cannabis indica
atgatttacattgcatagggattaatttatcgttacacccttcaatgtattttatccttaagccacctataaatgatatttcagtgaactaacataatcactgaaatgagtactcaaccatttatctctgtttagccaagctcgaaggaaatcatcatttcacttatatgtctagatagaagctatagattccatatatcgttttatttagggcacaaagcccaacacatctaaagataataacttagactagtgtttacaatatgaaacaatgaagaagttcataaaataagaatagctttgactctcgcctaaacaagacatcgttagattcttattttaatcgaaattatcctttattttcctcctagctttttcatttagaaattgcttagatagtatatcattggatagatagatattctagatattctatcccgaaatgatatacatcctcgatcttagagaatatcctacttgtaaatgcttgctaaaagcaacttaagcttagagttagattagtagtggtggtccaagctagaataaaactcaagatatatttggtataaatttaagtctttgactttaaattttaga

SEQ ID NO: 354080 - DNA, 902 bp, Cannabis indica
cttcgtctgggttctggtcctagtttttgtccgagatctagacaccgactactggtctgttccattccccgttacccgaatctcgagtcaagatctggatcactgtcacgggtctcggtctagttctggttcaggtcccaggtcccatttctgagtttgggttcgggattgagactggggtgcggttctaggtcccgacccttgttctgtgtccctagtctggttccatgtttgggtttgagttaaggttcaggttccggtcccgagtccaggcttgtgtggggatccgggtccacctcccaattcggtctaggtctgtttggagtccaggtccaggcccggttacggttttagatctatgtccaatttcagttatgattcaaagtccaagtcctacttccagtcccggtcaactttcgattttggttccaattttgggcacagggttcgggttcaggtccacttttgggtttaagactcggttcaggtctgggtgtgggttcgggtccttgtcagggtttgggttcagggctgggtcttaaatccagacactgactacggattttgtccaagccttgggtccagatccggatccaactttcgggtcctagtcgggtacttggtctcggtcctagttctgttacccaggcccctaacctgattctgggtacaggtcccgattattttgtgggtttgggtcccggtctaggtttgggttcgagtcctagtttcggttcgggtttaggtctcttttttggtttttatttgggttcgggtttgggtttaggtcctattcctggtcctagttctagttaagttctagttcaatttgcgattctgagttcaagtttgtgtttgagttcgggtcagagtttgagtcctggtctgagtttgggttcggg

SEQ ID NO: 354081 - DNA, 877 bp, Cannabis indica
tttttttcaaaataaaaatataaaattaaatctaataacaattataatattaaagattgatttttttttgtcgtactactcgacacatttgtacttcattctactttctgttatataattctattttctcatagagacaaagttgtttgttctttcttctttgcagatttaaatatattgtatatgtattaattgattggagtggaatcaataaaaaaaaaaaaagaaaacattacaaaagtttgaaaattattgattagtattggttattgataatatatattattgaaaagtttgaaagtcactaattgttatcggttattgatcttgaatacgtgttattgaaaaagtttgaaagttaatcattgttattggttattgatttttaatatgtattattgaaaatttaaagttattaattgttattggttattgattttgaacatgtgttcttgataaacttagcaattgatgctatagaatattattggttcttgattttgactgtgtcgttaacaaaagtttgtacatcatttagtggttattgatctcgaatatgtggtactaataaaatatacatatatgaagttggtaatttttcaggttatctctcaaatatataacttgaagatatatagacgcaattgggagtttagatatgatgtattaaccatgaagttccatattttagtattttgcagtattctcgaacttagtgattaattattcaaaaaattattttaaaaggggtaaaagtttaatgtgtataaaatagtagagttttattgtaatattataatgggaaattattctatatactattttttttttaatttttaattttttttttaaatttactgtttgggtttctaaagtg

SEQ ID NO: 354082 - DNA, 628 bp, Cannabis indica
tgtcgggcccaccttagctcccttcgcctcggagatgaccagccagtttttctcccacctaactcagttcctagctaaaatatatgcggcttgtgcctgttagaactccgtttaccaggttcaagacattagctctgccatggccgcggtgagtacttgtaatttattccttcctttaatattttgtctaaggcatctgacctcattcctatttctttttttagattactgttgagaccagtcgcctttccaagaccctaatcgaccatggcttcgtcatgtccgaatttaggagcattgacgaggccgtgaggatcctgcgggatttgtctgccgaaaggtgggcattctaagaggaggctcaacgaagggaggcccttgcagaggcaaagttctgagatgaggccaagcaaagggaggctgaagtggaggcgaggcaccaggaggcattgaaggtggagggcgaggccacagccagggccagacacgagcttcgggaggccagagaggctatggacgagatggctgccaagttaaagtccttagaggagttgcatcaggcggacttgcagtctacgaccaacctaaccgtggaggtgaaggagctaagggatttcagagatcaggc

SEQ ID NO: 354083 - DNA, 950 bp, Cannabis indica
gttgaggtaccgggtcttaatcgcgggtctcgggtctaagtcatgggtcttgggtctgggtctgggtcctggtccgctttgggtctaggtcctgtattcgggtttgggtccggagtccgggtcccgatcccgggtctaggtccggatctgaatgttgggttcaggtctagctctggctccgagtccaagtccgatctcgagttcgggtccgagtcccaagttcgggtctgggtccaaagtctaggtttgggtccaggtcctagtcttggttcgggtttgggtttgggtccaggtttaggtctgggtctaggttcgggtcccgggtctaggtccatgtccgggtctgcatctgagttccaagtccaagtttgggtcccgtgtcctaggtctgcgtcttggtcccgatttgtgtctcgggttcgagtctggcgtctgggtccgagtcccgactttgggatcgagttcgagtttaggtccgggtcggagattagggttgaccacaaatcctttgtaaatattatattacaatctaatacataccatttgttatgtattagataatacaacatacattgtataaaaaaaatttgttgcaataattaatagagtacattgctttatccaaacatagtattatttattatgtaatacaatacgacccttatacgactttccaaaccagccaaaatctaattattaattcaatagatattagatattagtggtgccttacactattaggaggtatcatttgttttagagtaaagaggctgtcaaaacttagagaaccgaagagcggcaacaagcctatcaccaatccaccaagtatcttcttcaagcctaagaaccttcttagctaagttgtgggcaacaatttttgctgtcctacgaatgtgactaagctgagcatttggaaagagggatagaagtgacttcagctggaagataag

SEQ ID NO: 354084 - DNA, 502 bp, Cannabis indica
atcactaactttttctttgcggctgcctccttcatcctttggataaaatccttcaggctttcattatgttgctgcatgacgttggtgagtgaacctacttccatatccttttcccatgtagtaatgaattatttacgaaaggccgattgtagatccttcgaactatcaatcaatctcggggccagtcgcttccaacaatcttcagcagacttagtgagggttagagagaagcataaacatttggcatcatcgctgacgcgagttacttgcatcatcttattgtatttagccaaatgtgttcgcagatcattcctcccctcatacaactcaatgtggggcatcttaaagttttctaagaatggagtttccacaatccttcttatgtagggcttcggatcttcatctttagaatctgacagtgctccactttgtttcttaatcaacttggtcaacacaataatttgttcttccaacctcttggtatcgctttcagggagatcat

SEQ ID NO: 354085 - DNA, 390 bp, Cannabis indica
aagatcctggtaaaataaaatcccaacagttatttagtatgtgttttttgtgataaattgtgcaagaaaagtctagggaaattatgggtttcggagtaaactcttttttcctgatttcgtgttttttgcgacattatgcgatttatatgcgatattgtgcgattttcaccaaggtcgatacatttaggagatgtttagcgatttttaggcgacattgtgcgatgtttgtgcgatatatggggtatggaataggttgtgcgatttttgaaatgaatgtgtgatgtttgtgcgatgttaactgacagaaacttgattttttagttgttttgttttacatttttttagcgatattatgcgattaatgtgcgatatttatgcgattctaattga

SEQ ID NO: 354086 - DNA, 511 bp, Cannabis indica
cttggcacgtaacaatcaccttagattattatacattggtttcttaataacatcatatatctacattatagattctttaccatatatatatatatatacataaaaaaccaaataatgagggcaaaagggaagatagtctttcattaacatacataatttttgtgagatcaaataacgtacttttttaattgtatagtggaaactagaataattaactattatgccgtcacaataaaatcttatatatctatttcatataaattgtggctatataacacaattttgggttatgaaaaattattaggtgactttttttttaaaaaataaaaaaaaaaatagcaaattattagatgttgacacgtaaagagtcattatacatatagttagttaaacctaaatataattaaagggctttttcatttttacaatttaaataagttttttttttttttgcatttttatggaattctacataaaaactcctattgcaaatagcgctgcaacctaaatt

SEQ ID NO: 354087 - DNA, 654 bp, Cannabis indica
tagatgatctacattgaataggaataaatttaccgttctacccttcaatgtattttatccttaaaacatttagccacctataaatcatactttaataaactaatataattactgaaatgaggactcaatcatttatctctattcaaccaagctcgaaggaaatcatcgtttaacttctaaatacttatagaagatatagattctatatctatgttcaacgctctcactcaattgaactaccatgttcccaagatgtaaatatccaccaagaccattgggtagcatccacaagcaacttgaagaacataaataatacaactaagttgatcctaagcatatcaggattaagatccatagacctaagatcatccattaatattgacttagaaagatatgagagtaagtttatgatatcttatccaagttcaatatcagtctattccaatgattactccatacatccaatactggtaaatttcgccaatgctgtggaaaggatataacacttatcctaggtgtaagtataccttatcactgattattatgttagtctaaatcaagtgaaatgaaaaatcatgggaattgaatttttaaacacatatatatttatatatcttctgaacttaatagaatttatacattaaacataatcat

SEQ ID NO: 354088 - DNA, 837 bp, Cannabis indica
attttacttactctagtgcaagcaacttactttagtaagatgctgaaacatttttttaatggctaattataaaagaagtcttttggctcctagatatagagtttatttatctaagaaacaattataatcattcaagaaaagataaagaccaaagaaagaatttttcaagcatcaacaatgagaggtctcatgtatgctctggtatgcattagactagacatatgctgttgagtgaaagttaggagtaggtatcagtttaatccatgaaacaataaaataaatcttaagattaaggggacctatatgttagtctataagggtgatgttttcgaaaccttttaggctacaatgactcagatttctagatttacattaaagctaaaaagtctaaatctaagatggtaattactctaggagtagagcagtactctaaaccaaacaaaattattcatttagaccctatagatggtcttgaaattcccaacaaatttatgcgatgttaaaaaggtaataatttaattattttatataataaatgttaatataattttcaaaacaatgcatatgagattttaagggcatcaaatacgtttattgggacgtatccatgaatattgatagaaaattgtccaaaacaatctaaaaactaaaaatgtggtttttatgtgttgaaatacatcagtgatatcgtcacacgtgcaaatcataacagtttaacaaaacagatggtctaattagtaagaaaaaattttgacaacttttttttaatataaccaacttgaagacaattcctaatatgaacaaatacagaaaatgtaaacagttttgtcatagcac

SEQ ID NO: 354089 - DNA, 508 bp, Cannabis indica
ccattgaccctacaattgaacggaactgtaaagaaacaaaaaggcctgactatttcgaggtgacaaaaaatatgttagtagtggaattaaagagcccaccagaaatcgaagtagaagagatagtagaaacgatggaactccttttgcactcaaaatctgaacatgaagagaaggtagaaaacttagaagaatcagagtattccccatcgttggataatgaggaactagaaaatacagaactgtctccaacaacaaatgataacaagtcagatggagatatatataccaaattatcatttcgaggtagagatcgaggaatcagagtcagaaaataaaaatttatcggcataccacccatcgccaggactagaagtctcagtcgaaccagcaccaatttaagaggatgtgggattggtaacatattcagaagaggacttggagagtcagtagttgagtcatgcatggaggacaattagctattgaaattttttttagttgtttagctatt

SEQ ID NO: 354090 - DNA, 977 bp, Cannabis indica
tcaagaatcacattcaactaatcaagactcatcttcaacatttcaagaatcaaactcgaactttcaagaatcagattcaagcaatcaagaactggttttaatggcttcagcaaggtttgaggtggacaagttcaatggttcaaatgatttcagcctatgaagaattaaaataaaggcttttctagttcaccaagggatctatgaggcacttgatgatgaagccatgaaattaattgaagacaacaagaaaaaacttgagattgaagccaaagcacatagtgccattctcctcagtcttggtgatgaagttttgaggaaagtttcagatgaagacaaggccttgggtctctggaacaagttagcatcaatctacatgaagaaatctcttgcaaacaagttgtatcttaagaagaagttgaacacacttcgaatggatgaatcaaaggaattgagaaagcatctagatgattataacagaatcattcttcatctgaataatcttggggtgaaaattgatgatgaagaccatgctataatcctgttgagttcacttcccaagatgtatgagcactttgttgatacgatcttgtatggcgaagaaactctaactatgacagtggttaaggctgcattgaattctaaagaaattcacaataagagagctgagaaagatgagatcagtggggaaggattactcaatgttaagggaaaattccccaagagggaatacaagggaaattagaactcaaatggctacaaaggtaaccattcaagatccaattctagaaactccacaggagggccaagctttaatggagttgcagaaaagcaatgttattattgcaagaaggagggccactttagagatgagtgtttaactttgaaggctaaactaaagaggggaaaatcatcacaagtctaggaagcaaggagttgctaatgtggctgatggctatgggtcgtctgatgcacttaca

SEQ ID NO: 354091 - DNA, 574 bp, Cannabis indica
cgggttagtgtgtagtgtactactacgttgactccgaccggacgggagatcacgtaggttcttccgtcgtggcggggcgcgggagcgtgctctgaagaccgcgttgaggtgatcacgcagatcgcccctatgtacttgatatcgtcctccctgctgcgtctctacagaaccggaccttatatatctgctaggtgtacgaccatgagaggatgaagaggcggattctgcgttattgtctcttgatggtcggttgcgaggattacgtcgctcagggtcttcatcaacctgtgtttcgtggttaggatacctcgcagattggtctctcgaggttggctggtttaggtccagaccctcaggatgggttctttgttccctgcgaacacgattattatgacgtctagagttcgttacctgaggattgtctgtgcgagtagtaggagctcgaggggggcgtcgggccctatccatccacttcggcctgtagtgcacgcagttgatcctggatcgcagtatattggtcgttggtgagttggatgattccctcagataccaccgccagagtgacaggtggaaa

SEQ ID NO: 354092 - DNA, 548 bp, Cannabis indica
ataatctaagaccaaattaagctccaatggaattgagtttgaagttcatacaaaaatataaaataaaggaaaaatatacaatacaacttcatttagagctcgtttggaacgccgtattaggtcgtattgtattgtattgtattatattgaattggattatatatcatatttttatataatactatgttaaactttaatttatactaaaatattatatatttaggtgtccataaaagttaataccacatatagttttacgtaaaaatattgcataaaatacaattcaatataatacaatacaatacaatacgacctaatacggcgttccaaacgagcccttatagaattttttagtctatttttttattttatatgttatttattcttaagattactgataaattttttagaaaaaaattgaattttttttaaacactgataataaattttaatataatcaatatctcttttatatttttttaagtgttttgtcattattaggagttttttctgaaaatacaaaatatttaaattttactttttacatt

SEQ ID NO: 354093 - DNA, 582 bp, Cannabis indica
tgctgagtcctcttcggtagagaatattgtccatcatcacatatcggtgtgcttggtactgtatctttttggacaacgccctttcttgaggcaactcgcctttggttatggatttgatgatggggtttatccagtttgtctctggctcaactacaaccacaacatctttaactttgatgcttggttccacgaggcgttcaatgggcaccacccccagtttcaaaacctcgctgtctgatgctaacttagccaaacagtctgcatgggcattcttttctctcgggattctttccactttataatctgtgaactcatggagtagctcccgaacaattgctacatacacaactattttttctccacgcgtttgatactctcccgagacttggtttaccacaagttgcgaatcgctaaagacttctactcttgtggctcccacgcttcttgctaattttagcccagcaatcagggcttcatattcagctttattgttggaagccgggaattcaaaacgcagagccgcctggagtcaaagcccgttcggagatatcatagctatcccagctccggatccgttttcgt

SEQ ID NO: 354094 - DNA, 420 bp, Cannabis indica
aagtctagggagcataatttagtgtttcagtgaaagttgaatgaaattagacaaaagtctttaaatctaacaatctcaatagttcagggggaattttttaacggctaaaaaaatttagggaatataatttagtacatgtccaaattcggggagaaaattcctaattagttgtgattaaaaataaatttttttgtatatatatatatatagagagagaattgcatagatattttatctccatttttattcaagttgatgtggacattagtggcagagctgaagtacgttaacagtaatgaatcattcatgaccatgaaaccaatgtcgtatttcccacgtccaaactatatgatagtcataaagaccaatcaattaataatagaaaagtacgtacgtggtgcatgaaatatatatatatat

SEQ ID NO: 354095 - DNA, 1238 bp, Cannabis indica
aaattaagagatcccatggccaagcctccaatcctgtcaaaacccgatcttggagaggacttattactatacttagcagtctccgagaatgcagtcagtgcagccctagtccgagaagaggaaaaaactcatcaccctgtgtactatgtcagcaagcgcatgataggggcggagacgcgatatccagtgattgaaaaactagttttctgcctcttgatggcctccagtgattaacaaaccatccgctcctgcaagttctgcagaagcttgaggcgtctggaagactcctcaaatgggctatggagttaagccagttagacatacactacataccgcgcacttctataaaggtacaagcgctagcggacttcataacaaagtgcaatgaagcagaagctagcgcaaacataccaacaccacaaaccccagcgtggaaagttttcgtggacggtgcctccaacgaaaacagatccggagctggagtagaaatgatatcatcgaacggactctgactccaggcagccctacgtttcgaatttacagcttccaacaatgaggctgaatacgaagccctgattgcaggactgaggttagcaaaagtcgtgggtgccacaatagtagaagtgttcagtgattcacagttgattgtaaaccaagtgtcgggagaatattaaacgcgtggagaaaaaatggttgcgtatgtagcaattgtccgggagctagtccacgagttcacggattataaagtggaaaaaatcctagagaaaagaaagcacacgcagactgtctggctaaattagcatcagatagcgagatagagaaactggggtggtacccgttgaacgcctttaggaaccaagcattaaaacaaaaaatattgtggcagcagttgatcaagagcccaattggatgattcccatcatcgaatacataaccaaaggcgagttgtcccaagaaagagcattgtctagaaggatacagtatcaagcgcaccgttatgtgatgataaattacattctctacggaagaggactcagcatgccatacctaaggtgtgtatcgaaccctgaagctaagcaaattatcctagaggtccacgagggattctgcggagatcatataggaggcccgagtctctcaaagaagatattgagataaggatactactggccaaccattaaaaaagactgtatagactatgtccaaaaatgtgattcgtgccaaagattcgcgaacat

SEQ ID NO: 354096 - DNA, 545 bp, Cannabis indica
ttgaaaaatatatttttttcagatcttatagagtagctaccatggtagatttgactaatattgcttgatatcaaagcagaggattgacattctctttagggaaatttttatagatttgtaaaaagactcaataaagttacttatcatatgtgtttgttggttgtccatgttgtgtttcatgtctaaattctaggaatggtttttgctttgtttcatttttaaatattggaattctttcaaatgtaaatgactttctcatcattttaaagtacttgattgtgtaacatgtaataagcattaaaaatgaatttatgagttttgaaaactatggaggagagagatttcacccttgatttatgtctgtttatgttgtgctgtaacatgaaaagagagacatctctcttaatctgtgtaattgttgctctaacatgaaaggataactagggttttaaatgtgatatgatttgggtcatggtgttgctagttcttttgattggtgttacttttaatctttagagtgattgttgtacatgaatgacattatt

SEQ ID NO: 354097 - DNA, 555 bp, Cannabis indica
tacatgtttaagtacgattccgttcatggaccatggaagcatcatgagcttaaggtcagggactctaagatccttctcttcggtgaaaagcccgtcactgttttcagtgtcaggtactgatctaatttccttacaaatctgtcgtgtttgtgtgtgattttttaatggatgctggtgttgctcaacctcattaaaacagaaagagagaccccatcaacaatgtacgacgaggaagaagatgcgttttaatctgatagctgataagggaatcaacagttgggtttctcaccaaaaacagcatttcccatgaacaattttctcaattcctttgagagaggtaggtactttacttactgggttggtttttattgttggctttcaagtatttgattatgacttacatgtttttttggagcaccacaaagatcaaatcttgaaacatcatgttaatttcagagatatgcattctgatttagtaagtagtacatagaaatgctaattcttgtaaaacaattcaattagtaggaattgtttttgagttattgttatcagttc

SEQ ID NO: 354098 - DNA, 797 bp, Cannabis indica
ctaacaaactttaacagctcatgcaacaagtaaggacagctgtcatatttttagctcccttagctgacctgtcaaagacaagataagatcaaaaaaactagatgacactatcaaccagacagatgacaaaggcagcataatttgccacacgaaccataggaacttacaatctcccccttggcaaattatgctcaacgatagaacacacaattaagataacagaatcatactatcattaaaaggaattccaagagttttaaccaaaagacagcacaaaaagacacaacatacacaaaaaattacacttataagattgtgtcaaacggctgcaaaacccaaaagaaaaacaattacactaaacaactccccctcggtgagcatgattagcctgcagggttctgagcaggagcaccagcagattgtgactccccctggattggtgcagctgtatcggctggcaagggatcagagccaaactccccctggagtggtgcagtaggatcatcagaggagctggactgaactggagaagcttcagtgagtggaccagagtccattgatcttagaacttcagacatagctgtgagaaccgtaacaactccttgctcaaaccttttctgacgttgttgatctaagttgtaagcatgagccaaattccgaacttcggacagtaacttgacttgccaatgagcagaaggcaagcgagagagtggtgatgtggtcactggaggaatttctgagtcagcaggagcagcaggatcagaggtggaaaaagcaatgaccgatggaggaatggg

SEQ ID NO: 354099 - DNA, 939 bp, Cannabis indica
cggaaggagtcatttaattccacccaatgtaaggttacttaaactttatacgtgtttaatttatcgttttagaaagttcttgtttaagatgttaataaacatacttgtgagtagatctaagatcttggtaaaataaattccaacaatcttcccatagcaagaagggcacctcacttacttggtcttaagccaatctgactgtaactcttagtttgtacactaaaggctttcgcaattgatatatatcgcttctgtcttcctatgtgtactgtccttgatgcctcgctattcgcattcagcaacatatggtttctcgctaatgtactaagcaccagtttgtatattgattcctcgcctaagaccttacagtctgtagcttacaaatatactctgatactcacgtaattaatgcgttattccatttgaagcgattgcatcgatccatattccctttatcttgacacgtgtcctccactgagatggcagccgaatttgagttataacaattgccccttaaaaagttcttgtttagtaaaaagtgctttttaataattacagagggcattttcaccaaaatcccttcttggaaaaaatgcgtcctttgattctggcggttgtacagtttcgagggttattatgaatcgtcccttcatattctgccctccaaccgttggatttcccaatccttagctttcttgtcactggactttgtgcaaaaaagggcggctcaagtttgtcatttttcacaaacctctggctttttagtaagatccattttcagaatgcatcatctctttcttgctagaatgtcccttctgagttcaaaagttcactctcctaaactcataataccaggatgcaccaacaattttccattcgttcccaagaactttaagcctcaattggaaccgaaaacgatggattccaaggttgaggagc

SEQ ID NO: 354100 - DNA, 534 bp, Cannabis indica
ttacggtcggtttttgatgttaacggtcggttacggttttgtgaacaatcaaaccgtaaccgcctggtcggtttggcagcaggtaaaaaccgaccgtaaccgaccgaattcacccctaaattgaagaacaaacttttagttctttggtatattgagaaatattaaatgtatgtagtttgttcattagtaagtcttgaagtacttcatacacatcaagaattatagatatatgatcatttgatatggaaattaagatcatacaacaagaatggaataaaaatatggtcttggagtaccatcattgtcacaaataaaaatttatattatcattaatgtgtcatgttcatgtctacttgaaattttaaattttagtataaacaaagttgtgtacacacatgaatgatacaattagttggataaatattgatgttgcaagaacccctcatctataatttagaagtcaacatgtactctggaagagttatagagaatatatgtgatcatagataatatacaatgatattttaaaagtga

SEQ ID NO: 354101 - DNA, 750 bp, Cannabis indica
tcacaattaccttccactgtaattatatatatgttctagatttaacagaaattgtatacattataccataaccataaaaactaaatgtaaacataaatgacttctaatattctatcgataacaaattagattgtattgaaatgtgttttatttagggcagaaaatccctacataaataaaaaagaaggaatacatgtggtattagactgcataaaagaaaagctctagagtccattgactatgatagatgccctaacccaaccctaagcaagaaatgggtttgcttgcttttcactcaataggcttctaaaagtagagccttatgagaacatgaaactggttaagacattaaccctaaagaattcttgtcaaaataaagacaaaattctctctctcattccctcccttggtgcgccaccccccatagtgaagaacacaatctctgtgttcttcatttcactcaaaagatcatagtcttatgtgttgacattctaaagtgtggtcatagtttttaccattgaaaaaggataccacacatcctcttttttctatgtaagatattagggaagacaagtggtcatagaagcacttcacacacataggaggcttggtggatcttgtttgtggtgttcctcgaattgaatctgaagtctgagctacaagatgtaaataaaagttgtttgtttttatttcttttttttttgaaggtaaaactttattaacaaaccaggaacaaatcaaggaaggtca

SEQ ID NO: 354102 - DNA, 1169 bp, Cannabis indica
ttattcgattccatcttggttgtagtggatcgattcacgaagtctgctcattttctgcctgttagaacaacctattcagtggatcagttggcagaattgtacgttaaagaaattgtaagacttcacggggtaccgaagtctatagtttcggatagagatctaaagttcacctccaagtttcggtagagtttgcaacgagcaatgggtacaaaactgaaatacttttgataatattaaaaattacaatttatcacaaacacttagaatcatagactattatgtgaataataatcataagatgacaataaattgaagcaaaacctaatttagtgatcatctaaataagattaaaataacaatcatgacattgaaaatagaacaatagaagcaattcaatatattgaaaattaagaaaataacattcatcatagaaattaagaagtcatgtcttatgttttgaatatcccttaactaaaaagaaactactccaaactaatcattataataaaatgtaaaatataagaagaagaagagaaactataatgataaacaattaatgatgcaatcttcttcttattctctttctctctttgagtttctctatcaaaatctaaaagtttttagaaacgaaccctagaagtcttatttatacaccataaaaatattttgctttaaataaaagataaaattaaaaatttgaaattgcactctcgtcgtggtgaaggtgagggtcgtcacagccacaacctcctcatcgcggcaaagctcatgctcaccgcgacgagtgtctgttgctgaaaaatttctgccgcgtcttcatattggtattttttccataactccttcaaaacaactcagaattggacgattcaagatgttgaagaacaaagctgagaacgagatctacaactttcatgtttagctccaagtctagttctgcttctaaagtcgtcaaaatttgcaagtaagttctaccttgtaaaactaagctctccaaaattgacatttttcactaaagtatgctaaaataattccaaaatactcaaacacatgattaacctttcaaaatcctagcaaattaaaaatcacactaatcgaagggttaaagagtcatttaaaatactaacacataaaatggtcatatttataagataaatatagagttatca

SEQ ID NO: 354103 - DNA, 906 bp, Cannabis indica
gatagtacgacaggtgtacttggacctaactgggaaggaccatatcaagtggtcaaagttgtcgaatccagagcatacaaattaggtaagtataatgaaaaaatgcaactcgttctagtaccacgatattggaatggggaacatttaggaaaatactaccaataaagtagcaggtcaaacgaccacactaagtactgaatgaacatttactcttaagtgaatggcctggtgggcggactacgctcaaaggtttcgacaagtactcaggtcaggtgaccaccatttaaagtacaatttctatttctgcaatttgttttatttcatgttaagctaaaagatcagattagatcaaatagctctgatgtaagttactacagtaacaaatacatttttcgatcaataaatgaataaagatagtcgtttcaaaattcaaattgagtcaaaattatcagcatgtttttgaattaccatccagtgtgtacaaaaggtttggtcgaaccgaaaacaacgaaaagataaaaagtatacttgtaagaaacaagtgaccaagagtcataagcctgctcggtcacttagggggcacctatacctgtacaaagcgcatttggtaaagataaaacagtcacaattgcacgatcattataatcagagaatgaaattcattaaagataacaaaagcatgtaataccgggattaaaagctgcccggttagcccgttgtctttaaaatgaaaaacaattccaagtttaaagatcgcttggtcggtcatgatgtcttagaacaggccttatggtcgaataagataaaataaaaataaaaggataaaagaagaagtatttaaacagctggactcacaggctcttggttcgggtcttctgggtcggcaggagctggaggatctgttgt

SEQ ID NO: 354104 - DNA, 1350 bp, Cannabis indica
caggctcttggttcgggtcttctgggtcggcaggagactggagggatctgttgttggaatagggaggtatatcaacattctagccggaggtagaagcagccacctcagtttcaccataagccacttgggaagcgcagaactcgaggtacatgtccttggcttcacccaagtagtcgaagtttgcttgaggattagccttcaaaaagtcatcgaagagctcaagactggctgtctccaaggcatgaactttctttcccatcctcgtcacctccgccgtaagctcctcctccttagacttcttctcctcctccatccgacaaaggaccgctcgaagagacatcctttcatcttgaaggctgttcacttcggcagataaattctcgattgtctcttcaagtccgtcagaagcctcgagatccttagtcagctcagctattttcttctgggcggtaaaaagcttcttgttgacttcacccagctccatccgaacagctccaatttttaccctggcatcatcagcgtccttcctggccaagtccaacaccccggccggcgtcttttccttagaagaggtcccctcactgcctctagacttcttggccagaggagatgcgctagagcttccgccaatcctcttctttagagcatgaagcatcttctgagacatgtctgcaaggaacaaaaacaacatggttagaaaaaaacatacatcagaaacataaagcataatagtcaagaagcttaaaaacaagacggaggagtatgcaagatgattgcccaagcaagcctcaaaagtccatcatcacctgacattcctcttatttcagacataatagctttcccttttccgatcacgggagaaggctccctaatgcgaattgcatgttcaataggcctgtgctgggtcggaagtttcttcctcgttttgagcggagtcacctgctcttccacagcctcatcttcatgattcaagggctcctgagcatatttctttgcccttgcacctcctttcatctgagattcaagcttaagttagatgagttcattctcctgatgagctcgtttagctcgtccagcaccagttttcctcttcctctccttcactggcttaggaatgaaatccttcggatagagctcgtacttcacaaagttatcctcagaggtgaactggatgatattctggtcttcccccgacagttgagcaagcttttgagctccatccctaagagtaagagtgaggggagggcggtgatatgttggaatctgctggaacgagtacggttgatgcccgcaccatccaccaagaagtactcatcaacaaaatgcgcaattttgctgatggccgaatcc

SEQ ID NO: 354105 - DNA, 907 bp, Cannabis indica
gtcaatcttctgtaggatggtggctcgagttctacaggaagcatatccatatgccatggaaaatggagtatgtctggttgtcattttctcagttattcggtacgaccatagaacttcaggaagctcctctggccagtttcctttagcatcctctagtattttctataatgtatccttcagtgtcttgttcactgcttcaacttgaccatttgcttggggatgcgccactgtggagaaactttttgatgataccatggttcacacaaaaattagtgaaggactagctgtcaaactgtttgccattgtccgaaactattttgtacggcaatccgaacctgcagattatgttcttcacaacaaattcttgaactttcttagatataatggttgctagtggttcggcttccctccacttagtgaagtaatcaaccgcaactgcactcctcctttgcccttgggtaattgtccgatcaagtcaattccccaaatgggaaaaggccacggactttgcatctgagttaactcgttggcggagctcaatgtatcttcgaaaatctctagcatttgtcacattttttaacataggcctttgaatctttaatcattgtcggccagaaataaccttgccttagaattttcttagataaactctgcccggcggcatgatttccacaaaatctatcgtacacctcaaataaaaatcgtgcagcttcttcctgagtaacacatctgagcaacggcatggagaaccctcttctgtacataattccctctactatgatataccgcgcagccttccttctcatgtttcgagcttcatttcgattatctgggagttccccagtgttgaggtaggctgctattggcgtcatccagtttggggaagtatcaatcatttcgatctctt

SEQ ID NO: 354106 - DNA, 1423 bp, Cannabis indica
gcattgtctaattagacgagcccgtacctgcatcgagtaatcatcatatatcactgacgcccgtacctatgcccaatacgtcaccaggaagaaacccaacaatagtttcaatctaagccataaccaagaaattttatatcactgatgcccgtacctacacccgatatgttaccaggaatagtgcatcacctaatcaggtgagcccgtacctacactcgatactcatcatatgtcactaacgcccggtacgttgccagaaatatcgcatcaccttatcaggtgagcccatatattatgtccatagtatcatcacgttatcattgcttaaccaatcaaacttttcattatataacaataataaccatatctcaatattatcagttcacaacaatactaattgcactacaatacaacgtactatgcagtacaatatacttttcttacctttaatctaggttcatacatgttagccgacccaagtggagaactattcccgatgatctcagccctatgtcacaacaacggtaaaccaacaagtgtttatcccaaaacactgcttaatattcacataagacaatctagggttttctaccaaacctcgcggtataaatacactaaaataaaacttacattttggcttcaaaacatacactacattgtagatcttgttgcaagcttcgaaacagtatatagaatgtccgaaacaaatactcgagtgaaaaattatgacaaaaatacgatttctgatctccaaggaatttctaaaacaagtgaaactcgaaaatcccaaattttgcactcaccaaaacactaccaaaacttatccaaatcactccaaacttcacagggcacatatataccataaatattaccatccttacataacaaaaattaaaatcgagcttaaatgaaaaatgccattaacatttggactaagctttaaaaatttctaaacacgatttctaactcaaaatcatctcaagttcaacaagtaaacatcgaaactagtcccatagctaccaaagaataattctacaaaattgaaatctccataaccactttaaatcacaaagccactatataaaaccaatcgtttttagcttaaaacataattaaactataccttaagctttttctctctaaggattttctatcccgctactactagagcttagatcgctaagttttgggttgaaaataaagatagatataggaagatgagggtttcgttcatttattcttatgttatgtttttaaaacatataacatatatatgtataaaaattgataagtttcatttatatatataagaataatataataatataatattagtaatatggctaattaggaaatttttccctcgaaatttgacatgtactaaatcacgccccctgaagttttaaggtcattgaaaatgccc

SEQ ID NO: 354107 - DNA, 1030 bp, Cannabis indica
atcaaaaaaccgaccgtaaccgatcgcggttataaacggtttttaacggtttgggcttaacaaggcccattaaattggatttaatggtttttttacattagatagacttagacataccagtttgggggttcactagcagaaatttttttagcttaaaccctttttttctaataatttttcgttcccagtcgcaggctcgcagcaggcaacagccaccagtgctcctccttccttccttcttttgattttgagtttagttggtaaccatagttgagagagagaaagataaaccatagttgcggttttttaaatattgagagggataaagagagattgagagaaattaagaaagattgaaagaggttgagagggaatcagagagagaacgagagagggggctaggtttgtttgagaacaaaatgaaaatggggaagaaagggggattcgcgctccctgatacatattaatacttttaccggcgcatcgagttacgccggtaaatgtgttttaaaaaaaattgacctaggtcaaaatgcgcgtttaatttaatatttttagcgacacaattgtgggccagtaaaagtatccccacctaccacaaaaaatccacgtaggaagtttccctccctttttcttgagacttttttcggcacatatgcgccggtaaaagtagacatgcgccagcaaaaatgaaatgaaaggtagaaaacttctcgcgccttttgacgcttcattttcttacttctaccgacggatgttcattattgcgccggcattaatatgttttgttggtgcaataatgaaagtgggatttcaggttttgctttgtgtcaacaacttttaccggcgcatttgacgaaatgccccggtaaaaaggccttttcttgcagtgagaaaaagcaccagcaacctgcttactatgtcggtaaaagattactaggggtagaattgaggtatcaccctcttgaaaaacttgacttatgcctcatccacgcgtctcacaagttacgaccttacttccaggcacacc

SEQ ID NO: 354108 - DNA, 809 bp, Cannabis indica
aagagggagaagtcgggctcagatcttggtgatactctgctacagaaaggatacaagggttagagatcagagacgaatgagttcatttaattccgctgcaatcaatgtaaggtttctcatacctttatgtgtttattttcatcattttatagattcatatttaggttgttaaaatatacttgttagtaaatttagattctggtaaaagatatttcaacaactggtatcagagccatggtaattgatttactttcaagtaatatggattcaaaacgatgtatgtgtgatttggatgtgattcatgttgatctatgtatttattaatgattgatttatgtttgcaaattttttacgtaaattatttaaatttttgttctggaattatttttattgaatagtatgaaaaaaattaagcaattcacttttttttgcagaactcgatttcaattttatttgaattatttttgaatttttgaaaatcggaaaaatgaggaagtggtgtcaccccacgtgcccgcgcggacacgagtgatcactcgggtgtcacgcgcgtttagacaagggttgtccgaagcagctcgccaagcgtgtttgaagcgtctccctacgcgcgcggaaatcctacattgtaggaaccgtgtgcatgaaatctcggcagcactgcatcagtgcgcgcagatggtatgcattgcataccatccgcacataatacaattttttctaattttttcattttttcatgcttttcatggaattaatttcgaatttttgtgtaattttgtatttagatttttatttttcatatttca

SEQ ID NO: 354109 - DNA, 562 bp, Cannabis indica
aaataaacttgtaaactttaacttttaaacagttgggatcccaaaaatatttacaaatgatattacaagtcatttccttctagccgatctaaacggcaaaatagaattcaaaagttcatcatcgatagacccttaacccgcttggtctgatatggcttgaacatgtacattcttcgtcttgctcctcaaactcatggttgatcagccactgacttaccctttccaggacagtagagcacccgtgagccaagcccagcatgacagtataaatcacaacaatataatatgctcatcatactatttaatagatatgtcattcacatacgtctgtatgacacaaacgtgattattataccaacatgcccatttatgtctacgtggcgtagacctatgtgttgcgctcacacatctatttaaatctacatgacgtagacccacgtgttgctctcacacgtctatttacattaaggccttagaagtggttcatcttggttatgagtaccgagtccaacctgattatgccttgagcgcataatccttaaatctcatttcaattaacatg

SEQ ID NO: 354110 - DNA, 608 bp, Cannabis indica
aaacctcaatccgccaaggaaaacaataaggacttgactcatttgagcatgaaatgacttaaaactatgcataaagtcaatatgtcatcaaaccctcaaggaacaaggcatatgcgcccatatgtaaaaggcagtgctcttcaattttaaagagcactgccacagggaaatggcaatgctcttcaattttgaagagcattgccacaaaggaatggcagtggtcactccgtacaaaccatgaaaggaaaattgaccaaatgtgttcccccaacactaagaagtgaaaaacaagtgaaagaaactatttcccacctaggaccaaccctagccgaccactaccatatggaaatggcagtgctcttcaactttgaagagcactacaacaaaggaatggcagtggtcggccacaacacaaggaaaggaattttattggccaagttgtatttctaacatctatgtaccaaataaaagtgagaaaaatcactaaggcttcacaagccccttatgcgaccaataccactttccaactccaacgggtggcagtcccaagacccccaaaatatgactcaccatcaaaaaccaaggcaaaatataccctaagcggtccg

SEQ ID NO: 354111 - DNA, 896 bp, Cannabis indica
accagtgttctcttgtgtcagtgcgattagaggccagggaaaccgagtccagcctcttagactgagcacacgtccattgtcgaagagtggtacgagccatccaaacaacatcagcagcactacaacttttaccattccaaagcatatcattccgagccttccaaattgcccaaccaaccatgacagcttcttcaaccaaccccatattgcctactgccaacacttccataaaccagtcaaaaaaattggtagctacagaatggccaacacctaacgctgatcggagccaacaagaatgcgcaaaggagcattgaactaaaacatggaaaattgactcttccctaacattgcaaaacacacaatgtaaatccacaggaacatgtttactatgcagctgagtacgtgtaggcaaacaacccgaaagagctttccaaacaaaatataaaaccttaggaggggctttaatcttccacaacatcttcccaacatcctactccatggatgagttccaactaccattgaccaactgtaagtgagtataggcgcttttgactgtgaaaaaacaagttggatccttgttctaaaccaactatcactcccaagattaacactcaaagacacctgtttgatgagctccacatcacgggactcaaacaagtcctcaataagctccaaatcccattgtctactatctggcttcattaattgagacactttacaattgaccagtgtcggatgattagataccacacacgggttagcctcagacaaaagccaaggtgtgtttaacacttcagtagctgaaccagatcttattctcctacgggcaccatctctgagcagcttttgtgacgcaaagacacaccgccatataaagctcagattaccacctaact

SEQ ID NO: 354112 - DNA, 627 bp, Cannabis indica
tcacacacacacatttttttcaatatgcatgacatccaaacaatgtcgaactagtagacttttccaatatggaagacgaaagaagattgactttctttgaaaacaaccattagtttttttatttttttgcgtctttccatacttaaaatctacaagttgaacttgttggagaatttgttccccagacagtggcaaaggagccatatcaccctcttcagtaccatcgaatgctttcttcttccgtctatcaggatgatttgcaggcaagtaccgtctgtgacccatataacacatcttgtgtccatttgccaagcgacgagccgatgtgttagtgcaacaaatcggacaaccttcgtaaccttttgtgcttaagcctgataaattactataagcagggaaatcactgacagtccacaacaacacagctttcagattaaaaaattcttttttaaaaccatcatagacctgaaccccgttctcatacaattctattaaatcgtcaatcaatggttccaaatatacatcgatattatgtccaggttgttgcgggcctgatatcattaaagaaagcatgttaaatttcctcttcatcactaaccagggaggaagattgtacataactaggaa

SEQ ID NO: 354113 - DNA, 589 bp, Cannabis indica
gtataaatttaatgtgttttaaagttagttgttattgtaacaaaatgaattagttgttttattttaatttaggtaaaatgataaagctaatggaggaaaaaaaatgggggaaaatatagattttattttaatggaagaaaaaccgtcacctatacccagttaaaggcaacaattttaaaccgtcgggaaacccacattagcgacggttttgaaccatctcctattatgcccgttttacgacgatcgtataggcaacggttatagaaactgactggaatactttaaacgactatttaaaaacgtcgggaaaacccatttttgtactagtgtattataccctaataaactatttccaagcaacaaaacaacaatcaaagcccagaatatattttcaccattaaagcttcaatcttgagttctaaaactcaaagcttgctaaaaccgtcgaaaactgacacgaaactacaagctgaaaaactggatttcctccctgtagaaaaatccgggaactggttttgtaagcattgtaaaaccggttaatcggttttacccagaaaaccaacaaaaattcataccctaaccaaatcgt

SEQ ID NO: 354114 - DNA, 642 bp, Cannabis indica
ttttacaaaaaatagtgccttatgtaattattcttttttttttaatcaaaaactaaacccgaaaacgaattaagatcctttattaaaaattggtgttacttaatatattaaacctatttaagtgtgataatattcaaccaactaaatttacttagattccatatatagtttatttttttcttaaaatgctgaaattaattatgtgtcacaatataaaattagtttaatagacaccatcttttaatagaagatcttaattctgaactactttatttatttttttccatattcaattcaaatatggagacaatattttgccaactgagcgagactagtacaagagagaaaaaaaaaaaaaattactttgatatatgatctaccctataataaattaatcgatgaataattagcatattcgcctcctgaactttcggcactacctagttttgcccctcaaaatatacggcttgttaaaaattatccctaaaatataacatttacataattatgcccattctgttaggttctgttatctttaccgttaaaaattagcatttttactccttaaactttgattaatatgaaattttcccccttttatttaaaaaataattttaaaaattataatattctattttttgg

SEQ ID NO: 354115 - DNA, 749 bp, Cannabis indica
acaaaatcaaatataccagaaacttaaactatctcattcgtagtttttatgttcttcctttcattcaagtattctatatcacataaaaaatgatataccttaaagaaatatgaatgtacgagaaaactaaactaatacactttattttttcctttccttcatgatatactgtgccgagagagaagaaggaggcgagatggtctagacacgagagaatgagaagatgttagaaagctagggttaattatccaaggttataattgtagtttcatcatcaaaattttaagtgataggccattttgctaaatatttataaaaatggacatttactcacttagttttcatatttatgtctattttgaatctcatccttaaaaatagtgtactgatacactttttttttttaatatattttggtatttagaagaaatttttagtctaatttttttttcctaaaaagtactgttcaaataatctatttcacacgtatataaaataaaagaatcacacatataagagacttttgaaccctatttttagcatgtcaaatttcttcaaaggtctcaaaattttaaaagatatcttaaataactataacgtacacgattatgaacaaaattaacctaaaaaatttctcccaaataccgaaatagatagaggtgcatcagtgcattccttttagggtgcatcgtaaaattttccaatttttttttctttttttgcagaatttaaaattatttttctaaaaa

SEQ ID NO: 354116 - DNA, 510 bp, Cannabis indica
attttgaaaaattcagaataattcacaatacagaaagtaatgtttaagtaatatatttcacactcgtgcaattaatatactgtttgaatcctgtttttggcgtgttacatgcttctgaattttttaaaattttgtaagacgtcttaaataactataacatacatgactatgagaaaaaataaatttactttccaataccaaaatagatcaaaatacatcaataatcttttttttttttttttttttttttgacgcggtgatccaaatcacacatgattaacaaaacagcaatccacaatcggcggcggcacctcctcgaaccaggatagctcattgtctaaccgaagagcatgttttgccaaaccatgtgctgcagaattcatattccgagcacatgggacaaaactgctcccgggagtttagacaataaagctatgacatcctcaaaaagcacacccagctcgttgaaaaaaacctttcctttgtttatagctgtgactagagacagag

SEQ ID NO: 354117 - DNA, 1083 bp, Cannabis indica
aggcttgtagctaaagaaaataaattgtctaagttattgtcctaaaagaaaccttagaattcaaaaaatatagaagattcttaatttatattagaatataatatatgctcaagcatgtatatatttatacttaatatgcatattaagaatgttggatagatatttaagtaaccatataaggaactttcagtatgcagccaaataagctataagaaatttaaggagaataaaatactatatgttcacttatcagaaattagaaaacaaaaaatgttggagattgttaagatttctgattctgatcttataagtttttagttatgagattttttgtcacatatggctgcaaaattaagaatggtattgaaagctaataaagatatatgctgtgacaataaatccatcaagttgcattttagtaacaacatgaactctataaggtcaaaggcacattgacttagagctaattgttattaaaacaaagttcagagtaataaggtgtctatagaacataataaggacaaactctatattttgtgtgattcaaatcattaaggatataccacttaaggctttttaggagcttgttgctcatatatggatgtggtattatttaagattgtgctggtttggtgggagtttgtatttggaatgttctatcaaactcacacatatttatggtttgattctgcagataaagtatggatttaagttttgagtactctgaattttttctttctattgaggtttaagtataaggttagaaagaattaacaaaggattgatctcaattaaggaggaccagttggaaataggcatgctaagatcacatttgcatgtaatttctatgctacgcatccatgattgatctatgtcatttggttatattgatatatgtgaccattgatggatttagctacgctaaatgttgtgaaagccgctttgatcctatgttagtataattaatggacgagattgttttgaaatatctataattatgatagcaaagtttaagcgcttataaggttacacactacatgaaaacatatgtagcccaagtgggagattgttggattaaaaatc

SEQ ID NO: 354118 - DNA, 461 bp, Cannabis indica
aatcacgtaatacgcctatgttagttagggtgtttcacactaagactcaaaaatttatgaagaacactctaagaattttgaaaattagaaaaacgaagaggaagaagtctcaagaactctctagttgtctgaatattgtaaactaggttaagagtcgttaattggattatgagactatcctattcttattatactaatttacttagtgttaggattgaattatatggaataaaaaaataataaactaatataaaaaaaatagggacttagtggcccaccatatatgtgggccccactaattatatttttgctattttttaaaattatttatctattattttacaaatgccatattttctaattttaatcattaaatgccaaaaatatttatttaataattataattaattgttaaataaaattatcatttatattatttattaactagaccctacaaagtc

SEQ ID NO: 354119 - DNA, 719 bp, Cannabis indica
ggtacttcctgaggaagttgaagaaggtgaagaagagcaagaggttgctctcgtgcgcaagcgcaagggcaagatggtagaagaggagccttccaaacgcccgcggagggtggacactccggccccgagtcatgactctgggatcccctccgaggcggaggagtatacagtgcctcatggcattgtgttgactccgatccccggagatgaggagaggcagaatcttcggatagccaaacataactacgccctcgacgagtacactcgggggcatgctgaggtggaggccttggagagggtcttacgagaggagctgcaaaacaccctcaacgaggagaacttccgaaattcgtgggatctaaacatggaccccctaacggactggttcaaccctttcctcgggcccaccttggccccttttgcctcggagctgaccagcgagtatgtctcccatctgactcaattcccgcccaaacggtatgcttcttgtgcatccttgaactccttctaccaggttcaggacatcagcaatgccctggctgtggtacgtacttgtgatttatttctttcctcgatattttgcctaaggcttttattctcactcatacttccttttccagattactgcagagaccagccgcctttccaagaccataattaatcatggcttcgtcctgtccgaatttgggggcatagacgaggtcgtgaggatcctgcag

SEQ ID NO: 354120 - DNA, 539 bp, Cannabis indica
ggtggatgaagctattgatatatccagttcaaaaaaatttctttgaactctacattatactcaatacaccacagtatctctacggcacatgaattttgattaaacatggatctaatataatgaacaaattagcaaatttattagaacttattcatgatcctgtattttgttccaattaattacttttgtaatagaaattgataccaataaagttcttggacatagtattacagtaccttatttcagtgagagaattttaaaattctaagcccatatttatttggatgacacttgtgatattactataatatgctcatgatatgaactttagaatatagctgtgaaagtaaatctaaccattcatatggatagaaataacttatcagaattttgaggatatgataggagaattttgcaaagtctattcgaatgacttgggcaaaatttctaatccttatgatttattttatgctatctttaatgattacttaatcttaagcaagtatttaacttttgtgttaatactagattgctatgtt

SEQ ID NO: 354121 - DNA, 875 bp, Cannabis indica
ctttgttttcattataacaagtccatcattagagcatcttaatgaagatgcaaatataagtgatccaaatacaaaatataacttactttgttaatagtctattctaatggtgtgctaaattatgatgcaaaattctcaaataatcaaaagtaaactaaatttacatcacaatatattatgatggaaaatttgcatgacaataaatgctatgtttttatatttaccattgtgccacttttaatattttattattaaattttagctaatatactcctttgcattaaatgacttagattgttattattattttattattaaattttacatttaaatttgcattattattttatatttttaataattaaattattaagtgagcattgaataacatattaaattttgtatcaagatttacaattatgcatatggagcataatagtaaaagttagggctgtaaaccgtccaattcgaataatccgtccaaaccaaaccgagataacccgacaaaaatacaaatcgaaaaacccgataaaaatataactcgcccaatctttatattgggcgggttgaaaataataccaacccgcccaattaacccgaactaactcgaccaactcgattaagaggggttttttttttttttttattacatgtatgtttttatgatatatatttatatatcatatgatttatatcactatttaaaaaatataaagttgaaactaatatgtttcttagtggtggttgaattgaattttaaatatttcaatctatatatgtttgtctcgttattacaattaactaaaatataacaattaaatgtaaaaataaaaaaattaaagaaaaatattggtggtcggtttggacggattaac

SEQ ID NO: 354122 - DNA, 512 bp, Cannabis indica
tagtgcttagagatagaagaaaataaatttttagaaaaaagtgtaacaccttgttcaagttatttcctagagagttcccttagtgatttccactcaatgttgtgagtgtgtttttattcatatatattttcttcatctatctttcatataaatatatatatatgcaatacataatgtctatttgtgtattgtaacatatatttaatcaatctcttattttaatctttgtattattttataatagaattgtaatatcttaatttattttctattaatatgtaaaatctctaacaataaatatgcatataaatatatgatttttctaaagtgaagaatttaaaaaatagcccatttatagggcatttaatagtttatactaattggacaattgcattgtaataccatggtcttggtaacatatttaaactatgattgattaaaatcttttgtcttattaaaaaaataattcaatgagtagtgcttgtctatttttacttaatatttagtcataa

SEQ ID NO: 354123 - DNA, 725 bp, Cannabis indica
tatggctatactatgtctatactcatacattagtttattttggcaaattaaaataaattttcattaattgtttacatggtagtatttttgtatagctatactatcgtatatgttaataaatctattggtttattttggtatattgaaacaaatttttatttttcttttcgtatattagaacaataatttattttattttatatagcctaccattatatatgtcaataaacctactattgtttgttggaacattattttatatttttcaatacagagtaaactataatcaaacatagtgatatacaccaataaacctattaatctatttttcgtatattggaataataattcattttttcaaacacatatcatcatgcatgcttataaaataacaaattaattagtctatttttaaaatatcaaatgattaactatatcggtaacattaaagatacttatacttttaaaatatcaaaatgatcatctgtatttgttaaaaaaaaaaacttaaaagtgaaaaacattatagagagaaaaaattattaattcatactcataatatgaaacatataaaagacaaaaaaaaaaaaaaaaaaaaaaaaaaaaagaaagagaagatattagtaataaagagaaaaataaactacttactctagacctttatttattatgtaatgatactgagattgacgtgatggatttgaaaaaatacaaaagaaaaaaag

SEQ ID NO: 354124 - DNA, 797 bp, Cannabis indica
gtgtgttctcctcatagaagtaaaaaagactatcaaagaaatccatgaaggcttttgtggagaccatccaggttggcaaagcttgttgaagaaaataattcgacaaggatattactggccaactataaaagaagacacacacgaatttgtcaaaaaatgcgataaatgtcaaaggttttcacatatacctcgtgtactaccaatagaactaagaatgatgacctagcctacccatttgcaatatgggggattgatttgattggggcactcccgacaggacgaggaggagcaaagtacgcagtggtggtagtcgacttcttgacaaagtggacggaggctgaacctctagtttccataacctgcaaaaaatttctcaacttcgtcgtcaaaaatataatttgtaggtttggaatacccattaagatagtaccctataatggaactcagttcgatggcaagttacacgctaaattttacgaaaggatcaagattattaagagattctcgtcagtatcaaggcctcaagtgaatgggcaagtagaagctgttaataaaccttaaagaatactatcaaaaagaagttgaacgctgcaaaaggtacatgggtagatgaagtaccacaagtgctttggcctcatgaacgactgagaaaaaagaaaaagggcaggcttcattctcgctggcatttggcttggaggcaatgctgcaaagggaagtcaatatcgctacccacaaacgagatttctataatcaagaagaaaaccagaactcttcaaactatccttggatctacttga

SEQ ID NO: 354125 - DNA, 644 bp, Cannabis indica
gtatttgtgttcccagttcgagtactcaccgttctaggttgaatactcgcacttattcatcattttattattattattatctattttggagttgtaaaatcccttcaacaaaaaaaccttgatggatactatcaaaaagaagttggacgtcgcaaaaggtagatgggtcgatgaactaccataagtactttgagctcacataacaactaagaaaatagcaacaaggcatactccattctcgctggcatttggcttggaggcaatgcagccagtagaagtccatattgcgacccacagacgacatttctataatcaagaagaaaaccaagaactcttgaaattgtccttggatctacttgaggaaaaacgtaatgagtcacaaatcactaatgcagcatatcgacaccgattgacaatatattttaaaaggaaagcgaagaagaggctttttaacgatggtgacttggtgctaatgcgagtatttgcaaatacgagagatgcatctgtaagagaatttaacccaaaatgggaagggccttatgtgatctgagcaacagtgggaaccggggtttataaattagcccgacttaatggctcgctaataaagaaccactgcaacgtggagcatttgcgaccctactacc

SEQ ID NO: 354126 - DNA, 634 bp, Cannabis indica
tactaacactaattgtttatgcatgtagtttcaagagtgttagtatagtgtaggatcttgatatggatacggtgttacaaacacgagtaccagggggtacgtcgtgcatgtggtacaacacttagtaattcctagaagtacaataatggctctacaacacgagtacagggttggtactttggtaaatttggtacagaagtcgtacttcccttaagaacattctttaccacttggtgagctcgttattgagctcaggacggtttacgcataaagtcgtactagcattaactttatatatgtgttgcatatcttactgagtctgttgactcaccagtttgctaccttgtgtaggtaagggaaaagcgaagctggagaaacagtgagatggggctcgacagtgattgtacatatcgcgacagtgcaacctggagggtttcaatctttcactattttgagttgcctgtacacgtttttgtttaaaatatatatatatatactagtaactttatattagtaaaatactttaaactgtattttgagattcgggatcccgacctatatgtttataaagttattatactatcaaattaatttttgagttagtaagtttcaaatacgggcgttacagtttggt

SEQ ID NO: 354127 - DNA, 600 bp, Cannabis indica
aaaaaaatatttttttataaatattaaataatttaatattaaaaagtaatcaatctaaaataaccgatccaatccgcattcttgaaaatttgattgatttgaatttgagctattgtgcggattagattggatccaaaaaataaaatccgcacttagtgcatatcgaatgcactatgagcaaaataatgcggattggattagataaacactcctatcaatatgtgtattgtgctttataagctagtctccaagattatttgcatgagatttaaacttgcacttgtcatttcaaaaacacaaagtgccctcttgcaaaatagattgatataatatatgatggattttgaacttgtccatggtataaagaacaagacttctgctcaaaaagggattgtagtgcttaagttaggagtaaagcattttatcatattgatgttgggctttatgtcttaaataaaactttatttcaatgtaattttttctattcaattatcaatatagaaacagatttattttcattacttatttagtttgttgtttagttcatgtgatcatttatttgtttatttgatttgtaaatttatccaaatccttatcaca

SEQ ID NO: 354128 - DNA, 968 bp, Cannabis indica
ttcaggtgttagtttgggtctgggtccagaatgagtccaagtccctatttgggtccaggtcggggtcccaaaccggggcctagtcaaggtctaggtcacgaaccaggttttggtctgggttttagtccgggtttaggtcttgagtttgggtctaggtttgggtctgggtctggatctgggtctgggtcttggtcctgggttccaatctcggtttgggtatgggttttggcccatgtccaggtttgggtttagggtttagggtttactatttagggctttagggcttagggtttaggggtaagtgtaaagagtttggaatttagggtttaaggtttaggatttagagtttaatggtccgcttccagatccagttccaatttcgggtcacagggtacgatttaaggttcgggtgtgggtctgggtccgagtcctggtttaggtctaggtccgtgttttggttcaggtctgagtctttgtcccaaatccaaacacaaaccacatgtcgagtctagtttcgagttttggtacgggttcgagttctggtctgggtctatgtccaagcctaggtctaattaccagatttagacaccgaacatgggtcgggtccaagccttgggtcttgggtccagtcccgggtctaaatccagatcctggtccagttctagctcatgtcttgggtcctggtctgggtcttatgtccaagtttgggtataggtttgggtcttgggcctgagtcatgggtctgagtccccgattcaggtcagggtcctaggtcccaatctgggttagggtcccagtccgagtgcaagtcccagtcgatgttcgagtgcaagtcccagtcgatgttcggaactagtccttgtctcgggtcttggcctggtctgggtttatttaatggtttggttctgaggtctcgtgtttgagtatcgggtcctggtctcaaaaccattcggatcctgggtcccagt

SEQ ID NO: 354129 - DNA, 785 bp, Cannabis indica
tgaatagcaaacttttgtaactatattttgtaaacaggataccagaatcttataagtataatatgttatgttttagctgaaaagcaaaattttaattattcacgtttttccaataacctcgttgattagcaacgtgctgcacagtaagttaaaaatcacgttaacatgcctatgctagttaggatgttacataaagaatgttggccatgacaatggcttttattattttagcaaatgggccaactctgagattaatggggtagaaggtatagtttccaatatgggagattggaaattgaaatggttctacacgtttaaagtcccaagagttaggacttacttcaatcgtcgacctagtatgtcgcgtatcacaatacttagtatatatttttattaccttgtatagtcgattatgtctgtttttgtcactcgcagataaactagctcaaactgtactggattctgctcgcagggaaattgttgaagttctaggtagcttgcctgttcaagatcgcgattggcagttgttctgtactactgcaaaattgcaagaacataagcttatactgtaatgccctaacatttaggtacgctacacaagatgattaagaaaccgtaatcccctaaatgggattactaataaaatgaccgtggaaattaaactttaaacgaaaacagaataataataaacttgtaataattttaactttacaaacaaaagttacatgtttgggatcctaaaattttttttactaaaatattacaagtcttttcccttagccgac

SEQ ID NO: 354130 - DNA, 570 bp, Cannabis indica
aattaaactttaaacgaaaacagaataataataaacttgtaataattttaactttacaaacaaaagttacatgttttgggatcctaaaatttttttttacaaaatattacaagtcttttcccttagccgacctaagcagcaaaacagagttacaaaagtttcaacactggtagaccccaacccgcttggtctagtgtggcccgaacatgtacattcatcgtccagctcttacactcatggctgattagaaactgatttaccctttcctgcacagtagagcacccgtgagccaatattaatgccatttcattttgtctgtatgacacagactcgcgtgttacgctcacacgactatttatgtctatgcggcatagacctacatgttacgctcacacgtgtattaacattaaggccttagaacagttcatctcggttctagttaccgagtccaacccgattatgtcttgaccaaataaccctttacttcaatatacatttatatccatcatggcataacaattacatattaataatttacttgggtaataaccctaagccaataaaccgctc

SEQ ID NO: 354131 - DNA, 831 bp, Cannabis indica
atattaatattgatatccgtctgcgttctaaatggttaaaaagatgtggattaaatgtgtgataagttaagcagtaagggcaattaaatagtctgataagcgagctatccgggctcggggcaaatggtaaggaagagaattcttcattgccataatgctgggaacatgtaaattctgttatgcaagatatgattagacaataagggaaaacagatctgagatctgaaagaacaataggctcatgttgtgtctattcttatattatcgacacttactattgtaccactagatgtggttgaatatatgaagccaacttactagtagatcaagaagcgaaaactaaatgaaccaccaattatgggacaggacaaaaaggttctagggccgtcaggatagtggtcaaggtgagaataataaacggtgaccttatcgtgagtattcaagatgcaaaaaggcgccatttgaaccaatgtagagccagatcttgttttattgtggggtagtgggtcatctgaaaagaacccgcccacagttaagaaagattgatgttaaagaagaaaagtgtacggatcctacctaagtgccagttatgattcaaagggaccggatatcagcccttcggccgactcaagttagaatttatgggcaatattataattgttattgatattaaacattgtacatttagttagagacatcaaaaaatcggaatggaccatgcatgtatgttatttagtggtaacccatttaacagggtaaatagattagaaagatgacaatacgggtaaactttgccaatgtccttgaaaggacataacacttttccaaggt

SEQ ID NO: 354132 - DNA, 513 bp, Cannabis indica
agcagatgtagaaatggaaataaacttcgaggaacacccagaagaagacctagaagaagaccctgaagaatctgaagccaagtcatgcgtggaggacgaatagtagtctcttttaacttgtcaaattttatccaacgaaaatatttctattcctattccaataatctagtgactatgtaactagagatttagtacgcttttaagtaaataaagatttatttttcttcttcaatcaaaattttctcttatgactaaagtaactccaaaaataaaaataaaaaaattgcaagcaagactgttcgcctccacttaggaatctgcttttaaataaagtaatgttgattcttaaattgggaataaatacttaaactagacaccaagaacaagaagtacaaaagaatgtgacatctgaagcagcctcaaacattgggggctctaggaatttggtcttaaattattcaaggcccaatggatagtgtgagtgttcaaaaattaggtggaggaattcgttgt

SEQ ID NO: 354133 - DNA, 522 bp, Cannabis indica
ttcttcactaggcagccaaggttcgtgtagaacattaatctcctccctagtaccaacacaccaccgagttccttttcttaccaactcttgcgcttcaaggagactacgccaaacgaaacttgggttgtttcccaattcagccgaaaggaaagtactgttggggaagtatcgagctttgacgacttttgcaaccaaggaattaggacgagtcatgagtctccacccttgtttacgtagcatggacaggttgaaatctctcaatgaacggaatcccatgccacctttagatttatgcatacaaagcccatcccaagagaaccaatggatgccattttttgccttattagacccttgtcaccaaaacttattcatggttttctccatatcacgggggatatccaatggtaataagaatacactcattgcatagcttggaagggattgtgctactgttttgatcaacacttctttgccggctcgagaaaggaatttcatctcccacccctcaaccctctttcgaac

SEQ ID NO: 354134 - DNA, 648 bp, Cannabis indica
tacatactactactagggggaaattgtgtaagttggaaagtccaattacaacctgttgtggcattatccacaactgaatcagaatacattgcaactacagaggctattaaagaaagcatatgggttaaaggagtcctagaagagctaagattactagactcaaaaccagtaatttactctgatagccagagttgtgtacacctatgcagaaaccctatgttccatgacagaaccaagcacatagagataaagtaccacttcatcagagacaaagtgacacagggacacataaatattgacaaggtgcctacagaagagaaccctgcagacatggggactaaagtgatcaccctatctaagtttaaacattgtttaaacttaatagggttggatcaaggataatgtgatcctttggatcacagagctatgaccctcagaaatgactcgaccactataatatcagctcagtgaaggtttaggtggaaattgttggaataaacctccacttacactgatattaagactcaatacaacttaatacaaggacagaaaaggaaatacaagcaaatccctaagttggccttcggcctctaaatccctaacagaaattagttagaatggatttggttaatccacacctaactaatt

SEQ ID NO: 354135 - DNA, 555 bp, Cannabis indica
tcgatatttggccttgtgggattgtttcaaatgttacattcgaccttatgatctcttaaatgtcgttcgttatacccacacttttcaagtccaaacgtgaggaggatgtattagagttagttccatattgctaatatgtgaaaataaattaccatatataaaatgaatgaactactcgtctcattgctaattggttttgagataaaatcccatgtatcttatttcaaattctaacacgttcctattcttatgtatttattttttctaaccaaacgccaccgaaaatgtcaatattttcaatattatcttcctcatatttatttaactttttttatattattttaattttgaagtgtcaaagattctaatattaattttgaggagagacattgaacattttttttattatattaaaggtttcatactgttatctcaaatttggcactctgacgtggcatcccgagaatgatgacacgtggagtccacttggagcatctactcgggaaaatagaccgagcaggatgcctcgctggcacatccagaatgagatactca

SEQ ID NO: 354136 - DNA, 677 bp, Cannabis indica
atatttttgtcaattaaatatgccaaaaatagaattaacaaaaggattggtcatctccgagaggatctacctggatgacagatggttcttgtttcctcctctccatgagtgaatttgacccgaagaagatatgaaaggacaggtggagtataacacattgctcaaggttaagtcattgtatacgcatttagtgcagcatggagaagagcatctgacacattactttgaagtgacatgctaaaggttaaacccataattttatgatttcataatgcctcatacatcaattgatggctacataatgagctatcaaatcacaagcaatagataagtaaggtctcaccaaacacctatagcaagcctaaacacattataaaatgtaggcaatcatgccctatgatcaaatttaggaaattgtacaaagcatggttgatacaatcatgataatggtggccttttaccacaattatgagcctataaatatgtataaaaatggaataaaaatggaaactttttcagaattctctgtaagaaaaaaatgctcatcaataacagtggctcgtggactaaggttcattaataacccaactacgtagaaagttctcattaatacttcgaacatctctaattacagttgtggaaaatctcagtcaactattaataggtaaaagaaacaa

SEQ ID NO: 354137 - DNA, 423 bp, Cannabis indica
tatttaaaataatgtattttaattaatcatttattttaatcgatatattttaataatgaaaattacttaatttaagttgatctaaaattaattaaaaattaattttcaactttgatttaattttcaaataataatttcgaaaatctatttatatttaaatataaaaattttgaaattatatataaaatatgttaaaataaatttctgacaaatatctaatttaagttgtttaaaatgaatttcaacttaaataatttttcaaaatttaatcaaataacaaattaagtatcttcaactaatcaacttaatttgaaaaacatccctatttaagttgatccaaaattaacaaattttcaacttaaagaatattttaaagaatatctgaataactacatttcaagaagattctacttaattattaat

SEQ ID NO: 354138 - DNA, 800 bp, Cannabis indica
ttggaacatactcattaaataagttggaaccgcttgtagaacagccttaatcagaacctcacgaccaccagcagaaaagaaactccgcttccaaccccgtactcgcttttgaaccttgtcacaaatactagcaaaagtcctcttcttgttccgtccaataaccgttggtaaacccaaatacttatcatgagtggcaactgaccccaagcctaaaatacccaatacacttgcacgatccgcaggtaaaacattcggactgaatgtgatagcagacttatcaaaattgacttgttggccagaagcaaactcataacactgaagaatccgacggatagaatccgcctcccgtccattggctctaccaaatatcaaactgtcatcagcaaagaaaagatgagacacccgaggccctgaccgggagcaccgaaaccccattaactcaccactaaactctgcctgacgcagcagggaagacaaagcctccgcacaaaaaagaaacagataaggagagagcggacacccttgcctcaatccccttgtaggcaccacacatccccgaggctttccattcactaaaaagctatactgagccgaagtaacacagtccatgatcaaatccacccacctactagggaacccaaacttacccataatagcacgcagaaaacaccactcaactctatcatacgctttactcatgtcaagcttcaaagccataaaccccctagcgccattattcttcttgaaagagagtgtaacaactcgaaccccaccataacattatcatgaatagagcgacc

SEQ ID NO: 354139 - DNA, 562 bp, Cannabis indica
tttgacatttgatgtcaagcgatttgttttgacgtcgatttgtagtcatcagtgacttcacacccttgcaaagcgtgtaagtaacctcgctctgaacgccttcgatcttgctttctcctgtcactgcggtcgagtgacaggctccggtggtgctcgaatagccttcgaagagtttgatcggcgtcatcacggcgtaattagttaaaagaagagtggtgattatgagagatgtttgaaccctttttttctcttttgtaagattgctttgctttgatttttaataaaaaccttaattgcatgctatctatttatggcaaaaaaaagatagaaatttacgtagaatataagataagcatatttggtgtccatagttcattggtggacaggggatagtactttaattttgttttcaaatgtgtgcatgatcttctttatcagatcctttaattaattgtgttatataactaacttgttacataattaatttatcaatagcaatatgcactttaattacggcaagaacaatgactaaaaaatattaatttttagttataatataatt

SEQ ID NO: 354140 - DNA, 959 bp, Cannabis indica
aaaaaactttaaagtctgaaccaagtaaagaaggattaaaggaaactgtcaacaaagacttatgctggtgaattccctcaagcctcctcccatcagcagctccagggaagactcgttgtgagcactaaccaacggctcactaacctcaggaactaacaggttcatgtaatggacgagcatctctttgcctttcttggcctctggatgcactgacaaaggtggagtaggagcccgcatctgctcagattttctcttggccagctcgaatccaccctttgattgctcaggcctgtccgagcttcctcctcgtgaatctttggacttagcaacttttggagtagaaggatccataacagttagtttctcagaaaggtcaataacctccccagccggtgccttttccttggaaggggtcgcctcgccgcccctagatttcttggtcgaaggaggtgagcttgagtttcctccaactctcttcttcagagcatcgagcatcttctgagacatgtctgcacgaaacaaaaacaacatggttagaggaaaaaaggcatcagaagcataaagcatgatagtcaaaaagtttagaaaaagacagaatatcctgcgaagcaattgtccgagcaagactcgagagtccatcatcacctgacaaatcccttatctccgccatgacagctttcccttttcctagtgcgggagaagatggtcgagcaggtgagctgggctccctaacccgaatggcatgttcaacgggcctgggctaggccaaaagtttcttcctccttttgagcggtgtcacctgctcttcctcggcctcatctttattattcaagggctcatgagcatactgtttggcccttggacctcccttcaacttagcttcatgcttaagttgaatgagttcatccttctgatgagctctctcaacccgtccagcactagatttcctcttcctctcc

SEQ ID NO: 354141 - DNA, 749 bp, Cannabis indica
acaatgtgggtccgcccctgcccaacagaatatatcatctgatttggttgagttgaaagagttcattgttgcccagtttatttattttgctacccaatggctacaatgcagacacagttttcatccgtgcttgttgattttgttgctaaggtatgatggattttctatagttgtttttaagtttgtttttagttacttatatatgcttttgtttccaaaatttttacaggacaaaggtagcgactcttccaatgatgatggtggtagtaataatgaagaacatattgaatcagacggtaataaagaagcagatgataatgaagaagcagatgataataaagaagagtaggatgataaagatgaagatttagaggaaggtagtggtgatgaagaggaggagggtagtgatggagaacaaaaagatgcagatgataatgatgattttgagtcaaaagaaaaagatgagaagggcagtgatgatgaatgcgatgatagtgagaagaaagtagatcattagacaatgtaactatgttttcgttactttgtatgtcatattttattgtaattccaagtttatgggggtaaatagcggcataagtacccaaagttttatgtgtgtaagcggcataagtacccaatgtttgtaaaactgtaattttacttctagttttgtcagctacagactctgttttaaatttattaaaagaacgtttggaagtaactgatactacatatttctatctagaccc

SEQ ID NO: 354142 - DNA, 559 bp, Cannabis indica
caacatacttgtgagtagacctagatcctcgtaaaataatttccaatagttgagtcttttcctcttcccagactaaggccgcgctaaccgcattctcggagacggccaagtacagtaacaagtcttcttcgagaataggttttgataggattggaggtttagccatgtgttcttttagttttttgaatgcctcctcgcattcgtcggtccattcgaatttttggcattttttcaggatgttgaagaagggaatgcacttgtctgtggattaggagataaaccggctcagggcggcaacctttccggttaagctctatacgtctttgtgcttcttgggagaagccatattcaggagagcttggattttttccgcgtttgcctctacccctcgttggctgacaataaatcccagaaagtttcctaatttgaccccaaaagtgcacttctttgggttaagtttcattttgtatattcgaaccacttcaaagcattcctcgaggtcatctgcatggattgcacatgcctttgacttcaccaacatgtcgtccacgtacacctc

SEQ ID NO: 354143 - DNA, 566 bp, Cannabis indica
aaacacagtataatcctttggcttgtgatgctaaacaggctgaagactaaggagcgattaatcaacatgggtatcatggtgcaggagaaatgtagcctatgtgaagacaagccgagaacattcagcatctgttctttcatgcagggaaactggtcactgcttgaagaaataaaagagtgatgctagagcctctaatgtgcaacaacttgtcaaatggatagggagagcaaaaatttcaaaatttaagagggatgtatactgtgttgctactgctgctacggtttattgtgtttagaaattgaggaattctattatatggcagggtgcaaagttagacacaaaccgattagttgaggaggtgaaatggaatgtaaaggctcgggttcaatttttgttcccaaagaagctatcaagtgtagataaagagtggtttttctctttatagatagcattcattgtaaaaacatagatggaaaatgatggaaagataaaattgtataaattgaggcccttggagtggggtgctcttaggatgtaaatatgtttgtgcaatacaattcattgat

SEQ ID NO: 354144 - DNA, 594 bp, Cannabis indica
actttatatgtgtttatttattattgtttcagaagttcatatttaggttgttaatcaacatacttgtgagtagatctaagatcctggtaaattaattccaacaagcgagtctacggtgtcagctcgtgaacaccttattcactccaggcatgctcctgatgtcgaagtcgaggagatggacgaagattggatggctccaaaccgagagtcagatgaggaagaagacgctgagggaagtgggaccggttcagtggataatactcaattggatgagcccttctcatgcgaggacttggtctcgcgagtcaccaaatctgacctcaccacctttacgagattaaatttgctgcgacttgcctccttgcgtcctcgtcctacccagagagcgcacctttcctttactaaccctgcgatcatacccacagaggatgtggtagtttctatccccattcttcgatgtggagtatcaatcccttttcatccattcatctctgctattctgaagcggtatgatgtatcttcttttcaactaaccccaaatagctatcgcatagctttaggcttttatgcgatgtatatggagtatgtgcatag

SEQ ID NO: 354145 - DNA, 605 bp, Cannabis indica
aataaggttaagagaatcctattgatactatcatttactcagcccctaaggctgaggaaatgatctctgtttaaaataaccttttacactcatacctcaacaactactaaattattgatgcttgaacatactgaaccttaaatgacttattcaatgaaagtgataaaaaagtaataagattacatataaaagtttagcagcacaattaattccaaaagtaagaaatactgaccgaataaagactttaaaagacaagccaccactccacctgtgttattgcgtataatagcaccaacacctatagaattagtatgcttatcaattgatgcatcaacattgagtttaaattgtcccataggaggagtaacccaactcgaggtagaagtgcacgtattccctcgttgaatgttaatatttttccgacttgcactaaattcagcatgaagcttatgaattcgtgagacaacaactgtaggtgaaaattgctcccggccataaacaatctgtgtacgctcactccaaacataccaagcggcaactaaaaataattcaaattcaacctgagatagcacttcagacgccaaaagaatagtttgttgaaagga

SEQ ID NO: 354146 - DNA, 373 bp, Cannabis indica
agggcataaaacccaacatgcttaatcatccaactgattcatacttggatcacgcccttctagctcccacgatgtactaagttctaatgatgctgccctctggcctctatgcaaactctagcacccttcttgaccttcgcaggcaaacataacttcaaagtctcactggcacaaccctctggcgtccacacaaactctagcgccatctcaacgcttgcgctcggtcttctcagccttgctagcttctttgatgcattcattccacaacttcgaatccctatcgatgcctttgtgtgacttacgcccattggcgctttaacaagccaacacattccactcaactgtctcgacgcttccatccggatcaaataaa

SEQ ID NO: 354147 - DNA, 918 bp, Cannabis indica
gataactaatcagattgtaaagagttttatttagggcacaaaacccaacactttcttcttgacaaacaataacggagctccccaaggtgacacactaggccgaataaatcctatgttaagtaacccctggagttgaattttcaattcttaaagctcacctggagccattatataagggggtttagaaaccgattctgctccaggtgccaaatcaattataaaatcaatttcccgctgatgtggtaaacctaggagttcatcaggaaaaacatctagaaatacccgaaccacattaatgtcttctagccgaacagagtctggccgaatggtgtataataccaccgccagaaaccctggacatccatcacacaaaaattccttagctgataacgccgaaatcactgggatctgagatccctgaaccgaatcgacaaaaacaaacggttcttcaccttctggttggaagattaccatcttcctcttacagtcaatactggctgaatatttggataagaaatccattccctatatgatatcgaaatctgctaagctcatttctatcaggtcagcacttaactccctatcatcaattctaatcagcatagacctaatccaccttttggagataactaactctccgccaggtaatagggttccaaaccctgattcataactatcatgcggtctatccaatttactaaagaatatggctgccacataagaatgtgtgtccccagagtcaaacagtacaaataagtaaaagttgttgaccgggagctgacctgttactactgaaggaatggcttctatatcagcttgagtaatggcgaacacccttgctggagtgggtttcgctggagccttcggtgcttcggttctgagttgagggcatccatcttgtaatgccctgtcatgcca

SEQ ID NO: 354148 - DNA, 510 bp, Cannabis indica
taattgaaacattatagcatcttcttgtacttttctagttgcatgtgatcattccaatacttctggtatcacctaggaattttaggcatagatggcagatggatgttactgccccaaaataaactagaaatggtcgtcccaaaatagcgttgtaagtctttgggcaatcaactaccataaaggtgttgtacttggaagaggatatgtcattgcttcaagagactactccatttattgtcattagaagttgtatttttccattggaatcagtgtgtctcaattaaagccttgcagttgaattagacaaggtaataaatttgcttcaacaagaccgatggctttgaaggcatctttaaaaatgatgttaacaatgcttccgttatctacaagaattctaagaactcttttattcacgatttgagcttctatcaccaacgcgttattgtgaggaaaatgtacatgcttggcgtcatattttgtgaaagtcattggcaaattatcatctgagga

SEQ ID NO: 354149 - DNA, 518 bp, Cannabis indica
aagaggaggcctcatacttttgttttggtattgacagtataaaagaaaaaaaaaaagggggaggacagtataaatgtaaattctgccgtgtggcagtaaaattgaaaagtattaccccaaatccagtatttttgtaaaatgcccatttttaaaattataaatgtttgttttgtcttgtgtaacatacacaaccaattatctatcaatctatttaggctaattaggattgcccctgaactttaacatgtaccaaatcatgccccctgaacttttaaggccattgaaaatgccccctgaactattgagattgttggatttaaaaacttttgtctaattttattcaaagttcaggggacatgatttagtacgtgtcaaagtttagggggcaaaaatcctaattagtcatctatttatataatgttggaatataaataactaagattgatacttttttttatgcaggggccgactggtttgtctaccgaaacaaatatggtgttaggtgaggtgaatttatt

SEQ ID NO: 354150 - DNA, 628 bp, Cannabis indica
ataaggccatgcaaaattgggcattttgttgacgagtacgtcatggtggaaggaatgggcatcacctacactcggttctagcagatccccacatatcaccaccctcctttcacacttgccctctaggatagagctcagaagcttactatgctgccgggtgctgcccgggatatcactctgttgacctccaaggacaactttgtggagtacaggctttacctgaaggatttcattcctcggcctgtgaaggagaagaagaggaaatccagtgctggccgggctgtaggagctcataaggagaatgaactcattcaacttaagcgtgaagctaagttgaagggaggtgcaacggccaaaaaaatatgctcatgagcctttggatcctcaagatgaggctgaggaagagcagggggctctgcttaaaaggaggaagaaacttccggcctagcccaagcctgttgaacatgccattcgaatcaaagagccttgtttacctgctcggccaccctcccccgtaccaggaaaagggaaggtcgtcctggcggagataagagagttatcaagtgacgatgatcttttgagtctttctcggacaaacgcttcgcaggatattgttgggttttgtgcc

SEQ ID NO: 354151 - DNA, 810 bp, Cannabis indica
attacattcaaatggagttttatttagggcataaaacccaacagataatgggagctcggtaaatatccttttataaggagaccctaaagaaaatggggcttgaaaaagctaaattaaggccttgaatggtgaacctttgtggattcaccggagacagtatcgctagccttggcgtaatcgaggttgcattaactttaggcgaggcgcctttatctgctacggtcatgcaagacttcttagtcgttgacctgccctcggcttacaacatattattgggttgtccatcactgatcgaactatgggcattcagttcgattaagcaactatccttgaaattacaaacaccagatggtgtgggagtggtgcgtggcgaccagatgctggctcgcgattgctatcgcatagagttacagcataggaaagtcggtcatctattgatgacgatcttggcaggagaaaatgagaagaaatataaagatcttaatccttgagttcaagatgaaagaaacccgctaagaccaatcgaagagttagaaaaggttattctcgacccaggaaatcccacaaaatgtgtatgcattgggaagaacctagacgagcagctcaaatagcagctaataagctttttgaaggcaaaccaggatcagttcgcttggagccatggagatatgattgggatcgaccctaatattatctgccattgttgtcgagtggatttcgcaacaccaaattatatgatactattagtgacaagaacaatttacgtgaaagaacaagtgcgagtatcaacctagaatggcgagtactcaa

SEQ ID NO: 354152 - DNA, 555 bp, Cannabis indica
ggggatccgagtgaagtttcctgtatgcttcgattgttgtcaaaactatctggagagtgcgaaatgattttatacataacaactctcatccggatgttttgaaatgtattgaccagatttataattcttatgcagagcttcatgatactttcccttgccctacaccatctttaagggggcctggaggccgccacatcaggattggattaaattgaattgtgatgtaagggtgggatcataaagtatgtgcttatcggtggtagctagaaactatcttggtacggtggttcggatacacacggatcggttggacttctcggatgcattgtgtggagaagcagtggcttgttgtgcagcggtttcgttggctctggagaaaggttttaagtttgttttgattgagagtgactcgagagtagttatcaatgctctcaataggacggagtctcattgggcgattgacaactatatctcattttgtgctaagtcatctccctcttttatttgctgtaattttgtgtatgttagtagaacttgtaattttgcagcccataa

SEQ ID NO: 354153 - DNA, 644 bp, Cannabis indica
attattattattattaatatgagaataaatggaaaatattcaataataataagttaaatatctaataatttgcgacaattaacagttcaagctaaaagtactcccaactaatagtttctctaccatattctttaaaatatatcactaaaattcaactttatttattttatcttaaacttttacattatatcatacatcaacttttttattttttctatatcatttaaatattattatattttactcattctatataaataattaatatactattgcacatagggatgcacattttccccacggggacccgcccctaatggggcggggattccccgtctaaatggggaacggggcggggacggggattactttttattcccgaatgttaaacggggcgaggacggagatcacactccccgccccgacggggacccgtttagtattttatcttatatttttagtaatattttatattttataatttatgtttgtatttttttagtatattagtatcttttttataaattttaagttatgtttttgataataattagtttattgaataataattaatgtataatattttaatttttatgtattttaatatttttgtatgttaaaaattttattataaactatatttt

SEQ ID NO: 354154 - DNA, 637 bp, Cannabis indica
caagattgaactcagcagaggttagtggcttgagaatacaagtgttcagtagccattaacatttagcgtttagacaatgtctgaactttgcttgagtgacacacttggttagcatgtcagcagggttgtgtgcagtattgattttcttcatggtcacttctttccttgctacaacatccctgataaaatgaagtttgatgtctatatgtttggatctctcatgaaacatggggtttctcattaggtgcagagcactctggttatcacagtacacagtgacatcatctgtgttaaaccccagttctttggtgagtcctttgagccaaatggcttccttgacagcctcagttgctgccatatactcagcttcagtggatgagagagccacaaccttttgaaggttggatttccagcttacacatcctcccagaactgtgaaagcatatcctgtgagagactttctggtgtcaatgctaccagcatagtctgaatccacaaacccagttagttcctcttgtgagcttgacttatttccaaaggtaagtcctatgtcaagagagcccttgacatacctcagaatccatttcaaagctgaccaatgttcttgtccagggtcagcaatgaatctgctgactac

SEQ ID NO: 354155 - DNA, 513 bp, Cannabis indica
attctcctccctattatctcatcttgctcaactttcaattgtgttattaagttttctgaattactttcatattttactgttttttaaatcataattgctttcgatttgccgaatagaatcataagtatagtttagtggtatttaatccaattccctgtgggatcgacctcacctgtgtgagatttactacttgattgcgtatacttgcgtagcgtttataaattatagcaacagtcattatttatcatgataatcctatgctctatgatagtaaaacacgaaaggtggaaaatgagcataaaggagggaatgctgatgtggaaaaaacaatgggaaatatttcaaaaaacttatctttggcgggccttggcaatggggctcgccaatcattatgaaactcttgagttggaactgtcgtgggctcgggccaacacgaaatattcagttcctaaaaagtctggttactcagaaacggcccaaagttgtgtttttatgtgaaacgttgtgtaaaaa

SEQ ID NO: 354156 - DNA, 585 bp, Cannabis indica
tggtacatagctccagcgtttttaaaaccaaacgggatgactttgtagctataaagccccatatttgttcggaaacttgcatgctctacgtctggtggatgtattttgattagattgtagccttagtaagcgtccatgaagcttaatatttcgttccttgctgttgcgtctatgagctgatcgattcttggaagtggaaaacagtctttagggcatgctttgttaatgtctatgatatcaatacagactcgccattgcttgttcggcttgggcactagtacgggattcgcgacccaagcccggtaagaagcttcaattatgaagttgttgttgtgtagcttttcaacatcatccttcagggctactgctcgttctttgtccaatagccttcgatttttttgaactggccgaaacttgggatcgatattcagaacatgtgaaataatagaaggatcgattccgaccatatccgcatgtgaccacaaaaaaaacgtctaggtttgctctgaaattttatcaattctgatttttcttcgagaaacaaaccttttccaatctttagctttctggtcgggatagctggat

SEQ ID NO: 354157 - DNA, 1157 bp, Cannabis indica
gatctgctcgaagaaatggccatgaataaccaacaatggccaactgaaaaaagtcaaacaaagaaggttgctggtatgcacgaggtagacgccatcaccaagttgacagcccaagtggaggccttgacgaagttgatgactgctcaggtgaaacaggctcaagttgcttgtgagctctgtgggggtcctcacacctatgaccaatgcctggtggatttgaatagtttgccaatggatcaagcaaaatccattgggaactattctcaaaataataattatgggcacaagcaacaggggctctaccagcagagaaatcaaccccaacaaaaccaacaacagccgcaacaacaaaatcctagtggaggcttaaatatccaagctgacttattgctccaattcatgatggagactagagcctctattaaaactctagaaactcagatggaacaattggctactcaagtggcaaaacaagttcaaggaaattcacctagcactagtgaggcaaaggaaaaagagcaatgtcaagcaatttccttgaggagtggaaagagttatgagggacctagtggcaagcaaccagttgaagatggggttcaggatcaacaggcacacacacaggcaccaaaggaaaagaagactactgagggtcttgcaccgaaagaagcttcgcctccgatcagcatagatcaccatattaaaattccttaccctcaaagactccgcaagaccaacctcgacaagtagttttcaaaatttcttgaaatatttaggaagctggacattaacattccatttgcggaagcgttggagcaaattccaacttatctgaagttcatgaaagaaattttagctaagaaaaggaagttggaagaatttgacatagtggcactcactgaatagttctgtgcaattttacaaaagaaactaccgcccaagcttaaagatccaggtagtttcaatattccatgctctctttgtgatctgggagcgagcattaatctaatgccattgtctgtcttcaaaaggctaggattgggaaaaacaaagcctacaacaatgactttacaactggcagatcgttctttaacttatcctcgtgggataattgaagatgtactggtgaaggttggtaagtttatcttccatgcggattt

SEQ ID NO: 354158 - DNA, 835 bp, Cannabis indica
acccggtgtttccccttacggatcacgggactactgactgtcacaggttcggcgatgatagctgtggtagtgggcattacaaaaaaaaaaaaaaaacaactatcaaacttttagtcacaaaaaaaagttacttgtgactaaacatggtatatgaatacaagtagtcactaatttagttttagtcacaataagtattgtgactaaaaatacttctagtcacaacaaattgtaatttttgtgactaatattttagccacagactttttagtcacgacgtaggaatgacaatttataattagtcacaacttttttacttttagtcataagttttgttgtgactaaaagtaagattttttgtagtgggggtagtgatgcagtggtggttgtagattaggattaaagaagaaaaaataataaaaaaaaaataatggtgatgctgggaatataggtacttgggcagtgagcaagtacatggagaagaagaagaaaaaataagtttttttagggtaaataccattttcgattccgtgttttgtaaaagttactaattggaccatctattttgttaaatgacaaaatgaaccttgtattttctaaaattttacaaataggaccatctagagatgttatgacaaaactggttactttttttatctgttcgtgttagaaattgtctaaaatttggttatattaaaaaatatataaacttgttgaaaattgagtttagagtcctatttttatcattttagaaaatataggttctattttgtcatttaacaaaatagaggattcaattgataatttttataaaacatagagtctaaaatggtattta

SEQ ID NO: 354159 - DNA, 729 bp, Cannabis indica
tcgcttggtcgttgcttaacttcaaccaagtctcctaactgcaatgggagatggcgcgaggaggagaattgtgcatgaaattccaaagagaaggttttccatgaactaaactttctaggagccaacttgaaataccattgctgagcagcttccggcagtgtgacagggaagattctgtagcatacaactcctcgtacgctttgcaaatccatttgcatttcaaagtacttgagatgcgaaaggggatcttctctcccagtgtacatcttccacgtcggcattttgaacttgtggggacatcggtaggagattgatctcaggtgagaaaggagttccacgtgctcggtccagctcaagatcattgcttctttgtccagccatggcgtgaaacatatttttcagtttgtctactgagcctgtacggctgggctgacctgctcgacattctggtcaattttaattacgtcagcatctttctgagcggggatttgagtacgggttctaggctgcacgatcgtcataacattctgatcgtctgctcctccttctttttagatcattccttaggtcatgggttgtccctaacctttcgaacacagaagttcctggttgccttagcggttgatttgcttggttgacgggtggaatgacaccattaatctggttggaccatcaggtatgacttctcctgatgaattaccagacaaggtctgctcgcctaccgctagg

SEQ ID NO: 354160 - DNA, 517 bp, Cannabis indica
agctcaagagtatactttaccttcaatgtgggataaggtagctatgtcttcaaaatttagtcaaagggctcaaatgatagaagagttcaatatgtgtaatagatggaagaaacgaggaatatctagagtaccagttatggtcgagatgacggtcaaggcaactccagcgaaagtaagcatattatcagatggatctgttgctgttgaagtagggggaattgagctgggccaggggctttggacaaaggtgaaacagatggctgcttttgctctcggttcaatcattgctgatggaactgaacacttcttggataatgtgcgagtcatacaggctgatacattgagcctgattcaagggggattaacagcaaaaagcactacatccgagtcaagctgtgcggcagtcagaatgtgctgtgatgtcttgattgacagattaactcctgttaaagagaagctgcaggaatcgcttggctctgattctatcaaatgggagatgctgattgctcaggtatct

SEQ ID NO: 354161 - DNA, 432 bp, Cannabis indica
cataagtatgttgattaacaacctaaatatgaacttctaaaacgctaataagtaaacacacataaagtatgagaaaccttacagtgggtgtagcggaataatatgtctccttccactcagatctctaacccttgattcctttctgttgcagagtataatcaagatctgagtccgaatgtccttctgttggatttgatccttcacagtcttccaatctatgattgaggtactgtttgctgtgtgtgggcactactctctcactaagtatttcgaaattgtatctttcttgtatgttgtgatcatagaagaagaagagatgggcggctatatatagagaaaaggaaagctgaactttctgaaaaggcagtttcgtgaattactaagtaattgcttaattgccttatttggtgtgagccatcactttccatttat

SEQ ID NO: 354162 - DNA, 809 bp, Cannabis indica
gataggtcctcttttacggggtcaatataaacgtgtattaaatatgttgtaaatcgtaacattttgggatgtctcgatgggaacacagcgtcagtaaccttggtagcgagctggagcttttctcatgttttttcgaggttgatgatctaagcctcgtcgttcctgcgtttgaagacataatgctctatctgaaaattgcagttcttagggacaaggtgaacttcaacagccaacatcatttgaatgtcagcttctatccgagagaacttactcgacgaagctgtgaatctcattgaaagatgtctggagctgattagtgaaagtatcgcgagcgtgccttcctatagcgagatggacgcctcgctattagttgtttgggtttacccgactgttttacttagtttgtacattgtgtattatacgctaagtgtcttaccaatcaacgtgtctcgtctcctaacgcgtagcaagtttaatgcctcgccttgtacatctaaagtcgtatgatttctcgttaatgtacgaggccacaatttgtatatctttatctcgcgtaagacattatagtaagcaagttgtaaatatactctatcacttccgcattaatgagttattccattttcaaatataattattattacattcattgattagcattcttcccaatttgaaacgtgtcctcctttgaaatgatagtcgaatttcgagtataacaaaaacataacttaaaaaattatactattatactagaaaaatataaacacatattataaaattaaataattaaaatattaaattattaaaaatta

SEQ ID NO: 354163 - DNA, 563 bp, Cannabis indica
acattcaaaatgttttttaaagcattaaatatagcaatgatgctcataaattcaatgaagctaagctagataacatgccataatgagctgagaagcctgagattatacatattaattctttatatatttactcagaattgtcttctttgagtgttttgaatggagaattgagagagcaagtctatatgtctaaacctaaaagattcaaggaaaatagaaatgaaaatttggtttgtaaattgaaatgatccatttatggtttcaaactggcatctcgccaatagtacttgaagtttgacaaggttgtgatattgtttggttttatagagaataagtttaacaaatgtatttatatgaagatcagtgggagtcgttatatttttttttatttttacgtggacaacattttacttgacagtactgatttttcattattaaatgagaccaaaaaaaattttgtctaccaattttgatattaaagatcttggagaggcatctttttgttttggggattgagatttatcgtgacaagaatcaaaaagttcttggcttatctcaagaag

SEQ ID NO: 354164 - DNA, 588 bp, Cannabis indica
tcgagccaaaggccccatctcagcccttcaatcgttgaagccggttgccattgaactcgtcgttgaggacgaaagagttaacctcgatatccactaggttgatagcgtcttcgccgagataagaacatagtgaaagatatttttatggtgtctctgtcgtcgcaatagaggcgccaaagttgcaaattggggattttgaagatctaacaagtcttgtatagtactagtatttatgtattaaaatagttcttaaaacccaaacgattagcaccactttctctattttttcgatttggatctgtgtgctttttttaattaggaaaaatgttaatggtggtggtaatgatagagtggtggtgataatggtggtagtattggtagtgtggtggtagtagtggttgtggtgtgatggtggtggtgttaatggtggtgatgtggtggtggtgttaatggtggtgatatagtggttaaggtgataatggttgttacagtgataaggttgaagaaggaagaagaaaaaaaatgtaagaataacaattaattttagggtattgaaaaagaagaagaagaagaagaagaatagaataa

SEQ ID NO: 354165 - DNA, 485 bp, Cannabis indica
tactatcagtcaacgcagcagaaaactcacctcctattctaatcctaagcagaataggttttctaatcctaaggagaataggtttttttcttcagcgtttattttatcattttttggctataaaagaagtagacttcaatagttttgggagaggcaattgagagggaaaaaagagtacgaatttcagagacagaagtcaatactggaggcattctgcagatagttttcagcactattttattctctatcttattctctctcttaaagttaatatgtgtgattttgcttccatgtgtagctaaacacttgattagggttagatggatattgtttgatattgctttatggtattaatatgatttatttttcccccagtttctatgtattctatttcattcatgcttaactactttaattgcctgatcaccaattaattgtctatgattttgatgcgagatctgagaagtgagtgtcaattatgctat

SEQ ID NO: 354166 - DNA, 765 bp, Cannabis indica
ataaataaacaaataattttaaaaaaataaatgaataaatattctatgtacgacaatccactaaaatactatgtgtctcaatattataaccaatcactatttaagattttaagggtgtatgggttgaccaatattagggtgtctattgtagaactaccctaatgtatatacacataaatttgatatacatttatatgataagaaattaaaaccgattatctttatttagcatgggtctcctatgttaaaacttgtcacaagtttgcgtattaaatttgtatgtaaattatgtgtgtatatattattactaattatgaaataaggtaaaattagtgtgaatgaaggcgccttaaaacatctctaatgatacatcatttatcaaattgaggtagaatttttatattattttatttgccacactaaattggtgtgcactcaattttacattattaatagtattgaattttgaatctatactaatttgaagtattttttttgtttgcattcaaaccctaattttaatttttttaagcttacattttgtgttcaaaataaaatttatcacaaaaataagtgttagaaattttatataaaacataaagcataaatgatcatgtaagaaaattcggaattaaatcaaacatatacacgatataacaaaaagattgaaatacctcccgtcattgattctttaagcttcaatcccacactaattttggatctgttcaagaaaaaaaaattgattagtgtgggtaatcgagcttc

SEQ ID NO: 354167 - DNA, 879 bp, Cannabis indica
aacaataaaacataaaaaaaatataaaagtttacacaaaaattactttaaagaaaacgttataatacgtatagaaaattgataaaaaaaatatatggtataggcgctccaaatttagttaaagcaattggtataaagaaagagctaagctagattaaaactcaaccatgatgggaagtggagctagagtcagattacttggtagcagtccaagctattcgaaattcgaaattctttacctatactttcttcttttgaggttattataaaagattattgtaaaattcttgcatttgttggattttctcaaagagaagatgaggaaaaaagttgagagttgggatagtaaattcttatctggaccaggtaaagaagtccttttgaaattggttgcccaatctctctctaattacgctatgagcatctttttagccccaaagggcatttgtaaggagcttgagaggaagatgtgcaagtttcggtgtaagtctacctctaagcaaggaactggtatacactaaatgaattggaattgtatgtgtgttgctaaagatcaaggtggaatggggtttcatcatttgcacaattttaatattgctctccttagaaaacaagcttgagacttcatactctcaaagattctctagttggtaatctgttgttacgaaaattaataattactacgcaagtgcacacaatcaagtagtaaactcacgcaagtgaggtcgaaccacagggaattggattaattactactaaattataattatgattctatttggcaaatcaatagtttttatgattcgaaaagaatgaaagtaattcaagaaacttaaataacacaagtgaaaaattgatcaagatgagataatagggagga

SEQ ID NO: 354168 - DNA, 1017 bp, Cannabis indica
aattttttgagataatgaagagaaaattctggtcttttgcttcatcttggccgaccctctctcttctcaaaccctctcttattttttttcaacttgaatttgggagaaacttgttggaattgaagcttgattgttgagaaaattgtgttggaagcttgaggcttgtttgaacaaggaattgaggtagtttttacagttttgtttttggattccttgctgaaattatttataaaaagagcatgttagagtgttggtcttcttgattatgcatgttgttgaatttgatgtttgatcttggtaaattgggtgtgaataacttgaattgttgtaggttttaattattaagttgtggctgagtctctaggttgatatccttgttatttttggtatgtggctgctgtaaaatattggaaatatgttggttttaagctcaagttcaagagcttggattttatgagttaaagtcatgattttgtgtttaattgtgggatttgtttttggtaaattcagaggcatttttaggatttcattgagtttaaagtttgattgtaaactctgatgttggttgtgtaaagcaagcttgagttcatggaactcaagcttggagctttaattgcactttttgattcttagtgaaattattgtgtttgagctgtggaatatgtttattacgtcatataatgatactttggaaagtttggtggtgttttgggaagatttgagtaggttatgggggcctaaagattgaaatttttcgttttctttctgcccagacaaccgaaattccggtgggttcagggctgctccaaccggaattccagttggagtacatcgggaaatgctgcattttgttttggccataacttttgactcgggactccgttttgagagttctttatatcgtttgaaagctcgttttgagctctatgtgattatctgtattttaaatgccatgaatatattttataaatgtgaaatcagtggttaaccctatttgtgaaaatcccggattgtgtg

SEQ ID NO: 354169 - DNA, 555 bp, Cannabis indica
ttatatattttatttttttaattaaaagaaaagggtatatagtgacacgccacgcgtgtgagcaaacgtatttacccacacgttgtgcgcgtcgctaaagccacgtgattcacgtggctttagcgacgcgcacaacgtgtgggtaaatacgtttgctcacacgcgtggcgtgtcactataggccatagtttttttatttttataaaattgtaaattttgggttttagtatttagtgacactctatatttttagtgacacacattctgcgtaataaacaccgaacatttagagtcaaatgttgtgtgtcactaaaaactacttttaattttttagtgacccacacttttatgtgtgtcactatatagtgtcactaaaagcttaatttgtagtagtgcctctatagatgatttacattgcatagggataaaattactgttgcaccctttcaatgtattttatcgttaaaacacttagccacctataaatgatattttagtgaactaatataatctctaaaaatgagcgctctatcatttatctctatttagctaagc

SEQ ID NO: 354170 - DNA, 886 bp, Cannabis indica
aagatgtcccatccaagttcagaaactttccctccaaattcgtaacaccagaatacaccaaccactttccctctctacacgttcctaagaaccttaaacctcaatttaaactggaaacaaaggattccaagaatgaggagcttctgatcaatcccaagcaaggagatgcagttgatcattactggcgatcctcacaagagattttttagggtaagtatcatccctcgcgaatggtggtttgatctgaattattacaatgtttttgttgctccattgatctcttatctatgtccctacaggaatggacatggatcttgagaacaagttcagaggtcctcctcaggatgataaggaatccaggaagaaggtaatcccaattggcgtggtcattgattctactgaagaacccaactggcccaagacccaaacttgcacgaggggacctttagaccagtcaatctgtggtgttgaaaaatttcctgaggctgggaatgaggctcgactgtaggaaatgggatcttttgatgtggagaatgaggtctatgcagaggttgagaccttttaagtgtagacggtctttctcgagctatgcgtagatagtctttctcgagttcatcaacctcccatgaataaccttgtattctttgtttgggaaaatggcttaatgatttgcccctagtggcatttttgtaaagacacgtttgtaaaccaacttgggttttctcttatcttcaatgccttgtacttttttcgtttgaacttaatataattgtatttgcttgtatttttatcacaatgtaaacaattatacttcgatcaaatgtaaagtactttttaggtttttctattactcgtaattttcctttttaagtagttagttatctac

SEQ ID NO: 354171 - DNA, 722 bp, Cannabis indica
tcagtgaaatcaacgtatgtgcgccatgagccattaggcttgggcacgagtacgagatttgctaaccagtttggatagaacgactcccttatgaagtcgcatgccaagaggcgatccacctcttccttcagcgattggtacctcgcggggtccattttgcggcgcttctgtcggacacctcgcacttcggggtcaatgttcaatcaatgacacttgacttgcggagatattccgaccatatctgaatgtttccaggcaaaaacatccaggttttgtttgagaaatgtgacaaatttttctcgctgttgaaaagttagtttataacaaattttgaaaactttattattatctattggatcaataggttcctcaatggtgtcttccacggcttgagcggttgcggcatagtcgaggatcctaggatccaaatctggctcgtctttatgcggtacttcctctattctgaagacctcctgacgaggaagtggtgcctctagcaggtagatgacattgactgacttcttttctgcaagtttgaccgcggtgttgtagcattctcgcgagtctgactggactcctcgcacagaacctactccaacgggagtagggaacttcaatgtgagatgatagatggaagtcacgatcttcatctcatttagaataggctgaccaatcacggcattgtatgtcgagtattggttgattactacgaagtcagccat

SEQ ID NO: 354172 - DNA, 1025 bp, Cannabis indica
ctttgtgattctgattcttaaagtttttcccattgggttttagaacaacaatgtatcttttattagtgttgttgttgtttccaacaacaagcacctcttccttttggtcttattttcgagtttcctcctcaattcgaagacgagtgatcagactttccaatgaaaactcttttgttttgtgcctgagagtatttttaaaatctttccacgaagggggtaatttatcaatcataacagcaacttgaaattgttcatcaatagtcataccttcagacagaatttcgtgagctattttctgaagctcgtgagactgggcttcgactgatttatcatcggtcatttgaaacttcaggtagcggctcacagcatatttctttgttcccgcctcctcggtatcatattttttctgtaatgcttcccatatctccttggcagatttgtcagaattataataatcatacaaatcatcagacaaaccattcaaaataaaattcttacacagaaaatcattctctacccaggagtccctttccttaacctgcgattcgtacttctcgacttcatccttcttctcggcaggaggtggagtctcagacacaactggtttcaaaacagtaagcacaaacgcaacttttttcatggtcagaaaaaacagcatcttctgtctccaacgtttaaaatgcaaaccctcaaaacgaaaaggcttgttaatgtcagcagtagaaccagaacattcatcggtagtagtcatagcagaaagaacgtcttaaaattgttgaataaactgctagcaaaataaaagaggaacgatattaccgaatgaagaattctgggttgagtcgcggactaagtcgctctctttaagacgttcgcggcactgcccaggagtgtgcaagcagtcggaaattgccggtcgtccccaggataaaacagcccagtcgttgcactgtatcggaaccccactgcactgtagagcaccgtcgaatacacccagaaaatttcataccgcagatggaatttttaat

SEQ ID NO: 354173 - DNA, 1362 bp, Cannabis indica
tgaatttttcatccttttttcagaataaactcctcctattttagttacataggagggtagttaattataaatcagactgatatcttataaaaataattccctgaatttgttggattagattgcgtcccacataaaataaatgcggttattatttgaaaatcacacagctatgattggtctgcttttactgggtcaatgcatacgtgtattaaatatgttgtaaagcatatcgttctgggacatctcgctaggtaaatagcagcaataaccctggtagtgagctagagcttttcccatgtctttctaaggttcataatgtaaatctcatcgtttatgttattgaagacataacactccatctgacaatcgcagttattggtgacaaggtgaacttcaacagtcaacatcatttgaatgtaagcttctatctaagagagccgactcaacggagcagtgaaactcattgaaactcagtgaaggtaccatgagtgtgccttccttaagcaagatggatgcctcgctattcgttgttcggattcattcgactgttatacttggtttgtataacgtatattaaacgctaagtgtcttcacagtcatcatgtctagtctatgtctcttcatgcgtagtgaggttgatgccttgccttacactactgaggccgtatggtttctcgttaacgcacgaggcaacagttcatatatctttttctcgcttaacatcttacagccaacaagttgtaaatatactctgtcaatttcgcatttaatgagttattctattttcaattattattatcattatatttgtttattcctattctcccaatttgacacgtgtcttcctctaaagtgctagccgaattttgggtatagtatattttattcaagatacttaattatttgtttctaattttaatacatttaattaaataaaaaattaatatttaagttgattttgttcaaggtacttaaatattgaatatttttcttaagaaatttaattcaataggaaaattatatttgtgttgaaaatgaatttattaattaattttagatcaacataaattagaataatttttcaatattttttttatactatttttatataattttgtaaaatgtacttctttaaatacattggatttcaaatttagttacatatatttattagaaaattaaatttgagtttaatattaattttagatcaacataaattagaataatttttcaaaatttatgatatttgtttatataaatttcaaaaatgtacttctttaaatacattggatttcgaatttagtcacatatatttattagaaaatttaatttgagtttaatattaattttagatcaacataa

SEQ ID NO: 354174 - DNA, 506 bp, Cannabis indica
taaaattgcttggagaggtctccttcaaacttgccactcaggggtgttatccttgtagaacaaggcttccgagtggcagatcgagaacttagagtaaatcaaaggaaaacttaaagaaatttgcccaaagccctacttttaatcaaattaaaccatgttaagaattttcaagaatattattttttatttttctatcaaaataaattatttttatttaggttaattaagatttttgtcattaaattttgacaccaaattatgcctttcaaatttttaaagttattaaaaattctctctgaactattaagattattgaatttaaaaattttcgtctaatttcattctattgtactaatatggtgattgtccatatactaagttgtatcaccgaactttaatatctctaaaatcatgacccttaaactttaacatgcactaaattatgtctcttaaattttcatcaacgtcaaattatttttagtaaaattgaataaaaaattttaaat

SEQ ID NO: 354175 - DNA, 873 bp, Cannabis indica
aggcttgtttggtgcctcctgttggcatattagtttaatggcacgtgcttcaagagtgtgggctgcatttatgatggtcatcattaatatttatttcctttcgtaggcaacgattcgcttcctgtccattgagaagtcggcgcatttaatccgagtgtcaataaagtaatcaaacgttttcaactgccctggcgtccatttgtctcaaccgttggatttgtagaatgtgaatcgattacgattcccactgtatgatggtgcctgatcacagctgccttgcaccctttctggtctataaaagccaaccttttttcttcgctaggttactttcaccacttcgccatttcgccccaagaacacattcaagaaaaagtccagaaaccatagattttttactactattcctccgtcgttgccaatcagcattctaccgtcgaccaacaccagcccccagttcacaacctttgtgtaagttttctgggtactttacgcttttggtgttcacttgcatgttagggtagaacttttgattaagtgcttaatttctgggaaatgactttggcgaagactgtcgtgtgatgtatataccctcttttatttgtgttctgttactttctttatctttcattttgcaatcaacctttctgctgagagattgctcataatatgagatagtttttgtacccaagttttgttttcttttatttttcctttccttttcctctgctttcgctgcttttgagatatttgcacccgatgtttgcctatgagaatccctggaattcccatttttggcaaacatcaggagggggtctctttccagcggttaggggactcccattccctcttttcacattagggtttggtttgggg

SEQ ID NO: 354176 - DNA, 414 bp, Cannabis indica
gttatgaattttggaagttccgggttgagttggtgaatcgtatgcatcaggcactcggacaagcccatccgcgcgcgtatttcagacaagcattgtctgaggcgcagggtcttcagacagcacactcgcccgtgtgcaccctgttgtccgcccgaggacaccctgcacacgccgagttttctcgactggggaccaccattccgcgcgcgtcctgggggttcgcaggaggctgcacgtgcagcctcttgggctaaaatattatttttaaatatatttgaacctaaatatcatatttaaatttaataatatttatttttaatgattatttttaattttgatattttgaggtttaaatttaaaaaattgattattttattttttaaatatggtcagatttaaaaatttgttaatttc

SEQ ID NO: 354177 - DNA, 506 bp, Cannabis indica
acgaggcacaaaaactattgtactcagtgcctcgcttcacaatgatcgaagacaagctatatagaagagggtattcaatgcccctacttcggtgtgttctccctacagaagcaaatcaaatcatcagagaaattcatgaaggcttctgtggggatcttgcgggctgacaaagtctgtctaaaaagatcattagacaaggatattactggccaaagatcaataagaacacacatgagtctttctcatctcccttcttctgaatttatgtcaaattcaatgcatccttaacctctgtcatagtcagagtttctttgccatacaagatcgtatcaacaaagtcctcatacatcttgggaagtgaactcaacaggattatagcctggtcttcatcatctattttcaccccaagattattcagatcaagaatgattgtgttaaaatcatctaaatgtcttctcaattcctttgactcatccattcgaagtgtgtacaacttcttcttaaga

SEQ ID NO: 354178 - DNA, 1363 bp, Cannabis indica
gggcctgggatccaatctcggtaagggtatgggtctatatccgtgtccaggttagggtgtaggatttagggttttgggtttagtgtttagggatttagggtttagggtttaggggtacatgtaaaaattttaaaatttagggtttacggtttagggtttagggtttaagggaccgcttcaagtctcggcttcaatttcgggtcacatggtatgatttaaggcttgggagtgggtctgggtccgagtccttatctgggtctaggtccgtgtttgggttcaggtccgagtcttggtcacaaatcgaaaaacccacctcatgtttagtctagtttgagttctggtacggatttgggttctggtccgggtctgggtcttggtccaggttcgattccctgatttcgacaccgattatgggtcaggtccaagcctcgtttcttgtgtcctgggtaacgggccaaaatcaagatcctagtccagttctagctcatgtcttgggtcatggttcgagtgtcaggtggaggtttgcgtctaggtttgggtcttgggtcgtgagtcatgggtccaggtccccgattcaagtcacggtccaaggtccttgtctgggttagggtcccagtctgagtgcaggtcccggttcgtgttcggtactagtccttgtcttgggtcttcacttagtctaggtttgggtcacaattcggttgtcaggtctaaggtctaagtatcgggtcctgggtcccgggtcccggtcccagtctcgttcccggtcccggtcccaggtcccggtctcgttctcggtcccggtcccagctcttgagtctcgatcctattcctagtctagtttctagtcctagttctggttcaggtctttgtcctagtccgggtctaggtcccatacctgatatcggtctaggttcgggtttcgggttcgagtcccagttctagtacgagtacgagtctgggtttgggtcttattctgggtccaagtttcagtccgtgtctgggtccgagtcttggtctgggtttgggtctgggtccgggttctggtataggtctgggttcaggacctggtcctgagtaatgggtcctgggttacgggatctggttcgcaggtcctggcgcaagtctgggcttgggttcgggtctcttgggttcgagtcattattcagttctgcgcctagatctggttttggggccatgtccaattcctgttccacggtccttattccagttcttattccgatttcgggtctcggatctgagtttgggtttgggtcctagtctagaaatgtttccaggttcgggtcttggtacgattcccatatttagacccccactaggggttgggtccaagccccatgtcgtg

SEQ ID NO: 354179 - DNA, 501 bp, Cannabis indica
tcagaattaactgctaatttccaaattaactaagcgggctttacaatatatttgtttcatcttgctgaatgatcttaatttccatatcaaatgatcacatatatacaattcttggtgcatataaagtatttcaggactcctttactaatgaacaaactacatacatttaatatttctcaatatacaaaaagaaataaaagtatgttcttcaatcatttctaatataatcaaaaagtcttcaatagtctatcacaacatataatcactactacaaaaaagggctttagagacattcattgagagactctaaaatattttagtgacacttcactgtgcgtcactaatgtgggtgactggaaagacaatatttagtgacactgaatcagtgtgtgtcactagacctttttagaaaccctcactgctcgtcactataagcttttagagtcatgccatgtcacactgtaaaaataacagctacacactctgcgtgtcactataact

SEQ ID NO: 354180 - DNA, 689 bp, Cannabis indica
acagcctcagatggattcacatcagaaggaggaacatcattaacaaccttatcagcatcatcagcatcaccaccatctttaaccaactcatcaccatcatcggagtcggaatcaatatttttcaggatcaggcagttccttctcatcatcctcagcatcatcatcatcatcatcagaatcttgagttactaattcatcagatgactttccctgattcaaacaacacaaatgcaacttaaataaaacagtaaagaaactaaaaacaaagcatgaaaaaacagaaacaataaactatgattaaatacctcatcagaaggacgacgatgaatggcattaaccttctgctgaatatccttaattacagtcattacagacttgaaattaagatcaacaaaacacctcaaggatatgaagtcttcagccaatgatgcttgattcgaaatgaccatctccaacttagatttcatcaaatcaatatcctctgaatcagatttctttgaagatgaaccactctcaaatgtttgcttcgatataccacggtcatcaatagactcatcaagaaataaaccttcaagttgaagcttctgcctctcttcatcagtaggacatatgtttttgatctttaactgaacaacataatcaaacagaatataaaaatgaaaaaaattaaataatcaaaatattaacaa

SEQ ID NO: 354181 - DNA, 486 bp, Cannabis indica
aatggaggcttgaagcggagacgttacacttctgatgatgtccctttgattgtgctccaggagggtgctcctctggaggtccatggtatatttttttatagtagaaggagaataaaagaactagaatgaagaacacttcgaagccgatctccatctcttccttgttctctctctctctctgagtttctctgtctaatttgtagctttagaattaataaattcgtagcctaagatgtccttatttatagtgcttgaaaagatagatgaatccccgtagaattatgattctatttatagtgcttgaaaagatagataaatccccatagaattagaattctatttatagtgtttgaaaagatacatgaatccccttagaattataattctatttataatattaaaaatatctaactaaaagaaaaggtaactcatctttaaaaaaagataaaaaaaaatcgcaacgctacttgaaaaactatctttttt

SEQ ID NO: 354182 - DNA, 685 bp, Cannabis indica
tatataaaaaatgactaagtataagtacaaggcgaatacaaattagacaatgcgagtactattgataatagaattttaggctttcgccattccaagctcgtggaatcgcagtaccatcgagttctgcgagtcggtatgtagcgtcaccaatctttctgcgatgagatatggtccttcccaattatccccgaagaccccatgcgctgggttcttggtatttggcattactcttcgaaggaccaagtctcctgttcgcaggacttttgccttgaccttggaattgaaatatcttgcggttcgccgctggtaagccgcattttttaagtacgcctgatcgcatttttcttccagaagatcaaggtagagcgactgtttttcctcattttgcgagatgttgaaaacatctcttcgtagggaacctgccccaatctcgactggtaccatggcctcgcacccataggaaagcgagaagggtgtttcaccagtcgtggatcgaggagttgtattgtaagaccatagaacttgtgagagctcgtctggccaggtccccttacgttcttctagtttccctttgatggtgtgctttattattttgttaacagcttcagtctgtccgttgctttgtgggtaagcaactgcggagaatgctttcttaattcccagatcgtcacataattgtcgcatc

SEQ ID NO: 354183 - DNA, 536 bp, Cannabis indica
ttaatctaaaattaatactaaaaataacctaacattatgacatggaagacagttgtgattaaaatccattattagtaatggatagtcagaataaggaactaagaagtaaagccaagagagctatggttaaaactattcatatggagtaaccaaaggttttgtattacaaggacaagaaaagaaatcttgttaataaggctattcaatggacttaacaaaatttcctgatcctaatattataggtttgagattatctaaacctatggtttgtggtatgccttgtaatttattttactctagtgcaagtaacttactttagtaagatgctagaagtatttttctaatggctaactctaaaggaagtctttgactcctagacatagattttatttatttaaggaacaacttaaactattcaagaaaagataaaggtcaaggcaagaattttcttaggatcaaaaatgagtggtctcaagtatgctatagtatgcattagactagacacctactattgagtgggagtaatgagtaggtat

SEQ ID NO: 354184 - DNA, 569 bp, Cannabis indica
tggagtttgctcttcatttgattgttcataattattacttggtttaaatgaattaatgataaaacctaaattatattttatctacaccagctgccaagaagaggacatgccacctatccataacaccacaatgaaaaaaataccctcactaacatgcttaaatggtaaagtggcttaagggtaaaatggtccaacaccatagccccgcctaatctcgatattcaaagtatctcaaatattttttcccattaagaattaggctctaaacttacccatgtgactctaatggccatccatcgcattttctatcgtcaccgaacaaaaattataaaaattgcataatttatatctaggataaacaatactcttagagtttaataaaatctccaaaattgagaaattataactctaatgcccacttctaaaaatgaagtccacaacaataaaaaatcatatataattataaaatatcaataattaatgctaattgcctttactaatccataatttaacatgtggtcattacagttactatttagtaaaaataatattgatgtttagttttatgt

SEQ ID NO: 354185 - DNA, 954 bp, Cannabis indica
caaatgggccatggaattgagctagtttgacatacactacgtaccacgcatttccataaaaggacaggccttagtaaacttcataaaagagtgtaatgaagcagaagctagttcaagcgtgtcagtatcgcgaaccccagcatggaaagtgtttgttgacagagcgtcaaacaaaagcggatccggtgctgggataacaatgatatcgccagatggacttcgactccaggcaaccttacattttgcattcccagcttctaacaacgaagctgaatatgaagccctaattgcaggattgaagttagaaaaagccatgggagccacaagagtagaagtcttcagcgattcgcaactagtggtcaatcaagtctcaggagaatatcaaacgcgtggagagaaaatggtcgcgtacgtagatattgtttaggaactgctccatgagttcacggagtacaaagtggaaagaatccccagagaaaaaaatgctcacgcagactgtttggccaagttggtgtcggacaatgaaatagaaagactgggggtagtacccgttgaacacctcgcggagccgagcatcaaaatcaaagatacggtggttgcaattgaacaaaagccaagttggatggaccccatcatcagatacataacaaaaggtgagttgcctcaagaaagggccctatccagaaggctacagtagcatatcgatatgtgatgacggataatattctctaccaaagaggactcagcatgttgtacttaaggtgtgtatcggaccctgaagctagatagatcatgcaagaggtccttgaggggttctgcggagatcatacatgaggtccgagtctctcaaagaaaatactgagataaggacacttctggccaacaatgaaaaaagattgtgtagactacgtcctgaagtgtgattcgtgccaaaggtttgcgaacataccaaga

SEQ ID NO: 354186 - DNA, 647 bp, Cannabis indica
actttttagtcacaacataggagtgatgatttataattagtcacaagttttttacttttagttataaattttatcgtgactcaatgtaaaaaaaaatttgtagtgagagaatgactaaaagacactattagtgcttagtactattctaagtatcatactactatttatgtaattaagtattagatgttatataactagcttttagtaaaataatattaaacaatcataaaactctacctataaaaaaaatattgggcgtactcaatatcaaccaagaagaaaaaaaaaatgaaagataagtcaagtaatctaacttgttaatttcattttttgcatatttaattgacaaaaatattttattatttagtgtatattttcggctggagtattttaatttgtgtccatattttgtgtatctaaacttggaaggaaagttgtctagcttttctatttatggaaattgaggtaaaaatggtaagtttgattacagaatttattcttatctaaccagttggtatattttgatcttgagtgagtttcccattttcttagatcagatttcttgaagagaaaactggagcttgtacttactgcccacgattttgtaggtacaaaaatggaaattcctgggctgattgaagatttat

SEQ ID NO: 354187 - DNA, 623 bp, Cannabis indica
cttagtatgttagtattgtgggacggttatttagacattgggaatgtcgggattggccgagaatttagaatttcccaaaataccctttagtaccccttttatgttatttttgggtggaggggcaaaatgacctttgccccatttatgttttgtcctttagtggactaagtaattagaaattgatgttatgttatgtttcttttggctgaaataaaggtttattatttgcttttactctcatttttattcaaagtagaaaaattatgttggattaagtggaatgaaactgttttgatgcatgtttgattggttttaagttagtttagagttttggttcaaaagctatggtttttcaaagtgaaaatgtgaaattggttgctgggtttgttgtttgagattgagaatgatttctacagttttagtatgcatgattatgtagtttaaatcaggttttgatgcttgtaggtgagctttagccaagtttgagttttgaactcaaagcttggagctcacacggcatttttcgtttctgtggtttctggatagttttgttgctttgaaatgttctttggggtatttagaacaggtctggaaggtttggtgtgatttggttttgatttgag

SEQ ID NO: 354188 - DNA, 615 bp, Cannabis indica
gacacactagaccgaataaaccctatgtccagtaacccttggagctgaattttcaattctttaagctcagctggagccattctataatgaaccttggagattggttctactcctggtgctaaatcaattataaaatcaatttcccgttgaggtggtaaacccggaagttcttcgggaaaaacatctagaaattcccgaaccaccttgatatcttctggccgaacagagtctggccgagtggtgtctaacaccacggccataaaccctaggcatccattacacaataatttccttagctgatagggccgaaatcaccaggatccgagatccctgaaccgagccgacaaatatgaacggttcttctccttctagttggaagattaccatcttcctcttacagtcaatactggctgaatatttagataggaaatccattcccagaataatatcaaaatctgcaaaactcatttctattaggtcagcacctaacttctttttgtcaattctgatccgcatagacctaatccaccttttggagataactaactgtccgccaggtaaaagggttccaaaccctgattcctaactatcacgcggtctatccaatttactaaa

SEQ ID NO: 354189 - DNA, 894 bp, Cannabis indica
tcaatgctttagttcgagttttacgagttaaatatgttctaggatagtagaatttagaattctaattctagaaaataattatctttattttagtttgagtttcatgagacatatcttttggtatatttgaattttatgagacattttatggttattatttttatgagatattttatggtatgtttgaaatttatgtgacattttatttattcctaggtgctctaaaagtattgattccattaatttttgaggcttacgccttgccttacaaaaaaaaagagcctcaaggttcatagtctaatcgtttaacaaaaataatggaacaattccttaaatcaaacaacaacttttgacaatggaaccaaaataagaattcatagacaaaggattacaaatagcttgaaccaacacaaggcaatccatctctaccaccaccttcggtcagttattccttttaatctaacttaatgattctttcactcttattgctttgacaataactcattggataactccaaaacaacaactagaaaaaacacttaaaagaagagaggaattatttctagcaacacaaacaaaaccgtgataaccatgattatcaaaaatagatgcttccacatttagagctcgattggcacagcttttgaaaaagctaaaagctgttttttgaaaaagctatgataaaaatgtgtttggtaaacagtcaaaaaatagctttttgaagaagctacagctaaatgctgaagttgcttcaactcaacttttagaaaaagcttttttgtttaaaagactataataaatttttttatactaaaactatatttacttatttattacatattaaaaaataaaaaaaaataaaataaactaattataataaaataaataattttt

SEQ ID NO: 354190 - DNA, 693 bp, Cannabis indica
agcggtaccttcaaactgagtttaaaggatttcccatgcctcctttacatattaacaagatgatatcaatttaatgcagatttcaccaacaccattaaaatagtatgcaaagctttattcttataaccaaacaatttttcatctttagtattccaacttagttcaagttttaccttagtattatcttcatcatcatttttagtaggtcaagaccaacctgcaagtatagccctccatgccttctcatcttatgatttaatgagtactctcattttgaccttccaatatgaataattcgagtaattcaataggggtgattgagtaatggagtttccttctacaaacaacgacatctcacacaaaacaaattaagtagaataaaataatctcatgatctaactaagagtttagtgaccagctctgatactaattgaagttttgtattttaatattaccaatttattatttaattaatttcttaattaaatacgaaataataaaattggtgttgaaacggttattctgtagctataggaaataactctgtaactcaagaataaaccagaaaacaaatagtgcagaaacgtaaaaacacataaggtttttgtacgttgttttaacaatccttacagattgttactagtccatgggaccacgcctagagataagattcattagatagatctaaaaaat

SEQ ID NO: 354191 - DNA, 498 bp, Cannabis indica
taaaaaaatatatatatattgtttgaagggccccaaaatcaaatttgccttagttataatatatagaactaaaaaaaataaattaaccaactaaaatatcaataaattactaatttgaacaaaattacaaaaaagaaagctaagactattaacaaaatttaaaagaatagctgaaaaatactttatattataacaaaattttaattacacgttcagtaccaaaatgattttcttcgatcttagttatctagatcaccatcttgattgtctagatcaccaactgggaataaaaattccttaggagtaaattcaaaattatgataatcattttattcatatattgctacatcataaatagaatcattataaaaatgatccgagtgataatcgtcacttgtggactcatccaccgcctctcgatttaaactaagcttttcagaatgttgtttcctcttactttttttttacccttaaagagacttcttagcattttattca

SEQ ID NO: 354192 - DNA, 582 bp, Cannabis indica
accggaaacaacggttccgcacacagccaggacgttcataacatgactgttccaccaggcataaacgcccagatgaccatcggagacgcaaccaaattgcaaaacctctgcgctgtgcttggactcatgcagggtcacaataataccctgcatcatgatcaggaggaattacgtgcagcaataaacctcacgttcgacgaacagaggcgtatgttcgccgagtggagggacaaagagatggaggcattaagggctcaccatgcaaagatcgaagatcgtagtcggcaagccactgtgctgatacgaagagcctatcagactgtaggccagcaaatgccgagcatcattctggtagagaaaccgaagatgacccaacggtcaatgcttctcagacagccaatggtcagccgtctaatccccggtcacgagctccactcatgggccaagaggtaggcacacagaccttgtctgggaattcatcaagaggagtcatgctcgacggatccatgcaaaataattgagccattccacctgccaaccaagcgaaccaatcgctaaggcagccaggttctctgtgttcga

SEQ ID NO: 354193 - DNA, 579 bp, Cannabis indica
gcctgttaggaagcatgttagtagtctgatagtagaatatgcgcatgtttttaatttccaaataagcgaaattagtaagtttactttgattacgttttgaccagactagctcttggttactcaggctgttcagattagtatggacgccaggcgaaacactaggagccagggtaattcggttggatctaatgaaggtcagggagctcagagtcccccaaattttcgtggccgaagtagaggtctcaagggcagggcacgtggtcggggtgaagttaatccgccacaggttgcccaggctgcccaagctgctcaggatgcccaaaattgggaaaataggtttgcagcaatgcaagccaggatcgaggaactagataatgaaattcaacggttgagacagcaaggtgctcctgcagtgcctgctccagaaattccagtggcacctgcccctcctgtccaggccgaaccagtggtggcagtgaatcggatggaacctctgtatgaaaggttccgcaagcaagcacctccagtttttctgggaggcccggatgtcatgaaagtcgagcaatggctaacagtgat

SEQ ID NO: 354194 - DNA, 567 bp, Cannabis indica
tcgtgaaaaaagctcagaaaagcctccttacatacaaaaataattttcttcatggctagaaatggagagaatgttgatacatcacatgaagaaacccctcaccgtcctggaaaaaagccaatgggccttccaactctcaatctaaatagaccacttgctctaggaggacccaacctgagggtggcccaagcactcagaccactcgttccaggaggacccaaaaaagtcataccacagacctcgcagagtggttcgaaatattaaagaagtacaatatgaagcttaacccaaaaaagtattcctttggagtttcctcaggaaaatttctgggattcatagtcaacgtgaggggcattgaagcaaatcctgagaaaatcaaggcttagatagatatgccatcaccaacaaagccaaaggatgtccaagccctaacaggaaggatggctgcacttaacagattcatttcaaagtcgattgataagtgtttgccctttttcaatgtaatgcgaggcaacaagaaattcgagtagacagaagagtgcgaggaggcctttcagagtattaaaa

SEQ ID NO: 354195 - DNA, 675 bp, Cannabis indica
tattttcaaatgtatacatctttgaaattaatttttttttgcacattttttgtaattaattaaaataatgtatacatttgtgtaaaatgcccattctttaaagttataaaagaaagttgtgtgatttatttaataagagattaccaattgttttctcacacattttgagcatcaaatactttttagaaaaattacatttctatcgtatctcattattttatttaatcctttcctatcaaaacttataaacaaaagtttttatttaagacaattatatttaatgatgcaaaattagtccaacatttcacacacaatataaaattttaatgagcatattttgttccatttaagtatacattttattcactttataatcgttagattaatagttgggttgatcgagcagttattaattattaaaagaagaatatatcaaactaaacttagagtaccttcaattttgatcaaataaagtatactaaaacaaaatttgctgtaaatgacggaatgcattctattttttttttttttacgataacgattcaaaatccattccaatatacatataattttgttattatttgttaaaaatatatttttattataaaatattagtattatgtaatattataatttagagaaagaaaatagagaagagatgagaattttctgagt

SEQ ID NO: 354196 - DNA, 1237 bp, Cannabis indica
tatgttttgttgtgattacttgctttttacattgttgttgcccttaattttgcccaaaatacgtggaccaatatgacgacgacacgtggatctaagaggtgtgacgctcagatcaatcgactaagtctcttagcttcgagagtgcaacaagaatataccctcccggaggagaggtaaaggctccacatactcccggagaccaggggaacgcctagggatctccgggaggaacaggaccttatttgaacagtcacctctcatttaatgctgcatgggagaaaacgtattggaactgccataagcaataagtctgacggcgtaacccctcttatgcagctattacgctatgattaataaggctagtgacggctactttatgggagatcacatcaatcaagaagggataaaagactatatccacctaacccctaagatacctaaggtataggtcatgtatctcctattttgtatctgcagggaatattactgaaactacacagaaagacaagtgcttcagttctagggatcaccccagaaaaacagtataaataccccccaaatacactgagataagggtcgagaattttgggttcataagaattaaagagaaaaactaagaggaatatctaccaagaacattctctgtaataaatactgtaataaataagaaagactcgtggactaaggctcattaatgccccaaccacgtaaaaatcttctgcattaaacttcctacaactttctcatatacattattcaattggttgccgaaaacctcggtcaacattttggtgctttcattgagagacgaaggaagcatctgcaactagacaacaaccttgtaagctaaaatggtggaaactcgcaacacacgtcagccccgtcctccttaagacgctcaaaaccctgaagatgaggaagtagcctcaagagtcaacgtggattccaaagagcgagaagaggccattgatggcgaatacgaggaaaacgttgacgaaggcagttacacaaaattgctgctcttaagacaaaaggctgctgatcatgaagctgagatcaccgcccaaaaagaacaaaacaaaaggatgcaagaggtgatggtcaccatgcaaaaaagccatggagacaacagggatccacatacaccctaaaagcccatccctgcaagacttgaggaaaacaccggaagagtcctcaccaaagcactcagaagcataagtctagggagcctagtccc

SEQ ID NO: 354197 - DNA, 802 bp, Cannabis indica
aaccacctcccgtggctccttgcacgatctgctcaatgctttgccttatgacttgtccaatgttaatgttgtaccccttcattatggcgtacacatatttcaggcgatccatttggacatcggaaaaatgcttatttggcactaaccgagcactcacaaagtacagccatgtttttgccaccgggttcagctcacaccggtataggatatttggcgacccctctgtgccatcattgtcatggaacctcaacccaggaaatcccactgtctccgccacatccaccatatcaaactgctcttcctcctcaataattcggaggcgttgttcttccctagtgtaatcttggacagagaacatcacattaaatgcatcagcagtagcgggaactttctttccacgcactttcacttccccattccggcggtcgggccaattcgcaagaaattcacaagccatagtaacattagcccgaccccgagcatctacaaagctcccccacttcattctttctatttgagctctgattgtttcaaatcgaggttgacgcctcaagggattctccgggaattcaataccccgatcatcaatataagccctattctttagcctcatgaagcgattttgggcctcaatgtttccaaagcgggtcctatcaaaacccgttggtggtgggtttgaagacgaaccctcctctacattcctagtcctcttgggtgccattttttttcttttttttttgtttttaaaaaaaaaaaaagggcacaacaccccccttaatttttctctatcccaaaaataaaa

SEQ ID NO: 354198 - DNA, 627 bp, Cannabis indica
tttttcagagcctttttttatggttttttcgtccctttttcaatataacttgcctctatttataatttcatagtcagggagttaattacagagttgactgtaatctttacaacaattatcccctgaaattatggggtttgattacatatcacgtagtataaatgcggttaatatttaaatatcacacaattgtgataaatctgcttttactgggtcaaaatgatcgtgtattaaacacattttaaatcataacgttctgggatatctcaacaggaactcagtaccaatgaccttgatagcgagctgaagcttttcccctatctttccgaggttgatgatgtacgcttcgtagcttctttgcttgaaagcataacacttcattttgacaatcgcagttcttaataacaaagagtacttcaacagtcatcattcgaatgtcagcttctgctcgagagaactgattcgctaaaattaataacctcactaaaagatatctgaagctgattggtaaaagtatcatgagtatgccttcctatagtgagataagcgcctcgctattagttgtttgggttcgtccgactgttatacttagtttgtatattatacgctaaggtggcgtttggttgg

SEQ ID NO: 354199 - DNA, 697 bp, Cannabis indica
ctaagtttaaatttttgctcaagacccccaaaatatttgtaccggccctgcagtgatgctactcatcctatatttgacccaaatatatatagctttcaaacttttcatatagtattctaattattacccattaaagttattggctatatttacaaagttgaatattaatatttcctagctagcttactctgtaataaagatttttaaataagtagaatgtttgttttttttaaaatcaatatcttgtttcttatttttattttgaattacattacattattttcttcttattattattgtttaaatcttaatgggtatcctagatccctatacccaatacagatttccctaccccgaacccatagagaattaagcggggcgaggggggatggggtacataaatggaaaacggggacgggttgggaggtgcattacccttttttattacccactcaattttcattcctaattgttatggggtactaaggtatctagcaccactataaggtgacgctttataattagttacgattttttataatctttattaaagtaaaataaatcactacaagaaaaggtgtttttgccggcgcatttcgtgacatgcgccggtaaaagttgtcgagactaccaaaattatggaattccaaatttattttgggtttacttttgccggcgcatttgtgcgccggtaaaa

SEQ ID NO: 354200 - DNA, 1666 bp, Cannabis indica
acatatggttctgaaaaaattaagaaaatccagcagttaggccccaaaccaaaccctaatgtttaaaaagggaatgggggtcccctaaccgctggaaagaggccccctccggatgattgccaacaatgagaatcctaaggattccctttgacaaacaacgggtgcaaaaatccaaaaagcagctaaaacgaaagggtaaaaggggcgaaaaacgagaattgccttatgccctaaaatcgctctatactttgaaaatgttatttcgacagaagagacaactctagaaaagcaatggaggaaacaacaagggcacaaataagaaagattctacgcactaagcaaattcaatcgagattatttcccagaaattcaacaatcaacccagatacccaaaacatgctatataaacaaacagtgatacaagtataaagtttcctgaaaacttacatgaagcttgagaactggaagttcatgttgatcgtcggtacaatgaggattggcaacgacgaaggaaaagtagtaagtaatctatggtgttaggaatttttcttctctctgtgaaggctctgagaaaatttggcaagatagcgaaagtaaccaaatgaaatgggaaggctggcttttataggccagaacggatgtgaaacagccgtgatcaggcatcatcatacggtgagaatagcaatcgattcgcattgtgcagatctaatgattgggataagcgcccttcaaggcggttggaaacgtttgagtactcgactgacacccattaaatgcgccagatcattaatggacaggaaacgaattgttgcctgcaaaaagtaaaaactgcaataatgacagtcataaatgcaacccatgcgcccgaggcacgtgcccgttagttaatatgacaaccggaggcatctaagcaagcttcatttacttcacaccaaacgaggcttggggggtaaatgttgcccctgattttgcccaaaatacgtggactaatgcgatcgcgacacgtagatctgaacagtatggctttggtataatttggctaagtctttgcaaacctagagggacggctaaagaggcaccttcgggagaaggcatgaggggaccacgcactcctggagggcgaatctatagcaaagcacttccgggagatatcaaaccccctctgaacagtcatctcgcatttaatgtcgcatggtagaaggcgtattggtactgtcataaatataaaagtctgacggcgtaaccccccttctgcagctattacactatgattaataagcctagtaacgactactttatgagggatcacatcagtcaagaagggataaaggagtatatctatctaacccctgaaatacctaggggacagaccatacatttcctattttgcataagttaagaatgcatgcccctactgaagttacacagaaatatatatgggacaattctaaggattaccccagagaaaacactataaatacctcccaaacacattaaggcggggtcgagaattttgggtttcataagaactaaagagaaaagtcaccaagaacattctctataataaatactctcataaatactaaagactcgtggactaaggctcattaatggccccaaccacgtaaaaatctcgtgcattaaacttcttacaactttcttatat

SEQ ID NO: 354201 - DNA, 603 bp, Cannabis indica
aggcgcgcctctgtaatcttggacggagggcttacccaccatgcgcccaaggcaccctgtcttctatgaagaaccaccgcagcaagctccgcactgacatagtccacgccctcaaccaggatgtcttcgtcagcattgactggctccccagcctcgttgtattccccattgtttggggatgcatcctctgcctcttcctcctcctcagaggaactgtccggacgtacatcgtcctgcccctcaatctcttggacctcagcgtccccttcatgatcctcctccatctgggcagagtggcgtgccgagccacttgggggtcagacgcgtcagccagacgcacagttctctttgtacgagccatcattctatggctatgtacagggtttgaagaatgtccttcgctagaggaaggaggactagaacaaagacgaggatgatcctcgtgcagaagttgaagcatgtcctgaacgattcgatgtctgttgtcccaagactcacctgagtttatctacaaaagataacgcacaagatgagtgtttggtcggaatatcgaacgataaacgagaaaatatgctgactaggagtactcaacgaattaaagaa

SEQ ID NO: 354202 - DNA, 505 bp, Cannabis indica
tccaacattgctgcttgggtccccaagtcgaggatccacatcttcatcctcgccttgagaagtttcctacttgggaatgttttttcccttgtctaggctttggctggaggatatttccttcttagccttggccactacaaggttgtaacattcttaagcagattgctaattccctctaagacaccctaccccatttttggttgggaacttcacgcaccagtgaaatatggatgtgacatcttttaagtcatacaaggctggtcgacgtatcattacgttaaaggctgaaggaacattcaatatcaagaaatgtgccataattgttatgctcgtcggagcttgtccaactgcgagaggtagatggatttgtcctaaaggtgcaactccttgaccggggaaaccatagacaggctggaggcatggagttagatccttgagctggagccccatcttctcgtaagtagccttgatcaaaatgtttgaagaagctccattatcgatcatg

SEQ ID NO: 354203 - DNA, 558 bp, Cannabis indica
ttatatcttgcttcattaaatgaaaattctagtgctactgaaggtactcgtaattttctctaaaccagaatttagtgatggggaggaagcattccaatactattctttttacaagagtgaaaattccaaaaagtggaaggcttggtacgagtctcatcgaccacgtccttgtggacatacaccatttagtgcatatccctatgatgagaaggaagaacaatcctacaactctttctatcagaatagtcttgatgattatagttggaagcctgagtacaactataatcccttatatgagtggagttatgaggaagatatgtcgtttaatcacattgatgattatagttggaagcctgagtacgactataattcattatatgagtggtattgtgaagaggaagattcttggttttcttataactctcagcatctatacaacagttccctcaatgacactattgttgagttacaagcatctatggtaataaattgcgagatgatgaaagacttacttgctgagctgaaacaaattaagcaagaattgagcaagttatctgg

SEQ ID NO: 354204 - DNA, 643 bp, Cannabis indica
gggtaaaggtaaactaacgaacgaaaacttaaaagttagtaagtacgaaaacggaaaacgggactttagtttggtagtcgcccgtttacccttttctcttattttcttttctttttatgttttcttttttttggtttcccaccatataatagattagagaatagtcgaaactaaaatcaccaaccctaagctaaacttttagaaatgctttaatggcggacggtagttggggattaagattaagctacttcgctcatcacaaccagggccccgccaagatttcaaattttttagaaagatgttagaaattaataataataaccaagcaggccattgatagtggccagcttacacttgatgccgcagagaaaagatactaaatcaaatgtcagttacagacattctttagtctgttaagacatttttaactataggctaatggtaaaatttaaatttgatgttaaatcaacactaaaaatttattattattaattttttttttcgaataaaaatcataagatctatcaattaagggcatcttcaatggagaaattcaactaaaaaactactattttaacattaatttttttaattccaaccacaacaccaaaaattacattaaatattatatttttcattattc

SEQ ID NO: 354205 - DNA, 859 bp, Cannabis indica
aaattgagaataattcaataagaaaataaaaatgtttcatagtgatagaggaactgaatatgaattgaacttgtttattgaattttataattcacatggtatgatacacgaaaggactgcaccatattcacctgaaatgaacggtaaagcagaaagaaaaaatagaacctttactgaattagttctggctattttgtttaattcttatgttgtatctcattggtggagtgaaattttaactgtttgttatattgtgaatagatttcctaaatctaagagaaaaatttcaccttatgagatcttgaaaaataggcaaccaaatgtgtcttattttagaacctagggatgtttagcttatgttaggattcctgatcctaaaggaataaaactagctagtataggctatgattgtatatttattggatatgcagttaatagcaaagcatatagattctatgatctgaatgcacatgttatagtagaatctaatgatgttgatttttatgaacatagatttccctttaaattaagaaatagtaggggcgcatctactagaaatgttcctacaattaggaataatgagcacgttgagagtcgtgaaatagaacccagaagaagcaagagagctagaatagataaagactttggttcaaacttttatgcttacaccttagaggaggatcgtgccaacctccaagaagccttgtcttccctagatgctaacctgtggcaagatgtcgttgatgataaaatggactcacttattacgaacaaaacctggcattatacaaatctacctcctggttgcaaaactatagggtgtaagtggattttgaaaaagaaattgaaacctgatgga

SEQ ID NO: 354206 - DNA, 833 bp, Cannabis indica
cttctccccacaaagctcggaagacccaagtacttagcattatgtgagataagtcgaacccccaatctatttgccaatgcctgcccctgagtggatgagattctcttacccatgcacacctcagatttatctagatttacttgttgacccgaaagccttgagtattgctgcaagataagcttcatggtatcacattcattctccttcgcatcaagaaaaacaaaattgtcatctgcaaagaataaatgcgaaattttgattctatctctcccgaattgaaccccaataatgcttccagccctttttggcttcatgaataatgcaagaaagaccttcagaacaaagtagaaaaagatatggggatagcgagtcaccttggcgaagaccccgggtaggttggaaattcccaagtttctcaccattgatgaggaccgagaatgatacactttccacacatctcatgactttttctatccattgttcctcatatcccaaggccctcatcattgttcttaagaagttccattccactctattataggccttggacatatccaatttcagagccattttccttccattagtcttcatacaatgaaggctttcaaaccctattattgcattatcttgaatgagcctaccccccacaaaggcacttcgttcctccgaaattacttgatgcatactttgcttcatttggccagcaaagcattttgccacaattttatataccacattgcaaaggcttatagatcgaaattccgacatttgggttggctttgggacctttggaatgaggcaaatgagtgtatcattaatgtcctttacctgca

SEQ ID NO: 354207 - DNA, 655 bp, Cannabis indica
agatcctggtaaattaatttccaacatgttgatacaaatacaaaagtgatagactttactttgatataccgttttcctcctgaggaagaggaagcttagtagaaatattatggagttaataataaaattacattaatatatttacaaagtgttagccctcggtctcaaaatggagagttgaagggatttaagtagaagaagtgccaattcggatctgtctcttgccttgtgcatcttcggggaaatttataggccgacccctcgcaaggatagtcgttgatggatcttctgttggggattattttaccaggatctaaatttactaccatatatgttattcaacatcctaaatatgaatttctaaaacaatgcaattcaaacaaatataaagttcaagaacccttacattagttgcaacaaaattaaatgactccttccactcagatctccaacccttgtatcccttctgtagcagagtatccacaaaatctgaggtccttcagttgaatggattctttacagtcttacacactatgattaagtaccaacttgctatgcatgggcatgtactgttgggttttatgcccaaaaaaaaacacatttcaatataattaaatttgcttattaatatagatcagaaataacatttaatgtt

SEQ ID NO: 354208 - DNA, 656 bp, Cannabis indica
agatcctggtaaaataaattccaacaagatgaacttgtcaaccttgactaacacatcctcaatgactcctctaggatgagctagtgatcgatccgccaattgtagagttactgtagttgtctttgcttctcccaactgtaatcttttaaacactgacagaggcatcaagttaatgctggctcccaagtcacatagtgcatttattccttcaattctcccaatggtacaaggaatagtgaaactccctggatctctgagtttgggagggagtttcttctgtagaatggcgctgcactcttcagttagagccactgtctcatagtcctccatttttctcttctttgacagaatctccttcatgaacttaacataactcggcatctgttctaaagcttcagcaaagggaatgttaatgtgtagtcttttgaaaacctctagaaatttggtgaactgcttatctagattggtctttcggagtctctgaggatagggtattttcacatgatgatcaatactgattggtggagactgctgtggtggcactgggctatcagtagccttctctactgttcatgttagggttggcactggttgaactttaatctcctcatctactggttgtgtcaattcgggccatcatatttcttaccgctcct

SEQ ID NO: 354209 - DNA, 980 bp, Cannabis indica
gatctagtctccataattgcaataataaatctgtctgaagactagaattcccactagagctctgttgctgagtctgttgttggttctgtgtctggttctgatttctctgttgatagaacccactattccttcgattccctccttgattaaacccatagttgttgttgttttgagagtaatttccaatggcttttgcttcattcattggcaaattattcacatcttcctggcactctgcatagggatgaggacctccacatagctcacaaaccacttgagcttgttttgcttgaacagccatcagttttgttagggcctctacctgggctgtcaacttggtaatggcatccacctcaagcataccagccaccttctttgtttggctcctttcagttggccactgctgattattcagggccatctcctccaacaaatcataagcctcattcgcacttttcctcataaatgctccaccagctgctgcatctataagggttctagtgttacctaccagcccgttgtaaaaattgtgaaccagcatccacttctcaataccatgatgagggcactttctgatgagatccttgaacctctcccaagactcatggagagattcattatccagctgacaaaaattgttgatttctcctcgcaacttagcagactttgctggaggaaagaacttagacagaaattttgttgccaactcattccatgtggctataaaatttggcggcaaggagttcaaccaactcttggctcgttctctcaacgagaatggaaacagtctcaaacggatgacatcatcactaactccattgactttgaaagtctcacataattccatgaagtttgacaagtgcagattggggtcttcagaagggagtccaccaaactggactgaagactgcaccatttgaagtatggcaggctttatttcgaagttgttagcatccactgctggtggtctgatgcatgac

SEQ ID NO: 354210 - DNA, 1198 bp, Cannabis indica
tcctatgaatgtgtttgtgtccaagttcggggttgtgtccctgtagtcaggtcttgggcttcgggtacaaggttgtgtcccatgtctcaagtatggggtcgagttttgggtctcggtcccggttctggggcccaatttcgggtctaagtcccccatctaggtccagatccttagtccaagttttgttccaggttcgagtttggggcctaggtcccccatgtaggtccggatcctagttcacggtctatgtccaagtttatgttcgggtttggatcccgagtttgggtccgagtcgaggtcctagtatgggttcaggttttagtgtggatccgggtcccggtctgagtcctagtcccttttcaatatcaggtctagatcctgatctgggtcctaatcaaagtctaggtctcagaccaggttcttgtctaggtttaggtcctgagtctaggtctaggttcgggtctgtatctgggcctgggtatgggtatgggtctatacccgtgtccaggttagggtttagggtttaggggtttgggttttgggtttagtgtttagggatatagggttttgggtttagtctcggcttcaatttcgggtcacatggtatgatttaaggtttgggagtgggtctgggtccgagtccttatctgggtctaggtccgtgtttgggttcaggtccgagtcttggtcacaaatccaaacacccacctcatgtttaatatagtttgagttctggtacagatttgggttctggtccgggtctggatcttggtccacgttcgattccatgatttacacactgattatgggtgacgtccaagcctcgtgtcttgtgtcctgggtcacgggccaaaatccagatcctagtccagttctagctcatgtctttggtcatggttcgagtgtcaggtggaggtttgcgtctaggtttcggtcttgggtcgtgagtcatgggtccaggtccccgattcaagtcagggtcaaaggtcccagtctgggttagggtcccagtctgagtgcaggtcccggtccgtgttcggtactggtccttgtcttgggtcttggcttggtctaggtttgggtcacaattcggttctcaggtctaaggtctaagtatcgggtcccgggtcccggtcccagtctcggtcccaggtcccggtcctggtctcggtctcggtcccggtcccaggtctcgatc

SEQ ID NO: 354211 - DNA, 690 bp, Cannabis indica
gagtacgttcttcaaagtttcctcatctttgtacattttgcctttctcaatttctagatgtcatttatctgtgatgacaaatgcttcttcatcgttgctttcttgttgatcttgtgtctgtcttgttagttgagccatcatttctgcagcaattatttttgcatagtcaacaaagtcaaattcatcattatcttcttttttgttttctttttgtcgatgtgttggtgttccccctgactgagttccatattcaagcatgtggactttatgttctgtgtcaacctcagtaaaaaaaagtagctgtgatgttgtttttgtgttggggaccatatttatgcacaaaggatgttttgtcatgtcattttcagttgattttaactgcaagtaaaactccgggctttcatcatctgtgatctttaatgctggatatctagactgtaaatgaaactgcatttgtcgggtacttgagtttttgttgcagttatgttttttcaacagtctgtccactaattgtgtatatttgcaatttatttggatgcatatcccagttgtttcaaaaccagtgtactggttgttctcatcccaatgtccattgctttgaactagtacaagtattgatttcatttgtctgcaaattaacagtatgttcgctaaattgtatttttcatgtatgaaaatatttgaataaca

SEQ ID NO: 354212 - DNA, 692 bp, Cannabis indica
aagaggttttggatcaatttattaattatgagactttgtatggtctaattaataaataatataaatagtaattatatttgatagttaatgataattattaaataaatatttttggtatttaatggattgaattagaaaatatggtattattgaaagaggaataactagttgaaataaagtggcaaaattgtaactagagattggtccctttatggccggcccttactgttgattttcgcccaatattttattcttttttaatccatataattcagtcctaagccctagttgaaacactataaaagtaacatgatgctctcatctcatctaacttaactgaaaacttgccttcaaccaaatcatatttagttttctatgtcagacaactagtaaatgagagagttccttctatagtgattttgcctccttcattgttctacatatttgaaccttttgtgatagagtgtcatgcccacacatagcaagtcaagtactcaatcatagtgagtaagacgagggtaaccaaacctgaaggagagaaagagatccaggctcagatcttgataatactctgtgacagaaaggaacaagggttaaagatctgagcagaaggagtcattatattccactccaaccaatgtaaggtattttaaactcttatatgtttaatttcattgttttagagatatcca

SEQ ID NO: 354213 - DNA, 591 bp, Cannabis indica
agaactcaattaaggattaatatatacttactatcttctctgcaatttccttgtcgtaatcagtgacaagttttctactcttggtgcgagatttaatccaaacacggtggcgggggggatctgcaacttcgaggtcctttttctacataacgttataacaatgaaatgagtaccaattaaattgtatagcacattatagcacattaaattttaagcattacttaccacagcttcccgtacgttcaccattccactccgaccacttcgatgtctggattgaatttttgaggaacgttcacgttgcaccttactcaattcctacaatgccaaaaaaatacattagatacatgtacttgtatttaagagtttatcttagtgttaatataattagcgtaccagaaattcaggagttagtcgactttcaacaaatttgcaccaatcagcagcgtcgatctcggggtgcttttcagggacttgtgccagtcgtcccagatcattctctttcaacgcgggcattatgatgtcttttgtcatcctattcttgaagtctttcattaacttcccagctaggatgagacaatcatgtttgaa

SEQ ID NO: 354214 - DNA, 500 bp, Cannabis indica
ttatgtaattatctcaaaaaaaattcatataaaaaagctaattaattttttttggcccaagactcccatttagtttaagacaaacctatgtagatccaaggcatcaaaggactcaactcatattttagtggatggtgccttcaacaaaggccagggcacagctggggtggattaagagccgatcttgaaatttagcaggttatagtaaaaaaattatttttaagcctttttttttgaataaaatgtaaactttcattaacaaacacaaccctccatacaatgaaaataaactcaggagtgaaatctaactcttggataactcgacctggcgagaaacaagacccctaacaataacatggcagctttgtttgtagatcgctaaacaaaagaaacaacaacgttttgacaattgagcaataaagcactacaatcttgagccaaaaggttaaagtcagaaggcatagaaacatcacaataaagagcttgaacacacacaagac

SEQ ID NO: 354215 - DNA, 534 bp, Cannabis indica
gggtttttcttttggttcccttccgagggataccttatagggctaggttccctagacttctgcttttgggtacacgacgaggattcttctggttcctttccaactccagcagtgatggcttcaggatgcacgtggattcctgctgcctccatggctttttgcatggccagcatcacctcttgcatcttttggttttgttctttttgggctgcaatttcagcctcgtgagcggcagccttttgtcacaagagtaccggctctgtgtagctgccttcgtcgtaggcgtcgtactcgtcgaaatttccttcatactcgtcatcgtgggttccttcttcttccttagagcccacattcgctcttgaggcgacgtcctcatcatttgggtcttgagcgtcttgaagagggcgaggttgacgtgtgtttcgagtctctaccatttttgttttgttactgtctacttttagacgcttccttcagctctcaatgaaagcatcaaaatgttgaccgaggtttttggcaaccaatataataata

SEQ ID NO: 354216 - DNA, 629 bp, Cannabis indica
ataagggcccaaaaaaaaattttttgcctgtggcccactttgtttcaggaccggtcctgaatgtagttcaacttttttttattaataaaattttaattttctacatacaagtatataataactaatttataatataaaaggtctacaattaatataatatgtatgattaagaaaatatctttatactaagaacaaaataagagttcttacttcttaccatagaaaatttctatatatataacaataaataattagaactaattagttatatacaaaaataataggttaattaagacttttttacgctcaaactttgacatgtaccaaattatgcctcttgaacttttaaggtcgttaaaaatgccccttaaactattgagtttattgaatttaagaatttttagttccaacatttgtaaaattcgaagggacatgaattagtacatagttaaagtcagaaagacatgtatttggtaaatataaaaatctgagagtatggtttagtatataaacaatcactgaaataataaaattgaatgaaattagacaaaaatccttaaatctaacaatgtgaatagttcatgaggaatttttaacggtaaaaaaaaattcaaaaaacataatttggt

SEQ ID NO: 354217 - DNA, 778 bp, Cannabis indica
cggccaaaaaagttcaaagagcatgatttggtatatgtaaaagtttgagaggaaaaattactaattaaccaaactaaaattatatattaatatatttataaaaatttaagtgtaatgtccatgatcttttttatttgattgtatacaaaaaattattaaaaattatataaaattaattgaagctacataaagtacatatactttagtaattagattattatttgtaaaaaaaaaaaatggaaataaagtacttgggtcttgatatgttgatccaaataaaacacgatataaaatgggtcaagatgcaaaatggccctaaatctaacaattatgttaataaatgtcattttttttataaaaaataagaaaatgtccactctattaaaagtttgatgataaaattacaattataaccttgaataattaagtgtttgatatatttattttgcaaaatagtatatcgtttttatgtgcaattgtatattaaaaaatactaaaaggtagtatattagtttaagattgtggtatattattttaatgtgctatggtatataatgaacgaaatacgaaaattaaaaaatgtggaatattaatataagtttgaggtatagttatatttcactatgaaatattgtctttatgttcattagtatatcatgaaggaaaaaaaagaaaaaaaatatatagaatattaaattaagtttttggtatgaacatattttttccactatactggtggtatattaatttttcactatagtatttatgcttatgattg

SEQ ID NO: 354218 - DNA, 634 bp, Cannabis indica
atataggcacactttatatagaatagatatgacattacttttcttttaatatatgtttagaaaaagaaaaaaaaaataaaaaaaaaagaaagaaagcgatacagttaaaaaaaaggaaaattaatgttatacatgttggtactatcgggtgaggatttgtactccaaattgaatgggacagaaaattaaaaaaaaaaaaaagagtgtaaccttaaaatcttttattatatataggggaattctaaggtaggttatgctctttcttccttatgctatagggaagtctaattgaccaatcataatttaaacaaaaaaaatgtatataaattttatcattgtctgtgtagctgattgttatgcaatggagagagtagaaccacatgcatatagacgtctgggtgggaggtgatatccaaactaggccaaaaatgggtcgtgtcattcacgggcgcgtgagggtcctattttgagcttgtgaaatgccacgttgcagctggatgagtttgtgggctgctatttttgtgcatttgttggttacaaaaaaaaatatattacatgaattttataaaaatattaaaaactgtttacagtaagaatttatcagctcaactttagttaaaaaatcaaaaacaac

SEQ ID NO: 354219 - DNA, 876 bp, Cannabis indica
gagtttaagcatacttaacttgggtaatctcaagatgggaaatcttttggggagtcatcccggaaagcgtatgagtgaggacaaagtacgctaaaaagattcatattaggatgcagaattgatagtcgctcgagagatttctaagaggaaagaatgtgttaacaagtaaagatttacaaggtatcaagatgagttcatgttagtgggtggaaataagaaatgctctaattgaatacctattagaaatgaatacttaacttgttattaagctaagtaagtaggtcagcttaagaggtcccatataaggaatggaaagacataattatgaattatcatgtgttgtgggatcttatgattttgactgaatagtaacagttggacataccgagttgatatgttgtctatcagtatagacaattgatacaataaatgagaatacataattcatatgaaggaatagtctaatcttgtgaaattccaaggttgatatctttggctatgattttaagaattaaagaaggttattgagaaccatggaggttaaagcgaaaaatagtatgttttattcttgaaaggtgggtaacctgagaagatcaatgaaatattagaaacatgctgtgagcatatttaataaaggatatatagattatcttagaataatctcttccctaatgaggtttttattttaaaatgataattaaatgtaccacaggttaggtaccttattaagtgtggtacaagagaaatattagatacttgtttactgaggtaataaggctaggtagcctatcagctagccttaaatcctgtgttgtctggagtatataatgtgtttcatgtctccatgctgagaaaatatgtatcagactggaccca

SEQ ID NO: 354220 - DNA, 504 bp, Cannabis indica
tttttaaaaaaaataaaaaaatgtaaaaaaatatgtagcaaaataaataatatctatcactcacatatttgatgaaaatatatataacttaaaaatttaaaaattcacaatagtctcatatcacggaagtatatattaaaaatatatatttaaagtgtcttattattctaataaattttttatattaataaatcaatataattttaattttttaaataaaattaaaataaaaattataaaaaataattttaatatgaaaaataattaaattaatttttttataattattttaaaaagaagattgaaacatacaaaaatatattttgcaatcacattaaaaaaattacaactaattgggcaagattaagttcaccaatcacccacatagaaaataaatataatactttttatatgaaaaattaatcaaagagcttttttttataattattttaaacttgacaaatattgaaaagtacaaaaatataattctcttcaaaaaaaaaa

SEQ ID NO: 354221 - DNA, 596 bp, Cannabis indica
atgggctaacacagcaaagaactatccaatcaacccaagttttaataaaaccaataaaagttaatgtaagcccaaataaaaagtctaacaagattctcatgtaaactagccccacctcaaccacttcctcccatgcttcatcatatagcattatatatttttgtttacataatgtatttgatggatatgagtatccaaaatattataactgctgtaacaaataaagacatcacaagttttgtttttcttgaaaatttagacagtatgcatatattgaaaaaagttatttacgatttttgctcaaaaattatgacttatgtattattaatatatatatatatgggtatgcttttaatgggtattactcatgtatgggtattttattcttgaccattgaattaattaaatattaaaaaattaatgtttcctattttgttattatctgtattcctaaaatagatgaaactattaatagaaataaaaaatttataaatggaattattatttaaaaaataaaaaacactaaaaaaactaacaaactattttttttaataaaaatcatttaaagattaaaaagaaaaaagtgtatatttatc

SEQ ID NO: 354222 - DNA, 622 bp, Cannabis indica
ggaagttactttccttttcaattttttttttctgattttgggtaagtaaaatcatgtgtatatatattctcaactgcccactcacccacgatcaccactctctcttgtctttcaatttttcctaaaaggtctaatttttattttcaaagtgtgagagtgtttgtgttctagggtttcaaagagatggccaaaactaagaatgcccaaccgtccaagaagccctctcgtggctctgcctctgcatctccaatctcccctcctacgccgcctgcactagtgaccggagcttctggttcgtcctctgctccgacgaaatctgccagaaaatgaaagacccaagctcgaaaatcagtgatcaatctcgcctctccacctgtcgttgcttctccaattgcttcttcaacacttgggtttagtgatcatgatgaatctcattcatccgatcacacattggataagtcctcttcttcgaatagtgctcctaatgtcaacaaagctttggtgactttacccacggtgagttctcgaacaaattccaagttttccactccgcaaaagcccgaagtggttcaacctaaaattgtatccaaagggaaaaaggtggtttcttcatcttcaaagg

SEQ ID NO: 354223 - DNA, 561 bp, Cannabis indica
tttgcagccagttgtactaatcaattcagttttgatggctattcatgcgtactggtgtcaaatattcatcttgcctaagaaagtgattaggcaattggaagctatttgtagggcttttctatggaaaggccaagcttgtgttacaggtccgggactgattgcttgggactctctttgtcaatccaaagctgaaggtggacttggttttaggagaatccatgaatggaaccaagctgcaatggggaagtatatttgggcaatagctcaaaagcaggatagcctatggttgcggtggatcaatagtgtttatctcaaagaaaatgattggtggagttataaggcttcctctcagagtagttggtattggaggagtcttgtaactctcaaggatcaatttcgagacattgcagggtcccagttttgttctcagcagcaacaatatcaggtgtctcatgggtatgcccttctctgtccagttcaagggaaagttttgtggtctcagcaggtttgggggagattgaacaccccaaaacactcttttatttcctggttagctattca

SEQ ID NO: 354224 - DNA, 605 bp, Cannabis indica
cctggttagctattcagggaaggcttcgcaccaaagatagattaaggaaaatgggcatgaatgtaactgagcagtgtgaattttgtgttacacagcaggagagtgcagagcacttatttttccactgcaatactgctgctgtttgcttgcagatggttaaaaattggcttggatggcatgtcaaagctgattcaatgctgtctctcaccaggtggcttgggagatcaaagataagtcggttcaggaaaaattttcttgctgccgggcttactggtttagtgtataatttgtggaaagctcgaaatctctgtgtgtgggaaaagaaaaatctgactgttgcagaagtgctcgaaaggaccagaagtgatgttcttcaaagagttcatgcaatttggccgaaaaaggtgtcaactgaagacaccatctggtttcaaagtttatgatcgttagtcgttgcaactgttgtgtgcacagattatatagattgaaaaaagaatagtgtgaagagtttataattgtatagcaggtttattattttaggccctttgttgggtgctatttgattgtacaaaatagttttgagcaataaaatttttactgattca

SEQ ID NO: 354225 - DNA, 689 bp, Cannabis indica
ttcatgagatccataaaggctgccggtgcatttgttaacccgaaagacataaccaggaactcgtaatgaccatacctggttcggaaggctgtcttcggaatatcctcttctcgaattctcaactgatgatatccagacctcaagtcaatcttagagaataccgttttgccctgaagttgatcaaacaaatcgtcaattctaggcagaggatatttattcttaatggttaacttattcagctcccgataatcgatacacatccgaagagttccatctttcttcttcacaaatagaactggggctccccaaggtgacacactaggccgagtgaaccctagatccaacatcccttggagttgtatcttcagttcttttaattcagcaggtgccattcggtagggtgccttcgaaacaggttctgctccaggaattaaatcaatgatgaaatctatctcccgctgaggtggtaacccaggcaattcctctggaaacacatccaggaattccttaaccactttaacctcttcgggtccaagtaacacgggtttactggaatccactaccactgctaggaatccaacacatccactacgtagcaaatccctagctttcaatgctgagattcttggaacacgagaaccttggaccgaaccaacaaagacaaatggttcctcattctccggttcaaa

SEQ ID NO: 354226 - DNA, 768 bp, Cannabis indica
gtcgtgatcgatctagcggctcgagctcgtcatgtgctgtaccttcaggagaggtttgtcagtgatgagtttttgtcgaagattgacaagtcatcttcagaagagttgcttcctcgtgctgcggagttagcttcgcagttcatggctacatttgcaaaggcttttgctgtagggcccaaagaagttaaaatcgcgaagaagcatattgctcagcttcaagaagacgttaagaaactgaagaaggatgcgtcttccaaagccaaggaactagaggaaattcgtaaggccaaggaacaggtcgagcttgaagccaaagcgaagattgaagagatgtctcgcgacctggaaactgagaaggagaacgacaagaaacagtacgaccaggcggtttcagactacatctatactactatttccaagattctagacttcgacttctcgattcttggagcgaaagcaacagaaatggccgaggctcttcgcgctatgtcacccacaccaactcaaggtggtggagggaacattctcgaggagactgaagtcgcggaggtggaggaggttgagaacgaggtggccagtaaaggcgcggatgaatctgttcctgctgctcccaatgcttgatttttctcttctatgtttgaactatttttcttttgaatttgctagttagttttggacaaattcatatcctcacggggataattaatgtttaacattttcgcagtacacgggtactcgcgttttttttttatatatatattcgacttt

SEQ ID NO: 354227 - DNA, 528 bp, Cannabis indica
cactcggcaggggatcgaaaaaaaactaatctaagagggcatactcagagatttcattgtaagagctctaagagaagaatcattgtattctttgttcttaagtcaatacaaataaagagtaggctattaccgaactgctcggggtcgaacctctttaaaaactctgtgttctttatttatcttttcatactacatctaaattatatcatttatcacttacaattaagactcattgtcgttggctaaaagcgagatcaacattttggtgctttcattgagagttgaactcaagctcgctatttacttcaataaacacgatggtgatgcaaacccgaaagaggcgtggtcgatctcgtaaatccaccagcagtggatcctgcactgtaaaatctaagaaatgtaagggtttcaccggccacgaatcctgaacaaccaattgttatatatttgttatttaacaaatatataatgaagattaaaatgtagaatattctatattaatatgaaattaatatatattatgtgttg

SEQ ID NO: 354228 - DNA, 1273 bp, Cannabis indica
tccttggacttggcaacttttggagtataggggtttgcaaggctagctcctcagaatgatcaatgacctcccgacaggtgcctttccttagaggagcacccctcaccgcctttggacttcttggctggaggagatgcgctggaacttctgccaattctcttcctcagagcgtcaagcatcttctgagacatgtctgcacagaataaaaacaacatggttagagaaaacaagacgaaatagtatgcaaggtgatttcccgaacaagactcgaaagtccatcatcacatgacatgcctcttatttcagacataatagctttcccttttcaaagcacgggagaaggcggccgagtaggcgagatgggctccctaatgcaaattgcatgttcaataggcctgggctgggccggaagtttcttcctcctcttgagcggagtcacctgctcttcatcagcctcatcttcaggattcaagggctcctgagcatactacttggcccttgcacctcccttcaacttagcctcgcgcttcaattaaatcagctcattctccagatgagctcgttcagcccgtccaacatcagatttcctcttcctccccttcaccggtttgggaatgaaatccttcggatagagcccgtacttcacaaagttatcctcggaggtcaactggatgatattccggtcttcccccgacagtcgagcaagcctttgagatatatcccggagagtaagagtgaggggaaggcggtgatatgttagaatctgttggaaccgggtacgagtgatgcccgcgccatccaccatgaagtactcatcaacaaaatgcccaattttgctgatggccgtgtcatcggtgcttgtcaaccacttgaagtctggttgagagaaatagaagtaccccgacctgccttccttaggggtggacttcaaatcaaagaaccagctgacttcgtgaggagaaggcataccccacttttgggaagcgtagaggtcgaaaagggtagacagatacttaatgcccttaggagtgaactgggccaggcagaggccgaagaagtccgccacattcttgaagtattgatgcaaatgcatcaatgccccttgctgggcatgggcacccgaccaagcacacatccccttttcagggtttgtggcactgttattgtgggcgggaatatagcagtccaatttgcccaggtatccaccttggtcgagagtccgcaggcgcgcctcagtaagcctggacagagggcttacccacctggcgcccca

SEQ ID NO: 354229 - DNA, 505 bp, Cannabis indica
aaatattttttatttaatggtaagatatttttgcatttatgaccgattgtcttaccttgtatatttggatttagttgatcttttcttggttagaaaagatgctttaatgctgaaccttcctttgtttggaaatatcttgtaagagaatcttttcgcttatggaaagttagtttataaaggaaaccttgattaaatgtcttatcctcattaaattcgattgtatcttgatacaatcagaatatataatctgtttatgataggaatcaaggtttgatagaggatcagatccgattatagcaagtttcctttttttgatctgatttgtagcgtcagcttccgattctgatgctgcagatcgtgtttatcgtaggaaaacttcgtacagctgtagattcgatcttgtggctgtctctaaggtttctatgttctataaataggacctagagagcagtcattcgaatcagctcttccattattcattttttgcatttatcttatttgagag

SEQ ID NO: 354230 - DNA, 968 bp, Cannabis indica
ttactaaattactaaaaaaaataaaaaataaaataatgattttgaactgaggacatttactaacatagtcttatgatttagggtcatttgctatatttttttgaaatgaggacataaactaacatagtcctataatttggtgccatttactataatttccctaaaatattttcaatataaaaatatattttattaatttcatgaaaatattaatttaaacttaatttattttaaatttaagaccaataatttcaccattaatcagacatcttttcatttgagctctcacttgaatcttcttgtatatttttagttggcgagattggtggagtaataggttcttaaaatttttcttccatcctttgttgctccactacatcttcctcttcaaagaaaggaagaaaatcatactcgtctacttctgtgttccaattccaataatcttcttcatcaaactttacgtcgcgactgatgatagttttgccagtaattgggttgtacaacttgtagccgttggatcttgaatcatagccgatgaagatgtacttctcacttttttcatcaagcttcgttctcttctgatcgggaacatgaacataagcaatacttccaaagactctgaggtgagaaattccaggttttcttccactccatgcttcttgaggtgtcttctcatgtacacttcttgttggagagcaattcacagagtagactgcgcaagctatcactttagcccaaaactcctttggaattcttttgctttttagcatgctgcaagccatgttgagtatggttcgattcttcctctctgccactccattttgttggggggatcttggcagtgttaatggatgacgaattccatgatcctcacagtatttgttgaactcatttgatgtgaactcttatcctcagtcaaatctcatagccttaataggaagaccactttctttttcaactagagcttt

SEQ ID NO: 354231 - DNA, 593 bp, Cannabis indica
caaccatgtcgtgaaacatatttcttagttcgtgtagctgagcctgtacggctgggctaacctgctcggtattttggtcaatttgaattacataagcatctttctgagcaggaatttgagtacgggttccgggctgcgagattgtcgtaacattctgatcgtctagtttcctccttttgttcaggtcattccttaggtcatgggtcgcccccaacctctcgaatacagaagtgcttggctgcctcagcgattgattcgcttggttgacgggtggaatggcaccatttatctggttggaaccatcaggtatgacttctcctgatgaattactagacaaggtctgcccgcctaccgcttcgcccatgagtggaactcgtgaccgcagattgggcggctgaccatttgcagtctgagaagcattcatcgctggatcttcgtccgtctcacccaggggaatgatgttcggtagttgctgacctacagtttggtaggctttttcgtatcagcacggtagcctgccgactatgattttcaatctctgtatggtgagcccttaatgcttccatctctctatctctccattcgacgaacat

SEQ ID NO: 354232 - DNA, 986 bp, Cannabis indica
tagctcttatcacttattttataaatgaatatttgggttgagcgtaactcatatcacttattttataagtgaaaagttgggttgagcgtagctcatgtcacttattttataagtgaaaagttgggttgagcgtagctcctattacttactttgtaagtgaatatttgggatgagcgtagctcatgtcacctattttataagtgaatatttagctcatatcacttattttataagtgaatagttgggttgagcgtagctcctattacttactttgtaagtgaatattctggttgagcgtggctcacttgttattacttttactttacgtttttgagctccaaaatataacaaacacttaaaacaattgacacaggtatttacgtggaaaccctttcgggaaaaaaccacgggcggagcatgcgaaaatccactatgtagaatgacagtgtacaaggggggcattgttttgccatacatgtgattagaaatggtatttcttaaggtgtatggcattccagctatttcctatgtttcttccatctgctgctcggagtttgtatgctccttggccaactatctttgtaatttggtaaggcccctcccaattgggtcctaacttgcctgctccttcttccttcgtgttttggaacactcgtcgtagtacccattctccttccttgaattgtcggaccctaatgttcttattgaaatgttgggccaccttttgctggtatgctgctattctgataagtgcttgttctctcttttcgtctaacaaatcaagttctgtgttcatggtctgttgatttagatcatccgtggagtgttcatatctgatggttggtatttcgatttctgctgggatgaccgcttcagttccatatgtcaatgcaaatggggtctctccagtcgaggtctttgctgttgtccggtaagaccacagtacccctggtaattcatctgcccatctccctttggctttctct

SEQ ID NO: 354233 - DNA, 950 bp, Cannabis indica
ggtaaaatatatccaacagttgtaaccatcccaatttcagttggaaggatacaagtcaaaatcaagcatctgggagtcaatggaggcctgatcaataacataatttctcttgagaattccatgaaaattctcgtcgaatttcaactagagtttaggacttatttcacttaggtgataggggaattgaaggacatgaagattcaattaacgatgttaaataattcttcatccattcaagagtgtggtaagcttcccgctcagcctctaatcactcccaaactggcaacatatggcacaaacctccacttcttcaaagtctaatctcaaggggttaaggccattactactcgaagtggtcaaagtacggtttcaccattacctaagaccaatattgtacaaatgcccactctagatgctgccatgccacaaagaattccagtaaaggtgcccttccctcagctttaaaatctactaggaagttactgggaaatcaaggtgaaatcctaaaaaatttaaaacaagtgaatatcaacttgcctctcttgcatgtgatcaaacaagtgttggattttgtaccctaaataaaacccatttcaatataatcagataaactaattaataaagatcaaaaatcacattttatgttgcacggttcacatgatttatttcatgtttatatttaatgtataaattcgattaagtccataacatatgtatttgttcatgattatagtgttgtcagcacagtggaatataatcatgattatatgttcaaaagtttaattccttgaattatctcactggatttagactggcatgataatcagcgataggtatacttacaccttggataagtgttatgtccattccagggcattgacaaagtttaccaatatcggatgtatggagtatacattagaaggggcagatattgaacttggattagatat

SEQ ID NO: 354234 - DNA, 1393 bp, Cannabis indica
ccaaaagttgatgaacgagaaatccctcatgaaaatgaggaggatcttgggactcaaccgtgagaatagagatcacttgctagaaatcaccaatattcttcccaaacccataaagcgaggactcgtacataccttgatgggggaaacacgacaaactgctctcgggaggaaagaacagagcgtaaagaagcaagtgtgactttgtggcgatccagaacccatagtcgatcaactcgaagaggagaaagtactcaatgagctaatgatcgagaaagtatgggaaccagtagatccgcgagccactcaaagataaagttaatgagtaagacgcgatctatgagtaagacaagatcagccagcaattactcccagccggatctgcgagagcacttgaattggaagaaacctgacctttgacaatagcgtggtccaaagcaagaggatctaatccaattgtggataaacaagctgaaggacaagttcaagagatatcaagtgggggaattagggaaactgtctggatacgactctgacaaggagcttgagttgtatcacccaaatattatgaataccccatttcctttgggattcaaaaacctgcatgtctcgtcttacaacgaaaccacagatccggtctcgcatttgaataactttaacacaataatgcgagcgagtaatgtgacgaacaatctacgttgtattttgttacccacctcgcttgttggagcggcgagtagctggtttaacaagtttactcgtcattcaataacttcttgggagcagctgtccaggaatttcaagaagcaatttcaggctgttagggataggcgacccgaagcggcctcactaaccaatattaagcagcagcctggtgaaacacttaaggcgtacttaagtcgttttagcacggctgccactagggttagaaattttgatgacaacacgtaacttacaacccttcaggcagggatctccattgttccattaaccgcaggggcgagttgtagggtgatttacaaggacgtccggtaagaagcatcaatgagttcaacgagagggctcaggtatttgtccagaaggaaaaagcctaaaaagaaatgaacttgttgaaaacaagctcgggaggtaaactcagcaatgtctcaacaggaactgcttccatgagaattgataactcgggggcttctggtccgagaagaaaggacaaaattaaggaattgtcgaaggatagaaagaaataaaagaagcatgacaaatacgtgctagtgtatactatttataccgagctcaatgaaactcgggagaatatttacctcgcacatgagcagaaggtagccttcagcaaacccgagcctatgaggaatttaaggagcaaaagagatcctaacaaata

SEQ ID NO: 354235 - DNA, 592 bp, Cannabis indica
cagaagtagccttgccttagaattttctttgataagccgtgcagcttcattttgtgtgacgcatctgagtaatggcattgagaatcctcttctgtacatgaggataggctgctattggcgtcatccagttcggggatgtatcgatcatttcgatttcttctgtgcctgtgatactaggctcttcaagaaattggatcgggaccaggtttgccttgtcacttatgtttctactcgcgaatcgagctagcacatctgctgttgtattttcttctcttggaatttgcctgaggctgtagctttggaattgtgcgagcagatcatatatttttctcagatatgctatcattttttctccccgagcctcgtattcgacagatacctgatttaccactagctatgagtcactgcagatctcgatgtgctacgccttcatttccttcgctagtttgagtctagcgattagggcttcgtattcggcctcgttgttggagtctttgaatccgaatttgaccgctgcatgatggtgttgcccccaggtgtgacaagggctattcctccgccggatagctgatctgtggccgacccatccaca

SEQ ID NO: 354236 - DNA, 650 bp, Cannabis indica
cgactaggccactttccagaaacgcctaaaatttgaatgtaagctagtcgcgaccagccttagggcaagtcacgactagctcacgatttttctataaaatcccaattttttcccccattcaaccctaaaccaatttcaaatttttcttctctcagccgaccctaacctctcccattcgaaaatttcaaaattttccttcccaaatcttcaattctttcatcttcaaaccaatttctcaatcccaatccatcctaaaacctaatttctctaatcaatttacactttccatcaaaaaccacccaaatactcatcaatttcaccccaaatccgaaaatacattagttcttcttcttcaacctcaaactttcaaggacattcaacaatggaggtggagtaaaggcgtcttcgggtttgtaagtattattctctattacatttgaaaaattgcatgaggattttgagtatttttgtgaaaatagtgattattcttggaatcattggttgacataggaattattaggtttatagtgtgattttggattgtgaatgtatttgtctgaattattttggttagttttgaatttttgggatatagaaaattaaggggaggtgctgcccaatttttcttagctttattttgaaaaaaaaaa

SEQ ID NO: 354237 - DNA, 1051 bp, Cannabis indica
tattctcccttattacttttcttgctcagtccttgtgactcacgagtgctctatggtgcaggtaagggtaagaaaaaggaaaagttagagcagccatgaggtggtactcttctccagtaatgtacatatatattgaccctgccggcctatgtgccaagttgccaagagttattttaggctatatttactgtgtattttgacttgttgttgtatataatcattttgtaaaacttatataacaagcatctctacaacacagttttagtgtcgttataatgttcgttactagggattattttagtgaagtttttaatattatcacagattttaataatcaattaatctattagtacaaaactagtttataaaattacacacttgacgtccatataggttagagcgttacactcgcatggtagatgtaagtagaacttatcctaaattagctagtcagtgtaaatctagttcactgattaatctttggacattaaataaatattttcatcatataatcatataattataaattaaacacatgagtaatatgatttactaggtcaaaataaattttatattctttattcataataaaaggttacaaatgaattaaggttttaattacggcacaaaatcctaacaactccatcaacacaaaagctctagttttcgttctcatttttacatacatatgctctgtatctatatgtaacacatacattttggtgctaattttgtaatcagttttcaactttatacttaagaaactcgttagagtctccaaatcttgagtatcaaaatcatgataaactccaagtagatgtaagtcattatcgctgaaagggaccaaactactataaaatcgatgtgttcatcactctttttactggtttcatattaacaattgccgcttatcgggacaacattgttattggtcatttcacgagtcaataataatatgtaatgaccgctttagcaatttggattagtaaaggcaattacaactaattttattattttattattatttgtgaattaatttaattgtggaccc

SEQ ID NO: 354238 - DNA, 688 bp, Cannabis indica
accttaggcattcttgctgccacgtgtcgtaatcccaatttttgatagatacgagtatttaaactctttgatacgaattagctcttctcatttttccctctttaactgaaattcaaagaaacctccatatcttgtcctgattcttactgcttcctcttatatttttttaatcttagaagtgatcgagagcaatcgcagagacaaaatcatcaaaactaaaggttagtttcgaattcatttgcatttttggtttctgttcaaaagataaaacagctttttctaggtttttgtattttgaggaggggtttgagaatgcattcttgtaggaaatgtatatagggctatgtttttctgtgtaggactgggtaatcccagaaaaatagacctgaaatttgcataaccatgaactttaggaagaatgtttgaataatcgcatctttatcttttgaatacacgcgggtatttggatgaacaccccgaatactcacatatctgctcatcctaggtttcacagagaatttatcacttctagtcgttgcttaaaaccttaggtatttatactctgtatattttgttgcaggaatattggttaactctttcaaatggtgggcgtgtcgcaatattccaatgctcatacgtgcgatcgtatgttccttgaggtactgcgatacgcccagccattcgtggc

SEQ ID NO: 354239 - DNA, 575 bp, Cannabis indica
cattcactgacccaaagaaaattacaaaatcacatattccagctgaaaatgctccaattcgaattgaagtcccagaaggacaattaattaatgattctaaagcacgtttgaaacgtggtagaccagtcggttccaaagataaaaatcctcgaaaaagaaagggagcaaataatcaagatggccctaatgaagaggctgaaaatttcgaggaagatgttgacataaacaaatctcttgaagagattcaggtacctgaaaatattagcaataatgagatctcaataaattatgtcaatacaggaaaagaatggaaccgactcgaagtaattgtcgacaatatttttgcttataatgtagcgctagaaattatgaatgaaaacgaggatcttgaacctaaatctatcaaagaatgtcaaaatagaaaagattggccaaaatggaaagaagcaattcaagcagaattgaattcacttgctaaacgcaaagtatttggacctatagtccaaacacctgaaggtgtgaaacccgttggatacaaatgggtatgtttacgtaaaagaaatgagaaaaatgaa

SEQ ID NO: 354240 - DNA, 1432 bp, Cannabis indica
aggataacttcttcttgttcgtgctgcgctgttcgggcataccactcccgagctttgcccgaatctccagcaacatgcggtcctccaatgatgacttgcagatgcccatctaccggtggaggtagtaactcttggttattgtcattcctctgaccctgatcggtcttgacatacttctgcaagtgtgggttgtttttccttattaggaattcaatttcccgattcaggttctagcattcattagtgtcatggccatagtctctgtgcaaccgacaaaactttgtcatgtccctcttgctgacatctttcttcatgggcccgggcttcttatatggggccagtgactgggttgacatgtaaatactttttgcatcttcagtcaagatagtgaacgcagtgtactttgcttgattctcccggggagcttgttcatatttgccagcaaactttctcgtcttcccattcccttgcatgtggttgttgttggaacgcttaccacttgagcttgaattatttgggtaatggggaagttgggcgtatgttcaagtagaaggagcctttggcttgccaggcttttgctcaccttctgctcgttgaatggcttctttgagcttgatgatgccttcgacacggtcaagaaaatcactcattgagtctaccggcccattcttccttatatccttccaaagttcactgaggacttcgatgcaccccagtatcgtggataactttccatcttcagtgacccgtgaaactttggtcacctccgtcatgaatctgttgaggtatgaccggagaggctcgcctggtcgatgcttaacttcgaccaagtctcctagatgcaatggaagttggcgtgaggaggagaattgtgcatggaattccgaagagaaggctttgcatgaaccaaactttccaggggccaacttgaaataccattgctgagcggcttccgacagagtagcaggaaaaattctgcaacacacatcccctcgtactccttgcaaatccatttgcatttcgaaatacttgaggtgggagagaggatcttctctccctgtatacatcttccatgttggcaatttaaacttgtggggcagcgccaggagattgatcttgggagagaaaggtgtgtcgcgtgcccggtctaactcaagatcattgtttctctacccagccatgccatggaatatatttttcagctcatctagctgtgcatgtacggcttggctaacttgctcgacattctggtcaatttgagtcacgtctgcatctttttgagcgggaatttaagcacgggctacgggctgaatgatcgtcgtgacattttgatcgtctctcctctccttctgttcagatcattctgaggtcatgagtcgcccccaactttcgaatacagaagcgcctggctgtcttagcgattgatttgctt

SEQ ID NO: 354241 - DNA, 666 bp, Cannabis indica
tgagaactctagcatgcataatgattatttgttattttgcgatcatttatttatgagaagagagcacaaatggcatgattatgtcataacatgcatttaatggttattgctcttgttttaattagctttaagaaatccaagaacctatgccatgttgacgctgagcggaactaaccacaagtagtgggtagaatctctcatgatgaatttgactcttatgagagtggatttggccttgagaattgatgcacctccgaaacctactgatgataccactgaaaaggatagaaattcctatgaggattgggagcattccaatcgttgttgtctgatgcttatgaggtatcacatggatgagtccattcgtgatagtattccccaaactaagattgcaaaagattttctcgatgcaatcaaggagaagtacaagaaattctcaaagaatgagaaaaatgaatatgcctgattttattccattggactaattatgttgattcaggtgacattagatttcacattgaaaaactgatgggttgttagcaaactgatgggattggatcttggtgaggattacatgttgtggtttgtgatggaaaccattccctctcagtttgattcaatcagatcaagatataatgctcaaaaggagcaatggaccgttgagga

SEQ ID NO: 354242 - DNA, 1465 bp, Cannabis indica
ccatttgagcttgaattgcttgggtaatcggggagctggacggatgtcccagtagaaagagcttttgacttgccaggtttttttcaccttctgctcgctaaataggctattcaagtttgataaaaccttctgaacggtcaagaaaatcacttatcgagtccactggtccgttcgtccttatgtccttccaaagctcaccaaggacttcaatgcctcccagtatcgcggacaactttctgtcctcggttacccgtgaaaccttagtcgcctccgtcatgaatctgctgatgtaggctcagagaggctctcctagtctttgctttacttcgagcagatctcctaggtgcaacggaagttggcaagaggaggagaattgtgcatggaactctgaggagaaaaccttccatgagttgaactttccgaacgccaacttgaaataccattattgggcggcttcccagagggtgacaggaaaaactctgcaacatacatctcctcgtactccttgcaaatccatttgcatctcgaaatatttgaggtgggataagggatcttccttctcagtatacatcttccaggttggcatcttaaacttgtgagggcaactccaggatattgatctcgggggagaaaggagttccacgtgctcggtccaactcgagatcgttgttcctttgactggccaggccttggaacatattttttagttcgtccaactgtgcatgcacggctggactaacttgttcggcctcttggccgatctgaatcacatcagcatcttttttagcgggattttaagtgcgggtttcaggttgcaccattggcgcgtcaagctgatcgtccactcctctcctcctgtttagatcgtttctgagatcatgagtcgttcccagtctatcaaatacgaaaacgcctggctgcctcagtgactggttggtttggccaatttgttaactggcaccattaacttggttggagttattaggtatgacttctcccgatgaattactagacaaggtctgcccgcctaccacttggcccacaagtggaacttgtgaccgggaatttgacaactgaccatttatagtctaggaggtattcatctttggatcttcgtctatttcgcccaagggaatgacattcacaggctgtttcctggaagtctaataggcttttcgtatcagcacagtggcctgccaactacgatcgtcaatgactgcttgctgagccctcaacgtttccatctccttgtccctctattcggtgaacatgagactctactcttcaaacgtgaggttcaccgcagcatggagttcctcctaatcatgatacagggtgttgatatgaccctgcatgattccaagagcagcacggaggttctggactttagtgtcatctccaatggttgtttgaacattggtagcgggtagaacggatgtactatgaatgccctggttggttgctg

SEQ ID NO: 354243 - DNA, 466 bp, Cannabis indica
tcaagcactttcaaattatgctatgagtgttttcttgttaccaattgatacatgtaaggagcttgaacgactcatggcaaaaagtttgggtggagcaaggattctaatcaaaataaaggtactagttggatgcatgagttggagtcgtatgtgtcgtcacaaagatgttggaggttcgggattcagagatttaagagattttaacttggctcttcttagaaaacagggttggaggttatggactcatgattcttctttggtagggcgtgtgtacagagcaaggtactatcctaacaattcatttttaaaggctgagtttggtgacaatcctagtgtaacgccctgtccaacagggacgccacgtgtgtgtaatttattaaaatattgataattatataatatgtaattatactaaaagtgtgggtaattaaattttgataattaaaatttaacttttaatctgttt

SEQ ID NO: 354244 - DNA, 587 bp, Cannabis indica
acagcctcatgtatgaataaagaactttctaatatttatatataattgtgagtcgacagactcggtaagaaaagcatatcataatcataaatatatatccagaacataatcaggcgcccatacacctaatcacgatctgataactgagtcaggatcgttctcgacaaggtatgactaactgcgaatccagtctattctcagtactctagtcatactgatgtggtagcagttaattcatactatcttgaggcctatcatatggcatctctgtgcaactctatgtacacttcactgataccttgatatgctaatctgatggccattgattttcctaacatatatttattggtacctcggtgaaactctacgtacacctcacttataccctgatatgctattctgacggcaactaacatgtacgctaaatatgtatactaatcttacctcatttccaaattcaggtgtgtcagtctacctgaatggaattgctgctcgatgatttacaggcccctaagtcacaatatttgtaaaactggtgagtgacacgctaaatcatttttcggagacttaaatgttggaaattattt

SEQ ID NO: 354245 - DNA, 909 bp, Cannabis indica
tatacattaaacataatcatgaaataaatcatgtgaaccatgcaacataaaatgcaatttttgatctttattaattagtaaatctgattatattaaaatggattttatttagagcataaaacccaacaccaagaagacgcactcatgtggtgggagttagtgtccctcacccaagacgtcaccactatgacctggaaagaattttgggaattgtttaatgccaagtactataacaagataattcccagttctaagtggaaagaattcactgatttggttcagggagaaggcatgtcagtaacagaatacacaacaaagtttgattgtttagccaagttagctgcgggtatagtacccatggacttcggtaagaaaaagaaatacttggtgggtttaaatgccaagattaaacatgatctggtgattaccacaagcgatacaacgacttatgctgggattgtaaagaaggcgcttcgagctgaaggtgtagtgaaatttctttaggagccccgagagactccaagtgttagtgggaccaccactcttcctacttctgaatatggtagggatggtggtgactccaccattgatcataagagaaagaatttccatacatctggtggttcgggacaaaacaaaagattccgagagaaccaaggtagaggaggacgtcagggttattcttaccctgagtgccctcgttgagtgcaactggaaaacatgcttctagtgtggtattgatgagtccatatttatcttataaatatgatcaatttatgtattaatattcttaaattgattctttaaattattgattagtgtgattttaatttgttaggttatttcaaagactattcatgcatttagagtcatttgaagggattctagcatattttggtagaaaatagt

SEQ ID NO: 354246 - DNA, 598 bp, Cannabis indica
gttaacagggagaatagcagcacttagcagactcgtctcaaaatccacaaataaatgcatactactcttcaatgtactttaaggaaatcacaaatttgaatggacagcagaatgcaaaatagccctctagcaattaaaagaacacctagtgaaggctccaatattgtccaaaccaattgatggagagtcgtcgtttctgtacctggtagtgtcaaatcataccgtaagtgccgcattagtgtgagaagaaggaaaggtacaacttctagtatattatgtaagtatgagactgctaggcacgaagtccagatatctaatgatcgagaagctttccatttgcttactgattgcttcacggatgttaagaccatactttcatgctcatgccataagggtactaaccaaccaccctctacgtcaagtgttgtaaaaaccagagtcatcatgaagactcctaaagtgggcaaaggaattgagtcagtttgacatacaatatcagcacaaaattttgattaaaggtcaagctttagctgacttcattgtggagtgtacagtgataaatgacgatcctgaaatgttagtctcggagagagaagtc

SEQ ID NO: 354247 - DNA, 1104 bp, Cannabis indica
cctatagaactagctagggttctggaattctttctctttttaaatcaaattacagcaagttttaagtgatctcaagctctacgtaatgtcccaacactttgccttttagttttttgaaattcaagttagtgaatttgcatgattttgggtttttgagttctgtagtagatgttgttgtttgatattgttttctggagtttaattatgatatattatattgatttgagctagttttgatggctgttagtagggttaagcaagttttgagtgttagaactcaaaattggtgctttaatggtgtcttttaattctaagcttgggtagttgttttgttgcttggaatatgtctattgggatataacatccaggtcttgaaggtttggtaaggtttggaatcgatttggttgagttttgtaatagtttgggttttctggagtaaaccggttaactggttttacaggacctgtaaaactagttacctggatttgctgctgggttcctcaaaaaattcgtgttgtcgatttgtgctagtttcagagctttggttggtgaattccctatagtttaggattttgccatgttaagtttcagtagataggattttggtataaaacctaagtccccggttaagatttagcgtgtcacttatccatgttgttatcgatgtgatttaacagttgttccactcaggttggccggcacacctaaatttgaaatcaaggtaagattagtataatgtcattcatatgttattacatatttagcatacatgttggttatgccttttagaatacattgaaagtggtaatagtatacttagaattgtactgattactgataaatgtatattggctgaaatactgatcgatgttgtcaaatcaatatggatagagtatgactggcatattgagtataggctgacattatggtcgattgtattgttgtatgaaagttctagactcagtaccttgtgggacacggggttatggttatgatcgggtgtgtggatgcctggttataacctgggatattattatgttttatgttatgcttttcttactgagtctgtcgactcacagtgatatttccatgtgtaggtaaggg

SEQ ID NO: 354248 - DNA, 962 bp, Cannabis indica
agagagagagagagaaggattcgaaattgaagagagatagaaggctcaaaatctgactaaaaggcttaagtgcatcaactgtcggttttgagtccatcactatctatttataggaatccttctagattaaggtttgaattattagcattaaaaaattgataaataaatgtgttttatccaaaatttagtgagcacattagaggaagacacgtgtcgagctgggaagaacgaagaactcaaacacgcaatcgtaagtacacttagcatggaacaactcgttagaaacacaatttgcagagtatgtttataactcggctggctgaatagtcttctgtgagacagaaacgtacgaactgctaacttatgtatcgacgagaaaccatgtgggtgcaagtgtgcatgacgaggcttcaatctcgtcgagtggaagagaaacgataacgataaaaacacttagcatatattgcatggtatacaaactaagtataaacagtttggtgaatcaagatgatagacagcgaggcgtctatctcgctgtaagatggcatgcacgagagaaagatcatcgcgacaccagaaaatgtagttatcagaattaaaagcaatattaatctcaggaagtcatatgacgagcactagctcgccatcaaagttaacccggctccattcctagcaaggcatccacatgagataaggcttaccgtatatcgttaaatatgcattcatctcagcccaatcaaagcaggatactcacaactgtgtggattctaaataaaaactgcataattggtaatcaaatcccatgatttgagggaataattgttgtaagaattatagtcaacttttgtaatttactacccactatgtaattataaatagtggtagacaagatcaaaaaggaggacgaaaaaaaactcatacgagagaagccctgaaaaacaatcagaaatctaaataagatt

SEQ ID NO: 354249 - DNA, 656 bp, Cannabis indica
aataatctcaacaccttgatatccagatcaactgtaaaatgtagcattctcttcgtaataggatctgacaagttgtatacaatacaacctttcctcaccattacatatccttaatcaaaaaatccttgataatgtgaaattcttctctatatgtctactcctccaaggatgctggattctttactttttggcaactacatttgtgttagtcaagaagtaacaccagtagttaattaattatcggtacaatgccaaaaactgtacagaattttccataggctgaataagtatctttcctgcaactttaacattcagtctcactggtagagttagagacttcagataggtttttacacttctccaaaattactgctccaccccaagagtaatcatcttctcaccagtagactttctagcatcaaggcaagtctagaaacctgatttggtgtagtctaagagtattaaataccacccttatcaactgacatatacttgattatcttccaatgttcatttccgagattaatctgacaccaactcgttactcccactgatcctaaggaattctttcattggcctttatcttttctggaatagttaaaacttttccgtagtaaataaaatctatgtctagaagtcgagaagcttctatagat

SEQ ID NO: 354250 - DNA, 687 bp, Cannabis indica
gaattcaataataacagcataaataattatttaaatatctataaataattttccatgatcaaacataattaactgctaatttccaaattaaactaagcggtctttacattatacgtttgtaaaattacttgaattctatttttgtataactagaataaacagcatcatataaagtgcctcttttaactattatcattttataaataacaaacaagtcttaaataattaaaataaacattatcatacaaaaaaatcaagattataattattcacatatcataaaaaaatgtccgctggtacacctaattttaagtgtggtgcattgtaaaagaacctattaatttatatgtacactgctttttggaaaaaaaaattaattcaaaatgaaggatagaacttctatttatgatttatttaaatagaataattagtgtttttatcattcgatatggaagaataaaaatatctctttggataatcatagtcttttatgttagattttacttatttttactattaaaatattgaataattagcgtttttatcttgaactttaactattaccatattatgtctttttattttatatatatatatatatatatggaggaagttccaatggttacatttttattataaccatcatggttacatttttttaagccattggattactattaaatggtt

SEQ ID NO: 354251 - DNA, 564 bp, Cannabis indica
ccataagatggtggaaatggccctactgtacaagaaaggctcatccaatagtagaatcttacatcatgaaagaatttttttagttgctgcctattcaaattaggaggctacaatccactcactaagtaatttagaaaatcagcataccatggagtgtttgcttgagctacaacaagcagctgctcatccgaaaaagtttcttgaatttgaatttccgcttcctttccaccacctgtttccaaccgagataaatggtcagccacttcgttctccgtcccttttctatctcgaatttctaaatcaaactcttgagaagtaacacccaacgaatgagtcttggcttcgcatctttcttggcaattagatatttgatagctgaatggtcggtgtagacaatcaccttcgttcccacaagataagagcgaaacttgtgaaaagcaaatactacagccagcaactccttttcaatggttgaaaagtgaatttgagcatcgatgagagtcttgcttgcatagtaaatagaatgaaaaatctttcctcttcgctgcccaagtactacaccaa

SEQ ID NO: 354252 - DNA, 533 bp, Cannabis indica
gatgatgactcgggactcgggtaacggggcctggaacagaacagtagttggtgcctagatctgaccaggacttgaactcaaacccaaactcgaactcagaatcgcaaatggaactaaaactgaactaggactaggactaggaccaggacctaaacccaaacccgaacccacatcaaaacccagacagagacctaaacccaatccgagactaggattcgaacccgaatctaccccgagacccaaaccaacacaataaccaggacctagaccaagaatccggatagggacctgggaaacagaactaggaccgagacctaaaacccgacccagacccgaacataaacctaggacccagcttgtgacccgtcacaagaaatggaaccagatggggacctgagattgggatccagatctagacccggcgcttgaacaaaacccatagtcggtgtttggatttgggacacagcgctcgagccgaaccctgacaaggatcgaaacccacacccggacctgaacccattcccaaacccaaa

SEQ ID NO: 354253 - DNA, 978 bp, Cannabis indica
aaaaacaaggttttagttaaggtttattgttatctgaaactataaaaggatattgggtctaatgtatattattttgtaaatcacagatctaataattttgttcaatttttttttattatttttttgcttcagtttataatcgaagtaaaaatctaattagcgtcggtgcactactatttccttcagttatgaaccgaagcaaaaacttttttttttgtttcggttcataaccgaagcaaaaaaaacatttggcgtcggttctaaactgaagcaaaaaatatgactttttgcgtctgtggttattacgtcggttactctaaccgacacaaatagtttatgtgtcactttaaaactgaagcaaaacgtcacttttgtagtagtgaaatcaaagaagagctcgaggccggcagtctccaaagcatcaacattctccctcaagcggtttgcctcgaccgtctgagcatccttcaaccaaagaaggacctgctgcagagaagtcctctcatcttgaagacgaccaacctcagcagataaggactcgatggtttcctcaaagtgatcagcagcctcgaggtcctttgtcagcacggtgaccttcttctcagcggcaaaaagcttcttgttggcctcatccaactcatggtgagcagctgcagtctccgccctggcctcctcagcttccttcttggccaagtccgcctccgccctcaaggtttcgaacagagccgtactcttggaagtagcagatttagcccgggagtaggtataagccaacttcaaaccggcctgcataaaggaaaaagtcagtatgagaagctaagtatgaaaagctaaaagggaagggtcgaaaagaaaagaccaaccctggtaagctccttcaagactacacccaccaacacatccagagaagagtcgtcagcaccagccagctgctcaccgacctcaggaaccagccggttcatgtgatgagccatcacc

SEQ ID NO: 354254 - DNA, 690 bp, Cannabis indica
aaatttctttgattagcaaagattgcacaataattgaaaaagcactgtagtgtgccttagcattagggcgttacaactgcttcctacaagcttatgtaatattaagtcatgtgtttcttctaagcaccttgaaatattttcaaaaacatgtttgggcatttcattaagcttcttgatttcaaagtgcaacatcaagtttttcacgggttgttgttgaggaaggttcagcagcctaaagatgttgaattgcatgttatgattcgtggtgttaggcttagattcagcattgaagagtttgcattgatagccgatttagattgtgaatgtgactttagtgtgttagattttaagcaagatgttaacagtttttatttgaaatattggcggacctccacctctataactaaagaatctattagggaatattttactacaaagaggtggggtaattctaatgaggatgttgttaagttggcaattctttattttgttgaataatttttgcttagtggtactaatcataatgttgtaaacagtggtaggtatgatgaatttgcttagggacagagttcttttgaattgactatttcgtcgttgaagggtaagctttacaattgggttgaaagttttagaaaaacgaagagtttaggaaagaggccgagtgtattatatactttgatcggttgtcct

SEQ ID NO: 354255 - DNA, 2003 bp, Cannabis indica
cacatcccttcttggggtttgtggctcggtggtttgaggcaggaacataacattccagttcgcccagatagccagattggtccaagtcacttaagtgtgccgtagtgactttggacggagggctcacccacctggcacctaaggcaccttgcctcctatgagggaatgtagcagtaagctcctcggtgacgtagtccactctttcaaccaggacatcgctgtctgcatctactggctccccagcctcattgtatcccccaaaatttggaggtgcagcctcctcctcttcctccgcctcgaaagggctgccaggacggacatcatcctgttcctctatctcctggacttcatcatccccttcatgatccccctcctcctgaatgggcagatcctgttcggtactgggtaaagtggcgtgctgggccacatgagggtcggacgcattaaccttacacatcgtttgctttgttcgagtcatcatcctatgcctagacgaaaaatttgaagtggagagcccgtcacttgaagaggacggactagcacaaagatgaggataatcctcgtagaggagttgaatcaaatcctggtcaatttggtgttcgcttcctcaaaactcaccagggttcatctacaaaagacaacacgcgagatgagtgtttggtcgggatatcgaacaataaacaggcaaatatgccaaccaagagtactcaacagattaaaagaatgaaagtgttcaaaaataactcaaaacccagaagtttgaagtttttgggtttagggccaagtttcacgaagctttgaacaagcaaggtgaaaggcagacaatgtgcgataaaaggctaaacgtcatcaatcacgaagcttcacagatcattacaaagaaaatcgcaaagttttaaacctagattttctacttatcctctacaacaaagtcaagaacgcgtgtatggaacccataaattaagcatgcaaaataaaagaggaaagaattgaaaacttactcgctgttcgacgtttgagtttggtccaaacgaagctgctcggatactttgggtggaaatctcacgacagacttaaaacgaaaacttccttttttgctctgagattgctaaatagagaagttggtaaaagtgaatttgtgaaggatgtacatccctataagcaaaaaaatgaaaaagggtaatcatttcaaacaccttagaggcctaggttccccccaaaagcaaatatcgagaatcaaacataatcaagtgtaaccgtcaaaacatggtcttaaaaaaccgagtttcgaagcattaattgcgtcagagcattaattagctaaaaactgaagagacgcctggtcagcctcacatcgaatcgtgaatagaagcacctgacacgtgtcacccatccaaacgcaaagacagctcgaatgaagtctacacgtaactttaaaagtcccgtacagacttggggggcaaatgttatcccaatttttgcactctgacgtggcattgcacgatggtgacacgtggaatcaactttatgtacctgctcacaagaaatatgccgaacaaggcaccacatacattcactcggacgaagtcctcttagtcgggaagggagcaatccgcgcagcacgccaacacttagcaaattcagcttttgcatagtgagtcactgaagaaatccctataactttgggatcagatcacagagatatggcaagctgttcgaatcccacgattagtgtattatgaatttactatgcaacctttccacttatatcaattgtaaccagaagggaaatacttccctcccaagcttatagccctataaatagtgattcatactcatttggcaaagggtcgaaaaacttgtctaagaatttatattcagagatattattgtaagagctctaagaaaaggaaccattctccttattcttaagtcaataaaaactacgaggattaggctattaccgaactgctcggggctgaacctctataaaattctcatgt

SEQ ID NO: 354256 - DNA, 958 bp, Cannabis indica
tgttgaataaaatggattacattgaaatggaattttatttagggcataaaacccaacagaaacatgctgataattttgactcaatctgaattttgaaataactatatttattcatttattgatcaaaaagtgtatttgttaccgtagtaacttacatcaaagctatttgatccaatttgatcttttagcttaacatgagataaaacaaattgcagaaataagaaacggtactttaagtggtggtcacctgacctgagtactttgtttcttttatcgaaacctttgagcgtaatttgcccagcaggccattcacttaaaagcaaatgttcattcggtacttaatgtggtcatccgacctggtactttattggtagtattttcttaaatgttctccattccaataccgtggtactagaacgagttgcattttttcgtcatacttacctaatttttatgctccggagtcaagaacatcgaccactagatatggtccttcccagttaggttcgagtacacctgccgtactgtctttggtgtttaggaatacccatctcaggaccatatctcccacgaagaatttctgagccttcacttgtttgttgaaatatcgagctactttctgttgatgggctatcaactttaagttttttgtggctccttttcttcgatttcatcaagtgatttggctaggagtatgtgattggtatcttgattgtacatgatcttctgtgggaaggtagctcgagttctacaagcagcaagcttcatatctgtacgccattgcgaatggtgtctgtccggttgctgttttctcagttgtacgatatgacgatagaacttctgaaagctcttctggccattttcctttggcatcttcaagttttttctttagtgtatccttcaaggtcttgttgactgcttcaacttgaccattcgcctgaggatgcaccactgcgga

SEQ ID NO: 354257 - DNA, 649 bp, Cannabis indica
tttatagtccgtgaactcgtggagcagttcccaaactattgtcatatgcggccattttttctccgtgtgtcttatattctcccgacacctggtttactaccagttgtgaattgctgtagacttctactcttttagcccccacggtttttgctaatatcagccccgctatcagggctttgtattcggcctcattgttagaagctgagaattcaaaccgtagggctgcttggagtcgaagtccgttcggggatatcattgcgacccctgctccggatccgttctcgttggaggcaccatccacgaataccttccacgccgggactggtggtgtgggtatgtttgcggtagcttcagcttcattgcactccgtgatgaagtttgctagcgcctgcccttttatggaaatgcgcggaatgtagtgtagatcaaattggcttaactccattgcccattttaggagccttccggatgcctctggcttttgtaagacttgccagagcgggtggttggttaatacattgattgggtgagcttggaagtaaggtctcaactttctcgaggccatcaggaggcaaaaaactagtttctcgatcaccgggtatcgcgtctccgctcctatcatgcgcttgctaacatagtacacaggatg

SEQ ID NO: 354258 - DNA, 552 bp, Cannabis indica
cacaaaacacaacatgttctacctcaggcaaggtggcaaggcgggcaatgtgtgggtcagacagtgaagattttcgtacagtctgcttggttcgcgccatcatattacgcttagatggagttttatcagacatgtgcatagcaatagtcatggggaaggtggcaacaggcttatctgcaatagcagggtttgggtggccctcgggcagaatgtcaactacgtttcggcggactatgtacgtccagttggacgaaagatagcgtctccaccctttgctaagttcccaattgaaacgaccgtatccctgaccttggatctggtcgggataaaagtgatgttgcacttcaggatttggggaaggcgtgtgtgttggaattattttaccaggatcttagatatactcaaaagtatgttgatttaacaacctaagtatgaacttctaaaacgataataaattaaacgcataaaagtatgagaaaccttacattgggtgcagcagaatatatgtctcctcccactcaaatctctaacccttgattcctttctgtcgca

SEQ ID NO: 354259 - DNA, 963 bp, Cannabis indica
tttccttcatttggttacttccctttttcgccaactttcttcgagtttttcagagagaaaggaatcctcagaccagaaaaccttcaaacacttacagatttctttgctaacctctactcgttactgtcagcctacgtttctttgttgatcaacagcaacccccagtttcaacacttcatgtaagtttctcacatccctccctttactattgtgttcatggcatgctttactgtttacttgtttttctgggtttagcgtttgaagtttttgggaatgttttcccttgagttttcacataatatgtctagatttcccttctctggtgttagggtcactcttgttacacattattgttattttgagtgaaggctcacttattttttgtgtgataaccttcgagggtatagagaagactttgtctttctcgattttctgcccctcctctttcattttctgttatgcgcaatgtcactatctgtgagacttttgcacccaaattttgtccaggaaatccttctaaggctttcttgttgacaaccgtccggaggggtcctctttccagcggttaggggacccccattcccttttttgacttagggtttggtatgggacctaattgcttgaattttaattctttttcagaaccaaaatgtctgcatccagttccaaatcttccaagaagggtggaaagcgtttggccaccttggaagaggtcatggtgggtcccgttgcccaggaggggtataggcctcgtgctacgggatgggaagcggtcgagcttcactccactttgacttgccctcaccaactggagaacatcgtggaggtggctggtatcaagccctcgacgtccgggacgtaccaccagccgccccgagatgcggagacccctaaccacaattacggaggcttcggggcttggagccagacgcatctgatgatcggggctatgcttccccttca

SEQ ID NO: 354260 - DNA, 649 bp, Cannabis indica
agctcatcttaatcagtggttgagtgctcaagaacggtctttggacacaattttgagtttgttaacacttgaagatggtaatgagcattgtactccaaacaagaatatgattaaagtaaatactgatgccgctattttcacctctactggctgtttcgatttttaatttctgttgcatgtgagttcagttagttggcctatgttgtggttgtctcgtcgtggtttaaaagattagaagctcaactgctacgctttcatactttagtagtattattgaagagtgcaagtgtcttttcaagactttggttactaaggatatttttcttaattttacaatatagctcattttcttccaaaatttacttgttctatttttgaatgtattattcgagcgaaagcgaacaatgcttcctcaaagttcatttttgtattggtgaacaatttgaattaatgaggtttttatcatttattaaaaaaaaagtgttggagacacaatggtgtctagaaaagggtgtttcagtaaactcttaattctttagccattcagtaaaacattttattgtaattttttttttcataatcttgctcgttgtagttatttaaaattatctataaatatttaaaaaattctgaatagtttactgtgctg

SEQ ID NO: 354261 - DNA, 874 bp, Cannabis indica
caaatcttgatgtttgagccactcctccgctgtccagggttttttccatgatagttcagcaagaacgtcaacattctcttgctcctctgaacgctatggctgctgccgcttcttccagccgccctcctccatctcaaaacaatagcggtaatccttctcggagcaagaaacctaggcctacttgttctcactgcctcaaacctggacatttggttgagaaaggttactttgtccgtggttttccccctggttatggtgacaaacgcaagcaagactccaccaagtccaaccaaacttcggctactattatcacgggacaagacaccacttctcagctgcaactcagccaacaattgatccaacgtttgagtcagtaactccagcagccatctacttctagtgatgccgctccaagtgcctctaatgtgtttggtaaccctaatttttactctattttttggattgttgatagtggtgctactcaccacatattgcaataacattagatgctttactgattttgaccacaatattattgcatctttagtcactttgcctaatggccaacaaattaaagtcactgcttccgatgtggttcagcttaacaaagatattcggctgaaaaatgttctctttattcctaaatttagattcaatttattttcagtgaatgattttttggaagataacactaacttgttgttgttttctgaatctcgctgtgtcattcaagacccctctcgaaattaacgattgggacagctaagaaagttgggaagctgttcttctttgatgatttgatttcagcaaataatacttgtactaatgatgatccttggcattttcgtcttggacatccttctatgtacatttc

SEQ ID NO: 354262 - DNA, 690 bp, Cannabis indica
ggttctgtagggattttatgagtccagtccttcatcctctttgactgatgtgattcctcacagagtagccgtcactagactttattgatcatagcctagtaggtgcagagtgggggttgtgccgtcagactttattacgtatggcagtttcaatacgcctcctcccatgcggcattaaatgcgagatgactgttcagataggatctgacacctcccggaggtgctttgttgcaatcttgctctccgggagcatgcgagacttacatgccttctccgggaggcatgcctaaggtaatcctgcccttaagaagacttagttgatttattcaaacgctaaaaccccttccatctacgtgtcatcatacggttggtccacgtattttgggcaaaatcaggggcaacagaaggtaatataatttattcatgaacatcttccaatcttttattctacataaatgagaatttgttattaattaaggaaaaccggaataaattgaaataataatgaaatattggtgaatctgaacaaaaaaacaacaacggtttgcatgaaaaaaaaatattaatgcatataattagatgctacatagttttaatctgtaaacatttgtttataagttgttttccagtagaataatggttgtttgggatctgcaaacgagaaaaaatgaatctattcttattaattac

SEQ ID NO: 354263 - DNA, 720 bp, Cannabis indica
tttacaccttcttcattaatttagtccaggtatttttgtgccacgtggtgctactgttgacacgtcatcgtctaaatttttttggataaacacttagctttacatttcctaaagtaaattaatggccaatttttcttatttggcttagtcttagctttacgaaaggtgaatttacaataaaaacataataattaagaaacaaaagaatctcactttcttagttctttaattcttcttacatttataatatagacacaaaagcattaactattacataaatatatatattggtagctagaataaatttgttatgcataatcctcaaaataacataacatgccgttagtgtagtttactttgacattcagttcactacaatatagttctcaataaattgtaaatatgttgttgactcaccaaaaaagaagaccaatacttctaaaaacaacatctcttttttatttaaaaaaaaaaaagaggacaacaatggcccaaaaaaaaattagtagaggtataataatggagtggatctatctataccccaaaattattattattattaaggaaaacttataaaaatattgaaatttgagttatcttttactttttttaaaaatattgtgtttttataaaacaataatagaacacaaaacataacaactaaaaacaacagcggaacaactaaaaaacaaccatagaacaacagttaaaatttaacac

SEQ ID NO: 354264 - DNA, 723 bp, Cannabis indica
gtgccccaatcaaatcgatccccaatattacaaataggtaaggcgaggtcatcattcttagttccgttggtggtacacgaggtatatgtgagaatctctgacattcatcacatttcttaacaaattcgtgggtgtccttagttatagtaggccaataatatccttgtcaaataatcttctttgacaagcttttccaacctccatggtccccacaaaagccttcatggatttctttgaagttctcgtttgcttctgcgggaagaacacaccgtaggagaagcattgaatatccccttctatataatttgccttcaactattgtatagcgaggcaccaaatccaagagtttttgtgcctcatttttgtcagctggaagttgcccgatgaaaagatagttgactgtaggtgtcatccaggtaagcgagctatctataatctcaaattcttcttctcacatatacttggctcgtttaacatctccactggaaccaagttcaattcatacagttaattctgcgaggccagttttgctaaggcatcggcattagagttttgttctcttggtatttactcaattttgaaataatcaaacttttccaagttcttccaaagcttctctaggtactttgccatttttaagctcgtagcctggtattcccctagtacttggtttacaatcaattgcgaatcactatgacatataagatttttaaccttcaacac

SEQ ID NO: 354265 - DNA, 584 bp, Cannabis indica
tatttcatgattgtttaatgtataaattctattaagtccaaaatatatgtatgtgttcatgattatagtgtcgtcagcacagtggaatataatcatgaatatgttcaaaatttaaattcccatgattggtcagttcactggatttagactagcatgataatctgcgataggtatacttacaccttggataagtgttatgtcctttccagggcattggcaaaagtttaccagtatcgaatgtatggagtatacattggaagggacaaatatttatcttagatgagatatcttaaacttactttctaagtcaatataaatggttgatcttaggtctgtggatcttaatcctcacatggttaggttcgatctcaagagtgttatttgtgttctttaatttgttattttatatccattttccatcaacggattcatactgtatgttaatgtatggaatattagttttgtattctgtgaccaagatccacttggactattctaagaactctttattgtaacgagacctaagtcatcaaaagaccacatcatatatatctatggcatttatatctgttggaaattatttt

SEQ ID NO: 354266 - DNA, 547 bp, Cannabis indica
aggtgcagagcacatgatcacggtttaaattttccataatttttttaatacctccttctgtaaacctccttctgtaaacctcctttgtaaacatattttgcaaagctgcctcttataaatttcaatactttttgttgctttcatatcaagttagatgttcacaatcaacatttttttaaagctgatatgtttacaattattaatggtgtttataattttctttttattttcaaactaaatattgaatatattcatgatattggtttacaaaactgatatacaaaagaaacatagatcatacaaagtaattcatatagaaaacatactattagttatgctaataaatctattagtttatttttgcatattaaaacaaattttatttttcttttgtatattggaacaacaatttatttcatttcatatagcctacaatatgttaataaacctactagttatcgtttgttggaggaataatttttattttttttcaatacagagtaaactataatcaaacataatgatatacgccaagaaacacattagt

SEQ ID NO: 354267 - DNA, 673 bp, Cannabis indica
cagattccaagagaggaaaatacaactgtagatgcgctagccctttggcaagcagcaatataagtgacaaggcgaacctggtcccgatccagtttcttgaagagcctagcatcaccggcacagaagaaatcgaaatgatcgacacatctccgaactggatgacgccaatagcagcctatctcaactctggggaactcccagataaccgaaatgaagctcggaaaatgagaagaaaggcagcacggtacatcatcgtagacgggatcatgtacagaagaggattctcaatgccattactcagatgcgtcacatcaaatgaagctgcacggcttctatatgaagttcacgacggattctgcggaaatcatgcagctggacagagcttatcaaagaaaattctaaggcaaggctacttctggccgacgatgatcgaagattcgaaagcttacgtcaagaagtgcgacaaatgccagagattttcaaagataccaagagctccgcccaacgagctgacacaaatgcaaagtctgtggccctttaccatctgaggaattgacctaatcggacaattacctaaaggtaaaggctgagtgtagtacgcagtggtagcagtcgactactttacaaagtggactgaagtcgaaccactcgcaactatcacatcaaagaaggt

SEQ ID NO: 354268 - DNA, 922 bp, Cannabis indica
ctattgattatataaaggaaatttttttcaagtttctgaaattttctacttattgcaccaagttgtaattaaaaatcgcaatcaaaatattatagataataaccgcgattaccatgtactgcgaaaatattataaatagatatccccgcgaggatataaaagtcgttcaaaataaacataaatgtaaattcgtctaattacaaggtgcgagtacccttgcaccgcgtaaacaaaaaaaaaagagaggatagaatttaacacaggtaaataagggaaaggtcaagcattcggagcagaaggagcagacccatccgcgactttgctgacggcttcattctcgacttcttcagcctccgcaacctcagcctcctcgagaagattccctccaccaccttgagtttgtgtggacgacatggcgtgaaaagcctcagccatttcagcggcttctgctccgaggattgaaaagttgaagtctggaatcttggagagagtggtgtagatgtagtccgagaccgcctggtcatactgcctttttccattctccttctcgacctccaaatcgcgagacatctcctcgatcttcgtctgagcgttcttagcctcgagctcgacttgctccttggccttgtgaagttcttcgagctccttgtccttagaagtcgcatcttgtttcagcttattaatgtcttcctgaagctgaacgttgtgtctctttgtgatttcaacctccttggatccagtaataaaagccctcaagaacatagcaatgaactgtgaagctaactctgcggagcgaggcagcagctcctcaacaggagtctagtcaatcttcaactggaactcatcacttaaaaacttctcttgaagagacaatatgttgcgggcttgaatcgctgggtcaatcacgccttctcccttctct

SEQ ID NO: 354269 - DNA, 582 bp, Cannabis indica
tttgaaaaagttagtaattttaatttaaataataaattattaaaaaaataataaaagtaaaaaatgtaacatataatttaaaatgtaataaagtggtattaatttttttttaaaaagttagtatttttaatttaaataataaatgattaaaaaataataaaaaggggaccctggtatttccacggggagactttctctcagcccgcagttgaacttcctgaaaatgacgaagaggaaatggcagatgtgttggcggacatgttaagaggggaccctgggtttgacgaatctgctaacactactgattctttcaatgaaccccctatcaacgacaacaacaagtttgatgacttgtttaaggagatggaggctgagttatatccaggttcaaaaaatcagccctcaatgcactggtaaagcttatgcactgcaaggttgaataggtggagcaacactctttcgatatgttgctgtcatcttgattgatcatttccagagggcaaaattccgaagtcgcattatgagtcgaagatgcgattgcgcaatcaggtttggttacgactcaatagatgtgtgcaagta

SEQ ID NO: 354270 - DNA, 534 bp, Cannabis indica
cccaccccgacggtgttggaaaaagaaggggggcgtattatctcggataccacccgaggtgactcttaagggaaagaagaagcagatatacagaaagccaaggaggaaacattcgttggaacagggacttcttcgaagttctcggattgggcagtagactcaatctcggggtaataagccgctgtcgtctgagtcaagcttctctctgatacttcaggctcctccttagcctcttcaactggtgtcaatgtgggaggaaaaatagcgaaaggacacatagccagaggtggtgcaacatcgacgagaagcagcataagttccaaggcccaatgcagcttgctcaaaacagggacagctgcagacctctgaaaaatgcaatggaggaagtgtagtgggctcgaaatcacgaaagctagaaaaggggttcaaagaaagaaatgtaggatccaatggctacaatcttgagaaaatgttagaagaggaaggctcttttgagtaaggtatctggtttttgagtagggaagacataatgca

SEQ ID NO: 354271 - DNA, 1344 bp, Cannabis indica
ttttaatttttttttagtgtaactctatttagttataacctcccaattagaatataatttacttggtcccaagtgtattcttggatagaactgtataaagcgtaatttattaattacggagattatatcaaaatgtgtgggtatcgtggataccatttttaaaattaaatattttcaggcccggagatcgtggaaactggataatgtggttagaaatgtcatgacacttaaagatggattattttgaaaatattccgaactagtttagaatgttagaatgtcagtttggtagattagttaaaattaccaaattacccctaagtttatattttaagtttgaaggtttaaaagggcaaagtggtcattttaaggatttattttatttgtcttttagtgattaataggctgaaggttaagtgttttaagttgaataaatgataaatgtattttcttttaaggatatatattaataacttaggaaataaggaaccaaagcttcattcttttcttccccttcgtgcaagccaaaccagccagcaagagtgtaacgcccgtatttgaaaatttgctaaacaaaattaatcttatcatattataattatatagccatataggtcgggattatgagtttacaacaaaattaaaaattacatttacaatatatagttacataataattttttttcttacaaaatacagggcaactcaaaatattataaaaccgaaaccctccaggttgcactgccacgatatgtacaaccattgccaagctcaaactcactgctcctccagcttagcctttcccttacctacacaagatagcaaattgatgagtcaacagactcagtaagatatgcataacatatataacagtaatgttgcaccgactttatgcttaagtcgttctgagctcaataatcgagcccaccaaatggttaagaacgttcttaatggaagtacgaccactgtaccatatgcactaaagtaccaactctgtactcgtattggtagatccattattgtactcccgggagttacttaagtgttgtaccacatgcacgacataccccctagtacttgtgttggtaacaccgtaaccatcctaagatcctacactgtactaacacccttaaaatcacataagcattagtgttagtagtgtaaacaaatgataacatacattcattagcatatatatactttatgctatcttacctcgtttccgtgctcaggtgtgccagttagcctgagtggaattgcaactcgacgtttcacagggccctaaatcacatcatttgtaattttggtgagagacacgctaaaacacttctcgaggactttaaa

SEQ ID NO: 354272 - DNA, 623 bp, Cannabis indica
aaaaatcaaatctttattacataaagtacccaatttgattaaaagagagaaatcaacaatgcatcatcatatctttcaagacccatttttctttaaccctaattcgtcatggacatatataatcaaaattaataattcaaatctgttaaaaaaaactgagagaactcattgtcgctggtgggagccgaagccgaagccggagccggagcagacaaagcagcccccagtacgaactctctctgcgacgaatcaaactctctctgtgacgaatcaaaaagggtggaaatccttattagcctccacaatcgccattatcatcctcctcgtcgtcaacggcaccagcaagcaagagagagagagagagagagtgaacgagagagagagagagagtgaacgagagcgagagagagcaagagtgaacgagagtgagagagaacgtgagcgagagagagaagcggaacagcagagaatgaaagagaaaggattagggttttcatagttaggtattttccttatcattttctatttatattctttaaattttacccacaaaattattttattttaataactaaaaatctgatataattttttttttaaaaaaaaatgttaaatctcatata

SEQ ID NO: 354273 - DNA, 1269 bp, Cannabis indica
atttattatttttattattttgatttaatatatatacatctggatttgtcaaaaaaaaaatatatacatacatctagagatatattgagatatggtacgataataattaaataatacgaaactttttcgttacgtacctgatttagtaccataaaactaacacacccccgctctaccacctaaattgtcgtcgccaccagcaaaacccacgacccatctccaccagagtctctctctttatctcactatggttgaaaccccataagcccgaagcccggaaggccgttttagcccggactaatatgggtaagtttttttagggtaaatactattttaaatcctgtattttgtaaaagttactaattggatcccctattttgttaaataataaaatggaccttatattttctaaaaaaataaaaataagacactgaactcaattttcaattattttattttttaatataaccaactttaagacaatttttaacacaaatagatacagaaaatataaccagttttatcataacatccctagatcagattattattaagttttattttgacgaaaaaccagtttaagctattatttgtacaattttagaaaaatacaggtctattttatcatttaataaaatagagggtccaattggtaatttttataaaacacaagatccaaaatggtatttacttttttttattaaaattttaggatatatttttttgcattttttttattattggtgtcgataggtcgaagataactatattcaaatttttttcaacattttttcgatgggtttatgattacaagtgttcagaggttgaagatgaatatattcgtttgtttttgacaacttttcaatgatttttcgacgatttttattcgaacattgaagattagattttaatgtttttgacaattttagaatgagttttcgtggcaagttgcacataattagattttaacagcttttcagtactagtagtgggtgggttctggcatttgagaatgaaacctatcgatcgagcagtggcggtcgaagcttcggggctttgggttttcaaaaaatgaagagagagttttgtcctcaagtgcgaccagttcaaacggagtcccggtagttcgaatggaatcttggtgtaggtggttgttgggattttttggaaagaaaaacgagagacacgatagaggaagagaattaaatccatgtcatgttgattaaacatatcacggatcaaatccacatcccaagctcttctctctag

SEQ ID NO: 354274 - DNA, 738 bp, Cannabis indica
aaaatatctattcaaactaaactaacaaaaattttcaaatcttcatgttatttttgacaaaatataattttattaaaaaaatgtctaataagataaaatgttaaacctaacatattcctaatcttataattttaattaataaaatatattttgaaaataacaaatttgaaaaagatatgatatggttaggaaattttgaaatttgaaaaagattatttttaaaagataatattttaatatcaaagtaagatcatttaaaatttaagtaaagataatatctgatcttataattaaaataaataaaataatctaaaatttcaaaattaaccataaggctcctttgtgagaaatcaaattttcaaaattcaaagcctactaatatcagaaactaattttaattaattaaaaaattaataaaaattaattttattctgaaaattagatttttaattgaaaatttagattctacacaaaattctaacaaaatttggcttttgtttcaatgaaaaacgatttttgaatcaaaagttatgacgaaaacaagtttgaggcacaggggtatgcattgcatacccctgcgcgcgcggaatggagagtatggccgaggaacgaggctgcaagcagcctcatttgaccaaggatctcgggcgcgagctgcccttcagaaagcagcgtgtccgagcgagcgtgtgcccatgcgcgcgcgcgtgtgtgtttcaaatcctgatattttcgttc

SEQ ID NO: 354275 - DNA, 533 bp, Cannabis indica
aatgagtaggtatcagattaatccaggaaaagaacattggaagacattcaagtgaatcttaagatcaagaagaggagctatatgttagtcaataagggtatttttaattctctttgactacaccaaatcaaatttctagacttgccttagtgctagaaagtctggtgatgagatggtgattactcttggggtggagtagtgattttggagaagtgtaaaaacctatctgaagtgtctaagtctaccagagagactgaatgttagagttgcaagaaagatgcttattcagtctaagaaaagttctatacattttcggcattgttccaatatttacaaactactaatctttacttaatcctgactaatgcaaaattagttgcaaaaaattaaagaatcaagtatcccaagaggagtagacatatagagaggaatttcacaatatcaggaattttgtgataaaggaaatgtaatgatggagtaaaggctgtattcagtacaacctgttagtgttggaatttattttaccaggatct

SEQ ID NO: 354276 - DNA, 851 bp, Cannabis indica
taaaatgaagacaaggttcaatgccacttctgatatagcaatcgaaaaaagtgtgtccataatttagaagagtgacatcaataccatcatgccaaaggagcatcaaaccgccactcataccaactctaggagactcaaggccattattaaaacgtaaagactgtcgaaaacgggaaatagaattgctaggaagctttgtttccatgagaaacaaaacatggggcgattgttgagtaacaagcaatcgtaggtgtctgaatgcgttcgggttccccaaaccccgcgcattccagcttaagattttcatgatgaatggcgaggttgcgaagcatcgccggacagtcaaaagaatcaatagaatcctcgtctaaagaaaccatagattcagggacaacttcaaaggtggagtgggaagccgattgacccccaataccacgacagcgcttaaggattttcctcatggagagagcatcacattgtcgctttatggaaggggcaggaggagtgttttctttcccacttgcagcagcagtaatgctatggggaaaaactgaggttatggtggcagtagtagtgagtgaggaagaggttggattcatgggtgaaggtgggcatggccatggtttggatgaggaaattggtagtgtagtaggcgtggatggtggataagtagcaaaaatatttggagaagaaccaatagcacccgtatctggtacaaagatatgggaaaaatcagccactatattggaaggatgggggtgttgattgttggaacttgcggatggcgtagaatggcctgagtaaaaaggagtgtttatttttggatcaaagggagccccgagtatgttttt

SEQ ID NO: 354277 - DNA, 945 bp, Cannabis indica
gcccagctggatggtccccatcatcgaatacataacaaaaggcaagttgccccaagagaaggcactatccagaaggatacaatatcaagcgcaccgttatgtgatgatggacaaaattctctatcgaagaggactcagcatgccttatttaaggtgtgtatcggaccctgaagctaagcaaattatgctagaggtccatgaggggttctgtggagatcatacaggaggcccaagtctctcaaagaaaatattgagacaagggtacttctggccaacaatgaaaaaagattgcatagactacgtccagaaatgtgattcgtgccaaaggttcgcgaacatacctagagctcctcccaatgaaattaccctgatgactagtccctggccctttgcggtctggggaatagatcttattgggtccctgccaacaggaaagggaggggtaaagtatgccatagtagcagtagactacttcacaaaatggacagaggctgagccaatgaagactataactgccaaaaaagcactagactttgttattaaaaacatagtgtgtcgatatggcttgcctcacaaaatagtctcagacaatggaaagcagtttgactgcgaagaattcaccgacttctgcaaccaacacggagtcattaaaagcttctccgcggtggcaagaccgcagacaaacggacaagcaaaagaggtcaacaaaatcctaaaggtcacccgaaaggaaaagttgctggcctgcaaaaacaattggcctgaagaattgccaagagtgttatgggcctactggacaaccccaagaaccacaaccggacaatcgccgttctcaatggcatacggttgtgaggctatggtcccagtggaaacgttattcccatcccacaggagaacaacttatgatccaacaacaaacaaggctttattacaagaagcgttgga

SEQ ID NO: 354278 - DNA, 1330 bp, Cannabis indica
ttatctaaacctatggcttgtggtatgtctggtaatttatttactctagtgcaagcaacttactttagtaaaatattgaagcatttttctaatggctaattctaaaggaagccttttggctcctagacatagagtttatctaaggaacaatttcaactattctagaaaagataaaagtcatgaaaagaattctttaagtatcaacagtgagaggtctcatgtatgctttggtatgcattagaccagacacgtgctattgagtgagagttatgagtaattattagttaggagagaaacattggaggacattcaaataaatcttaccataaaaagataaattatatgtaagtcgataatggtggtattttaatactcttagactacaccaaattactctgggggtggatcagtaatttttggaaaagactaaaaatctttctaaagtctctaactctaccagtgagactgaatgttagagtggcccagaaggctactagataattattcaacctatggaaagttcttcatagtttttggcgttattccagtcatggattaactgctagttttacttcctaataacacagatttagttgccaaatagtaaagaatgcaataccctaagagtagtaaacatatagaaaggaatttcacaatatcaaagattttgtgactaaggagatgtaatggtggagaaagtttgtattgaatacaacttgtcagatcctaatacaaagatagtactgcatactacacttgatctggacatcaagatggtgcgattaattaaaatgcacttttaattttatattagtggaagtgggagtttgttgggattttatgccctaaataaaatctatttcaatataatcatatttgctaattaataaaagatcagaaatttatgttgcatggttcacatgattactttcatgattatatgtttattgtataaatttttattaaatctagaacatatagttattcataattatagtgttgtcaacacagtgaaaaataataatgattacatctttcaaagtttagtcccatgatttatcagcacactggatttacactgacatgataatcagcaataaagtttacttacaccttggataagtggtttgtcctttccagggcattggcaaagtatgctagtatcggatgtgtggagtatacatcaggctggaccaatattgatattggataagatatcataaacataccattgtatcttcctaagtcaatatcacttagttgatcttagatgaatgatcttaatcttgagatggttaggttctggattaaatgtattattcatgttctt

SEQ ID NO: 354279 - DNA, 730 bp, Cannabis indica
gtcttactttttgaggaatcaaatacccagttgaaaccctccaaagtccaaacgccatcatacagtacaggcacaaatacagatgaatctgtcccaaagaaatacaaacaaacttacatttaaaaatcaccatactatatcgcacacaatatcgcacaataatcgccttaagctaacataatataaaccagttatgatgtcgcacaataatcgcacaacaaaggaaagaaatcgcataaagtcgcacaatatcacatagtcaacaaaatcgcataacgatgcacaacatatcgcacacaaatcgccaaacatcattatcgcacataaaatcgtacaataatcgtacaaagtcgccaaaattaatcatgtcatccctaacctcagatttctcatgaaatcgcacaaaacatcgcatgatgtcgcataaaatcgcaaaaaacaaaaaaacccagaaaaacacagactgttagccacaaactctacctccatttcaaggacacaaaagtcacatattacaactaacaacgttcagatccatgcaattcaacaaaaaactacactatttactaagaaaaacacttacccattgctttgttgagtgaggtggaggttgagggtgaaaatggtggaggtggcagtcggccgggagaggatcgatcggcggcagtgatagagagggagtgtgtgtgaagagagagagagaaagtgcgtgaagagagagagagagaga

SEQ ID NO: 354280 - DNA, 813 bp, Cannabis indica
gtcatccttatgatcgtgtcttcatatataaaatggtttcttgtcgatatatgaattaatagtttgtacatctatgtctcactcaagactattcagtcaacgagctatagatatactgtaccagtccaacatttaatgatttatttccattttaatatctttaaatattaattattattatatttgttgattcgtattcttccagtttgacatgtgtcctcatttgaagtgacagccaaattttgggtataacaattgccccttaaaaagttctttttttaatgaaaagtgctttttaaaatgattacggagggtatatctgtcataattctcttttgaaaaaacgcatgtcttttgattttggcagttttgtggttttgaggtgtatcagcatttaatgaccatatttccacttctttttcaaattctacccattggataaattgtttccctgaaccaacggagattgacccaatagtataaaatgaaaaaaggaaccacctttgcactactttcgccattttagagactctaaagatttttcaagcttttttgctgaaaaaccattcccaggtttgccctaaaccttgcatgccatctttgtcattaatgtttttcctcagagtttcatccgatttaattttcgacttcaagcatttaaagggatcttcatgtcgttcgttgattcgcagattgcagagatgttcgccatccaaaacactaatttcaaacagtgacttttcttcctattttcttacatgcttttgatgttgtgtttctgggtttgatttctaatttcttagtcagcacctt

SEQ ID NO: 354281 - DNA, 1093 bp, Cannabis indica
actgaaattttcaatttttttaccgtggtgcagatttttttttcaaaaatcttgtgttttttttcaaaaattttgtgtaaattttatactgtgtactgtgttaagttttcactgttgcctacagttgctttttaattgtttcactgttggttttagttgttatgttttgtgtttcaatgttgttttataaaaatacagtacttttgaagaaaaaaaatcgtatagtagtatttttgttaaaattaattaaaattctaatatttttgaaagtttaaaaaaaaaaaaacaatatatatcatttatgaatgttctgtagtcaaaagtacaaagtagaagaaaaaaagttagtaaattttaaatggatcaacgaattttgatatcccatctgggtatatatttcaatttttttaatggcctactctttccctgggattgcaattaattaacataatttaatgatctagaacgttagttaagtaaaataaaaagatcttctagaaccttttttttttttttgagaaaaagcgtttaaattataaaatcaaatagttagacctcgcggtcgttacacaatatattgttaggtacaaccgaaacagggatagacccaaacacctgatgagcaaacgcccatcgagccacattgtgagcggcaaagttacaagatctactaataaaagcaaagttacaactaataaaatgaggagcagacttagtacaaaaagagatgtagttttcaagcgcccaacgagagtccttccattgatagcattgataaccacactcgagtcattctccacaatcacaaatttagaaccaatatctaaggctaccgagacagccaagcaacacgccgcagcttctccacagaggacatccgagaagtcttcccgagccgtctgaattctaatgactctgccaaaatgatcccttgcaacaacagcaatgcacatactactaaatcccaccttgacgtcacaatttagcttaatccaatcctgaggaggaggggaccaagcttcctttaggtctggcgtgggagtaggaagcaaagaatcatggatatctgcataagaagtacaaatattatcaa

SEQ ID NO: 354282 - DNA, 558 bp, Cannabis indica
tcatcacatataggactgggataagttgaaaatatcttcttttcttttatctataatctaaataccttcatattattttttatttaaaatatatccacttttttaagttgaattgcctcactcactctctacctaaatctagcatataatttacgggtcttatgggaacatcatccataaaagtaggtatatctaaaaaaatatgaaaatgaaggtaaaaattaaaacaagtaaagtaaagtgggtatacaatgtaatttcctctatagggcctgattcacatatatcataggaataattacataagacaccactttttgtaaaataattatatttttacgttcaaagaaattttttttttttacacttttacggttttccaaaaaataacactaaaacaacataaaatcaacaacaaattaacaagattacaacataaaaagaccgtattttctgtaaataaaattaaaaaaatcctaaaaatatttaaaatttcgtaaaaccgtatttttgtaattttttttattgtttttatgtttttgtgaaataatccctata

SEQ ID NO: 354283 - DNA, 1144 bp, Cannabis indica
cccatgcggcattaaatgcgagatgactgctcagaggaagcctgacatctcccggagatgctttgataccacttaggcctccgggagcatagaggacttcgtatgccttctccgggaggcagatcccggatgacgccagtctttataaagacttagctaataatttgagtgttaagaccttcgtgtccacgtgtccctgtttggttggtccacgtatattgggcaaaatcaggggcaacatttaccccccaagccttgtttaattgaaaaatgaacaaggcttgttcagatgcctccggttggctcctcggtttcctggcacgtgctttgggcgcgtgaaggtgtaattaatgatagccattactgcagcgattcactttttgcaggcgtcgattcatttcacgtccattaattgatacggcgcattaatgggtgtcagacggacactcaagcgtttccaccgccttgatgacgaaccaatctagccgttggatcttgggaattcgaatcgtgcgcctccccagccgttcgattggtaggtgattgcgcctgttccacatgcacctcggcctataaaagccaccattcttccttcatttggttactttcagcctttcaccaaatttcttcgaatttttcagagagaaagaaaaccctcaaaccagaaaaccttcaaacaccataggtttcttactaaccttcattcgttactgtcagtcaacatttcatcgtcgatcaacaacaactcccagttctaacactttatgtaagtttttcgcatcccttactttatcgtttgcgttcatggcatgctttactgttcatctgcttttctgggtttgaagtttctaggaatttttcgccttgagtttctgtgtaacacgtttaggtttctcttttctggtgtttgaattactcttattttgcccattatacttttccaaaggcccatctgttctttacgtaatgaccttcaagggtacagagaagactttgtctttctcgttttctaacctttcactttcttttcctttctttgcttatgtggaacgtcactatctgtaagattcttgcacccgacttttgtccaggaaatccttctaaggctttcttgttgacaatcgtccggagggggcctctttcc

SEQ ID NO: 354284 - DNA, 655 bp, Cannabis indica
ttcgaaaatctctggcatttgtcacatttcttaacataggcctttgaatcttcaatcattgtaggcctgaaataaccttgccttagaattttcttagataaactcggctcggcatcatgatttccacaaaatccatcttccacctcagacagaagtcgtccagcttcttcttgagtaacacatctgagcaatggcatagagaatcctcttatgtacataattccctctactatgatatactgtgccgccttcctcctcatctttcgagcttcatttcgattatctgaaagttccccagtgttgaggtaggctactatcagtgtcattcagtttggggaagtatcaatcatttcgatctcttccgtgccagtaatgctaggctcttcgaggaactggacaggaaccaagtttgccttatcacttacattactgcttgacaatcgagctaatgcgtctgcagttgtgttttcttcccttcgaatttgtctgggacctagcttttgaattgtgcaagcaggtcatgtatttttctcagatgtgctatcatcttttctccccaagcctcgtattctcaagatacgtgatttaatgtgctcggctttcatctcctgggctaattttaagccatcgattaaagcttcatactcggcttcgt

SEQ ID NO: 354285 - DNA, 926 bp, Cannabis indica
ccctgacccctaaacccctgatccaagcccttacccatacccctagccccaaccgtaccccaaacccaaacctctaacccataaaccgcaaccccaacagtaactgtaaaccctaaaccctaaacctaaaccgcaaaccctaaacccaaaacaccaattcccattctccgacccattcccactcacattcccattccaattcccattcttattcccattcccattccctttcccattctgattcccatcgccatccccatccccattcccattgccattcccattcccattcccattgccttcgcattcccattcctattcccattccccggccactcttatttccattcccattcctgccccattcccattcttactcccattcccaatcccattcccatttgcatttgcattgctattcccattcctattcccattcccatttccattccatagcccattcaaatttctatacccattcccattcccattctcattcctattcacattcccactcccattcccattccgtggcccattctgattcccattcccattccaattcccactcccaatcccattcccattagcattgccattcccattccccgacccattcccattcccattcccattcccattcccattcccattccctggcccattcccattcgtattcccattcccattcataatcacattcccattcccattcctatttgcattcacattctcattcccattctgtggcccattcccattcgtattcccattcccattcccattcccattcccattctcatttccattccccagcccattcccattccccattcgggattcccattcccattcctcgacccatttccattctcgttccctttcccattccccggcccattcccattcttattcctattctcaat

SEQ ID NO: 354286 - DNA, 692 bp, Cannabis indica
cattagggttataacaatggaaggatggaaggaaaagttctttttcgcccgtggtcctcttgagtttgtttccgacgatcctacggccccatttattaaccggagctggggggctcccggtacttatctctattactattttttgtttgttttttttttattttttttattttacctctttcttcctcctcttttctcccattctctttgtttactctttggttattcggttatactactttctattgccgtatgcagatttttgtgtatttttctcttctcttatttcttttacctaacggcgtatttggtgttgactccaatgggagtgttttttgtgcagccgttgccgataacgaggagactgtcatcggcgatatttttactgagaaggttcggaaggtcacagccttagatcccaagtttcgatcaatcaagtttcttctatcccgtgaggccttaatcgaatcctccgcctggcctcgcgaactcagaatccccctaggtatccccactccttatcctccttactttatttggcctgattttttaaaatgtgctttaagacacttaaatcaaacacctgagccacttttgatagagttttctgaggatcactcccgccttgcagagacttacccccgtcaccttcctaaaatgaggttgtccgagttgaccattgaggagattga

SEQ ID NO: 354287 - DNA, 709 bp, Cannabis indica
ttctaattataaaattgaaaagtaaaaacagttttatagaacatgtttttgaaagatattttcacttttccacttttaaaaacagaaaactgattaaaaaagtgttaccaaacgccacctaaataattcaaattaattgttttccatgaacgtattttttcttcagtattttagttgcttttgagtatttttttagttgcactccagcaattatgtcaacttgtgtattattagttcgttatatttgcaatcaattaaaatgaattgcctacgagtttcataatttgcttaattaatttcttcatcaaactgtgcattgcaaaatatgaggaatagaattgcgtctttttcttgagagtaaaagtttgagtattgttagtcaacttcaagacaactgtaatgaaactgtaaagcaacagttatatctgttacgagccaactaacataaaatcacaaaacaactaataaattcacatatttaatacaaaagaatattataacaatcgtgttttatctatttaggtcacgtatttgacaattacgaaccctgtttatataatactatgatattgtagaagtaaaagtattatccaactaacgtgtaacttaattccaactagaaatgattacttgaggctagctcaagtggccatagggggtgcgtgtgtattggaggtcctgggttagagtcccaggttatgctgatgta

SEQ ID NO: 354288 - DNA, 911 bp, Cannabis indica
actaggaactaaaagtttccctatcgataaaaagcatggcaataccccaaaaaacataaaaacgaggaaaactagggtttctgaaatttccccaaccggtagaccggttgcccaaccggaattccggttctgggaattttcgaagcccatccggaattccggatgcacaaccggaattccggttcctcgcaggcagatttcaaaatttcataactcattcaaatccaacccaaaccacaccaaaacttccagacctgttctaaacatcctatagaacaattctaaagcatcaaactcacccagattgcacataaacaaaaatcaccattaaagcttcaagctttgagttctaaactcaaacttgatcaaacactaccaacatgcaatcaaaccagtccaaacctacttaaacatgcataaaatagcctctgaaattaacagcaaacatcaacagcaagcacacaacagattcaagacatttctttgaaaaaaatcatagttttgagctaaaaattccaagcttgaaacaaagcaaatatcatgcattactaacagcttaaataacttcaaattatcatgcttacatctcagaaaatatcaacaacatcccagcaacaataatccaacaaaactaagcatgcaacctattaaacttactcaaatttacaaaaaaacttaaaggaaagctaagggaaacataccaacaacttgagatcactaagatttgctaaaaaggagcttgaatcaccaagaaaaatggctggttcttgctgctccaagagggccgaaagtgagaggaaagaaagagagagtctttgaaatttttctatttttttctaagtgttgaaaatatgaataaaatggaatttaaggcacttaacacatttaacttcagccaaataataaccaat

SEQ ID NO: 354289 - DNA, 1145 bp, Cannabis indica
attttaaaatataaaaataaagaaacctcactctattaactaataaatagtaattattaataataagtaattttaaaataataaataaaaaatcacaaaaaaaaaattattattatattatctaattacatgttattattaataattttatttactaaaaaaagtaaaatagaaaaaacattaatgtatattaagaagtttgttatcccaatttttgcactctgacgtggcatcgcataatggtgacacgtgtaatacacttggagtatctgctcgggaggaacagctcgagcaggatgcctcgctggcatacttgaagcaaaccgatcaacgatccgtgcagaggaatcaatacttagcgaattcagctttcgtattatgagtcatcaacgaaatcccaataacttggggatcagattacagggatatggcatacacacgatcccacgatcagtgtattctgcgtcaatcccacgatatttgtactcagcattaaacccacgatcttttctgtttatatccattgtaacgagaagggaaacacttcctctccaagtttacagccctataaatagtgatacatgttcactgggcaaagggtcgcaaacagtttagtcgagaccttaccctaaatatattatctaagaattcttattcagagatactgttgtaagagctatattaaaggaatctttctccttattcttgagtcaatacaaataacgaggattaggctattaccgaactgctcgggactgaacctctataaaattcttgtgtctttatatttgttttactatatatcgattgttataaataacttatcgcttactaaataagactcattgtcgttggctaaaaacgaggttaacattttggtgctttcattgagagaaggatcaagaatcgctcttcattcaaaatctaaccacaaatacgatggtggtgcagactcgtaggggtcagggggatccagccaatccacagacggtggatcctgcatcgtagaacccaggaaatgcaagggttccaccagcttttaatcctggacagccggcaaacgtgagtcacagtgtaacgactgctatagatgaaatcacgcctagtgtgtaagagactgggaataacagttccgcacccaacca

SEQ ID NO: 354290 - DNA, 655 bp, Cannabis indica
agaccgcctacctttgtacaaagacagctcccggagggatcccaataagagatgcgagtaccacaacgacattgggcacaacaccaatgaatgcaaaaatctcaaagacgagattgaaaatttgatccgattgggacacctctacgagtggatcaagaaccggttgccccatctcaacccgggtcaggcggctggagctttgctgcaaggagcaccagggggtgcagcatgagtattggctctagttgtttcccccggagatgcccaacatattcccggcctgccacctagacccaacgggagagtggctatgatctcgggaggaccccacatcggaggaactacccgcaaggagctgaaacggtacgtaggggccgtgaaacacgatgaggtttgggaagttactcaactcccagctcaaaggccccggctaatggatcaactcattacattcacggaagaagacgctaaaacagtgcgctttactcaccatgacccattggtcatagagacccccattgccaataagatcgtggctagagtgctgatcaacaatgggagttccgtgaatcctttgttcaaagaggctttcactgcaataggcctaacggaccgaagacctttcaccaagtggttcccaactcacagggttcaa

SEQ ID NO: 354291 - DNA, 709 bp, Cannabis indica
tttagaaaaatagaaaaatttggaaagcttttctctcaaacctctctctctttttcggctctcttggagcatcagaagccagccattttccttggtgattgaagctctattttgcaaaactttagtgatctctaattgttggtaagctttcttcatccttctctttgtgttttcttgagttttaagaaagtttggtgtaatgcatgcatgattatttgatattgttgctgctgtgagtttgttgttattctctgagatttgagcatgttaaattaaggatatttgagttgtttttgaagcatgattcttaggttgagcaaagctaaggtttttctatgcaaaaattatggttttcaaagagaaatgtcttgaatctgttgctgtgatgttgttgatgtttgtagttgtttccagaggctattttatgcatgtttaagtaggtttggactggtttgattgcatgctggtactgtttgatcaagtttgagtttagaactcaaagcttgagctttaatggtgatttttgcttatgtgttttctgaatggttttgatgctttagaaatgttatttgggttatatggaataggtttggaaggtttgaggtgatttgggttggatttggttgagatatgaatttttgaatttctgcctgcgagcaaccggaatttcggttgtgcatccggaattccggatgggcttcgaaaattc

SEQ ID NO: 354292 - DNA, 492 bp, Cannabis indica
gtcttatgaatgttcgggactaaatatcgtgtgggacacggcagttagggttacggtcaggggtatgggcgtcttatcataacccgggatttatgtatgattatgatttatgcttttcttactgagtctgtcgactcacagtgcaatgtttatatggaggtaagggcaaggcaaaggctgaagaaccgtgagagcgagccggtgaagattgtacatttccgggcgattaggcctggagcgtacgatcctcgggacagcagtggtttttttgtaattagtcgctaggcgacaagtattttgtttagtcagtaaacttttgtaaagtgttttgtaatcgggatcccgagtatttttgtataaatattttataagtttaattaaaaagcaaaaattttaattaattacgatttcgataaacctcgtttattagccacgagctgcacagtacgtttaaaaatcacgtaatacgcttatgctagttagggtgttaca

SEQ ID NO: 354293 - DNA, 550 bp, Cannabis indica
cgagataagtggtcagccacttgaagatgtaacacccaacgaatgagtcttggcttcacatctttcttggcaattaaatatttgatggctgaatggtcagtgtagacaatcaccttcgttcccacaagataagattgaaacttgtcaaaaccaaatactacaggcagcaactccttttcggtggttgagtagtgaatttgagcatcgatgagagtcttgcttgcatagtaaatagaatggaaaatctttcctcttcggtgcccaagtactacaccaatagcaaactcactagcatcacacatcaactcaaatggcaaagtctaatccggagctacaataacttgggctgtcaccaatgcctttttcaaaatcacaaaagcctcatgacactccttagtgagctcgaattgtaacaccctaactagcaaaggcgtgttagcgtgatttttaacgtactttgtagctcgttgctaatcaacgaggttattggaaaacgtgaataataaaattttgcttatttaattaaaacataacatataacttttataaa

SEQ ID NO: 354294 - DNA, 546 bp, Cannabis indica
aaaaaaaatcgcaaatctactcgaaaatttatctttattttcgctatctatctttattatttttgctatctatttattacatatgaataatacagtaaaacaatagtccctggtaacgccgccaaaaaatttggtacgtgtcgtaagccacaacaaatttactattttttcttattctaatacttccaattattttagtgtaatcgtaattaaaggtcgatcccacgagcattatgtttatttaattattaacaatttagtagcaagaattataaaaaatgggggattttgatgattagaataaaatagcagaaaacaagtttaaagatagagtacgatatgagaaatttgttaaaggttattccccaccctcaacaatcattcctagttcttattaaagaatgtaattttcagtttccaatcaaactattaatcccgcagataacgctgaagcagtcaattatcccaatctccctattatatgtaatcaaggcgaagcgctcaataactaactcttttacctaaagcagtaaatccatgaagcat

SEQ ID NO: 354295 - DNA, 705 bp, Cannabis indica
agcttagagatgtttgttttttcatctttttcggaaattatttatttagttgttcgaattttttacttatgatttttttgtttatgttttttttttctagtacaattctgtttttgttacttctgtagtatattgtattttagctttatagtttattttattgtttttgtgatgtttttgttggaactgttgcatgaatgagattacatatatgaccaaaagaatctatttcttgcagaagctgtctccactgcttcatacaaggttataaatactataaatacttgtctttcttctaagtaacttgaaatattttagaaaacctgttttggccatttcattaagcttcttgatttcaaagtgcaaccgtaagtttttcatgggttgttgtgggaggttcagcaacctaatgatgttgaattgtgggttttgattcgtggtgttaggattaggtttagcgttgaggagtttgcacttaaaactggtttagattttggaagtgattgtagtgtgttggattttaagcaagatgttaacagtctttgtatgaaatattggtcgatctcaacctttattactaaagaatctgttagggaatgttttaccacaaagaggtggggtgattctgatgaggatgttgttaagttggaagttcttatttatttatttttttgaatggtttttgcttagtggtactaagcataa

SEQ ID NO: 354296 - DNA, 697 bp, Cannabis indica
gacgcatttcaaattgacttctttatctcaagtcaaaataaatgttcatataaacatttaaggccacctgaattactaatagcgtttagaaaacaaaaacacaaaatgtgaacaagagtatggattattaacaagcaaatgttatagcaccttgttcctacgattagaccatcggaggctgagttttcgccatctttttcttggtagctggaacaacgagagagaggaagaaagaggcgctgtaattttttttgaagggagggaggcgctgcaattgtttttgaaggagggaggcgatgtgttagaatggagagaggagaagttttagggttttgttagtttggttgtatgaaataataagagagagaaaaatatatttgattttattaattaattaatcaacttttaagaaaaataaaaaaaatcaatatatgcttttctttaggtgtttcagcgtcactttatgggtgagtgggaaagtcttcccacacgcgtattgggtgacgctatagttaattaattcatttttaataaaaaataaaaaagtaaatttaaattttttgaatagttttagtgacacgcattgtgggttagcaatactaaaattttaaagtcatataatgcgtgtcactaaaaattctttaaaatatttagtgacacgcaccttttgtgtgggtcactatagagtgtcactaaa

SEQ ID NO: 354297 - DNA, 425 bp, Cannabis indica
tttatttagttttgttttttaattttaaaaataaaaaacaaaatcatcctaccgaacacacttatcaattttgtttttacttttttaataaaaaaataaaaatccaattttaaaatcattaccgaacagccccttagttaattaaatggactaggttgctaaaataaaatatcacattgataggttttagttaggcccaattagtattggacttattcaatgaataacaattatttaattaatggttaaattcctctcctttgaaccttgtgtgagagttaggtggccatagtagtgaatatgacatactgaactcagccctcctccacacaaaccaccccaattgtgaaggctcatttaccttatttagataattgtattaggctaattaaattagtttaacctaattaaaattaaattagcaa

SEQ ID NO: 354298 - DNA, 659 bp, Cannabis indica
cataaaacctaacataaattaccttagtaaacctgctattgcatagaaatggataataggattaagccatattcaacagatacaattgaaatcaaagccctaatctttattaactgttaatttcctatatttatttatttgtttcatacttccactagttttctgattttaattttctctcttaatttttatttaaccaaatagaagtaagaatttaattttaaagtacttaactacaatccctgtgggatcgacctcactttttgtgagtctattactggttaacaatacgtatacttgcgtgttaaaattaccacaacagttaccaaacatgttaggagacatattttgtggttgttgaaaaacttgttgttgtgacatttacattggacgtggggttaaagtaaatgcgctaccttgctgttgtgatggtaaaaaaattttgtaaaattttttcaaatggtgggtcatgtagagaagggtcactagaggtgccaaattgatcaatcttatcacgcacttttaacataaactcagcaaagactcccatatcttctggactaatggatgtagatgggccttgtgattgagcttgactttgagtactagagcttgttactgatttgtctttcaatttataatccactcctctttgatag

SEQ ID NO: 354299 - DNA, 555 bp, Cannabis indica
aaccgctttgatgacggaggtcggctttggcttaggacgagtatggggttctgtttaggtggtggaaatgtggaagtggtgcgcttaggcttgggttggcccttggaggttgagggagtggctttggtggttggagctttgggtttaggtgaggaggccttacggggacgagtacggggtggtgagtgtgtggtggaggaaggcaaggcaagggttggtgggtttggttgggttggttgttgtggtggaggtgtgggcaaggtgttggccagagctttacgcttacgagatttggatttggcggttgccatggctcaatctcacaataataagctcgaaaatatctgagaaatttggatgagcaatgaccctgaaaattatttgacggactatcaatggcacgcgagattgggtctcggagttgttgctgagatggggaagctgaatgtgggtttggtctaacgagtggaggttgagtgtgggcgtcgggtcttggtaaatgaggttctggagcggaggttgaaaggagcggttcgcctggaaaaatggaggacg

SEQ ID NO: 354300 - DNA, 981 bp, Cannabis indica
catggtagttcgattagtgggattgctaaacatagatttagaatctataacttctataagtatttagaagtgaaacgatgatttccttcaaacttggctgaatagagataaatgattgagatatcatttcagtaattatattagtttaacgaaaaaatatttataggtagctaagtgttttaaggataaaatacattgaagggtagaacggttaatttgtcccttttcgatgtagatcatctatagaggatctttgactattaggattgtaacaatgaataatcataatgtatctatattgtgatacatacatagcattctatataattgagagtgttaatcaattccaaatctatattgacgcaaggtggaattaattattaggaagtttacttggtaaattctagatctacttattgaaaactcggttatataggctcatgattcccttactagttgagataatactgcttgcagacttagttaattgattttaattaatcaattataattctaaaattagattatgtcttatttatgaattttcactaagcaagagcttaattgtgaagaaaagagattttggggtctatttattaattaagagactttgcttggtataattaataattaatataaatgataattttatttagtaattaattataattattaaataaatagttttggcatttatagaattgaattggaaaatattgtattattgaaagaagaataagaggttgaaataaagtggcaaaattgtaactagagaatggtcccttcaaccaaatcaaacatagttttcttctgtgagacaactagtagatgagagacgccttctatacagttttcaagcctccttcattgttcttcatattcgaatccttagtcatagagtgtcatgcccacacatagcaagtcaagtactcaatcatagttagtaagagagtgataaccaacccgaaggagagaaagaga

SEQ ID NO: 354301 - DNA, 526 bp, Cannabis indica
agcactggtccaaagccaacttgccaagtgtgctgcaagtatgggcattctgctgcaatttgttataaccgatatgacgaaaactacatgggaaatcaaccaaacactgctggaaatcaagataagcaatttgctgcacttgtagcaacaccggagatgctcaatgacgactcatggtacgctgacagtggtgcgagtaaccacttaacagctgatgctaataagctacaaaccaagacagaatatgagggtaaggagttaatcacaattggtgatggcagccaattgccaatttcacacattggtacaggttctattcaaacaaatacctcaaactccttactattaaacaatatgctgtatgtacccagtatatctaaaaatctcgttagtgtttcgaaactaacagccgataatgatgtctcaattgaattctttcctgatttttgttgtgtgaaggatcgaagcaccgggaaagtggttctgcaagggactcttaaagatggactgtatcggattgactcaa

SEQ ID NO: 354302 - DNA, 692 bp, Cannabis indica
agattgcaaattgggttgttgcctaactagactgacttacgaattgacaggtttgtcctataaaagggacacctggtgcaatatgcagagttagaataatatggttagggctagtaacggttggagaggatggaatctaaattgttcccataaccaaggtgaaagccattggagggctattggcgggagtgatgattatctgccacaggctctgttcgattcggagcagaggttcacttagatggaagttataattgaacaacatgaagaggaaattcagaggttgaaacaacaaagatctcctgtagtaccttttaccttatataccaaaagttttcaatccggtattaccagcggatcagagtatggttagtagccaagtggaaccattacaagggggaaattggatgcaagaatctccagtcctttagggaaatttagaggtgaaggacacctttgggactgggagccctaaagaatctgctttaaagcctcatgaggttatgacagaaggtcgagttactgctccccttatttccatttatggtggaggtggtaggggctccgtacgtggttgagcagaagaggaaacctgcattgacagtggtgggtttaagatgaaacaaacggctcagatggaatcaaggcagaggtgggcgctagggttattcttaccctgagtacccacgttg

SEQ ID NO: 354303 - DNA, 594 bp, Cannabis indica
gctgatgatgattgtacatgtcacgacgatcttcaaaagacaacctagcggctttggtaccaaattataacaccctaactaattaggcatgttaacgtgattttaaacgtactgtgcagctcgttgctaatcaacgaggttattgaaaattgtgaataattaaaatttccttatttaattagaaactaaaagtagtacataaataaaatcttgggatcttgttacaaaatacatttacaaaagtttgatagtttaacataaaagttttttcacctaacgactgtcagcaaaagccttgatgtcccctaagatcatacgctccaagcctaaccgcccacacatgtacaatcttcaccagctcgctctcacggctcctcagctttagccttgcccgtatctacaaattgaaatagcactctaagttgatagactcattaagaaaagcataacatataacatactaatatcccgagttacaacctggcgctcatacacccgatcataaccctaatccctgtgtcccacatggtactgagtctagaacgttcataggacaatactatcgacaataatgtcagcctatactcaatatgc

SEQ ID NO: 354304 - DNA, 640 bp, Cannabis indica
tcgggttgacttttgacttttagtttttaaagtcctcttttggatagggtcttgaattcttgatctcttgataaaacttttgatcttatgaagtgtgaagtagttgatatacttgttgaatccacttctttgattatgtttgactttaccgagcaaatattgatactttgtgaatttgcttgcaaaatggtcaagaaaagattagtaacaagtaataatcaaatatttgtttatcatcaaaataagtgagtgattgacttttggtcaacaacttgtaccccttgtggatatcccatgaacacacatgttctagtttttgaatcaaactttgtcctgtgtgcagtgagggttgaagcaaaaacaaggcaaccaaaatttcttagatgctcatagttaggaactttgtcaaatagcagttcataaggagtatgtttgtttaaatttggtgtaggagttcggtttataaggtgtcatgacacaatcagtccaaaattcaataggtaagttagcttgaaaaagtaaggcacgagcaacatttaaaagatgttggtgctttctttcggctacagcattctcctgttaggttatttttagtattaattttagattaagtttagtatatttttattgagttttaatc

SEQ ID NO: 354305 - DNA, 931 bp, Cannabis indica
gtacctttgccccttaaattttgataactattaaattataccccctcaaaataaaaatgagatattttgttagtaaatcttaaaaaactaatttaaatcttaagaaaaaaattattttgaatgattaagaaaaataaaaaataaattaaaattttaaaactaattaagtgatataaaaattatttattttttattaaaaaattcatatagatattaaaaatttaattttttaagatatgtgtttataaataaaataaattttgaaaatatttttttaggaatagtttaagtttttttagtaaaactaatagtttttaattaatttaatatttttattagattttttaataattttttttttattttttttttcagaattaatataatattataattggtttataagaaagaattttataatttttaaaattaatttagttttaataaatgggggcaaaatttcgtattagtcaaaatttaggaggtaaaatactaatttttaacggtaaaaaaatgaaacctaacataattatgtaactgtgaaattttttaataattcgtatatttacgctaattattttatatattaatagttttcaaatatattctttaccagttgcaataatataataaaaaactattatatttaattaaaaaattatttttgtgtaaagtttagtattgatggttggaatagaaaagtaatatcatattaaaattactttatttttttttaaacaaatacaagtatttatggttgtagttgccctaatattttcaaaggctaattaggatttttgtccctaaattttaacatgtactaaatcatgctcctgaacttttaaagtggttaaaaatgctccctaaactattgagattgttggatttaaggactttcgtctaattttaataaaaaaagtctaacatggat

SEQ ID NO: 354306 - DNA, 657 bp, Cannabis indica
accatcggtttgaggatgaaaagctgtactgaatttcaacttagtacccattgcttgctgtaaactttcccagaatttggatgtaaattttggatctcgatctgaaactatcgacttttgggcaccatcaagccgaactatctccttgatatacaaatcagcatattgatccactgtatacgttgttctcactagcaaaaagtgtgcagactttgtatatcgatccactatcacccaaatagagtcataataccctattgttctgggcaatcccaccacaaaatctatggtgatatcttcccatttccactcaggaatctttagaggctgaagtaaacctaccggccgttgatgtgctgctttaatttgctgacaagtgaagcatcttgacacgtattcaacaatatccctcttcatacctgaccaccagtataaagctttcacatcatgatacattttggttttcctcgagtataaggagtatggtgtagtatgagattcatcaagaatctcctgtctgatatctttgtcaaccggtatacaaattctattttttatcgtaataacccatgagatgaaaatgaaaggtctttttccgacccagcctctaacttctccttatgcccctgtaactcagaatcactttgttgagccact

SEQ ID NO: 354307 - DNA, 932 bp, Cannabis indica
caccctacaggtcttacttcactttatgcgagtaaacttgcctggactgcgtcataatattttggccaaaaacaaaatgtatgtcgataattttcgaaaaatttaataccatgatccttgcaatctcatgttagtttattgcatatgcaaatattcaacatctattgtcgatataatttcattatatgataatttcctcacatattgacataacttacagagatctctttaaattacatagtttttttaattatttttatcatttataggtacctatatagaaccactttagggattcaattatgatcaaatatgttgtgtctaatttctctaggtagtctcttttagagtaccgtttccattatggttatcattttcaaattatcaatactttataacattaaggtatctccatgagtacctctagatttaacaacttcagggcaaatcaaagaacatttattaataatttctacattgttcatttacgcttcaggcgttttcaactcattctatctcaactttgaataatattgatttgcagttggtatatatcatttgaactatattgttcttatatactttgtgcaaggatcatttttcaaaaattatcatcaattccaactgcttctctccccttaggactgaacattttgacaaaatttgacttggacctgacccgctcaacccaaaaattttaaaaaactcgttttgtttgggtgggtcggttcaacccagtacaccatcagacgggtttgcagattggttttttatggtcactaggtttcgagttgaacctgaacccgctcgccaacctggtcactttttattattttctatttttattacatatataatatattaaaaataaaaaaaccttaaaatttaattattttatttttattacaaagataatatattaaaaataacaa

SEQ ID NO: 354308 - DNA, 1064 bp, Cannabis indica
atggttccatccattctttttaccttgtaggtcccggaaccaatctcatcctcgattttgtatggtccttcccaattcggcccaagtacccccactccgggttcctgagtggctgggaagactcttcttaagaccatatcaccaatagtgaattttctacttttaaccttagagttaaagtacttagtcaccttcttttgataagccgccattcgtatttgagactcatcccagagttcctcaatttgatccaacgcttcttgtaataaagccttgtttgttgttggatcgtaagttgttctcctgtgggacgggaatagcatttctaccatcgcctcacaaacgtacgccattgaaaatggcgagtggccggtcgtggttcttggggttgtccggtaggcccataacactcttggcaattcttcgggccaattgtttttgcaggccagcagctttttctttagggtgacctttaggattttgttgaccgcttctgcttgtccgtttgtttgtggccttgccactgcggagaagcttttaacgactccgtgttggttgcagaagtcggtgaattcttcgcagtcaaactgcttcccattgtctgagactattttgtgaggcaagccgtatcgacatactatgtttttgataacaaagtctagtgcttttttagcagttatagtcttcattggctcagcctccgtccactttgtgaagtagtctactgctactattgcatactttactcctccctttcctgttggcagggacccaataagatctattccccagaccgcaaagggccagggactagtcatcagggtaatttcattgggaggagctctaggtatgttcgcgaacctttggcacgaatcacatttctggacgtagtctatgcaatcttttttcattgttggccagaagtacccttgtctcaatattttctttgagagacttgggcctcctgtatgatctccacagaacccctcatggacctctagcataatttgcttagcttcagggtccgatacacaccttaaataaggcatgctgagtcctcttcg

SEQ ID NO: 354309 - DNA, 773 bp, Cannabis indica
taaggccttagatagctcatctcagtttttgttaccgagttcaacttgattatgccttgaacgcataacccttaatctcaatatgtataacacataattaatggtgccactgcactatttgtctatttgctatagacctgcatgttacgctcacatgcctatttatgtctacgtggcgtagacctacgtgttgctctcacacgtctatatacaacaaggtcttagtaaggtttacctcggttctagttaccgagcctaacctggttatgccttctcgcataaccctactcatatatatacataatccatacattacgttctttcggtggtttatcttggtgatatacaccaggtctaactcagttatgttttatacacataacgcttaacaaacacgcatgtattcaatatttatgacatcatataaaatcttagggtaataaccctaactcatattttcattggattaataacattaccatatgttaacgctttcttactctcataatattctagggtaacaacccaagaccgcattaaaattaaactaaaggtactagtttaccgagtctaacttaattatgccatgaacgcataatccataatctcattatacatagcatggcatagcatttacacaatacatttcactagggtaataaccctaaactatcaatcgctaatattagggtaataaccctaatcccggttacaattactcacatatatcatattcaacataagtgccaccgcgcatactctacgtgcaaact

SEQ ID NO: 354310 - DNA, 730 bp, Cannabis indica
cccagttcgggttgaacactcttaccgatgcatctctcgtatttgtaatgactcatcttaacaccaagtctctaacattgaatagtcttttcttgactcttgtgttgaagtatcttgtgaatcggtgttggtatgcggcgttggtgatttgggactcagctcgttttttctcaagtagatccagggacaattttaaaagttcctggctttcttcttgattataaaactctcttctgtgagtcgatatgttcacttcaataggcagtattgcttctgagccaaatgctagcgagaaaggagtgtgtccggtggttgttttctcgttagttctgtgggcccagagcacccgaggtagctcgtcaacccatctacctttggcagcgtctaacttcttcttgatagtctcctttagggttttattaacagcttccacttgtccattttcctgaggcctgcatactgacgagaagcttgtgataatttttatttcactctcaaaattcagtgaacaagttgccatcaaatcgggttccattatcggatactattttcatgggaattccaaacctaatgataaagttcttgacgacaaagtcaaggactttcttacaggttatggagacgaggggcttggcctctgtccatttagtgaagaagtcgactgctaccactacatacttagctcctcctatcccagtgggtaatgttggaatttattttaccaggatct

SEQ ID NO: 354311 - DNA, 1379 bp, Cannabis indica
taaactcttatgtgtttatttcattgttttaaaattcatattaggatgttaatgaaacatatttggttgtaaatctagatcctggtaaaatatttctaacagctagtatatggtttctccaaccaaagtgttgcgcctttggaggaaattcgtctacccctcactgttggacaagctccaaagagaataactgtgatggcataattcctcgccttctagtgattttggtaaatcccttaggtggaaaattatattccttccctttttaatcggtctttttaatgatagtaacacctcatcttgttttgtagacatgggttattaagatatcatggaccgaaaagggaagaaaagggcaaccaaccctagggattccacagctgccgaggtggttccccccaagagacaaaggaaaaccactacccataagaagaaatccctggccaaacccattgatctcgaggtttctgacaacgagatccaagagcaagttcctgctccggtcgtttctgacaccaatgctccttgtcccaaggaaaacccactactacttcttcaagccaggccactgagaccttgtcggttgcagtaggggaggttgggtctgaatttgcccaggcatatggagtcgcctgttggcacaaacatcaaactcttattccccctgattgggattttctcaatcttaggagtccaaaaaaaatgctatcaaggaccttggacttcatttcatggtatgttggctttattataattatattattgtttttatacctctttcatattcatctatttgtaattctacaggcttcttttgcttcttttgcttcccatcgattactctctgagcgacttgtatacttggagggtgaggtccacaagttattatctcaatgcaaggttgtgattaagcactgggacgacgcccaacaagaaaatacccaccataagcaagaagttgagaaagcgaaggaggaagccgagaaggcaaagaaggaagccgagaaggcaaagaaggaagccgagaaggcaaaagaaattgccaagaaggcaaaagaggacaccgagaaggcgaaacaagaagccgagaaggtgaaggaggaggccaagaagaccgtcaaagcccaagccgatgagttcgagaagaagcttgctgaaaaagaaatcgaaaccgtagaacggtacgataaagttggttttcacaccgtatatcgggcctggatttggaatcctaacatggacacaagcttcttggaggagaaggaagaggaaaccttagctctttggagaagaccaggctaaaggaggaaaatggcgaggttgaggaggaagaagaagaagatctgtccaagtctcccattgtaacgccctaatctata

SEQ ID NO: 354312 - DNA, 681 bp, Cannabis indica
ggttctttgcacactcacatgtctagaaataagttgcacttttgtaggtaagcaatttttcaaggctctccaaacaagattaagtgcttttggaggcactttgatcttccaaaatcgctgccagaatcgggtatcaacatcggcaatgctctcatttttctgatcttgctgaaatgtatatgctgaactgacagtgtactcccccaatttatcaaagccccaatgccatttatccacaccagcagaataaaacaaggaaatacttaatattttttcagcatctctattgttgaaaacatcccttacaagctcttcatcccatttcctatctcccaaaaccattaatgaatcaacatttttattaacaatggattgactcaccgtggttacataaggattagagatgtccggaagccatggatctttcattatactcactgccgtaccaggtcctatagcaacacgagtgcctgatttaaccaaatgcttagcttctaataaactcctccaaatgaagcttgggttagaaccaatctcagcatccaagaacgacccagtagggtagtacctagccttaaaaactcgggctgccagcgattgaggacaaacgagcagcctccaacattgtttaccgagtaaggccatattaaaatccctgagattgcgaaaaccaagtccccc

SEQ ID NO: 354313 - DNA, 548 bp, Cannabis indica
tgtctttgttcaattagatgtgacgcaatgttgattgaattctaatttttggccagctttaacatttagcaagctagatcttacttggaaaagtaagacctagttgaacccctctaattgatgcatgatttttaaccctcttttaggtgttaattagtagtgaaataggcatattttggtaccatgcataactaaagatttgatgctatattggaatatttgtgatctaatctgatgtaggaatgcattgttgagattatgaatggtttattacaagtgttggaaaaagcttgcttgtctttttgaaatctgtaactctgccaggattgctgagtcattgttgtatcaactggaacatacaagtggaaattaatcacccaattttatttttcaaatcttaaattatcaccactttaatcacttttagcttcttatttttagttatttaatttaaaatattatttctcaactctagaatttaggttaagaatttttctcttgaattaattagttactttgctttattttatttgaaattttcgaattgc

SEQ ID NO: 354314 - DNA, 752 bp, Cannabis indica
ggagatccatgagttttgttgaaaatcaggtactatttgtttaattttgatcggaagtgaaggttgaggacgggttgaggtgagttttcgggacctgcgttacaggtatttctattcttgactgttttaaaagcttaattatttgatatgtataacacgaatagatccactttgaactttattttgattctttgaccaatgcatcgaaagtttttggctcttgtttatttattttgggaggagtttatatgggatgactcatttgatctgtaaaatgggttttggggttagctctgcaattgataatgataagctctctgttttgtgaaatgggcatgtgattttgtttttccagtttttcagtggaagatgaaaaaactcactttctctgaattggggttcgtaaagttttattttttcggacctagggacacgattgcagttgataatctatgataatctcttgccttgccttccttcgtgtgtcagtgtgcgtgtgccctgtttgtgtttgtgttttttttggcatgttaggttagacaatggactgagtgttcttttttgtgcattcgtttcatatgcatcttatgtttgttatatcatttttttttttaaaaaaaaaacgagacagaaaaagaatgcaataactcatttattttaagtagttttaccatggattttcatctatctgttttatttatttatttattttgtagaatgaaaggaggtttttatggactaagggctaaaga

SEQ ID NO: 354315 - DNA, 675 bp, Cannabis indica
aaatgaaactctttagccatacaccatgtaaagacctcttagtttaaatttggaaattagcagataattagggtttaattatgaaaaatatttattgatattaaaataattatttatgatgatttaattgaatttaaaatgcattttatatgtcatgtatagaaatttcatatttttacatgttcagtgcccgacaacattggaatgcggtgtatggctcagtagaatcacatcttggtatttttgtatagcggggtagtttagctagacattgggaatgtcgggaatagtcgaaaatttagaatttcccaaaatacccttagtgcccttttatgttgtattagtgtgggaggggaaaaatggtcattttgccccattagcccctttgtctttttgtgactttagataaaatagttattcaatccttaggttattttatgctgatgttattaagttaatgaaacatcttttactcattttatacaaaaattagaaaagttagaaaatcacattttctctctcaatctcactctctctttcagccacccttagagcagctagggttcttgatttttgcttcttcaattctgtgttttccagcagctcaaagtgtaacccaagccaaggtataatttctagcaacctcttttttgttttcttgagttgtaaggaaag

SEQ ID NO: 354316 - DNA, 545 bp, Cannabis indica
agtggtatctaataccgccaaaaaccctagacatccttctcgtaataatttcgtggtcgttaataccaaaattattgggatttgagatccctgaacaaatccaccaaagataaacggttcttcgccttcttgttggaagattaccatcttcctcttacaatcaatactggatgaatactttgacaggaaatcaattcccagtataatatcaaaatctgctaaactgatttctattaagtcagcacttaactctctatcctcagttctgatcggcatagaattaatccaccttttggagataactaactccccgccaggcagtagggttccaaaccctgattcataactatcatacagtctatccaatttactaaaaattcttgctgccacataagaatgagtggccacagagtcaaacaacatagagaaataagaattgttgaccgagagctgaactgttaccacagaagggctgacttctgcatcagcctgcgctattgcgaacacccttgctggagtgggtttcgctgcagtcttcggtgctt

SEQ ID NO: 354317 - DNA, 721 bp, Cannabis indica
caccttcaacgatatataaagggggtaggaagatgcctatgatcagctcgctctgcccaataactcgagcgacccaagattataaccctcctccgtgagaggaagggacaccttggttatctcgagagggagcgagtcacaagaatacaaggggcagttactctggtaaatcgattttgtaaaagaattgtgacatgagtagacatcggcccactgtggttgccatatcaagctgccacgtggaaagctagacgacaaccagtagcagtcaaagacaaataactaaaacaaggattacattacttggaaccccggtatatgtcagggattgaccttggatattgaaacaattgtgggagtatgttaggaattgaccctaaacaacaaaacccgttttatcaaaactagatgcttctggaagactgataaaataagcaattgaactggggaagttcttttgagattaatgattgtaaatcacattactaatgaaatattttgaatttcagttgtgaataaaataatcatttctttcaaacaagtaattataaagcgtaaaccctttaaggtgcgtttggaaagccacactgtaattggatttgtgtgtaattggaggtaattacacaatttggcatgtttgtctgaccatgtaattacactataattatgtaattggaagtaattgaggggttccaattacactcttcaattctcatggccc

SEQ ID NO: 354318 - DNA, 513 bp, Cannabis indica
taaaatatttccaacagttttcaagaatgtgtcatctaccacaatcactagtttgcaatgaatccattgaatttgacagtgctaagaacatgtacttgaaccggttcttcttgtctgttatcaattcggttactatgcctggattttctttttttagcatatgaaggtacattgggagttgctggtatgagtgttctggctttcctcttgacaataatagagccttttctcttgttctccaacccttttgatatcccatcaagaccccaaactcatgtagcaagtccttcatgatgtcattcgatgcatgcttcctgtttattgagtcgtacttcttctttactatttgagcaatagtattatatgttgcttgcctgtgatcttccactatgacatccaatgagcaggtgtggttgttgacatattttctaatcttgaatgtttgtgtttgtttcaactttgaagcacgcaaaaaccaattacaattttcgtcaacacatgtaaccatgtatt

SEQ ID NO: 354319 - DNA, 463 bp, Cannabis indica
ggtcgaagtaaaacagcgactaggcgagccactccgggcatacatcagcagattcatgacggaagcgaccaaggtatcacgggtaaccgaggatggaaagttatccgcgatacttgggggcattgaagtccttggcgaactatgaaaggacataaggaaaaatggaccagtcgactcaatgagtgatttccttgatcaggccaaaggtttcatcaagctcgaagaagccattcagcgagcagaaggtgagcaaaagccgaacaaaacgaaggcttcttctactggaacgtcctcccagcttccccaatactccagcaattcaagtggcaaacgtttaggcaagaaccacaagtaagggaacgggaagaagggaaagttcgccgaaaaacccggatagactccccgtgatcaccccacacacactgcattcactatcttaactgaagatatagaaagtgtgtac

SEQ ID NO: 354320 - DNA, 878 bp, Cannabis indica
ttttaatttttttgtgtctttccatacttaaaatctacaagttctacttattggagaatttatttccctgacagtggcgaatgagtcatatctccctcttcagtacaatcagatgctttcttcttccgtctatcaggatgatttgtaggcaagtaccgtgtgtgacccatataacacatcttgtgcctattttccaagcgacaagccgatgtgttagtgcaataaatcggacaaccttcgtaaccttttgtgcttaagcctgataaattactataagtaggataatcactaatagtccacaataacattgctttcaaattaaagaattcttttttaaaaccatcatagacctaaacaccattctcatacagttctattaaatcgtcaatcaatggttccaaatatacatcgatattatgtttgggttgttgcgggcctgatatcattaaagaaagcatattaaattttctcttcatcactaacaagggaagaagattgcacataactaagaagacatgccatgaactatgacgactacttagagatctatgtggatttactccatccgcggacaaaccgagacaaatgtgtcttggttcagatttgaattcacgatttatgtagtctacttttttccaagcctgggaatttgcaggatgtctaagttttccatctttaactctcttagtctcatcccaaatcaaattttcagaatgttctacattacgatataatcgttttagtcacgaaatcaaaggcatgtaccacatcacttgtagggggataagttttctgctctccttactcttgtttactttatgacgggaaaaaccacaagtcgggcaataatccatatctgcatattccttatgatataa

SEQ ID NO: 354321 - DNA, 1227 bp, Cannabis indica
tatgttaatacaggaaaagaatgagaccgactcaaagtaattgtgataatatttttacttataatgtagcactagaaattgtaaatgaaaacgaggatcttgaacctaaatctatcaaaaatgtcaaaatagaaaagattggcaaaaatataaagaagcaattcatgtagaattgaattcacttgctacacgcaaaaaatttggacctatagtccaaacacctgaaggtgtaaaactcgttggatacaaaggataagtttacataaaagaaatgagaaaaataaagttgtgagatacaaagcaagacttctaaggtttttctcaaagatcatgcattgattatgaagagacatattctcatgtgttggatgtaagatatttagttagcctggctatgagtgaaaactcgacatgatattaatggatgtagtcacaacttatttatatggatcactagtgttaacgcatattttcgttaaccaaatttgagcctcacgattatgattcaacatagaaataataaaaacaaaagaaaaataaaatatgaacaccgagtttttacgtagttttgcaattaaaattctgcatagtccacgagtaaatcttattcagattaatgagtattctttttacggcctcttgtataagagttttttcgtctcttttttgagattgtttgccactatttataattgcatagtggcagttaattacaaggctgacaaaaatgtatttactgtcattatcccttaaatcgtgggatctgattacatagtacaaaatgtaaacacggtgtataattttgaaagtcatacaactgtgattttcccgcttttactgggtcataaatatcgtgtattaaaaacgtctttaattgttgattctggagatatctcgagagaaacttgattgtagtgatcccaatggcgagctagaaccattcttctatccaagatcgacaagatatgttttacgtcgattgcagttataaggaaatctgctgacttcccaagtctgtgagtcttgcttctgttagttggataaaactataggaagtttccttgtagcgagatggtcatctcgcattcttatactccgagccagttgacttttatacttagtttacttattgtaagctgacgtacgtgttactcttcttgttgagaatattttatcaggatctagatttactaacacgtatgttgaattaacatcctaattatgaat

SEQ ID NO: 354322 - DNA, 762 bp, Cannabis indica
tctagttacaaagtccattgcaatgtcctcccacttccattcaggaaggactaattaaaggttgcaataaccctgccggcctttgatattcagccttgatttgttggtaggttaggcattttgacatgtagtccaccacatctcttttcatcccataccatcagaagtagggtttcaaatcctgatacattttggtggttcccggatgcagtgaataaggtgtggtgtgcacttcgtcaagtacctctttcttaagctcatcaacaccaggaacacaaactcgagtcttgtacaacaacattccactattcgagactgaaaagtctctaggccgaccaaccattacctcatcttgaaccttaactagctcgggatcttctaattgtgcctttatgattctctctaacagatcatattgtagtgtcaagttgtgcaaccttccaactagaaactcaatcactgcactaaccatttcagaggctagttgaggggctatcaaaaccgtggtacaaacctgcctgggaccccttctactcaaagcatcaaccacaacattggccttcccggggtgatgcagaatctcacagtcgtagtctttaactaattccagccacctcctctgcctcatgtttaaatctttctgggtgaaaaagtacttgagactcttaatatcagtataaatctcacatttttcaccgtaaagataatgccgccatatcttaagagaaaaaaccacagagaaagctctaggtcatgagttgg

SEQ ID NO: 354323 - DNA, 550 bp, Cannabis indica
gacataatgtcaatggatatcgatgggatgtcgatatttgttattttttggtattttttcctgtactcaccttgtttggtttgaaattgtaggagacaaagtatttcttgttgtatcgtacgatggtgtttggttatgtgagaattataattggatttacaaagcagaaggcagcttgacgttgacagttacaactgacacaaccctacaagaactgcgtcaaattttatatgaagagttggagattgatcctttagcgtatgatttaaagttggagatttgttccttgtacatgaagggacaaatggttccgccagaggttattaagaaagaacgccaactgagaacgttcttagagatgagggcaacaatgtcaaatacagagttcatgccattattcgtgaccaaggtcagaaaagtttggaattcgaagcctacgccgcctactaatcctctccctcggagtgtggtagggtcttgcgttcccgaaacagatgttgggattggtgggaatgaggaggttccgaccaatgtagaggttccgaccaat

SEQ ID NO: 354324 - DNA, 762 bp, Cannabis indica
atttaattaatttaaattaattataaaaaatacttaggttgctcagaaaaatctaggtttattttatattatgggctatgtgatataaactactataaaattgatagattgaattttcaggcgattttgtatttttcatgaattatttatgtcatttcttaatttaattatgaaaagtacctagattgcttaaaaaattcaaaataaattatttatggcttagtacagactataaactgtgttagaatagttagatttggttttcaattatttttatatttttcatgcatttatttagttgattcccaaattaattataaaaaatagttaagtgctgttaaaatagtaaaatatatttttgtaatactatttgctgtctatgatataaaatgaaataggttttataatttattagatgttgtaggtatttattataattaattgtgattaattaactatttaattgggttttgttagaataaatagtattttagtaaaattttacgtaaaaaatatttgtatgaattcatgttttacgttaaaaatgtttatttgagtacatacaatgtgtttgtgtgaatcaaaatgataaacgattatgtatagtgtgacatgcaagtgatattaacttattacgtatttttacgtgaatttctgtatgagtttagattatcatacttgaatgtattgttgtgttaatgaatatttgagatcttgttctcaacaaggaaacacattgaggtgctcgaggtagcaagtgtg

SEQ ID NO: 354325 - DNA, 851 bp, Cannabis indica
aaaaacccaaatagagacctaaacccgaaccgagacaaggacccgaatcgagacaaggatacgaaccaaaacctaaaccaggacccaaacccacacaataactgagacctggaccaagaatcaggatacggacctaggaaaaagaactaggaccgggacctagtacctgacccatacccaaacttgaacttaggacccagctcgttacccggtacaagaaattgaaccagactgggacccgagattgggatccgaatcgggaccaagggcttggacaaaaaccatagtcggtgtctggatttgggacccagccctggactcgaaccctaacaagcaccagaacccacacccggacctgaacccagtcccaaacaaaaaagtggaaccgaacccgtaacctgggatccaaaattggaaccaaaactgaaagttgattgggactggaactaggactttgacttggaatcataactgaaatcggacctagatacagaaccgtaaccgcaccaggacccggactccaaataagatctagacccaaattgggagccatacccggatcacaacccaaacctggatcggggacccgaaaccgaaactgaacttagaccaaaacatggaaactgactagggacacagaacaagggtcgggacctagatccacacccagtctccatcccgaacccaaactcacaaatggcaccttggacctaaactagaacaagaccgagacccgtgatagtgatcctgatcttgactcggattcgggtaacggggcctggaacagaccagtagtcggtgtctagatttgggactcagactagaaccagaacccagacgaagaaccaaac

SEQ ID NO: 354326 - DNA, 731 bp, Cannabis indica
aagtaaatcttggcaatacgcgagtattcaaattgttcatctgaataccagcggatattcgagttgttcatctgaatacccacgagtattcaagacgtgaaacagtgcctatacaagtatatcgtgtgcggttatgtcagtttacaggtcatattctatgaatttacccaggtttttttacctaaaacacatagccccataaacatacccctctgtgaccgcacctgtcacatcgcgaaactaggggcatgtgttatagtgagatttctctcacctagaaactcgagacaagactcctatttaaaggacacgtatattcagatttccaatggaagctgaaatgtccatgagagactcctcgaagtttgaacctcgccaggataaagccagcgagatcttgcgagtacgaccaaagtcggatcgcgtaactgtaattcgcgttatgcaggatgagagaatggatccaactcgcatgtgtcgggacatatgcgagtatcctctctatacttctgcgaaagcatagagatcaactctctatggtgcgatttggtcccaacgacccaatagccttgataaaccgatatagactcgcatgtctaggttctatcagctcgatatgcgatgtctacaagaggcgattgcttaaggactcagacagtccaaacgtaatgataaccctgcgagctcaacaacggaacatgaacagtcaactcgcagatgcggaagacgca

SEQ ID NO: 354327 - DNA, 904 bp, Cannabis indica
ggaacgggctccggaggtccagaacccatccgggaccgacctaggaaatctcctaagtttgaaaaataataatccttggcatgatctccccaccgggtcgagggcatcctaaacctaagaagacgttcatcgaaccctacaggcctaaggctggcatactcgctaacaaaaggaatgtaatgtactgctaaaggagacttaccggagccggaagtgctggcatcaggagcccctgtattcggcacctgaacaaaaggctttggcctggggggcctcctctcaaccgggctcccaatgcgaagggacttctcggcaatcgtttggcttcttctctcgaccgggttccccacgcgaaggggcctcccggaagccgcctgggccttggtgtaagccttctcctgggcctgccggtagagatactcctagtacttcttctccgcggtggcaataagcttgtcccagaaggtcttctccgcggtaggcaccctcacgttcggatagataaccttagaaaggttagagtcctccaccgactggtgcggcaggatcagcttggccttccggcagttctccgtcgtgactaagcccccgacgtcgagatccacccggtcataagtcgcaaagacctgggcccgctgaaggaaaatctgaataggcacggtccgctcgtatggggggatcctgacccactccgtgagaagctccgggttctccacagctcggaacctggaggagaagaagaagcgaaggcgatactccttgacatgagtttgccgattgtaagggaccaccccatcatttgaagggtgggcccggaaaccataaaaactgtctttaagtttgtccccctttttggggacggaaacaagttcataaaatacaaaatctccgccggactgggaga

SEQ ID NO: 354328 - DNA, 536 bp, Cannabis indica
aaatccatttgcatctaaaaaatacttgagatgggagagaggatcttctcttccagtatacatcttccacgttggcatcttgaacttttgaggtagtggcaggagattgatctctggtgagaagggagttccgcgtgcacggtctaactcaagatcgttgttacgctgcctggccatgccgtgaaacatattcttcagttcatcgagcttggactgtacgggtgggctgacttgattggcattcttgtctggttgggccatgtcagcgtctttctgagcggggatttaagtatgggctccggaataattgtttgttgtattattctgctagtctgttccccttcttctatttaggtcgtcccttaggtcagggggtgttcccaacctatcgaacacagaagaacctggctgccttagcgattggttcgcttggttggcaggtggaatggctccattattttgcatggatctgtcgagcatgactcctcctgatgaattcccagacaaggtctgtccgcctacctcttggcccacga

SEQ ID NO: 354329 - DNA, 681 bp, Cannabis indica
aaaggtaaagtataggctgagcaatagtgagctcgggctagatgaaggttatacatatcgaggcagttagacttagagtgttcagatctttaggacaatagggcttcatgttaatagtcgttaggcaacaaattttgtatacaagtactttggaaaatagttgtaacttttaaatgggatctcaaatcatgtatttatatatatttaatttaattaaagttaattaacaaaaactttaattatctaaattttttaattaaccctttgattagcaaatttgtgcacaataattaaaaaatacgatagcatgcctaatttagtaggacattacactaactctttttgtaatttgtatattcttgttggagttgattatgtttcaaaataggttgaagctatcacatgtcacacaaacgaccacaaagtggtggttcgtttcttgatagaaaataatttttcccatttcggaacactacgctatcattagtgatggaggtacacaattttgtaataatccttttgaaaaattcgtgaaagtttatgtcattacacacactacaacaattattaccaatagtttcgaaattattagtggcgggcaaaatctgatgctaataatagtagtattagcggcggagtctagactccaccgcaaataatatgtattttttttttaatttt

SEQ ID NO: 354330 - DNA, 504 bp, Cannabis indica
ccaattctaaacttagttacaaactcaacatcaaagagtgaggagaagaactacctcaacttcaagccacaaccaagcttaattcccaattacaaagcttaatccaacaccaacatcaagcaattttcaccaatttagctttgaaaattagggagggttagggagagagagagggtcgggtaagagagcgatatacaccagaatttttcttttcattatctcaaaaatttagcttttatcaatataagtcaaataaggtcaaaagaccaaaatgcccctagggccaactctcacatattcacacatacaagggcatagttgtcattcacactcatttatttttcaaataaaattcagattatccattatcaaataaaatgccaattaattcaattcaaattgcatttcgggccagaacctgattcggcccgaaatacccggttgtgactataccgcgccaacctgtcagaacacaccttaaaagacaacacatgcatactatat

SEQ ID NO: 354331 - DNA, 455 bp, Cannabis indica
tggcatagacccacgtgttacgctcacacgtctatttacaataaggccttggaacgtcccatctcgattctaattactgagtccaaccaaattatgttttgagcacataattcttaatctcaacatatatagcatggcataacatttaaacatcaataatcactagtgtaataaccctaggctatacaaccgctcactttagggttataaccctaatcccagtcttttaattagtcacaattataatattcaacatgagcgccaccgcgcttaactctacatgctaactattgtcttacctgatgtcccgcaaacgtgaagattccaaatcccctagtgctcctgaccaagttccggtaatcctagtcacagtttttaggatttacaaatagggttaatccttaaatctattttcacataattataaaattggcattcaaatccagataaacata

SEQ ID NO: 354332 - DNA, 663 bp, Cannabis indica
gtactacttacttttataagtacaaaaaaatagaaattaaaaaaaaaaaaaaaaaaaaaaaaaaagaataaaagacgttgaaaacctatgcctaggcataaacccctctttatttgggcaatgagcttgcattgactgatagtattttagctataactctctcaatattactcggaatcagacgattcaagatgttccggaaagataaaagagagatctagaacgtttatgttttgactttctccaaaatctgaacaaaacatagtcttatttaggcttgaagatttagctttattttctttttagctttattttcttgcacaattttctctattttatagatcatctttttgtgaaatttgaccaatatatagattccaagtgtcgaaacttgaaattaacgaaaacaagtgtacttctattctaaaaagtgataacaaagaagaaaattaactctaaaaataacataaataataggctcaaaatatcctaacactctctatttacttacttaacttttatttcttctcgccaatctagcgagcgagtgttgaccaaaaaaatatagtagatttttttatggtataaataaataatacaaataaatatgagattaaaaaataattaaaatttaaaatatgagaaaaaataataaataaattt

SEQ ID NO: 354333 - DNA, 899 bp, Cannabis indica
acaggtgtttttccacaggagctcaatgatgccaacctggttttcattcccaaaaagaaaaacttctcctcaatgggtgacttgcggccaattactttgtgtaatgtttcgtataagattggctcaaaagttcttgccaaccgtatgcgtaacatgattaactttgttatatctaaaacctaaagtgcgttcataccaggccaactaatttcgaacaatattatagtggcctttgaagtaatgcactacttgaaacggaaaaggagaggtaaaaagagctttatggctttaaaacttgatatgagcaaagcttatgactgggttgaatgggattatttgtgagctatcatgcttcgtatgggatttgcagaaaaatgggtaaaccttatcatggcttgtgttacctcggtgagatataccatcatgcataacaatcatgttatgggtcctatcatccccaaccatgaaatctagcaaggtgacccactcttaacatatcttttcattatttgtgttgagggtttatcatcaattatcaagaagttcgaatcaagtcaactcctccaagggtgccatgtggctaatggggctccatcaatattgcatatgttgtttaccgatgatagttgcttattttgtcaagcctctttgggggcagcttcaaatgtatgcaccttgcttcactcttttgaaatggcgtttagccaaaaattgaatgtcaccaagtcatccttattctttagccccaacactgatctttcgctaaagaatgaaatctgttcaacactggggatgcctgaagctgatgaggatagtctttaccttgggcttcctaatatcattggtaggaaaaagacaacaatacttggatttctaaaaaataaagtggtcaatcggat

SEQ ID NO: 354334 - DNA, 522 bp, Cannabis indica
aaagccaaggctgcttggatacaaaaaggggacagcaacttagctctctttcatgcgagcatcaaacagagacagaggcaaaaccaaattttatctattgttagagaagacggagtacgtgttactgagcctaatcaaattacttaggtgttcatcaactactataagtccttgcttgggtctcagatgaacaacagaatgaaaatctctaacaggatcattcttgaaggaccggttctagatcatgcacaagcagctatgctagtcaataactttaccaaagaagttaaaaaggcagtatttgagatacttggagataaagctcccagaccagatggatattctagtttctttttccaagataactgggaccttgtgggagatgatgtttacaacgcagttacttcattcttggaattagggaagatcctcaaggagattaattccactatcctcacaatggttcctaaagttaaatgtccttccttggccaaagattttagaccaattgcttgttgcaat

SEQ ID NO: 354335 - DNA, 526 bp, Cannabis indica
aagagatttaagtggttcgatgttatattttaaaaataaaaatattactgttaagagttaaaaattattgatcgaaaaaaaaatcaaaataatgtcattgccttatatttatatattgactaaccctcccaacttgcttgcttttcttttaattaccaaaccaataaaattgtatgaacgatcataacccctttttcagcttaattttttcatccaaaattgatgaatataataatagtaggaagtattactctcttccttgctttataatatatatgtatgtacttctaaccctaatacaatagaatatatatttatagagtactttaggataagatatcctgtcttagccagaatctgagaataatggtcatataaataatgttattgtaagggactggaaaggaagcttttcaaatgaaatccagaaatggatacaagggagagattttttaggatatataacacgatagagcagtttcaaattaataatacataataatatatacacatgaattaaaaacat

SEQ ID NO: 354336 - DNA, 746 bp, Cannabis indica
agctttagcaccggaggccccagcagatccatctaccccactaccagctgcatcacccccattaccagaggaggaggtctttcctgacaggtatgatccttatgagggagctccagctactcctatcggtgcaggtgttatctgtatagatgacagcaagaccgagggtgaaattttggtgatagaggcacaacctccaggggttaagagtgggaagaggaagagaaatccccctgtatggttccgtgactacacggagatgaagaagaaacagaggccttcttcgacgtttgatcccctggcgccaccggatgagcgattgttggatactttccgaaagtggtgttctggactcattcccaacaatcggtttcgggatttgaaaagtggtgattacggtccatcgttcttttggaagctgttgacactacaggaatggtttacagatgacgtaagtaaactaatttataattttactttactttacaactaatctataattaatatattttgttgtctaactgctttctctaacctttatatgtagcatatagatgcagcaatccatatacgcagaacaggcgacgcactgactatccactgacattttctcaaaagggtatcattctctctacattcgttacaagcatgatcagcagtgcatggacgaatcacaagggtcccagaaaaaatttgtgtgggagggattatatcctggagtactgcagaggtattcatcaggtatt

SEQ ID NO: 354337 - DNA, 497 bp, Cannabis indica
aaatacatcaacctagaagaggctcagatagtggcctacgggggctaccaccctaccgggatagcggaatatgtacccggagctaagctcccaggaatcttaccagccgccgctccaccgatgagcggcatacaattttccgctaccccgggatatagttagggtcaggccttagcccctgcgtcttctcattttgggaacccgtctaggataagcggacaagccccatctcactccgctccgaccgcaagcttagcaggtccctctcaaggctctcggggcaagaggtcctcaaaaggtagccatcggacggaggataagcgacagaaaagggggtatactccccaatatacccagtacacagaactaacggactcccaagagcgtgtgtatttctctaccaggcaaaacatgcactaccggagaccacctcctctgtacagggatagctcccggagggatcccaacaaaaaatgcgagtatcacaacgacattgg

SEQ ID NO: 354338 - DNA, 750 bp, Cannabis indica
gataactaatcagattgtaaagagttttatttagggcataaaacccaacacttactacctggcggataattagttatctccaaaaggtgggttaggtctatgccaatcaaaattgaggatagggagttgagtgctgatttggtggaattgggttgagcgaattttgacatcatacttgcaatggatttcttgtccaagtactcagttagtattgattgtaaatagaagatggtgattttccaacctaagggtgtggaatcgtttgtatttgtgggatcagttcagggatcccagattctagtgatctctgtgttaaaaggtagagatttgttacaagaagggtgcttagggtttctgcagtggtattagatacgacacggcctgagacaatttggctagaggatatcagggttgttcaagaatttttagatgtttcctgatgaacttttgggtttaccaccatagcaagaaatagattttattatcaatttagcacctggagtagaaccagtttctaaggtaccatacagaatgggtccaactgaacttaaagaattgaaaattcagcttcactaatgcttgacctcgggtttccatgacttagtgtgtcaccttatggagctcccgtgttatttgttaagattaaagtgttgggttttgtgccctaaataaaacccatttcaatattatgatatttactaattaataaggataaaaaatcacattttatgttgcatggttcacataatt

SEQ ID NO: 354339 - DNA, 958 bp, Cannabis indica
gggcacaaaacccaacactacctcccctgctatagcttgatgcaggaggggtaggagcctcgccaaccactggagtcctagctgacttagtcatgcacccaactgcgccctcagctcgttgtgctttctccaccatttcaggataggtggttttgtcgtctgtagtaatcatcaaatcatgtttaatattcacattcagtccgtcaaggtatttttccttcttactgaaattggttggcacaattcctgaggccaatctcgccaaccgatcaaactgcgttctatactcagtaacgttcatattctccctctgggtcaggtgagtaaattcttttctcttggcacttctaacggccacattatagtacttcgcattgaaaagttcctggaacttttcccaggttatcgtggtgacatcgtgtatcatagacaccatgtcccaccacaccaatgcgtcctcttgaaactgaaaaagtggctcacatcactctatcattcccggtgacacccataaaattcaaaatcttggtgaccacagttagccactgctcggctttcatgacgtctggacctcccaaaaaaaatgagctgccttgtaacggcctaaataattaggcacgccacccaaaatgcttatgaaaccctaatcccctaatcgggattactaaataaaacagcgcagaatttaaacttttatattaaacacactgaagataaaacttgtaatatatttaaactttcaaaatagttgggatcccaaaaatatttacaaacttattacaagtcttttctttctagccgacgtaatcggcaaaacagaattcaaaatacatcactggtagaaccaaacccgcttggtctagaattgctcagacatgtacattcttcgtccaagcactcatggctgatcaacaatgccttaccctttccagcaagacagtataaatcataacaaata

SEQ ID NO: 354340 - DNA, 1171 bp, Cannabis indica
caatctcggaatatttttcgccactagtcacaatgaattcgtactactaagtcatgaatataaagattggatttgcattaaatttggttaaaatatcccccctattaaaaaaaattgaatatatccttctttttaaagtttttcttactcttgcactcgttagtttcctcttaaaatctcaccctacacatctcaaaaaatcatgaaatttcacaagcacaaagccaagaccattgtgcatcacttttttgttagttatattaagaaaaaagtagttttcaagcagtaataatcattctaattgaaatagttaaaattttacatttctaatagtggtacccctttgtgaaatgtggccgggacccatctcgaaatatttttctccactagtcacaatgaatttgtactactaacacgtgaatatgaagattggtttgaagttaaattttgttaaaatgactcctatttcaaaaattgaaatattcttttgtttaggataaatttcaacaagttttttccttactcttacagtcgttagtgttctttcaaaatctcaccctacacatcttaaaaaattgtgaaatttcataaggacgaagccaagaccgttgtctataacttttctattggggtttgggtttggggtttgggggtttacgaatttgggttttgggttcgaggttcaagggtttttggtttaggatttggggtttgtggtttagggtttttaggtttgggggtttggggttaagttattttacattaggtgtttggggtttgggtttagggtcttgagtttggggttttgggttcttaggtttgggatatagggttttggggtttgggattaggggtttgggggtttgaggtttaggatttagggttttatgactagggtctagagtttaggatcttggaccaagtatttggggtatgaggctttaagttttggtttggtgtttgggttttagggtttcgggtttttgggttagggtttggggtttgggatttggggtatggtgtttttgtgtttggggtttataggtttgctgttttggggattagggtttggggtttagggtttgatgtttggggttttaaggttttacggtttatgggttttgggtttaggggttgggcttcgggatttgggttttagggtttcgggttt

SEQ ID NO: 354341 - DNA, 618 bp, Cannabis indica
tgtaaaaataatgtattatggtgttatggttgatactttattttttttatttaaatatatattatatgcaattaatatctctttttgaaaatttagctgaaaatattaaatattcaatgattgttctatcaccaaattttattgttagagaaaatattatttctttggtagctatttatgtataattacttactaaaattagtatttatatgtatatatatatatatatatatcagtttacattttatgaagtagtattaaatgtgtatattttaattattttttcaaatgtaataatttacatatatttattagtattaattttttgacttgaattaatatatattatttaatcaatttatttgtccaaaagttataaattcttaattggtatgtatttttgttttattgttagcttcacgaaggtacatcatgtgtgccttatattctcaccccaaatgagacttttataatgagtagttaactctacaatattttctaattgcattgctcatatagcttgataaagttttaatttattgagttttcagactcttttttgtgaacaacaataacgtttccatcaaattttcactacaacatttatcactaatagcg

SEQ ID NO: 354342 - DNA, 675 bp, Cannabis indica
agctatttgatctaatctgatcttttagcttaacatgaaataaaacaaattgcagacataagaaactgtactataaagtggtcaccagacctgagtactttgtttcttttatcgaaacctttgggtgtagtcccccgaaaggtcattcatttaaaagcaaatgttcatttactagttaaaattttcatccgacctggtactttattggtagtattttcttaaatgttctccattccagtaccgtggtactagaacgagttgcattttttcgtcctacttacctaatttgtatgctctggagtcgcgaacttcgaccacttgatatggtccttcccagttaggtcctagtacacctgccgtattgtctttggtcttttggaatacccttctcaggaccatatctcctacgaagaatttatgagctttcacttgtttgttgaaataccgagccactttttgttgatgggccatcaattttaagtttgtagttgcttttttttcttcgatttcatcaagtgattctcgaaggagtatgtgattcgtaccttgatcgtacgtcaaccttctgtgggaaggtggatcgagttcgacgggcagcatagcttcataaccgtacaccattgcaaatggtgtctgtccggtcgtcgttttttcggttgtacggtatgaccatag

SEQ ID NO: 354343 - DNA, 1168 bp, Cannabis indica
aatacctaactccagaaaagaaatcaaaccaaaaatacactcacagccccttaaaatccaaaaccacaaaccaaaacttaaagtagaatcaaagaacatcaaagaaggaaagcaaaagggttttaccttgaattggagcttcaattacaatagaaacttactgaattgggctgagaaaattctagcttggtgctggttcttaccaattcgagagaaagagggaaagagagaaatggttttctaggttattctctttatttcttcacacataaaataattgaatttctaattcaattaaacttatattcagctctaaatgagaccaaataagacaaaatcttcccttgacaatttactaaatttcccttagccaaaatcccaatactatccaactactaagggtaagttggtaattataaccccgataataatactctaaacttacaaaatgtgactctctaaaggcccaacgtcgctatccacagcttccgaacacaaacacagaaattaagtaatttacattaaatagcataataacatatatgatattaaatatatttccaaagtatacatttcataaatattaatttaatctcatacataaaccctaattatttaataattcaaagtattaatcatatgcggtctttacaattattcccccgttaaaaggatttcgcccccgaaatctacctgaacaactctggatgctgagttttcatatcagactccaactcccaagtggcttcttccactttactattcttccagaatactttaaccaacgatatgattttggttcgaaggaacttttccttcctatctaaaatttgcactggttgttcatcataagataggtcaggttgcagttccaatgtctcataactcaaaacatgcactgggtcaaacacgtactttcttagcatagaaacatgaaatacgttatgcactgttgacaatgaaggaggtaaggctaaccagtaagcaacttgtccaattttctccagaatttcaaaaggtccaataaacctaggacttagcttggctttcttcccaaagtgcctgattcctttcatcggtgacacacgcaagaaagcatggtccccaggttgaaatgcaacatcccatcgcttgggatttgcataacttttctgcctgctttgagaag

SEQ ID NO: 354344 - DNA, 580 bp, Cannabis indica
gctcgctgaaaagaaagtcgagagcagagagcgatgtgacaaagttggtttccgcaccgtatatcgggcctagatggcgaaccttattatggacaccagcttcttggaggagaaggaagaggaaactttggctctttgcaagaagaccaggaaggaggaagaagatggcgaggtcgaggaagaagaagaagaagatctgtccaagtctcccagcatgtagaccctgttttttatttttctctttttttttttttttttttttttttttttaaaaatggccttttggccaagacaatggtttgcccctggcggcactttttggtaaagacacatttgcacagttggatggccaacttttctttttaatgtcccatagttttaagtttaaactttaatatgtggatgtttgcttgcgtttcaatcacaatttaaacactcacacgcataaattttattaagggtttccattgctcgtattttcctcttaccccaagtaattgattacctactttacgcgcgagtagcttatctgcgtggccctcaatctacgagccatccttgattctgcctcacgatcatc

SEQ ID NO: 354345 - DNA, 880 bp, Cannabis indica
tcatagtaatatatgaaaatagtagaaattaacacaagataatgggaaaattataagtttattttttataggtataaataaataatacccatagtcaaaaaaaataataaaataataataccatgaagttattgggttttttttgtttttatttttttttttttaacatttatatgtgattttttatgccattaatttgtaaaaaaaaaatggaaaacccatattttcaaaacaataataagtttcaccggaaaagtcacaagcgcagaaaaagtcaccgaaaaagttactagaaaagtcacagttgccgaaaaagtcactgtcaccaaaaaaagtcactggaaaagtcattacaaaagtcaccagaagtagatgtctcaaatataaacaaaaatagaactaattctataacataatgaataaaaataaataatacgaaataactcaaatcagttgtaattcatataattgaattataaccggttctgtaacataataaataaaaacaaataacacaaaataactcaaatcagttataattaaaatagaacggttctataacaatgttataatgaataaaaacaaataatatgaaataactcaaatcggttataactaaattagaacaagttatataacataatgaatgagtatttttggggtagatatggtatgtgtgtaattatttagtgggttggagcatgttgaatggatatttttgtttgagttattttatttaactagtttttgtgtgtgagtttttaccttagttgctttacggaactaatttttttgtcttaaaatttttactagttgataaatataacaagtttctttatattatatttgagttattgtgtgttattatttgtgtttattt

SEQ ID NO: 354346 - DNA, 1050 bp, Cannabis indica
aaaataaaatataagtttttttaaaaaaaaattaaaataaaatataaattaaaattaaattgaaaggaccattgttcaaaaaaagaaattattgctcaaaaaaataataatcatgtgtagttacaaattaaaaattgtataaaaataataattcattaataatttttaatatgtataaatgtacatagattaaaaataagaatggtaatggtaaaataatgggacaattcaatatattgtattgatattataagcgaaattatcgcaatagacacaatccaaaattcatattttttttaataaaaatcataagatctattaattaataaattcgttaaaaacaatagaatgctttttaaaggaatagtccttcaactgaagcacacgacttgtagagaaacaagagtctcttgtcaagcaatgagccaacttatttgcatgtagatcgttttacaaaacacaaattgtgaaggcataaaataccgttctgaatcgcttggacacacaccaagctatctgtttccagcatgactctatcccacgaatgagttgcaatccaactcaatgcttctttaatgcctattatctcagcaatttcaggttgaacaaatccaatcttccccttttagaatgcttctaccatagcaccatgatgattctgagctacataaccatgccaaaagacaagactcgaaccaaaaaaactaaaaggaaaagactaaaaaaatcatgtcaaaagacaagactaaagactcatgtcaaaagacaagactaggaaaaactaaagtagtttcaacacataaacacgatcacagcattaaaattaattaaggaatgaactccttataattctaaccccataaaaatattaattggaattaaactaataatagtaaattaataaatgaaaacaaaaatctgaaacggaggacgtcgttgagccgaaccgaaccactctcagacgactgctcttgaacccctcacagaagaagacgttgatgtgggaatgagaaaaactttggcatcaatcaagaagatcaatacaatagt

SEQ ID NO: 354347 - DNA, 570 bp, Cannabis indica
agtccaatcaaattaaaataatattttatgtcaactctatgaacagttaaaagtacaacacataaatatttctccccacatgaataaaccacatatacagccggtttagtttggtttaatggaattgtatgaactttcttatattttatgttatgtccaaatacacatgttggccaaaattaataaacagactatgcaatactttttctctattaattgagtttgcaatttgtatgtttatttcttttaatcatatgacaacatgtatgttaattattataaatgttgaccataccggagtccatactctccaaacgaactcactgaacccagttcgacctagtgttgggcccggtgacacacagtatgtagtgaagttagctgtggggtaccggagtcactactctcctaacgaactcaccgaatccagttcgacctagggttgtacggagtgacactcaaccattcgtactactcacactgtgacttgcggtgtttacgggcccggtgtcacacagtatgtagtcaagttagctttggggtaccggagtcactactctcccaacgaac

SEQ ID NO: 354348 - DNA, 662 bp, Cannabis indica
tatgatataaaaatgagagataaaacttaaaattttctaatttttacccattcatggttaatacacattaagagtgcgcacatatatataaatatatattatatgacaccaagagtagagaatgcgaagatgcgtatatattaagttttatttcttagatctcatcttaataaaataaaactaaactagttaatatatattatgtgacacaaaaagtagagaatgtgaagatataaataaatgtatatatatatattaagtcttattatttttttttagatcgtgagaccttttattatcattctaagaaaagtatttcttaatgtattttatatttgtaacaggaagtgttactcatgtgttaggatctaagagggtgcaatagccactaccttttatttctttaacggtatagggtccttcccaattgggtacaaacttggttgcatgcgtccctcgcatcacatggtccgcagcttttagtaccatatccccttcttggaatattcttggtcgtacgagcttgtcatatgctcgagctacacgccgttgatactgtaataaattaccctgggctttatctcttcgttcatcaattagctctaattcttctaatcgtgcttgatgtacatccattcccgcagccatagctaatctagctg

SEQ ID NO: 354349 - DNA, 833 bp, Cannabis indica
cagcttcatagtctaggatgatggagtcagctggaaaaatgaacttgtcaacctgtactagaacatcttctatttgaccttcgggatgggccaaggacctgtcagtaagttacaatataacagttgtaggccgtacttcaccaatacccaacttcttaaagatcgacaggcatgaggttgatgcttgcacccaaatcacataaggctcttctaacatctcgtcccccaatagaacacgggattgtaaaactactaggatccttcaacttcagtggaatcttgctttttaacatggtgttgcatccttcggtgagagctatagtttcaaactcccctaacctccttttcttcgtcaaaatatcttttaagaacttgacataattcagcatttgctccaatgcttctaccaagggaatgttgatatggagctgcttcaacacatcccaaaacttcttgaatttcccatcttgctgctatatccgaaatctttaggaaaatggaaggggtggtttaggaccagaacttactggtgcagattgctgactgtgaggttgctgaccctttgctgtatcaactgggctagtttcagcaatttcctgggcaattttgttactcaatttttcgtcgatttggattgaagtgggctccccactaccctttatttcctccttagaatttttcagatgcttgccactccttagttgaatggctttacattgttccttcccatccctccttggattttccgtgccactaggcaaagaaccttgcggcctagcttttaattcattggccaaatgtccaaactgcaactcaaggtttcgaagagaggc

SEQ ID NO: 354350 - DNA, 1918 bp, Cannabis indica
gatttgagttcgggtttagtttcaggtctaagtcttgattctgatcccggtctgtgttcgagtttgggtcttggtgcaggactaggtttgggtcttattctaggtctgggtcatagtttgggtcccgcgttttggtctgggttttggttttgtcttggtatgggttcatgtctaggttcctgtcctggtctgggtcctgtgcaggtttcgggtacggggttgggtccaacttcagatttcgggtctaggttaggtccttgttatggttcgagtcccagatttagatctgggtctgggttcgtagctcctagtctgggcctaggttcgggttcggttattgagtcttggttttagtccagatcccagtgtaggttcctgtccaggtctcggtcctcgtcttggttcgggtttaggtttgggtccttctcaaggtctggatcctggtctgggtcgcgggtctaaggtctcagtgcgggtttaggaccatgtcaggtcaaggtcagggttcgggtgctagtctaggttcgtgtcccaagtctcaagttccagtcgtagtcaagctctcggccaaggttctggtatgagtttgggttatggtttgggttcggttttgttctcaggtatgggtcctagtcacagttccagttctaattccgggttttggtttggttctaggtccgggtctgggtccaggttgcggttggggtccgagtcttagtctgagtcgtggtatgggttttttgaatcccgatctgggtccaggttcgggtcctgggtctgggtcccaggttcgggtctaggtcctaggttcaggtctggatctgcggctaggacagtgtccaggtcccgtgtttcgatcccggtctggatctgggtctgggtcggtattcgagtccaagtctaggttcgtgtccatgtcatggtctggatcaaaattttggttaggggatttgtttgggtctgggatcaagtctcgagttcgggttcgggaccgggtctaggtataggtctgggtctgggtccgagcccgagttttggtgctgggttctggtctagtttcaggtcccggtctaggtctaggtcttatccacgaccccagtcctattagggtcttggccacgttctagtacaagttgcggtttcgtgtcctaggtcagggtctgggtctaggtcctagtcctgcttcaggtccttctctgagtcctagatcaagacaccgactatgggtcttgtccaagccccaatttccagatcccgagataagatctggatcccaatcacgggtcccaatctcgtttcagttcatgttccaagtcccggtctaggtctcggtctagttccgggactgagacttgggtgcaattctgggtccctagtcttgttccatgttcgggtctgagttcaagtctgggttcgtgtctcgagtcctagtttaggtttttattcaattttgggacccaatccgtgggtgggtctgtgtctgagtccggatactagtccggttacaattttgggtctaggtccaggtcctggtcctggtcctggtcctgctcgtgagtcccgatccgcttctggtttcgattctagtttcaagtcacggggtacaggttcgggtcgagtttcagtccgagtttgggttcaggtcttgatttgggtttcgagggaggtgggtttcggtctcggtgagggtcctaggtttggtctgtttctaggttcgggtccgggtcaaggtcccagtcccattccaagatcctagtctagttccaattcatgttttggttttagttggcgagtgtgggttagggtctgggtatgtgtctgagtcctggtttgatttcgagtttgggttcgggttctagtctatgtcccaaatcctaacaccgactacgggtcgggttgacgacacaataaataggat

SEQ ID NO: 354351 - DNA, 869 bp, Cannabis indica
tgacttgggagacacttgtgatttaaaatccattattagtttaaacaagtaatggattgtgtttggttgttgttattgctgctgttgtttgatgatgtttttgaagttaaattatgattagaattaatgtttagagctggtttgatggttgtttttaaggtttgttcaaggtttgagcttacaagctcaaactttgctctcacatggtggattttaattctattcatgttgaggtgttttattgctttgatattgttctttgaggtctaaatagcaggtctgcaaggtttcattgagtttggggttgaattggttgagttatgaatttttgttggattcctgcgcagaatcggaattccggttcagggggacctgtaggaacaagaattccggttggtccccaggaaaccccgcggaaccgaaatttcggttggggtagttttgggaaccctagttttttcccatttttgtgatgtttagggtattgccatgttattcatcgatagggaaacttttagtttcaagtttaagtccccggaaagtgatttagcgtgtcacttacgtatgttgtgattgatgtgatttaggagcctgttattcgccgagtagttgttccactcaggttggccggcacacctgaattcgaaatcaaggtaagattagtataatgttatgcatatgtttatacatgtttagcataaatgttagttagcgtcagaataggcaaatctatagccctcaaattagcatatcagggcatcgaggaggtgtacatagagatgcaccgagatgccaacagatatatgctaggctatcagatagtatgagttaactgctaccacatcggtacgattagagtactgagtata

SEQ ID NO: 354352 - DNA, 790 bp, Cannabis indica
gcctgagcttgcgtggaggcactgcaagaggaccctgctgcctttagctcagaatttcttcattccactggcagatatgatcttgcattttcacgaatctttactcccaatctgaaggagcttgtggtgggttcacatgttgaccaccctaaactctgccacagcctcggccgcgaccacggggattctagggaatttgatttccctgaccgcctccgatctcaaccatattaccctgacttcttgtatttcgctgggcatccatttaataggacttaacttgcgaacccataagccaggcaggtcagacatcgatcacaaaaacttcataccgctcttatggattttaaggcaacacattaaaataaataactataatctatatgcttcctcacatgctttgataatcacataaaatactaaacaagtacgggcttactgaaccgtgatccgagctttctctgatgaaggttgtacatgtcttggtgaacttcggtagacaaacttaatggctctgataccaaaattgtaacgctctaatgctaaggcacgttacagtgatttttcaattatagtgctttctttgctaatcaaagaactttcttgaaaatcgtgtcaaattaaaacttttatattaaatatgaaactttataaactttacataattatttacaaaagttgggatcccgtttctaaacttttttacaaaatattccaaaatacatatgacaggtcgcacaacgactacaaaatggaaaccccagatgtcccgagaccgaacactccaggt

SEQ ID NO: 354353 - DNA, 887 bp, Cannabis indica
taccaaattgtaacaccctacttttttaagcatgttcatatgatttttaactaactgtgcagctcgttgctaatcaacgagtttattaaaaatcgttattaattaaaattttacttaattaattataaacactaaaataatatacttatattaaaccgcgatcccgtttacaaaagtatttacaaatgtttcactgtgcatatacaaaagtttgttgcctagcgactatacaaaataagccccgatatcccaaagatcgtacgctttaggcctaaccaccctgcaatgtacagtctccatttgctcactctcacggctgctcaaccttagtcttgcccttacctacacacgcaacaatatttgtgagtcaacagactcagtaagaaaagcatcaataataacataataataacttggattataatcaggcgcccatacacccaaccataaccctatcctcatgtcccacacggtgctaagtctagaacgttcatacgacaatactattgaccattatatcagcctatactcaatatgctagtcatactctagccatgctgatgtgatagtatcgatctgtatctgagccaaacatacatctatcagtatccaatatatctctatgtatattgatatcgctatcgatgtaatctaacaggcataaattgttgggttttgttccctaaataaaacccagttcaatataatcagatttactaataaagattagaaatcacattttatgttgcatggttcacatgattaatttcatgattatatttaatgtataaattttgttaagtccagaacatatgtatttgttacatgattatagtgtggtcagcacagtggaatataatcatgtttatatgttcgaaagtttaatt

SEQ ID NO: 354354 - DNA, 540 bp, Cannabis indica
tagggcataaaacccaacatcccggatgctgcctttcttcataaagacttagcaattaatttaaatgttaagatcttttggtccacgtgtctctatctagttggtccacgtatattggtcaaaatcaggggcaacagtaaggatttctataactttatgtgtttaattcattatttttaggaaatttaggatgttagattatagatttataatcaaatatacatgttagtaaatctagatcctggtaaaatatttctaataattataacctcctataactatattttaaatttgaaaaaaataagataaccaattatttactaaatatataaaatataatataattataagcttctaataattttaaaaatttaaatatcatttaaccataatttaaaattataaataaccaaccaattttcaaaaataagtttaattaagatatatatatatacatataacatttcattattaatataccatataaaagtaaaataaatatcatatatttttaaaattatataatatataaaataataa

SEQ ID NO: 354355 - DNA, 708 bp, Cannabis indica
aaaattacactaatttttttgctgattttaaaaaatacctattttttttaaataagggacccaaaaaaaaatttttaccctatagcccactacatttcagggccggccctgtgtggatgctaggtctcgctttgagcctcctttgcccgaaacatacttgggaaactgtgttgtaggaaagtttgcagatgcatatgcaaaagatttggctggggaagatggtcttttcctcgctgtaaaagccattagtaatgccataagaagtttagagacgaagaaggagactattttgcatggactagaaaatttggttcctaggtttttaaagtcgcatgaaggtaaacgtagttatgatggctcatactccatagctggttcacctaagtttgagccttacaatactgattttggatggggaaggcccaaaaagtcggatgtggtttcaattgataaaacaggagcaataagtctttctgatactagaaatggagatggaattgaagttgggttggtattgaagaaacatgatatggaaaattttgcttttctattccatcaaggtcttgaataaactactatagaagcaaagatatatgcagtgtatccctagattggtttgagattttcattagagttttgctcaattaattgtaagaataattaaattatctgtcttttaagttttttttaggattacataaaattggc

SEQ ID NO: 354356 - DNA, 626 bp, Cannabis indica
gcataaaacccaacaccagatacatttaaaccctaaaaactaccaaaactagatgaggtgacaatgattcaagcaaactaagtaacacatccacacaatgtaacaaacatgagaaggaagaaagcaacttactgtttgaatttagggcttggggcaatgcctggttactccatctgcaattctttgaatgaagcaaggatcgctttgagaggatgaagtcggaggaaactcgcaagaaaaaggtcaaggacagggatggcatacaagtcctcggacaaacttaatggtgatccttgacgaagaagtttaagggttttttcagactttctaaaatggaaaaaatgatgcgaatgtggttccttttttcttactttatacccatgatagtggattcgttagattagagaaagatttgatcctacggacaagattcaaagaggaagtggaaaagatggtcatttaattatgatgtacctcgaaactgcacaaccgccaaaattagaggatatgcgtcttttcaaaaaagaggaacatgatggaaataccctttgtaatcattaaaaagcttttttattaaaaaataactttttcaagggaaattgttatacccaaaattcggtgagcac

SEQ ID NO: 354357 - DNA, 1479 bp, Cannabis indica
tttttttgctttcgggattctgctggttgtggtacggttatggaagacagtacaggggtgcatgttcctattgaggaggaggaggaggctatcttgtcttatgatgctagtgctacggatggtaatgactatgatgataggtggtgtatcgttggaaggtttttgactgaaagacaaattgattttgaggccatgcaacatatgatggcttcattgtggcagctggggaaggggatgtttgtcaaggagttggatactaatcgctatctctttcaattttatcatgagattgatatccaaagtatgatgaatcaaagcccttgaacttttaataggttcttgttaatcttcaaaaggttgcagcggggggaggatccaagattaattaccttgaatgaagttgatatgtgggtgcaattgcatgatcttagatcggggtttaaaactgctacggttgataaggatgtcgcaaactatattgggaagtttgttcagtcggatgaaaagaatttcatgggcttatggtgggattatcttcgtgttcgtgtgactttgaatgttacgaaaccattaaagagacgtatgaagctttgcaatactaacgggatcgagttctggactaactttaagtatgaacatctccccactttctgctttatttgtggaattatggggcattctgaaagcttttgtccacagcgtttcgaggttggagagggtcagataatcaagccgtatggcgaatggatgcgagtgagacctatacgtagaaaccacatgattggagctaaatggctcaagcagtttaatgttgccatggacgatgattctgcagtaaaaaccacggctcgtggtgaggtgtcttggtcgacgatggcaatggttgaggggaatcatggtgtgctggggtcgggtctgatgatagtggaggtaacttcgggtcaacgtgaggcagggataggatcttcaaaggttaatggggttcctataattgtggaagatgatttactagctgcaaaggataaggaaatatctaatgatatcaatgaggatgcttgtcttttagttcttgatacgaagaggagaagaacggctttggaagatattgatgaggcccatgtgagcggtgatgtggcaacgggtcaagaggtaaatggttcaaagaacttgagtttggtgggtactggtgtccagacccaccaatcattatgaatattttatcttggaattgccatgggcttgggaacccatggactttacaattccttaaggatcttgtgatccaaaagaagctcaatattgtgtttctctatgagaatatatccaattgttctcagatggagagagtgcgtgtgacgttgggatttgatggcatgatagtcatagatgtcaatggtatgagtggtggtattgcgttactatggaaaattgaggatgaagtatctttgcttgggtttctgatgcttatatagatgtgag

SEQ ID NO: 354358 - DNA, 695 bp, Cannabis indica
agacttttggttgtcgacctgccatcgacttacaatatattattgggtcgcccaacattgatcggactaggggcagttagttcgatcaagcatctatccgtaaattgccaaacacctgagggtgtgggagtggtgcgaggtgatcagatgctagctcgcgattgttatcgcatagagttatatcacagaatagccggtcaccagttaatggagatcttggtagaagaaagaggaaagaaggatgaagatcttgatcctcggattcaagatgaaagaaacttattaaaaccaattgaagaattggaagaggttgttctcgacccaaaatatcccacaaagagtgtttacattgggaagaacctcgacgagcaattaaaatagcaactaataagtttcttaagggcaaaccaagatcaattcacctgccatcatttaaatgtcgatccaaactacccaacaaaaagacagaagaggagacccttggattctgagaggcaaggggccctcaaacaggaagtggataagttattgatcaatgactttatgcgcgaggtattctatccctcgtggatagccaatcctgtccttgtcccaaaagtaacaaaacttagagaacttgtattgacttctctgatctgaataaggcgtgccaaaaagactacttcccactacctaggattgaccagttagtggat

SEQ ID NO: 354359 - DNA, 516 bp, Cannabis indica
gagaccaaatatatgtgttattctcaaaattctaaaattttaactaaatgaatataaaatgtcacttaaacttatttgtgatttagaaaatataatcgtcttttactcatttgtatagtattagaaacttctttttatttctctaaaattaattcttaaatttgttctagctcttcttatttttcttatcattttaatatgtgaaagcattgagtgaaaatacattatttgcataatgcattcacataaagagtatgttatacacataacactaattatattgcccaaacctacatcaatccctcaaaaaagttatacaaactaatcatggtagcttaaaaaaagtatcaagttttgttcaacgacttattggtcaaatttttattcttgaacaaattatcattaaatagtatttatttagcactataaaatcaattaacaatatatatattttaatggcaagcatagagcccaaaatctttcattaatttatccttcatttttgtgctaattaga

SEQ ID NO: 354360 - DNA, 615 bp, Cannabis indica
agaaactctagaaattttttcaaacttttttgccaaaaaaccattcccagatttgctcaaaactttgcatgccatctttatcgttaacatttttcctacgagtttcatctgatttaattttcgacttcaagcattcagagggatcttcacgccattcgttgatttatagattgcaaagttgttcatcatcccacaaaccaactccaaacagtaagtgacttttcttctcactttcctacatgctatttgatgttgtgtttctggatttgatttcttatttcttagtcaggaccttggttacctcattttttttttagaaactttagagcagaattatttctgggcaaatatattagggtttaggcagaacgtaggtttttcaaaattctcttgtttactaacttctggtttgataaatttatattgggttttgtgccataaataaaacccatttcaatataatcagatttacttattaataaagatcagaaataacattttatgttgcatggtcacatgatttatttcatgattatatatataatgtatgaattctatttaagtccagaacatatgaatttgttaaagattatagtgttgtcagcacagtggaat

SEQ ID NO: 354361 - DNA, 699 bp, Cannabis indica
agtatatgtaatcctggttctcccaacatggcaagtatatgtgcggtatcccctacacgtaattcataacactcttatcccatttcatcttgctcttgtcaccctcatagtaattccaatacatggcaaagatctgtggagcagatgtgtccaaaactacaccttttcgagtgtagacttttgggtacagggtccgtcttcttctcaataagtgcgccatggcatcaagttgttgtgttccaaaagaaaacagtaagacagatatcgcataaaagtcgcacaaatatcgcaggaaattgcacaaagaaattaccaaaattgtttcaaaaattgcacaaaaatcgctcgtttatcgcacataagtcgcaaaaaaaacataaatcagtgaataatcgcacataaattgcataaaagtcgcatacacaaattaaacagaaagtgcaaacatcgcatataagtcgcacaaatatttaaaaacacaataaattaattctgttaagaaataacttacagcatcgtcgagccattcgttcagcaccaccaatttcacgaaccaggatctagtggcttcgccagtgtgaacatccctaggacggccgttgtccctagcataagtgatccacttctggaaaaattttaacagccggtagtccgcaggtttcagtgtgtctactaccacgggcccatgtcgttgtttct

SEQ ID NO: 354362 - DNA, 609 bp, Cannabis indica
ataactaatcagattgtaaagggttttatttagggcacaaaacccaacagcatgatctccgaaacgatctaaatcgtagaaggggactggacagacaaaacattccaccaaccgtccagctaaatacccacacccaagatccagttcaaagagatcccaatgtgacacaagtcggtccataggctgaacaagttcatcagcttgtgcaagcacaaatagatcaactttaaaacatggcacaattctcggtgatcgatgtcctgtcagattttaatgtcatgttagcttgaccaaccctatatgatttaaaatttggcacattgatttttcatctgtgcatcaagttcctaactaagagtggggtaggctgtcttaaaggagatcaaaggattgcacgggaatgctataatcttgctctatctaaggtcaagaaggaaaatacctctagccagagttcagagaaggggaagagaattgcccaataggaactcgcccaaggcggggacaaaagttgagaatattttaccaagatctagatttactaacaagtatgttgattaacatcctaattatgaattctctaaaaaaatgaaataaacacataagggt

SEQ ID NO: 354363 - DNA, 813 bp, Cannabis indica
gccttgaaaaaggccaaaaaagatgagctcctgacccccgtcgtctgcaagcactgcattaagcgcttcgatgacggcttctacatggcctggcagtcgaatggccagagtatcaaacttgacttctatcccaagcctgaagaggctcttgctaagttccgggagaagaagaaaaggcttgatgctttacttgaagagcgccggggccctcgtctctctcctcgcatcgattaagccacggagtctaaccaatttcaccattacaaccatattttacttttttatttacagtcttttttcttcctttttagaaaactttaattattatcctctaaggggagacaattattacggcccgtccccaggcccttagtatgtcatattttttttaacctgccctttgggtcaggatattttaaatatatatgttcactttaatacatattctgtttgatcttgtttttacttttggcttgctttacgtctgtccgtgtggtatgccttagtaccccccctgagtggcatgaaaactttgtttttaaggcaatcagttttatttgaaatttagaggttgcatacacttttacggtacaaattcttttaacaaaggcctacgtttacatatttggactattggtaatacttccggagatgctctacgttccaagcccttggcacgatggttccgtccatcctttttagcttataggttccggagtcgatctcatcctcaatttcatatggcccttcccaatttggcccaagtacccccactccgggttcttgagtggctgggaagactcttcttaagac

SEQ ID NO: 354364 - DNA, 913 bp, Cannabis indica
tcgaatgagggcccggtccccttcaaccagcaaaaacatgtcaaggagtatcgtcaccgcttcttcttctcctctaggttcctggctgtggaacacccggagcttctcacggagtgggttaggatccctccctatgagcggactgcacctactcagctcttcctccaacgggccaagaccttcgccacatatgacaagaaggaccttgacgtcgtggggttggtcacgacggagaattgccggaaggccaagctgatcctggggcatcagtcggtggaggactccaacctttccaaggttatccgcccaaacataagggttccggtcgcggagaagacattccaggaggagatcattgccacgacggcagataagtaccgagagtacctctaccggaaggcctaggagaaggcttacaccaaggctcaagcggctgctgggaggccccttcgtattgggagcctggttgagaggagggcccaggccgctgccgggaggcccctccgtattggaagcccggtggagaggaaggcccccagaccaaggcctactatccaggtgccgaatacgggggctcccgatgccagcacttctagttctggtaagtcccctttaacgatacattacgtccctcctgctcatgaatatgctagccttaggcctatagggttcgatgaacgtctccttaggtttaggatgccctctactcggtggggggatcatgcgaaggagtattacttctccaacttaggtgattatttaggccggtcccagatgggtcctagacctctggtgcctgttcccttggatccctcagcctacttgtcttccagctggttccgtccctcggacagctatctcagggatgatgcagccagtgttaagattcgcgactttgctagggccgaattag

SEQ ID NO: 354365 - DNA, 672 bp, Cannabis indica
ttctttctcaccttcttactattttgaatttagactcctcaatcatgttaggatccatatctccaattactaagcattctcctattgcatccagagcacgcataggatgaaagaccttgaatgtggcttgctcatcttgagctctcatggtaagctctcctttttcaacatctatcaaagtccttcccgtagcaagaaaatggcctccctaaaataattggaatttccctatctccctcatagttaagaataatgaaatcgaccggaaaaatgaacttatctacttgcaccaacacatcttcaattttcccttccggatgagcaatggaacgatccgctaattgtaaagttacggtggttggtcatgcttctccaattcccaacttcttgaaaatagacatgggcatgagattaatactagctcccaaatcacaaaaagctcttccaacatctcgacccccaatagaaattggaattgtaaagctgtccggatccttcaatttaggtggaattttgctcttcaacatagcactacagccctctgtcaaagcaacagtttcaaactcgccaagcctccttttctttgttaaaatgtccttcaaaaacttcacataggttggcatttgctccaaaacctccactaatggtatattgatgtggagctgctttaga

SEQ ID NO: 354366 - DNA, 589 bp, Cannabis indica
tatatctatatgttagactattaatctaaccacaaccttagtttataaagaattttaacttatactttacttgatacacaattcaagatttatgttgcactcttaagtgtttctccccaaaacgagtttcatgaagaagaatgaataatcacacttctagccatgtccttaaataaatgttaattacatctctcaaataccttcatgttaggtttgcctaacattttttattggaagacaaaattacattcttttagtagttgtgcaaaataatcttagacgttacttacttgattcgtcttacctcccatggtagtattaaccaccatagctagtttcatcgactttaattttcttacgtagttgattagtcaactatggttttgaaaatttaaaattaataacgtctgaagattaatgcccttatgaacaaaataagtttcattagtctaaagacaagatactattattgatcattccatgaaaccatgaggaaagatctaccaaaatatagcataaattcttagatgatgaaattttattttgtcacttgatttctttatgtttgtttgttacccctttacaaaat

SEQ ID NO: 354367 - DNA, 431 bp, Cannabis indica
ttaaacaacatacttgtgagtagatctaagatcctggtaaaataaattccaacacagaacccatagttcaacaccattgttactccgagcatatcggcggagagggatacgaccgcttcattttagaattgaagaaaggttggaggcattatctcccgtccaactggacatatattgtccgcccaggtgttgctgacactcttcctgttggctgtccatgttcgggtaacttcaacatccctattgttgttcctgttgttacagttgcccggcattcacaccagtgttcgtccagaagtcggatgatggcctggacaaagctgatgatgcgaaaggtcaatgcatctgatcctcacgtggcccagctcgctattggaaattattttaccgagatctagatttaataacaagtatgttggattaacaaccta

SEQ ID NO: 354368 - DNA, 705 bp, Cannabis indica
agatcctggtaaaataaattccaaacattacaacctcctcctgttgaaggagagaatatggctaggttatctcggggggggggggggtacagtattgcaggagagaacaacaatgcccaaaagtggtacgtgagggaagtaaaaaacgaacactcagtatttgctccagaaccttccaagaagataaaaattgaagaacctccaattatatatttgatggaagatgagaagaatgtgaggtaccctcacgtcgatccattagtgattaccatccaactcgccaataaaaggataaatagggtgctgatagataacatgagttcagtgaacatcctttacaagtaaacactaaagaagatggggctcaaaaatgccaaattgaggccttgcatggtaaatctatgcagattcattggcgacggtattgcaagtcaaggtgtaatcgagctcgcattgaccttgggtgaggcacctctatccgccttaattatgcaagacttttgtttgtcgacctgccgtcagcttacaatatatattattgggtcgtccagccttgatctgactaggggcagttagtttgaggcgatcaaatgctggcccacaatgctatcacatagagctgcaacacaacaaagccggtcactagttaatggtagtcttggcagaaaaaagcgaaaagaaggatgaagatcttgatcctcagat

SEQ ID NO: 354369 - DNA, 902 bp, Cannabis indica
aggcattcaaaaaactaaaagagcacatggccaagcctccaatcctgtcaaaacccgttctcagagaggacttgtttctgtacttggccgtctccgagcatgcggtcagcgcggccttagtccgggaagaagagaaaactcagcatcccgtgtactacgtcagcaaacgcatgataggggcggagacgcgataccccgtcattgaaaaattggttttttgcctcctaatggcctcgagaaagttgagaccctatttccaagctcacccaatcaaggtgttgaccaaccacccacaacggcaggtcctgcaaaagccagaggcgtccggaaggctcctcaaatgggcgatggagttaagttaatttgacttgcactacgttccccatatttccataaagggacaagcgctagcggacttcatcaccgagtgtaatgaagccgaagcaaccgcaaacataccgacaccatcggttccgacatggaaagtatttgtagacggagcctccaacgagaatggatccggagcggggattacaatgatatctctaagtggacttcgactccaagcagctctacggttcgactttctggcttcaaacaatgaggccgaatacgaagccttgatagcggggctgagattagcaaagactgtaggggctaaaagagtagaagtctacagtgactcccaactggtggttaaccaggtgtcaggagaatatcagacgcgcggagaaagaatggccgcgtatgtagcgatagttcgggaactgctccacgagttcacggactataaagtagagagaatccccagagaaaagaacgctcacgcagactgcctggctaaattagcctcagacagtgagattgagaaactgggggtagtacccgtggaacgcttggca

SEQ ID NO: 354370 - DNA, 524 bp, Cannabis indica
aagtatttttttttttttgttgtttttgcaaaataaaaatattacataaaatcaagttatttacgtgttgttgataacaaattagtatacactacactagttgtataacaagtaaaaaatagaattttacatgtcaaacaaaaatttatcttatttcttacattaagacatgtataataataagagatcacacattatattaattttgaataaagttgggagattgatagaaagatatcgtaaatatgaagaaaaattacttatatttagtaataacattattcgttattttactgttgttttaaagttgtaaatatgttgtttgattttgttgctttttgagcatgttgttttcacgttgtttgtacgttcagtttcagtagttaaaatctgtagattccttaaagtatatatacaattatttttatgcttttatagcgttgttaaatggttgttaacaattttaaaaagctactaacaactattgtttttttttaaaatatatatatataattatacaaata

SEQ ID NO: 354371 - DNA, 628 bp, Cannabis indica
tgtaatttttaatattatgattagaatgagaaaaaatttagtattaaaataattttcttttactcttgatttaacattaaattttaatttcttcattaagttgtgttaggcgacgatattctattttatatttataataataataagtggtggagagtaaaatcagaaatattggcaatgatacttgaatttgaaaaaaaaaacaaaattattaagggtatgaattgtggttcgcgatagaccacatagacataataacattgccttttgtgctatcagagtaaaaaatatcccagtttggttaggcaccacaaacaactaaacttaaatgagagttaatttgagctcatcgacttatgagaaatctgttgaaatgactgcgcctacgtcgggatttgaaccttcaagatatacctcttttccatcttacacacgtgtgacgccccagtaactcaaccgctagctgtctcaccaagcgcctcatcggcggtcgcttacttaatatcaagaattagttagttttagttagttggttttagttgtccaagttgttatgtttgttacagttagttatagttgttacaactgtaactgttttcttcttattcttgctgtgtatatatagctc

SEQ ID NO: 354372 - DNA, 723 bp, Cannabis indica
aggttcaagttcaatagttatgaacttaattcatttctaagaatgagtcaaacgtgtataattagaaatacataaatgtacaaattttataaatacatgatcatatgatcttatcacatcgataagaaaccatgtaataaaaatctaaggctaatttagatttttgccccctgaactttggcatgtaccaaatcatgccccttgaacttttcaggtcgtaaaaaattcccctcgaactattgagattgttgcatttaaggacttttgtccaattttattaagaaagtatgacatgggtgaaaatttagggggcacaattctgtacatgttaaagttcaaagggatgattttgtaaatatcaaagtttgtgggcacgatttagtatatgaacaatctacatattagcgaaattgaatgaaatttaaaaaaagtccttaaatctaacaatctcaatagttcacggggaatttttaacgacctcaaaagttcagggggcataatttggtatatgtcaaagttcagtgagtaaaaatccaaattagccaaaatttaacaatgactcacgattgctaaagaaatataatttaaatattttcttcaaaaataatttaatatacatttattttctagataaataaataaaattatatatactaaaataaattatattaaaaaaataatcatcaataaaatataattttatcttatatataaatataaaaa

SEQ ID NO: 354373 - DNA, 705 bp, Cannabis indica
caaacaggttggagttagctatgactaccacttaaatccagtactagtaccaagattcaggaacagggaccatctgagaggatattatcaatgaagtaactgtttcttagatagttcactttacagtgagattcactttatcttgtgtaagtgagtcgatcacctcttgaaccgacaagatgcgacgaagtcatcttttggttaggaggtccctcactaaggtatggcccctacactattagtcgaacaaggcattagtgtagtgggatcactacagctaagctttgatgaaaaattaaaatttgcaactactactttttctttcagctaagctttgataatatctgatgacgatattatcaataaaagcttgttattaatcaattgcagctcatagacttgacaagactctcaagcgctaaacaaagcttgtagagttggcttgaggtaactacgattatttccttagtgagttaaacactgacaactcacaaatctctggatgagtggatgagtgctcataatgtaacaactaatcgagacccatgatcaagaaagcccaaagagatttggtatggcaagtgatcaatgaaggcatttcttcgatcactcgagggaaaataagacatattatacaggagctatgcacgttacatgagcattcacaaaaaaatcatggtacacgagagccatgtatgtcacata

SEQ ID NO: 354374 - DNA, 630 bp, Cannabis indica
aatccccatggtcgcagtcgtggttgtggcatagttcagggttgtcgtcctgtaaattcacaacaagctcctccggattaggagaagaggtttgcggagatgcaagatcgaatctgcgaacaagatgaaaaaattctgagattaaggtagcagggtcctcctgtcgtgcctccatagcaagctcaggccgttgtagctccagcgtttccaatagaacaacctatttttggcaaccgtatggagccgttatatgaaaggtttcgcaagccagcacctctaatgtttctgggacatcctgatgtgatgaaagttgagcagtggctcactgtgattgagcgaattttgaatttcataggggtggttggaaatgatcgggtgacctgcgccacatttcagctccaagaagttgctctcgtgtggtgggaattggtttccctaacttgggacgtcattgttatgacctgggaagagttccaagagttattcaatgctaagtattataatgaggccgtccgcagtgctaatcagaaagagttcactgagttggtgcaaaccgaggggatgtcagttactgaatatactacaaagtttgatcgtcttgccaagctcaccttgggtattgtgccaaca

SEQ ID NO: 354375 - DNA, 818 bp, Cannabis indica
aagtccccaaaaagtgatttagaagttttgagaataatgtgatttatgggcctataaatcgtcgagcagctattccactcagattggccggcacacctgaactcaaaaatgaggtaagattagtataatgatatgcatatgtatttacatgtttagcgtacatgttagttaagcctgttagattacattaaaatagcggtattagtatatttagtgttatattggatatcaataaatgtatgttgcttaagtactactcaacagtatcacatcggtacgactagagtacgactagtgtaccgagtataggttgatattatggtcgatagtactgtactagttgacagtatcacatcggtacgactagagtacgactagcgtaccgagtataggctaatgttatggtcagtagtactgtcgtatgaacgttcttgactcagcaccgtgttagacacggggatagggttatggttgggtgaatgggcgcctaattataatcggagttattgttatgttattgattatgcttttcttactgagtctgctgactcaaagatattgtttgcatgtgtaggtgagggaaaggctaaggttgagcagccgtgagagcgaacagatgaagattgtacatgtcggggcagttaggcctggagcgtacgatctttaggacagttgggcatcttttgtatagttcgctagtcgacaacttttgtaccatacactgtaaaacttttgtaaatattttgttaacgggatcccagtttaatataagtaaattattttggtatttataaattgttaaataaagttttaattat

SEQ ID NO: 354376 - DNA, 798 bp, Cannabis indica
atttagaagtaatttgtttgttattacatgtaaaagggtatatgtgtaattcaatgataaaaagtccaaaactattgccacttttatttaggttatagattatgatgatgttgcaatatataattgatattatatgtcaacacctaacatgcagaagattctagcaaaaacaataaagcaagtcctttaaagtaaaaatattacaggtcttattacataattttttctctgcaaatatattaagttaatacatgtcaatttatttagggatgtttatgtatttatgagaccacatttaatatttttaggtctatttaaatttgattcaattatatattagatgttagattttaccatctgattcaatccagttaattttaatgatctaatcgatccaatatccattaaatattgaattagatcggttctatccgttagatgtatttatatatatttattggtttgatttgagtttatctaatattttaaatttaatattttttttagatcggatcagatccatctaatattttagatccagcatgtattggatcaaatcgaaaaaaagagtaaaattttaatgttaatttttattgttgcccctaattttatccaaaatacgtggaccaactggactgagacacgtagactaaaggggtttaacgtttaaataattcagctaagtctctttcattaaagggatcagcatctaacatgcctcccggagaaggcctgtgagtttcacatactcccggagagcaaagttacaacaaagcatctccgggaggtgtcagatcc

SEQ ID NO: 354377 - DNA, 846 bp, Cannabis indica
ttgattcagtgagtttttctttggtttattggctggaatatgttgtgtataccctaattaggtactatggacagtttggtagcatttggtggaggactgagcaagaaatgaaatttcttgggtgaactagtgcaaaccaggtaaccggctagctggttttggcagggttccccaggcctttcatttcctcaattctcgtccattctgtgctgtggttgggtgtttccctatttccagagtttgattaacgcctagaaagtataatagaacctagggttatggattcgggtttcctgggattagggtttgatcatgtaacttacccggtttcataatgtgattagggcatccatctacacaagactttccgttcaggtcagcagcacacttgaatctggaaagaaggtaagaactaaatataatgtgtgatgtcaatatctgaatgtatgtatatgttatgtgtatatgcatgcttaatgagttatttgtactaccaacacttatactgttaaggtatagagtgtattggtatagtgaatgttatttgagagtaccgtgataccagcataagtatagagaagtactgggaaagtgtggtatatcactcagtagtactcagggtacaaaacaaaccgtaccaacactcatacagtgaggtacgtagtgtatgttgtatagtggctgtaccaggtactgaacgttcttattcatctgttgagccatgtaaataggtgtatgggcgcctaattacaagtcgaaaattatatgatatgctatacgcttttcttactgagtctgtcgactcacagttatgcttccatgtgtaggtaaaggaaaggcgaaagc

SEQ ID NO: 354378 - DNA, 558 bp, Cannabis indica
ctgcatcaatgtaaggttttcttaactttatatgtgtttaatttatcgttttagaaagttcatatttaggatgttaaacaacatacttgtgagtagatctaagatcctggtaaaataaattcccaacagaatttgcatgtgccatggaatatctgctttctactaaaaactcaacaatctttccataccatgctcgtggagcttgctttaattcatagagcgccttttttcagtttgcatatatagttgggatgtgctttatcctcaaatcctcttagttgcaacatgtatatctctcgatccaattctccatgtagaaaggcattttttacatccattttccatagtctccagtctttactagttgcaagtgctaacagttaccacactgttgtaatcttagcgattaggctaaatgtctcttcataatctagcccatattgctgagagaatcctcgagcaattaatcgagccttgtatctctcaattgaatcgttaggactaggttttaccttgtagacccttttgcacgaaatgggtttcacttccttcgacttt

SEQ ID NO: 354379 - DNA, 577 bp, Cannabis indica
ttcattgcctccgccatgaatctactaatacaagctcggaggggctcccctggcctttgcttcactttgaccaggtcctctaaatgcaatgggagttggcgagaagaagagaattgtgcatggaatttcaaggagaaagccttccacgagttgaaccttcccagtgtcaacttgaagtacaattgttgggcggcttctgagagtgtggcaaaaaaaaatctgcaacacacatcccctcgtactccttgtaattccatttgcatttcaaaatatttcagatgtgataaggggtcttctttcccagtatacatcttctaggtcagcatcttgaacttgtggggtagctctagaacattgatctctggagaaaaaggggatccacatgctcgatccagctcgagatcattgtgcttttgatcggccagaccttggaacatgtttttcaattcatccaactgtgccttcacggatggatgaacttgtttggcctcttggccgaccaatgtcacattaggatttctatgagctggatcttgagcacgggccccgggctgagtggctggtggaacatattgtt

SEQ ID NO: 354380 - DNA, 551 bp, Cannabis indica
ctccgatatggggtcctccagaaatcatagctactctcccattgggtctttgtggcaggccaggaatttgctgagtttcgcccgggggagcgattggtgctaatgctccggttgcaccccctggtgctccttggcggaaaggtcctgttgcttgaaccgggttgagatgaggcaaccggttcttgatccattcgtaaagatgacccaatcgaatcaagttttcaatctcgtccttgaggtttttgcattcattggtgctttgtccaatgtcgttgtgatactcgcaccttttgttgggatccctccgagagctatccatgtacagagtaggcggtctctggtagtgtgtattttgcctagtaggaaaatacacgtgctcctgggagtctgttagctccgtgtactgggtgtactggggagtgtacccccttttctaccgcttatcctccgtccggttgctgccttttgaggacctcttgctccgagagccttcagagggacctgttaaggttgcggtcggagcggagtgagacggtgttgggttttatgcc

SEQ ID NO: 354381 - DNA, 724 bp, Cannabis indica
ctgcaagccccaggaaaacctgggttgcggtccctagcttgatggaccttgggtcaaaaacaaccggtcacttcctaaccaggttgataaggatggtgcctacgacccaaccagatacataccaatcgtggaattagaaaattgccatcttaggcgtcgattggaggaagcaaaccagcataatgccgagttagagtgtaaaatagccgcagtaagggcagcacatgagaatgaaacccaaaattaacctgaccttgggagaagagatccacgaggcaaacctcgcggctcgcaaaataaggggcaagagacaacccagagatatactcagaactctcaggagatgcaacctgaagaaactatggaaaatccggggacacagcctgggatatgcggaacatcagatggaaatcgccaaccctctcttcaggtttatcagaaagaaactagtgcaaacccttatagggagaataaggtgattcaaaccttaagaggaagagcaaggtccgaccgcagtcaaaacaggagtgatctacgaaagcatctaaacttgaagaagcctgatctttgtcaataactcgtccaaagaaaaaggattcactccatttgcgaatggacgagttggagaataagttctgaaggcatcgagtcacgaaactcagaagaaaaccgcggcatgatactattggagaatttgatttggaagccttaggatcaaagaaaa

SEQ ID NO: 354382 - DNA, 762 bp, Cannabis indica
ttaaatagtacttggtgttgcaaaattcactcgacaacagttaactcataacttgcaagttgcaaacctttctcacttatgtgcccaaaccttcaatgccataagattaccttagaatcttcaggatcgagtttctgttgttgtgttgtgacaatgtgaaactggttctccctttaggtagtatagacctccttccttgtagcctttcattatggtcattgaacctttgctttgtttcatggtacatgtttcaatcttactcacaacaccaaggtcatctagcatacttaaagaaattaaatttcttcctaagttaggcataaatcttacccatgtaagagttcttataataccatcatacattttaaagctcacattacctgagccttcaatatggcatgtttggttgttgcctaagatgaccttccctcctttggattccctgaaataaaaaagtaaagatctattattaatcatgtgaaaagtgcatcctcaatctaaaatccattcatctttgaatttagttgcagtaatgtaaacttctccactctcatagccatcacttagattggcttcatgcttctttccctttttctttaagaaatgattttctccctgatttgattcactatcgctaccatttgttcttcttatgttacttgtaacgccctaattctaaggcacgctacaatgatttttcaattacagtgctatctttgctaatcaaaaaaatttctcgaaaaatgtgtcaaattaaatttt

SEQ ID NO: 354383 - DNA, 499 bp, Cannabis indica
caattccaagagaactactctcaattcgttgccaacaattcctcattaactttgatttcatttctagtgttgttaattaataatttagagtaatttgcgggataaatacatctctctcacactatttcttcttcttcttcttcttttttttttaataaatattctccatctatctctaatcacatttattttttttcttttattttctttaaatttaagtaactattaatttttgatctatgcatgacacctcgacagtatcatcaataaatagcatcaagacctcaattttcaatatttctccataatttgaagacatacaaacttctcttttttttatgtcgataattttaccgtcatcgatgtcttcaaattattcataatttattcattagtatgaataatttgatatgaaaaagttatttttaataataaattcatgaaaagaaatgaaaaggctattgtaactttttcttcctcattctcatgtgatactctc

SEQ ID NO: 354384 - DNA, 1297 bp, Cannabis indica
tgggtctcggtcccaattctaatgcccgtgtcccggtccatgccctaggttagggtttgagtcccggttcggtttccaatctcggtctaagtcaggatctgggtttgagtcctggtccaagtttgagtctgagtactgtcttcagatttgggtctgggttccgaggcgcgggtcatggtctgggtcctaggtcccgatctgggtccatgtttgggtttgggtcctagtcccagttttgatttctattcagtgtctgagttcgagtttgggtccgggcctagttggggtctgagtcttggtttgagtgtaggtccgagtctgggtctggattcgggtccaggtccgagttttggtcttaggtgcaggtcctggtctgggtctgggtcagggtctcactatggatctaggtcccgagtttcgatcccgacatgggtctgggtgtgggttcgagtctaggtttgtatccggatccctatctaggtccgagtctgggtcttggattgggtcccaggtctaggtctaggtccggctctcgctcccagtctcggtacacgatcgtgtttgggctcaagtttttgtctcgctttgggtttggggctaggtccgagttcggttcttggtttgggtccaggtcctggtcacagtccttgtcttgttcaagggtcctggttttgcagttcctgttcaggttcctgctccgtctcccgggtctaggtcagggtccgcgttggggtcctggtccgggttcgggttcgtgtcctagtttgagtccctgatctggtcccggtcacctgtcccggtctagttccggttcaggtcctgggtcccaagtccgagtttgggtttgggacagagactggggtgcggttctaggtcccggtcccaattttgtgtcccaagtctggttttatgtttgggtttgggtttgggtctaggttaagcactgagtctaggtatgagttgggatctgggtttgggtctcgacttgggtttaggtcttggttggagtctggcacctgttccggttatagttctgggtctaggtttaagtccggttacggttctaggtctaagtcatagttctggttatggttccagtcccgttcccgggtcccggtctacttccggtttcgtttcaaatttttggtcgcagggtacggattcgggtccaagtttgggtttgggactggttttggtccgggtcttggttcgggtcctcgtcttattctagttagggtcccgggtcttgggccgggtcctaagtttaggattgggtctgagttcggggttgtgtccc

SEQ ID NO: 354385 - DNA, 719 bp, Cannabis indica
ttagtgataacataagttatattatagtttagttattataacatttttactttattttacaaattttgttgtaactaagaatattttttataataactgttgtaatttcagcggaaataactttgagaattcaatcataaacctgcaataatctcaacacttgaacagtaataatgaacataaaccaagtaatcaacacaatgaatcaaaccagaaatcaatcaaagaacaacacaagattttatcctggttccggtcctagagatcaacatgatccctcgccatactccagctgagaaacatcaccaattcttcattaatatgtgaataagagagcattaatacaattacaataaccagagcaatcacagctcagatggcactcgacacacaccagagaaaacagtcacagttttctctctatcaacccgagtacaccccttgttcttgaccctcttcaagaacagaactctcagcttagaaccctaagcaactctctcttattctcctattttcctcttacttaaaatgaaaagactagacatatatatagaccccaactcaaacaaggatagcaccaactaactaactaacataaccgaaagttagttaagttagttggtttaaggagttggacaataagttggtttagaggatcaatttccacaaatttccaccttgattctctaaagcaacttatcagggtcttttcactgaag

SEQ ID NO: 354386 - DNA, 422 bp, Cannabis indica
tatcattttcttccaaaaattgcaacaaactaaaagagagttgctagagccttaccttgagttaaaacgagagagagagtgtttgaagagagagagataaatatcttttcaattttcttatttttttagaaaaatagataaaatgggataaaatgatggttttattaaatcacttcagccaaaataaactttaaaaatctgatttctcattaacataaaattcactaaaagacaaacatacaaatgggcaaaaagaccattttgccctttccacactaaaaggcataaaagggtacttaggggtattttgggaaaactctaaattcccgactaatcccgacattcccaatgtctaaataaaccgtcccactatactgaaatactaatttgtgattctagtgagccatacaccgagttccatg

SEQ ID NO: 354387 - DNA, 905 bp, Cannabis indica
aacatttgcgccccaagtctgtacgggaccactgaggttgcatgtagacttcttccaagctggctctgcctttggacagggacacgtgtggagcatgaccgttcgagactccatgtgaagctgactgggcttcccttcagttttcggttaattaatgctctgacaattaaaattttgaaatccgattttctccctccattgctgatggttgcactcgattacttttgatttcccatattcgttttggtggcgggaagccgaggcgtctgaggttccttttgatacagttacctctttgcctataaatacccatagtaaactcattttatcacctttaacttttaagtaaactctagagcaaaaaagagttttgtggcatcaaagtttccgaagtgccttcagacgattgctggtttgcttgacgttgcttgtactcagacattcgaatctttgagtaagtttctgatttccttgatgcttttctttgcatgtttacactttgaatgcaactatgctatagaaagaatgcttacgaaactctagggttagaaacttctgcgactcttctttaccatgtcttcatgtggtcttatagccatagagcttgtctttgaaccgcattatgtctgtcttccatcttgcttattctaagcttcataaacttttttgccctaactgaagaaaactttctgagttcttgagttttgacttttctttagatatagtcattctttaatctattgagtactcctggtcagcatatttgcttgtttttcatttgatactccgtccaacactcatcttgtgtgttgtcttttatagatgaacctaggtgagtcttgggaactcggcatgagatcgactaggatttgcttcaacttctgcacgaggttcatcctcgtctt

SEQ ID NO: 354388 - DNA, 674 bp, Cannabis indica
ctcttgagtcaactaactcatatggcacccctgtcgatttccacatgcatgcaaagtccgctcaaccatccagctgattcacacttgcatcacgcccttctggctcccacgatgtactaagttccaatgatgcagccctttggccttcatgcaaactctagcacccttctcgaacttcgcaggtaaacatgactaactaagtctcactgacacagccctctggcttccacacaaactctagcgccatctcaacgcttgcgctcgatcatcttagccctgatggcttctttaatgcattcattccacaactctacatctctatcgatgcctttgtgtgacttacgccctctggcgatttcacaagccaacacatcccgctcaactgccacagcacttcaatatggatcaaataaaactcgcatgcgaacacctccaagtacaaccatcctctgacgattgcagcctctgccccgttggtctccatgtgcgtccctcttgacacacacatgtagcaactgaagcattccatgtctatcccaatttgaaccatctcagtcatcaactctcgacctttgtcgtgactaacaagaatctgacggtccatgtactacctccacacgcctgccaacaagcttcctttttaacaaaagcgcctcctgcggcttacgatgtca

SEQ ID NO: 354389 - DNA, 700 bp, Cannabis indica
aatcaaactcatattctccacgcccccgttatccatagagcaatgggcaggcggagtcgtcaaacaaagtcatcataagcaatatcaaaaagcgacttgaaagtgctaagggaagatgggcccaagaattgcccagtgtgctctgggccaaccgaaccacgccacggactagtacgggcgagaccccgttctcacttgtattcgggatggaggcagttatcccgacggaaacgcaagtacctactttgcagtcagaattaagtgatgaagacaatacttccctaagactacaagctgtcgacgatatcgaagaaagaagggagcgcgccctaacccgaatgcagaattaatgctccgccgttgcaaaacaatacaataaaaaagtaaggccgaggaatttcatcccgggggaactggtcctgcgtaaagtttttcaaaacactgaagaaacccgagcgggaaaattgtccaccaactgggaaggaccgtaccgagtggtaaacccgacgggaaagggggcgtacaggctatccaccatggacggagccgacatcacgagaagctggaatgcaaggtacctcaagaaattctatgtataaatcaaaggttgggcacttcaaagtacatggaaactgtcatcaaaatttctcttcaaaataaataaaaatgaggggaagtcggaaagtattgtccaagttaa

SEQ ID NO: 354390 - DNA, 490 bp, Cannabis indica
gtctgcaggactcaggtactaagataacaccatgacaatatttgcctaaggagaaagtcagcaagaataaggtactaaggtaacattgaaatgtcaaggagcgaagagttagagtgaccgaggcattagttcaacatcttcatcaaagtgatatgtggaatgcagggactgtatacgagtactcgggtagcttgcgagatatatcttgaggggtattcctctaagagagaagtttttcccaagttaaagcgggggagcccactaattcatgtgcttgaagaatcagggtacttgttcagttttggtgtgtgaatccaaagagaaacactagaacagatgggttgttcagtgtgaagacttgcatgattgttgtaaactgcagatagacaatatgcaggggcgtaggctgagatcaagactgagctagtttgcgacatgtatgggcatgttttgtgtttatggggacactgtaagccgaatgattcagaga

SEQ ID NO: 354391 - DNA, 530 bp, Cannabis indica
agtggaaaaaaatcaaattcaagcccagaaaaagataaatcacatggaatatggagtagtggagcacacgggccgcgacccagctttagtgtgtcgcggcccgcttacgtggaaaatcaaaataattatcttaggaaggccacacgggccgcggcacagctttagcatgtcgcggcccgcctctgtttatgcagcaaaaatatcgtgggttctggaggtttctcaaattcaaatccgaataggaatttaaacatgtgcgttttatctatcttttgaggccctcaatgcctatataaaggaaagaagagagttgatttcaagaagcaatttaagagggaaataaacagagaatatagagtacgaattggagagatcaactacaatattggaggcattcttcagagggttttcaacattcttttcttctctattttcttctcttttctcaaagttaatatgcgtgattgtgttttcataaacatgagtagctaaacatttaattaaggtttagatggagattgtttaatatt

SEQ ID NO: 354392 - DNA, 687 bp, Cannabis indica
agactagtccttagcagcctcagtggcagctatgtattcggcctctatggtagagtctgatattgtgatttgcttagcacttctccaaacaacttctccacccccaagagtaaaaactatcacagatttagacttcttgtcatcaagacaagcttggaaatctaagtcgatatagcctacgagatttaaaataccacccctgtagactaagtcaaaatgccttgtactttttaaatacttcagaatatgcttaactgcagtccaatgctcctctcttgggtttgtctaatacctgctcacaattcctactacatagcaaatgtcaggtctagtgcataacattacatacattagacttccaattgctgaagcataaggaatccttctcatgtcctctatctcttgaggatcagtgggacactgttccttagataaacggataccaggtctagaaggcatcactaccctttggtatttgtcattgaaaatctctctaacaccttatcaatgtaagctttttgagagagagtaatatatttgttctcctggtttctaatgattttaatactaagaacataagcagcttcacccaaatatttcatttcgaattgagtgtcaatccatctttgatgccagtcattttcttgatattgttgccaataatcaaaatgtcatcaacataaagga

SEQ ID NO: 354393 - DNA, 1213 bp, Cannabis indica
gaaaaatgatatagcagaatttgtagcaaaatgtcttacctgccagcaagttaaggcgaacaccagagacctgcagggctgttgcaatctcttgatattcctgagtggaaatgggaagatattgctatggattttgtgacagggttaccgaagaacagcaaacaacaggattccatctgggtgattatcgacagactcactaaatcagcacattttctgcctgtgcgcactaattacaatgcagagcaatatgctgaactgtatgtaaaagaaattgtaaggctacacggagtcccaaagaccattgtatctgatagaggttcagtttttacctctaagttttgggaaagtgtgcaaagtgctttgggcacaaaactgaagttgagtacagcattccatcctcaaactgatggacaatcggaacgaactattcaaatactagaagacatgctacgagcttgtgcgttggatttcccaagtaactggagtaactatttgccactaatggagttctcgtacaacaatagctatcaatctacaatagggatggcaccctatgaaatgttgtatgggaggaagtgtcgatcaccactacactgggatgaggttggcgaaaagcgatacttaggcccagacctagtaagagaggccactgaagcggtagaaaagattcgaaatagaatggtaactgcacaaagccgccagaaaagttatgccgacgcaaagagacggaatgtggaatttgcagtgggtgataaagtgttccttcgagtgtcacctatgaaaggggttatgcgttttggaaagcgaggaaagctaagtccaagatttataggtccttttgagatattggacagagtgggacaggtagcttatcgactggcattgccaccagtattagctgagacgcataatgtgttccatatttctatgctacgaaaatacgtgtcggatccatcacacgtgctgaactatgaaagaatggagctaaagcaggacttgagttatgaagtgcgaccagttcgcattatagagagaggaacgaaggagttaaggtccaaaagtattcctctagtaaaagttctgtggagcaaccgttcagaaagggaggcaacgtgggaaatggagggagacatgaaagaacagtaccccgaactttttggtaagtctaatttcgaggacgaaatttcctttaaggagggtagaatgtaat

SEQ ID NO: 354394 - DNA, 787 bp, Cannabis indica
aaaacaaaaaatatcaaaaataaactaaaaacatacaccataaaaatattccataaaaatttacactataaaaataactattagggttaggtttagaattaaaataaataaaaaagataaaatttgttttatttaaacccttatgtctgaattcctcctaaaatatcttttcttctcaaataaattaattgagtctacaagataatattatctcaactagtgtggggaccatgggtttgtataatcaagtttccaataaacagttttagaatttatagagtaaattttatatcttactaattcctcctaactccactatagattcacaatttcactcttgattatatataactctctataccaagtatagatacgctataaattatctattatttcaatctaaataaccaatgatctttcgagtagggaaagatttaccattctaccctttattatattttatccttaaaatacttagctacttgtaaatgatattccactaaactaatataattactaaaatgagtacttcactatttaatctggtttagcctagctcgaaggaaactattgtttcacctctatgtatttatagaagctatatatttcgtactatgattaacgctctaactcaactgtactactgtgttcccaagatgtaagtattggaccaatgcaattggtcggctttaacaaacaagtcaaagaacataaaaaatacacttaaactagagcctaactgtcttagatttgagatcattaatctaaaatcaactaagtgatatta

SEQ ID NO: 354395 - DNA, 808 bp, Cannabis indica
tagatttcaatatgttcggctctcatatcttcggctaattttaggccagcgactaaagcttcatactcggcctcgttattggatgctttgaatccgaacttgactacagcatgcaggtgttgcccccaggtgtaacaagggtgattcctgcactagatagtcagtctatagtcgacccgtccgcgtgtagtttccaagtcggcttgtcttcactcttacttggctgaggtgtttgtaccagctcgaggttgctttttgatatgctttcttctttacctgtgcattctaccacaaagtctgctagggcctggcctctttgatagttgttcggggttggaaggtaattttgtattgacccagctccaccgcccacttgagtaaccgtccagaggtgtccgacttttgcaatatttggcgtactggttggtcactgtacaccctaataagatgagcttgaaaatagggccttcactttcttgttgctagaatcaggcagtaaacgagtttctatatcaatgggtatcggccttcggcctcaatgagtcttttactgatgtaatagactgggtgttgtatgttgttttcttctctgatcagcacgacactcacagcgtgctccgtgacaactaagtatatccctagttcttctccatccaaagttttcgagagtacgggaggctttgcaagttgcgtttttagctcttgaaaagctttatcacatccctccatccactccaattgcttatttcctcgtaggatgttgaagaatgggacacacttgtctattgattttgaaacaaatctgttg

SEQ ID NO: 354396 - DNA, 674 bp, Cannabis indica
ataaaaatattttaaaaaaccataatatttggaggaaaaaaaataacatatttgtattaaaaagttactaaagtgtcgaataaattcaggttacaaccataattgatgtttatatacgtacctactcaaataaaagtagagatgatttgttttttatatatgataatagtaattataaatgactccttatttaaccccttctctaacgttttccttgatcattgaactactttattagtctctcttccttttcaaccaatctttctcaattctgataagattcatttctttaaatattttgaacgtaacgtctacttttcaaagtgttcaaaatgtttaatattttcaacattgttgttgtttcttgatgaggttataactttaatccaatgcttaaatgtggaagagaatcgtaacaagtcttttgtaatagatggttctgatactttattgtgattttttagaaaagaaatggagttggttggaccattttgtataacgagacgaataagaaggaaaagaagaaggcaatattttatttgaatgatgaaatcaaagatgaattagttcagcatatcatatatgaagtacttcgtttcgaggtaagctttttcagtcctgaatacatccctatagagatcaaaaactttattaaagtgtttcattcaaaggta

SEQ ID NO: 354397 - DNA, 1148 bp, Cannabis indica
atgatcaagaaggtagaatacggtctatgggtggaacaagatccagccgtcatggccaatcagacctatgagaacgcttgaaccagaaaaacctgatcttcgttaacaacttggtccaaagcaaaaggatttaatccatttgtgaatagacgagttggagaataagttcaagagacatcaagtcagggagtcaggaaaacaatcgggatgtgattctgttgaagaattcgagtcagaagcttcatggtcaaagagggaaaacgactctaaaaggttgtccaaagataagaaacaaaagaaacactgcaaatacgtacccatttatactgtctataccgagcttaatgaaactcgggaaagtatctacctcacgcatgaacagaaggttgctttgaataaaccaaagcccatgaaacacgcgagacgtaaaagggacccaaccagacgatgtgaataccatggagatattgggcatacaacggaagagtgtcgtcagttgaaagatgagatagaaggcttcatagcatgaggacacttccagcaatatgtaaaggggcagaacaatgtccatgaccagcctgatctgcctagtaacccaagcgactagggaccataaccttcctttgtaggaggaaaggatacctcaattatcttgagaggagaacatgttacaaaaaaaattggacaagggcagttagtccggtcaagcaattacataaaagtattgtgaagtaatcaaatatcgactcataatggctgtcgtatagagctgcaacacaaaaaagccggttgtcaaccagtggtagttaggacaaacaactgaaaccaggatcaattcacctagaacctgggatatggcaaggattgaccctggatatcaaaatcattatgacaatatgttagggattgaccctgagcatcaaaacccattttatctaaaccagatgctacttcaagattgataaaataagcaattgaactaggagagttcttatgagattaaattaatgattgtaaaccgcatcattgacgtaatattttgaacttcaattgtgaataaagtaatcatttactttcgacaagtaatcatatgttgggttttgtgccctaaataaaatccattacaatctgattagttatcaatctaa

SEQ ID NO: 354398 - DNA, 628 bp, Cannabis indica
catgaggtggcagtcttctccagcaatgtacatattgacctcgccggcctgcgtgccgagttgccaggagttgttttagactggttgtatctgctgtgtattttgattttatatttaaatggttgtcgtacatatttctttagcaaaactttttacaacagggattcccggaacacactttttatgccgttataatgtccatttttagtgttttattttagtcaagtttttaatattatcacggtttttaataattaattattctattagtattaaactagtttataaaatcacacacgtggcgtccctatagattagggcgttacagtgaagttctcacagctatattgtaaaaaatttcttcaaacaaatttttgaattcctcccaggtcattccactaacatctcgggtttggcccacgatatcccaccaaacgcgcgcatgatcttacaacatgaaggtttcacagttcactctctttgttcctgtcactcccatattatcaaggatacgggtaatagcgctcatccactgctcagcctttattatgtcaatacctcctagaacggtctaaggtcggaggttgcagcttcacaaaccactcaaatacagaatctcgatgcggca

SEQ ID NO: 354399 - DNA, 827 bp, Cannabis indica
ctaacggataataattctttaggatttgtcccattaaaaagggcagaataatatgtctccttctgctcaaatctctaacccttgttcctttcagtcgtagagtaataacaagatttgggcttggatctccttctccccttcagtttgattaaccacagtcttccgtactatgattgagtacttgacttgatatgtgtggacatggtactctatcactaaaggcatgaatatgatgaagaataacaagaagggccaaaatcaatatgaaaggagtctctcatctactagttgtcttacagagttagaaaattaggttttatttggttgaagtgacttggatgagaattagagcatcatgttcctttttgtcgtattttaactagggtttagaatttaatgatatggattaaaaaagaataaaataatgggtaaaaatcccttttagtggctggccacttaatggacctcactagtttcaattttgtcactttatttgaaccatttatcctttctttcaagaatgtcatattttacaatttcaatcctataaatttcaaaactatttatttaataattataattaattattaaataaaatttctatgtattttatttattaattagactttacaaagtctcttaattaacaattaaactccaaaacctcttttctccacaattcagcatttgcttagtaaaacttcataaacaagacatagtctaattttagaattataattgattaattaacattaattaactgagtttgtaagtagtattatctcaactagtgtggggaccatgagcctatataatcaagcttccaa

SEQ ID NO: 354400 - DNA, 608 bp, Cannabis indica
ttagaatttaggataagatatatgttcgcgattccatctcaaaattaattaacaatgagaggattagctcataatttttatatattttattatttatttccacatatacatgtacaacttttatatttttctccctcttaataattttttttaacaactagatcttaataattaactttttcaataaagtataatattaggtcgaaaacatttaaccctaaaaaaagtatggttacttgcatgagattataataaaaatagaaatttaaataaggacaagtaaacttcaaccaattaaataattaataatattttaatattgatactaactaattactaaataataataattaactaattaaacatatgtttcaaactaattaatttaagaataattaacatttttatctcttgaatttttacactattaagttgtgccccttatagtatatggttcgttaatatactaatgtagttctttcatcatattctataaaattttatcatgaagtgagtgacacagtagatggtcagtttgataaatgaatgtaaattaaataactttcaccatttttacgtaaaaaaaaataaaattaaaaaataataaa

SEQ ID NO: 354401 - DNA, 771 bp, Cannabis indica
aatctcgtccatcaactatacccatgtaggatcaaagcgattttcgtcatatcaatcatgactaaacccatcaatggtcacatatacaaatatagtcaaataacatagatcaatcatggatctgtagtatggaaattacatgcaatgtaaaccgaacatgcccttttccaactagtcctccataaaataaagtgaggtcagacttaaacataacaaaacagagtgaatgaactgaaaactttatttctgatcagaaaataatcaaatacataaatgtcttaaacaaacataatgcaaagaaaatacaaactcccactaaatcatgatatcttcaagcaatactatacccatatgagcagtgtggccatgaaagaccttgggtggtaatccttttgtgagcggatccgctatcatggagtttgtcccaatgtgctctatatggatatctgtccactctgcactctttttttcacaactaggaactttatgtcaatatgttttgacttggatgagctcctattgttattggaatacatcattgttgatttattatcacaaaatatcttgagtggtctttctacattctccaaaatacgcagcctagctagtgttaaagtttgtcagccatattccctgatttgatgcctcataacatgctacaaattctgctgccatagtggaagaagctataagtgtttgtttgacacttttctaggatatagctcctttagctaacagaaaaatatagcctgatgtagaccttctgctatc

SEQ ID NO: 354402 - DNA, 686 bp, Cannabis indica
tttttaagtttaaagattttttttatatataataaaaaaactacataaaaataatagaaaaataacattcatataatatcaaaacaacaacaaaaaataataaatttacaacataaaaagaccgtattttctgtaaataaaatcataaaaattataaaattatttaaaattccataaaactgtctctttgttgtttttatgtatttatgaaataatccctatattatttcacattgttaaagcgttattataggtattaacgcaaattttcgttaacgattaataagcctattctataataaattaaacacagatataagaaaattgataagaataagaataataatgacaccaatttttacgtggttttgcagttaactctgcatagtgcacgagtctatcttattaagatatttctagatactgaattatgattttttttcaatcagtgaactctctctcaaagatttttcgtaccctttttttgtataatctgcccctatttgtaggaatataggttgacagttatttacatttgaatttgaaatacataaccgttttcacaaatagtgggctttgaccacgtcccattttaacacgtgtatagttaaaaattcgtataaccgtttgttattcctatctttaaggtagtggacactgacgtgggataggagcatctcgctaga

SEQ ID NO: 354403 - DNA, 873 bp, Cannabis indica
gatttctgtagaagacaaacctgatttggtttgttacttttgaatccatctggttcctccatgtatatttgttcttcaagtttcccatgtaagaatgctgtcttcacatccatttggtccatttctaggttaaacttggctactttagtcatcattatccttattgatgtttgtctgaccacaggagagaagatgtcattgaaatcaacaccctctctttgattgaaaccctttgcaactaacctagccttaaatctgatttcttcacctggtagtccttccttttccctaaaaatccacttgcagcctatcaatttctgccctggtggtcttgttacagttttccaagtcttgttcttgtgtagagaactcatttcttcattaattgcagcaagccatttccttttatttcttgagttgatagcttcctggtatgaactagggactgtagtatcaatttcttctgctgatgcaagagcaaaagctgtgcaatcagcaaagccaaatctctctggtggtttgatttgtcttctttctctgtctctaacaagtaggtattcttgtgaatcatctggtaagttctcttcctcagttgcatgctcatcaatttctgaatgtgaatgttcttgagtatccacctgatctgtagtgtctgcattttccctgctgctttgaatttctaaacctgctatttctctgtcagtttgcttgtgatttgcagcaccagttttcatagccatttcatgttctttgaaaactacatctctgctaataatgcattttctgtgaccatcttctaaacaccacagtttgtatccttttaccccttcagggtaaccaaggaacaaacacttgagagcccttggctctagt

SEQ ID NO: 354404 - DNA, 553 bp, Cannabis indica
aagatttgaaaaaatttaataattttttttatcaatttttttatgcattttaaattttattctattccattcctattccaattcccatttctattcatgattctatattttcattcatcccaaccaaacgccaccatgttcagtccaaaaatattcctgtcggattaagcgtgagtcggcctttaacagtatgttcccaagtaagggactattttttatagaagcctaaatttgagtatttttgttttgagaaaattatattgtatatttattttattttagttgttttaatttttacctttactttatattttttagggtgtctagacatttggtaccttgtgttttatctaaatacaagttaggtatactgtattttcaacaatgcttaaatggtaccttgtattttaaaatcatacatatttggtacccctaaatttaattttttttaataaaattttatttacaatcaaactgtctaaaattttatgaattctgaattcaaatttaattatttgataacatatatttgagatctgtttggttaaattga

SEQ ID NO: 354405 - DNA, 1006 bp, Cannabis indica
aaaagaaataaagcttacgaaaccgtgagttgagctcgacactggccttgattgtacatatcttgacggtcttcagtggacaacctggtggctctgataccaaactgtaaaacccgtatttaaatatttttaaactcaaaagataatttaatatttttcataacttcatacttataagggtcgggatcccgagtatcaaaatacaatttcaatgtattttactaatacgtacttataatattttttttaaaaaaaattgcggacatgcatcttcaaaatatagactcaaaatagtataagactgaaaccctccaggttgcactaccgcgatatgtataatcactgccgagctctatctcactgctcctccaactttgctattcctttacctacacaaggtagcaaactgatgagtcaacagactcagtaagatatgcaacatatatatataaataatgcgatgccggctttatgattaagccaccctgagctcaatcattaagctcaccaaatggataagaacgttcttaagggaagtacgactactgtaccaaatgcactaaagtaccaattctgtactcgtgttggtagagccctacctgtactcttgggatttactaagtgttgtaccacgaacacgacgtacccctagtactcgtgttggtaacaccgtaaccacactaatatacaacactatactaacaccctaataatcacattcatatagtgctagtagtgcaaacaactaaaacaagcatatattcatgtatatattcttacgctatcttacctcgttccgtgctcaagtgtgccggtcagcctaagtggaaacgcagctcgacgctttacagggccctaaaccataatgttcaaaattcgatgagagacacgataaaacacttatcggggatttaaaatagaaactaagcttaaccctatcgataaataggatgccaataccctaaattacataaaaacgggaaaaactagggctcgggaaaaagcc

SEQ ID NO: 354406 - DNA, 540 bp, Cannabis indica
ggatttgaccatgcattactcatggtatattcattgggaatgcccaactttatggatacttacagatacacttgtacaatagttctggggatcaccccaccaaaaacactataaataccccctcaaagctcattaaatggggtcgagaatcttggttttgcacaagagcaagaagagtaaatactcaccaagaacattctctgtatgtacaagagtgaaacactcaccgaattcattctctgtattaaatacatccataaataagatagactcatggactaaggctcattaacgccccaaccacgtaaaaatccttctctaactttcttacagctttatattctcataatattatattggttgccgaaaacctcagtcaacaaattgcataaatattttgctaacagttatttcgtgtgattgaaacctttgtctgatgcaaccttcgtccaaccacccagcaaccttcgtttaattgaatccttcgtttgatgcaacattcgaccaaccacccagcaactatcgtctgattgtgtaagt

SEQ ID NO: 354407 - DNA, 712 bp, Cannabis indica
gaagccactatcacgggtataaagtaagagaaaaggaaccacctttgcatcattttttttccattttagaaagtctgaaaaaacctttaaacttcttcgtcaaggatcaccattaaacttgtccgaggacttgcatgccatctttgtccttgacctttattctgcgagtttcttctgacttcatcctctcgaagcgatccttactttgttcaaggatttgcagatagaattaccggtcattgccccaagccataacttcaaacaataagttgctttcttctttttcatgtttgttacattgtggatttgctgcttactttgtttgtatcgtttccatttcatctggttttgatagttttttttagggtttaaactgcttctaggttcatactaggattcaggcaatatgtaggttgttttaagatctccgactcattaccttctggtttgataaaattctctccagggattggcactgctttttgcttacagcaatgtcccactctggttcaggaatttatcgtccagatgttttagagtttgagttccctacagaatcagccatctcgtataaaccaaacccttcaaaacccacctccaaattagagttgaacgatgctagggttagggaacacgtagtgagaacccaacatgaagatattgctagtcactacaggcattgttgggttttatgccctaaataaaactcttt

SEQ ID NO: 354408 - DNA, 780 bp, Cannabis indica
caaacaggtcacctttgacaaaacaatatttcttcctccaacccctcttgttgctagcaaccaactctgttacccaagcttttttgtttgctctaagaatgaatcgatatcgacctttatctgtatcgtgttgtttaagataataacttgacttgaaatctacaaagtcaaccctcttccccttcactctaactatgacttctatacccaacaataacctccaagcatttggcatgagttggctaggagctaccccataatagtccaacacttcttgtacaaatagagggaaagggaatcaaaagccaatcctaaaaggaaattcatacatacaaacccaatcgccactatcccaatcgggacgctcaacgatagttggaagtcgcatttgtatagaagaatgaatctcatattgatgtcacatgcgtaggatatcacccttagtcatactcgacctcgggttgtccctcaaaaagtgaagggaccgcccgacatactcattcttgtcaccctcataatcatgtaccattatcgcatactcaagagctcgaggctcttcatcaatcttacatacactctcatcaaaaacttccccctcatcatcactgtcaaccaaagtgacttgaggtaatggttgagcatcagggccggccagagggtggggcagccggggccgaggccccaagccccacaattttggaggccccaaaaaagttaaaatgatataatatacatataaaaaaacgtatagtaaataaatatttaactcaacaaattaca

SEQ ID NO: 354409 - DNA, 930 bp, Cannabis indica
atgagcctattttcgtaataggtttagcatagaaattatcaaatatttaaggaagaatgacagaaacaaaagtaacaccgggtttttacgtagttttgcagttaactctacatagtccatgagtcaatcttattctgatttttctgatacagaactagggttcttcacactcagtgtacttttttttctctcaagaattctccatcccttttttcagacattccgcccctaattataataatataggttgacagttaattacattcaaatttgaatcgcacaatgatattttcctgaaatcgtgggctataattatgctccacgtaaataaatgcaattattatttgacaatcacacagatgtgatttgaatcgcttttaaagggtcaacactgacgtggattaagacacgctgtaaaatgtgtctcgctaaggtgtctcgcctaatatattataacttgatttgttcataagtcttccagcaatggcatgagcaccagtgtattgagcaaatttaagaactgctcttggattataaggccttgtagattggacaatcatgtcctgggggttctcaatagcaacaataaccctggcagcaagctggagcttaccaagagtaagccttcctatagcgagatggatgtctcgctatctgttatctatgtccttcaagctattacacttagttagtataatgtatattatacgctaagtgttctaatagccgattagccttgtcaacacctctctacatattgcgaggcagatgccttgctatgtattatcaatgtcatccttgtgattatgtcctctgacgcgaaatggtttctcgtcaatacatgagagtgcaattccaagttctaagtgtggattcaataaggaattaataagatagggaatttacttggtaaattcggttcgacttatt

SEQ ID NO: 354410 - DNA, 502 bp, Cannabis indica
aaggctgtgaagaatccagaatcaagagaaggacattcgagctcagatcttggtgatactctgttacagacaggatacaagggttacagatctaagtggaaggagccattaatattccgctgcacccactgtaaggttttctgaaattttatatgtgtttatttatattgttttagaaattcatatttaggatgttgaatatcatacatggtagtaaatctagatcctggtaaaacatattccaacaacagcaccaatgcttggacggcctacagaaagagtgtcaacaacaccaggccggacgatattatgccagttggacggaagataacgtctccaacccttcctaagctctcaaatgaatcgtctgtagccttaacctactgttatcccaattttcgtactctgacatggcatcacatgatggtgacacgtggaatcgacttcgagtatctgtgtaaagcccgcttagttaatttggaaattagcagttgtttatgtt

SEQ ID NO: 354411 - DNA, 576 bp, Cannabis indica
ggtctaggttcgggtttaggtccgagtttcggtctaggttttagtccgggtatgggtcccagatccaaacatcgactatgggttaggtttaagccccgggtctaaatcaggatcccgatctcaagtccaagtcagttccacttcgggtcctaggtcttggtcctagtccgggtttaggatctgggtccggggtcaggtcctgggtctcggtgctagtttctgaagcctgggtcccggatccaggtccccattttggtccggttcctaggtcccagtccgagtctaggacccggttggggttcaagtcctagtccgagttcgggttcaagtttccgatcccgatctgggtctagatctaggttcgagtcctaggtttgagtcttgattcatgtccgggtccgagtctcgggttccgattcgggtctcttttctgaggctcgggtcaaggtaccccactccaggtccgggtccatgtttgggttcaggtcctagtcccagttctgatttcgatttcgtgtcaaggttcgggtttgggtctgggtctccgtctaggtcggggtttgagtccttgttcga

SEQ ID NO: 354412 - DNA, 674 bp, Cannabis indica
tgacggcctcattatagtacttgccattgaaaagttcctggaacttttcccaagtcatcgtagtaacatcatgtatcatggacaccatgtcccaccacactaacgcatcttcttgaaactgaatagtggcacagaccactctatcattcccgatgacgcccatgaaattcaatatctttgtaatcactgttagccactgcttggctttcataacatccggacctcccaaaaaaaccggaggtgcctgtttacggaacctttcaaacagaggttccatttgattcactgcgaccattggctcggcctggacagcaggggcaggtgccactggaatttctggaacaggcactgtaggagcaccctgctgtctcaaccgctggattttattatcttgtttgtcgattctggcttgcatttctgcaagcctgttttcccaattctgggcaacctgagcaatatgggcagcctgtggcgggttagcatcaccccgaccacgtgccctgcccctgggacctctacctcggccccaagcatttgggggaaattgagatccctgaccttcatttgatccgaccgagctgccctgactactggtatttggcctggcgtccatctagtctgaacaacctacgtaaccaagagctagcatgattagatcatgatcaacgagaact

SEQ ID NO: 354413 - DNA, 798 bp, Cannabis indica
ttagcatgggttttttgtgccgcgacccgcctgttagagtttttgggtttgttagctagctcccgcggcatggcttctgcatgccgcaacctgctaggggtttcttggtagattgtgtgttaactcattttgtttataactctttaatccgaactttgattgggacgttccatatcgttggaaagctcgttctgaggtctaaatgcctaactataattggaatgcaattatattaagatgtgaaagtgaattttgggattaaccctatctgtaaaatcttaagaattttgactaggattaccggcacttgtttaggagcagccggggattcggaatctacacatacttggggcactaggtaagacaacagttagtatgtagagttaagcgttgtggcgctcatgtatgatattatgcttgtgatttaatgaggaactgagattagggttattattctaaagtgagcagttatatactctagggttattaccctaatgattaaatagttttaaatataatgccatgctttatatgttgaaataaagaattatgcgttgaatgcataattaggttagacttggtaatcagaaccgagataaaccattctaaggccttattgtaaatagatgtgtgagcttaacacgtgggtctatgctacatagacataaatatgcgtgtgagcgtaacacacaagtctatgtcaaatagacaataagtgaaatggcatcaataatgatttgactttcgtttattgatatttatattgtcttgctatgcttggctcacgtctgctctact

SEQ ID NO: 354414 - DNA, 980 bp, Cannabis indica
tagtgtgtaagactgtgaagaatccaaacaaaaagaaggagtttcaggctcagatattggtgatactctactaaaaaaaggatacaagggttagagatctgagcggaaggagtcatttaattccgctacaaccaatgtaaggtttctcataccacttatgtgtttattttatatcgttttagaagttcatgtttcggacgtttaaaacatacttgttagtaaatctaggtcctagtaatatattccaacaactggcctgagagccatggtgattgatttactttcaagaaatttggacttaaaacgatgtatgtatggtttggatgtgattcatgtttatctatgtgtttttgatgattgtttgatgtttggaaattttttacgaaacataattggaattttattctgtaattatttttgttggataatatagaaaaaattaagcaattcacttttttacagaacttaattttgatttcatttgagttagttaagaatttttgaaaattggaaaatgtctaggggtggtgacaccccatgcgcgcgcggattaggtgacacacgggtgtgtcacccgtgttcagacaaagggatgttcgaacatgcatgcccagggtgtctaaaatcaccctctacgcgcacggacaggctgcatgcagcccccttggtcgagttttctcggctgtgtatctccacctgcgacgcgcggatggtatgcactgcataccatccccaccaaagtgatatttgaaccttgaaaataggtaaaaatctattttttttttacttagttggttatcttatttttaaaatttaattattttatcttatttttcaatttaaggtcagatattttatattttaaatatttatttaatttttaataaaatgaccttatttgaaatttaaaataagattattttaatcaagaaattttaaatcgtgacaagatattttgctaacttttaaattttgttatt

SEQ ID NO: 354415 - DNA, 865 bp, Cannabis indica
aaaattctaaagccatacaaaatggcacaaaattccaaatgagctcaccttggaatattaagaggtcacttacctcaccaaatttcaaagaggtcattaacctcacaaaaatctcaaaaatggtaattttacctaaaaattaaaaagtgcactaaaattcaaagccataacaaattaaatggcattccaaagaaaaagaggtcattcacctcataaaaagattaaaatttggaactacgtttgacttgattcctataaaaggatacgtaggcaacttagttgctaagactaagtgcagtcgccgataccgcaaaatggtataaaacacaactctcaaaattccataaaaggtcatacacctaggaatttttccaaattttcaaaatagcaaaggattcctgaaagtggtcatctaccggaatccttatatccaaattctaaaataccgcattctgaactacaagtggcttgatccttcacaaagaaggtatgtaggcagctcggttaattaaatggactgagttcagctgcaattccaaatttaccccaaatttcccaaatttattttaattatttaatgtcattgtaattggaatcaaagggtatttcctttaaataaaaggattgtaattaagagattattcttataatcttggatgggtcgaacttaaattaataaactcttatgctataaattcagcataggtgaaattgtgttttgcatttattttaatatgttaaatgtgaaaatttttgcttaacacaaacatcatgtaattttatttggaaaatttaatttaatatacttaaaaaaaactcaaatttcaaaagaaaaaaaaaatcttctttaactattttataaaat

SEQ ID NO: 354416 - DNA, 501 bp, Cannabis indica
ttggaaaatacagggtccatttttttatttaacaaaagagaaggtccaattggtaaattttgtacaacacagggtctaaaatggtattaacccaaaaaattaaggaattcacttttttacagaacttaattttgattttatttgaattagttatgaatttttgaaaattggaaaatatcaggggtggcatcaccccacctgcgcgcgcggacacgagtgatcactccggtgtcacgcgcattcagacagggcatgtccgaaaaaacacgcctaggttatctgaacaacccccctacgcacgcagaaatgctgcgtgcagcatttgtgtgctgcaaaactcgactgtgcacccatcttgcccgcgcggatggtatgcactgcataccatctgagccaaatgcaatttttttccatttattcatgctttttcatggaattaatttcgaattttttgtgtagtttttatttatatttttatttttcatatttcgaatctaatta

SEQ ID NO: 354417 - DNA, 516 bp, Cannabis indica
tggcgtaattatgtttggcaatacaaagttgttgcctctcctcatctgtcggaatcagagtgagaataataaccgggggtacggtgtattcctcagcctcgggaggaatccctgagtctgagctaacgccggggtgtccttcctcctaggcctctaggaagactcagtcttgaccattttacccttgcgcttgcggtcaagggaagccacaatctcaccctcctcctcctcctcctcctccccttcctcgtcgattaagacgattgtgcctaagggggcattggaagacgacctccccggggtcatcatttgggttggagccggaggaagagtaaagtccgggctgtaggtctcggcgagagtcgcaagaaggtcttccattggtctggctgctggaaaaaagaaataaataaaatgttagaataactataagaaggcatgcacctaacaacaaaacattaaagctagtcctaccttgactctctaactcaggcctagcaaagtcttaaactacaa

SEQ ID NO: 354418 - DNA, 1218 bp, Cannabis indica
gctacccaagctggagactcactggtttatggtgagcctaatagaaatcgaagagaaaggacatggaatcttcttcgcaccatagccggttcttcaactcttccttggtgcgtgattggggatgtcaacaatattctcaaccaagaggacaagaaaggtggacaaccttaccctggatggcttctagaaggttttcaaaaagctctcaccgattgtcatttactcgatctagatctcacggggtaccctttcacctgggaaaagagcagaggcactaccctttgggttgaaattcgtctggacagagcaatggtcaccgaagcatggactctcctatttcaaggtgctaaactttttaaccttgaaacttctacttctgatcactctcctttatttcttgagcctatttttgttgagcaaactcccacgaactaccgctttcgttttgaaaatgcttggttgaaagaacccatgtgttttcaaatcgtggaggattgttggcaacgggttggtgtggggggaattttgaataagttgaatgtgtgtgctgatgcgttatctcaatggggtaaagagataacagggaatttcaaacggagaataagagagtgtaatgccgaaatgaagcttttgaagaagaaaagagatgacatctctgtggctcgatatagtgaggttcgaaaacagctgtttgctataattgatcaacgggaaattttctggaagcaacgagctaaacaattctggttaaaggagggtgaccaaaatagcaaatatttccacaaggctgcaagtaataggcgacggagtaatcttatttcgaagcttaaaaatgaccaggggtgtttgtggattgggagaatgggttatctgatgttgtggtacagtattttatgtccttattctcagcttctaatactgattatagggaagtaatagactgtattaatcatgttgttcctgagatggccaatctagagtttacaagacctgtcttggaggaagaagtgaagacggcggtgtttcaaatgcatcctgacaagagtccaggaccagatggtatgacctcgactttctatcaacgatgttggcatatcgtgaaaatagatgttgtgggagttgttcagagattctttgctacgggggcctttgatgaagcttgtagtgacgcaaatgtagttctaattgttgggttttatgccctaaataaaactcttt

SEQ ID NO: 354419 - DNA, 519 bp, Cannabis indica
tgtaagtatacttcatcgctgattatcacatcagtgtaaatccaaaaacactgatgaaacagagacttagtcttttgaatcatataatcacaatcacattccactgtgttgacattactgtaattatgaatgaatatatgttctggacttaactgattttgtgcatatattaaaccataagcatgaaaaatacatgttaacataaatcacttcaaatctcttaaattgataactaataagattagattgtaatggattttatttagggcacaaaacccaacatgagcatgggttagaaatgggccgaccaacccaacccgaaatgggccgaagcatggtcagatttaatgggccgaacatcacatgggttgaaaaaagcccaacccgcgccaaatgggttgatatttgggctgatagtttttcaacccaatcaacccaaactgggccgaccagcccaagcccaactaaaatatatatatatatacatatgtgcaaagctaaacctaatacaacataacc

SEQ ID NO: 354420 - DNA, 537 bp, Cannabis indica
tgattgttatcaacaccaaaaatcactccagtatccctcctcgaagtagtgggtggtggagacatgtggaaggaagagtcggttgtagtaaagttcccatgagaaggattcccccggtcaatgggaataacaggagcatcaggtccatcgattgtgcttgcggcaattgagttatgcttatgagggtacaatcccactaacttgagcatctccacagttacaatctttggggcaagtttttcaacttctgacatggatgtcaaggctgtcgcatgttgtatcatctccttagttgggaccggtctggaatatgtacccgtatggttgaaagcccggtgggtagtgtccatggaagttgtaaaaagtaggaaaactgatgcttgtagctgcggtttgtgctacaaataccagaaacatacggctgaccccgttctcggttcataatgtagaagtattatgtgttgggttttatgccctaaataaaactatttacaatctgattagttatcaataaaagaaattagaagtgattgatgt

SEQ ID NO: 354421 - DNA, 443 bp, Cannabis indica
atcaataaataaatgaataaagatgtttattttaaaattcaaattgagtcttttttttaagcatgatgttaatttaccatcaagtgcgtataaaaggtttagtcaaacccaaaaccctgaacagacaaaagagcatacttgcaaaaaaattataagtgacatacttgtacaaagcatttggtaaaaataaaacaaatacagttgcttgatgatcaaaaacagaggatgaaattcaataaagataacaaaagcatgtaaaaccaggattaaaggctgcccggtcagctcgtggtttgaaaaatgaaaaataattcaaagtttaaagactgcttggccggtcactttctcttaaaaaaggccttatggccggacacatataagaaaaaggatagaaagaagaagtatccaaacggctggagtcccaagtgttgggttttatgccc

SEQ ID NO: 354422 - DNA, 604 bp, Cannabis indica
gaccaaggcggcgctgaccgcgttcttggagaaggtaaaatacagtaacaagtcctctccgtgaaccggttttgatagaatcagaggtttagccacgtgttcctttagccttttgaatgcctcctcgcattcttctgtccattcgaatttctgacatttcttcagaatgttgaagaagggaatgcacttgtcagtggaacgggaaataaatcggtttagggcagcaaccttcccggtcaaggtttgcacatctttgtgcttcttgggagaaggcatgtttagtaaagcctgaattttttccggatttgcctctattcctctttggctgacgataaatcccagaaactttcctgatttgaccctaaaagtgcacttcttcgggttgagtttcattccatacctccggaccacttcgaagcattctacgaggtggtctgcatgacttttacatgcctttgatttgaccagtatgtcgtccacatagacttccatgttccgtcccagaaggcctttgaacatccggttaaccattctttgatatgttgcactagtattttttagcccgaagggcatgaccaggtaacagtatacccccttatcggtc

SEQ ID NO: 354423 - DNA, 854 bp, Cannabis indica
gatagccaaaactcacactttttgaacttcgcataaagtttatgatctctgagtcgttgcagaaccattcggagatgttgttcgtgttttgcttctgaccgagagtacacaaggatatcatcgataaatacaattacaaaattatcgaggaaatccttgaataccctattcatgagatccataaaggctgccggagcatttgttaacccgaatgacatgaccaggaactcataatgaccatacctggttcaaaggctatcttcggaatatcctcttctcggattctcaactgatgatatcctgacctcaagtcaattttagagaatatcgtcttgccctgaacttgatcaaacagatcgtcaattctaggcaaaggatatttatttttaatggttaacttattcaactcccgataatcgatacacatccgaagagtcccatccttcttctttacaaacagaacaggaactccccaaggcgacacactaggccgtgtgaaccctagatccaacatcccttggagttgtatctttagttcttttaattcggcaggtgccattcggtagtgtgcttttgaaacaggttctgctccagggattaaatcaataataaaatctatctctcgccgaggtggtaacccagataattcctcaggaaacacgtcaagaaattccttaaccactttaacctgttcaggtccaggtaacatagatttactaaaatccattacaactgccaggaatccaacacatccactgcgtaacaattccctagctttcaacactgagactcttggaacacgagaaccttgaaccgaaccaaaaaaacaaatggtcctcattctccggttcaaa

SEQ ID NO: 354424 - DNA, 582 bp, Cannabis indica
ctgaaggaattttacagcaccctaggctgtcagagctttctcaaccattttagcataggatgttgcttcattagtagtgatcaccagatcatgcctgatcttcacattcaaaccggagaagtacttctctttcttactaaagtcatttggcacgatacccacggagagcttggccagacagtcaaactttgtagtatactcagtaaccgacatcccctcggtttgcactaatttagggaactctttccgcttagcactgcagacggcttcattataatatttggagttaaaccattctcggaattcttcccaggtcataactgtgacgtcccaagtgagggttatcaactcccaccacacgagagcgtcctcctggaactgaaaagtggcacagatcacctgatcattaccaaccactcccataaattttagaatacgctcaattacagtgagccactgctctgttttcatcacatcaggccctcccagaaacactggaggtgcttgcttacgaaatctttcatacaacgactccatacaattgccagcaataggttgatctgctggcaccgctggaactac

SEQ ID NO: 354425 - DNA, 730 bp, Cannabis indica
ggtgatccaccgtgaaatggcacctacgaaactcttgctacagtggactaagcagaccgtgatctgactgaaccactataatcctttgtctcattgttatttccagttttctgttaatcatttctcattcccagtttgagtactcgccactctaggttgaatactcgcacttgttcttcatatagatttctttctgttattaataatatcatataaaattggtgttgcgaaattcactcgacaacatttggcgccgtctgtgggaaacgagaattaaaatattattcatttcaagtaagaataccatcatggctggaaaccaaacaaacggaggtgctaacaacgggtccatcaacatcggaatgatgaacgtaccgttatctggagctagaacaccgcctgtggacgtcgttaatggcggagtagggaggagcaacatcagacctctcaatctgttccctgaaacagctggtcctcaagtcggggaaacgtccacaccaccagcaaccatgcactttccacctgtcactccggcggtggtatctgagggaatcatccagctcaccactgatcaatatactgcgatccaggaccagctgcgtgcactacaggccaaagtggatggacaaaaccgggcccgatgccccctcaagcccctactacttgcacagacaaccctcatgtaacgaattctagacgtcgtaataaccgtgttcgcagggaacgaaga

SEQ ID NO: 354426 - DNA, 619 bp, Cannabis indica
cacaattttttaccatggaagcaccaggttttagcatcgatcaaaggcaacagacttcaaaaatttcttgatcctaatcgagctccaccacagtttctaacagcagctgatcaaagagtcaacaatgttaatccggagtatgaggactgggagcaacaagacaatcttcttgtttcttggctcctctcatccatgtctgagaaaaccaccaatcgaatgatcgaatgcgaaaccactgcacagatctgggagcaactgacagagtattacacagctttgaatgcaacaaatgtaagtctttacaagactcagttgaggaacacaaaaatgacagggtcactgtaatgtaagtctttacaagactcagttgaggaacacaaaaatgacagcgtcactgtgtgattacctgctcaagatcaaaggattagtggatcgccttgctacgattggccatcgaaaaactactcaagatcacatagaagctatattcaacggtttaccagctgagtatgatgtttttgttacatctgttacaaccaggaaagatctttatagtgtggcaaaaattgaagccttgttaatggctcaatcgatttgaattgagaagaatgccaagaat

SEQ ID NO: 354427 - DNA, 650 bp, Cannabis indica
ttttttctttgtgtcattagcaaaaaaaaatttgaatttcttaaaaaaaaaaacaaaaggaaaccgagcaaaaagaaaaggaaaccgagtaaaaaaaaaagaatctggaaacctatcttcatttttttttttgtattttcttagtctccatagtctagaggcttgtttgccaaaactcacacaagtgttccaaaaatcatcatttattctttcagttttcttcggtgttcatttggtttgtttgattgaaattgctgcttgaatcctctcttgtactgtttgattagttttttaaagaacttaaagaagaatatgagtagaaaaaggctaggaactaggtagataattatttgggaaatataaagatgaaaattccctcttttcaagggaagagtggtcctgaagcatacttggagtgggagaagaagatggaattggtgtttgattgtcacatctatttggaaacgaaaaaggtaaaacttgctgccattaaatttactgactatgctattttttggtgggatcagttgtgcatcaacaggaggaggaatggagaacgagatattgactcttggcaggctatgaagagggtaatgagacgacgtttcgtaccatctcactattatcgagacttgtacctcaagttgcaa

SEQ ID NO: 354428 - DNA, 570 bp, Cannabis indica
cccgtagtcggtgtctggatttaagacccagacaaggacttgaacccaattccaaacccaaatgtggacctgaacccttaacctgttacccaaaattggaaacaaaaccggaagttaatcgggactggaactaggatttggacttggaagcataactgaaatttgacgtagatctagaaccgtaacaagacctggacctggactaatccgacctagacctgaattgggagccgaactcggatcccaacccaaacctggactcgagacccgacccgaacctgaattcagacccaaacatggaaccagactagggacatagaacctgggtcggaacctagaaccgcacccagtctcaatcccgaacacaaactcagaaatgggacttgatacatgaaccagaacaataccgaaacccatgacagtgatccagatcctaactcgggattcaggtaacggtgccttgaacagaccagtagtcggtgtctagatctaggactcagactaggacaagaaccaagacaaagaaccaaacccgaacccagaccaagacctgggacccaaaattagaac

SEQ ID NO: 354429 - DNA, 611 bp, Cannabis indica
ataaaaaatcattcacctaccattgtttgatagtagcaattgtagtagctcacacaattttttttagtggtcaagcaatcaagattgtgtttcttaaactgacaaaaacttcatgagcaacgaatattgaagttgctctaagaggcgagtctccgtggggcctatcccagtgaaggaaatgtggatccctaatcacgtacatcttttgttgcaaattaatatggaatcacaatcattctaattgtaattaattgtattatgttttgacatttctctttccaattctaaagaaaaaaatgatacaatggtgaacatccacgtgtagagtaaataaatattgcctttcttggtttcccgcttaatatatatatagagagaaattatattgccccttccacttctttcctcatcagtcatcttcttccttgctttgtctcttggcattctcagctctccctaacaggtttctttctctctctactcctttactaatacagtagaacctctatccaagaatatacttgggaccaagtaaattatattctaattgagaggttataactaaatagaattacactagaaaaaaaaattaaaaaactaaaaaaaatcaa

SEQ ID NO: 354430 - DNA, 489 bp, Cannabis indica
agtttgctaccttgtgtaggtaacggaaaaactaaagtggaggaacagtgagatggtgctcggcagtgattgtacatatcgcgacagtgcaacctggagggtttcggtctatcaacattttgagataatttagttgcctgttgtaaaaaaaaataataatatatgtatatactagtaaactttatattagtaaaatactttaaaatgtattttgatactcgggatcccgacccatatgtttataaagttataatattataatattaatttttgagtttagtaaattataaatacgggagttacatattgcattcagtatttacttttaattgtcaaaattataaattatattatttagatatacataataataatttcatctaataactaacactacaaaaactgctactttagttgaaaacttttttagtctacaacataaaattttttgttgacttaaatataattttaagttcacaataaaaagtt

SEQ ID NO: 354431 - DNA, 742 bp, Cannabis indica
aacaattggaacatgcccaagtgcatgttctctcaactaagttcacatcaccgcctttttcaaagtcagaaccgtcagcacctcttccaacattaaacaattgtgcaccgttacgtaggacacttctacgtctaccatcctcgtgttgctttatcaaatcttcctcaaaatgagttgccaaaggggtaacacacttacttgccttctcgagacggttagcaaaccaattttgtagtgtgaaccttatgaactcaactagagtagttattggatatgcccggaattcttcagtcacgttgttaaggctttctgcagcgttgtttgtcatgatgttgtacctgtctcctagacaataaggacgagcccatttttctaatcctatattgtcaacataagcagcgatgggaggatccatctgtcggagcacctgcaaatgtctatcacattccctcttcgaccatgcgtaagcggccaaccatatttgcgtgttacatacatcagtcttgaacttgtgggtgacattcatagaaatatgtttgtagcatgcacagtggcatgcttcggggaaaataacctcgacagcatgttcaatgctttgatgcctatccgatacaaacactaagttttcaacctccccaatcgcttcctttaacttctgcaagaaatacttccaagagtcatgattctcgctgtcaacaattgcaaaggcaatcggaaacagttggttatttgcatcgtacgc

SEQ ID NO: 354432 - DNA, 792 bp, Cannabis indica
gatataactccttctaatgtttcttcctcttctactcatgtagaggataatcccactcccttgattgaaccaacgcaagttgttacaactaagaaatctaccacaaatgttcttgttcagaaggtcatggctcctcatcgtagtgggagggtttccacaaaaccagctcgttatggcttggatggtgaaatcaatatggtcattggtgacggtattgatgatgatctattaacctataaataggcaatggaaagtcccaaacggaaacaatggtcaactagcatggattcaaaaatagattccatgaagaaagaacaaagtttgggaatatgtagacgcacctgctgattatcatcaaattggatgtaagtgggtctacaagaagaaaagaggtgctggtggcgaagtccaaacttttgaagctagactggtcgctaagggttatacccaaagagaagtgtggactatgaggatacttttagtccggacgccatgctcaaatccatcagaattcttctccccatatctccttatttgaattatgaaatttggcatatggatgtcaagacagctttccttaatgaaattcttgaagaaaccatctatatggagcaaccagaaggctatgttcttccaaagcatgaaaagaaagtttgcaaactcaataggtccatttatggacttaagcaagcttctttctcttggaataaaaggtttgatgaaataatcaagacctacactttcaccaaaacgatgatgaaccttgtgtttaccaactcaaggataatcaag

SEQ ID NO: 354433 - DNA, 546 bp, Cannabis indica
tgttgtatcagatggaaagaaaagtccttgccttggagtacgttttagatattgtagtacgcaatgagcggcttgtaaatggggtactcttggacatgttaggaattgacttagatgattgacgacataggaaatatcgggcctcgttatggtgaggtaaatgagtttgccgattatactcctataggaagtgggatcgggaagaattttccctttatctttgctgagtttcaggttagtttccattggagtagacgcaggtttagctccaaggtaacctgtatcagctagtaattggagagtaaaaggtctttgggaaacggatatcccttgtttggttcttcctatttctaaaccgagaaagaagcgaagagatccaatgtctttaagtgtgaactttttgtccaaaaaagatttgaagtgagtgatggcttgcttgttattgctagccacaattatgtcatcaacgtatatgaggacagcaagtataaatgtagatgtgtttttgataaacaatgagttgtcagaaagagattgatgaaagcc

SEQ ID NO: 354434 - DNA, 830 bp, Cannabis indica
attcaataaataacagtataataaattagttagaataagttttctctctgtctggctccttgcagctccctgagctggtgcaatggcaagaacaaggtccaaggcgcaggggaatctgaactcgacggggaagaagaagaaaaagaaaggaccagattcatctggtggtgcgaagaaattgaagtcgatggatgagattttaggggttgaaccgattgttttttctgaaagcgaggaggaaggggcgtctctgaatggccacgattttgagaggtctgacctatttccagcccctctttcaccaaagtcttctctacgagaaattcagcagcaggaagagattcgaacggagttcgcattctttatgcaagcaaatcaacaatgctcagccgacatcaagaaaggtaatatgcctcaacctcctgtaattaggtctgattctgtgaggaaaaatctagctagctcttttgttagcaaagaacaggggaaaaaggtgaaaatacaaatggaggacattgaagatgagatatcctactggtcctcttccattgtttgctatgttttaggggcaaacccacccttaggtgtgttagatggttttgctagacgtatgtgggcagggaaggttgacaaggtgggaatgctggcacatggaatttttttgatcagatttgaatctattgagtgtagagacaaagtgctagcaggaggttacattttcttcaataggaggcctgtcattatgaaggcctgggacccgaacgtgaattttaaaacgaagatgttcctagtcccgatttggatcaagtagaggaattggagctgaaata

SEQ ID NO: 354435 - DNA, 825 bp, Cannabis indica
taccacatcactatgattagagtactgagtataggttggattcgcggttagtcatactttgtcaagatcgatcctgattcagttagggttatggttaggtgtatgggcgcctgattataacccgggacattagtatgtttattatgttatgcttttcttactgagtctgtcgactcacagtgctattgctatgtgtaggtaagggcaaagctaaagttgagaagtcgtgagagcgagcagatgaagattgtacatgttggggcggttaggcctggagcgtacgattctcgggacatcagagcttttgttgttttgtcgctaggcgacaagtattttataaatgtgtagtaaacttttgtaactgcattttgtaaatgagatcctgaaagtttataaaagatatgttatgttttaattaaataagcaaaattttaaattattcacgttttcctataacctcgttgattagcaatgagctgcacagtacgttaaaaatcacgctaacacgcctatgctagttagggtgttacagtcacggtaccttgtagtagtggaagggtttcaaggaattcaccctgttatgacttggaagacacttgtgatgaaaatccattgttagtttaaacaagtaatggattttcagaataagaaactaagaagcaaagccaagagaactatggttaaaaccattcatatggaacaaccaaagttttctattacaaggacaagaaaggaaatttcgttagtaagtctattcaatggacttaacaaaacttcctgttcctagtattaaaggttttagtttatctaaacctatggcttgtg

SEQ ID NO: 354436 - DNA, 1161 bp, Cannabis indica
attttttctgtttgaaatcaatattgtgaggctcaaatttggttaacaaaaatctgcgttaataatttggtgctttcatcgagagcctctgtgaaaaagctctgagaaaaccctcccttcttttgaagaaaaacaacctccttcatggctgaaaatccagaaaatgttaacaccccacatgaggaagccaaccatcattctggaaaagagcccatgggctccagaagatctaccaatctgtagtccagaaggaccacccattccaggaggcctcaacctaagggtggccctagtgcgcggaccacatgttcgtggagaactcaacccggcgttggtcctagtacgcggacaacacgcttgaggagaactcagcgtaggaatggtcagaaccccgggacgagggatgaagagctcaatcgtgcgggtgcccaatcagtgagagaaagaacttatgaaacggaaagtcgtcacctgagacactgtctggaagaggcgcaacgtaggaacgctgagttagaacgtgaggcagcctcggccaaggtgccacaagggatgaataccaaaaattaacctgaacctggagtgagaagaccacgaggcacacctcatgggtcacgaaccaggagacaagaaaaggcccatgaagaacaacccagggaaaatgggacaccccctgaaaattaggacgaacagccagatgggaggcaaccggaaattgatgaacaagaaatcccacatgaaaatgaggaggatcttgggactcaaccgggagaacagagatcacttgctagaaatcaccaacgtccttcccaaatccatagagcgaggactcgtacatatcctgatgggggaaatacgacaaactgctctcgggaggaaagaacagagcatgaagaagcaagtgtaacttcgaggcgatccagaacccatagtcgatcagctcgaagaggagaaagtactcaacgagctaatgatcgagaaagtatggggaccagtagatctgcgagctactcaaagacaaagtcaatgagtaagatgcgatctatgagtaagacaaggtctgccagcaattacccccagtcagatctacgagagcacttgaatcggaaaaaacctgaccttcgccaaaagcttggttcaaagcaagaggatccaatccaa

SEQ ID NO: 354437 - DNA, 910 bp, Cannabis indica
atttaagacatcctgcaaaattttaagaaatttggaaaagtttaacacgccgaaaattacgttcaagcagtgtgttgcacgcgtgactattttagtttatacgtgtgtaaaatagactgtttgaacattattttctatattgtaaattattccaaatttttcaaaattttgtaggatatgttaaataattataacgtacatgaatatggaaaaaaaaaattagactaaatttgtttttctagatgccgaaacaagtaggggtgcagtaatacatcccttttaagggggtgcattgtagaatcaccctaaagtaattatgtaagatacgcggcaaactctttttcaaaataaataaataaatacacggtaaacttggaaatattgaaaataatttataattaaaagtaaatttcaatattttattttacacttgtataaaataaaaaaaattacaaaaaaattaatttttgtaaaaatttacgtttaaatttttttatatatatttttacgatattttataaaagtacaaaaaataaaaataaaaaatataaaaaaatcacaaaacataacatcaaaacaatataaaaaaataatatataaataacaaaaatataacataaaaatacattagaacatacactatattttatgtaaataaaatttaaaaaacgataaacttgttgtgaactccttacagaccattttttttttattattattgtttttgtatttttttaaaattatccaaaaaaaaatacatatgcaactgactatttgaactaggacagagtcactttatgcatatggatgtattggcattcctaaatattggtagaaacttatttttattgggaaatttgattttttatgcttacatttgattaaaaaaatttccctaaacacataataa

SEQ ID NO: 354438 - DNA, 632 bp, Cannabis indica
accatgcaacattaaattttatttctgatctatattaataagtaaatctgattatattgaaatgagtattatttagggcataaaacccaacaagttattcttagcagattgagaaaaaaaaattaagtaaataagaaaaattattaaaactttcaaataatacctgttgtttctggtctttcgagtatgcgataacatccgcccacacctccggtgtcaccatatctggacgtgatctcctgtttgcttcttcctccccatatttttcaatattctccttccatgccttcttcgtgtctgatctccagtcacgtaacccttttgacatagatttggtgacgtaatccacgaacgtaggattattagttgggaactcaaacttggtctgaaaaaaaatactaaagtcatatatattgtattaccgatactctatcccatatagtctgaatgagtgtagattcaacgtcctcccactcaaacttgttcataggaatagtattgcgaacaagaaactttatgtaattgttaaacttgttgccatggtcatctacaggggccccagtcgccatatgaaatctaaatttcaatttttgacctgctagcagcttggccagttcttcctcaatattttt

SEQ ID NO: 354439 - DNA, 783 bp, Cannabis indica
gacaaaagtccttaaatttaacaatctcaatatttcaggagaatttttaacggctaaaaaagttcaaggggcacaatttagtatatgtcatagttcgggaaaaaagtaataattagtctaaaaaaataatagagaaagtattttattatagctgtattatattttcaccgtatcaattaagtatgttaagtgtcaacttaaaaatatgtagagatatatctatttaataagtgatctaagtatcaattttttagcacttaatgaataaaaaaaatactagtgcaataaaatggtaagataaaatacatttgttattaatttttttaattaaaattatacgtgtaacaattataatattacacaaatattcttaagacaaaataaaacaaaaaataataaaataaagagaaattattctatatatttatttttttaattttttttttcaaatttacagtttgggtttctaaggtagtttctccagtggtttctatgtgggctgctatacgatttttagttacaatttagggtgctttgctaattgcaattgaagtttttatgtaaaattctgtaaaaatacaaaacaaactgttttaaaagtgtaaaaataaaaaaaattcctaaaataaaactactcttattatttattgattattttattatttaattttaaaagaaacattattgaatagtaatgtgagtataacttagtgtgtgtgatactcacgttcagtattattatatgattcgtttggtatgctgtattacaccgtattgtattgt

SEQ ID NO: 354440 - DNA, 553 bp, Cannabis indica
aactgataactgtgcaacgacttcttaatttgaatttgaactaaattaatctcctttaatcttaattttaattttcaaataaatttttattttaatcaaattaattcttctttaatttctcctttaattttaattctcttttaattttaattgtacattacaaacttaataaaattataaaaggtttaacacacgtgcaaagcacgtgttacccaactagtataaataaatatacatataagaagtataaaattttatatctcatttttttaatacttttgtactctcttataaattttattttattattttttttgaaaaaaataaaatgcaaacacttatcctatttttttctctccttttcatttttttattattgagactctaactatttcaaaatcacattttataaaaaaaaatttaatcaatttcttttaacttttactaaaatatgattcttttactttcatcatttttctaatatttttctaacactatttctctctcttacaaaaaaatagggaaaaaacaaaaaatacaaaaaaggaaaaaa

SEQ ID NO: 354441 - DNA, 569 bp, Cannabis indica
aataggtgcttgagtatctacatactgatctttggagtgcaagtaggatcaaaacacccagtggaaatcaatatttcttatctgttatagatgactatagttgaaaggtatgggttttcttattgaaacagaaaaatgattgtctaaacaagtttagaaatcggaaaacatttgttaaaaaacaaactgataaaaaggtcaaatctttaagaactgataatggacttgagtttattaatgatgagtttgatgagctatgtgtagaaataggcattagaaggcataaaactattgtcaaaaaccctcaacataatggggttgctgaaaggatgaatagaacacttctaaacaaggtaagatgttttctacttgactctggtttgcctaagaaatattggggagaagctttgtacacttcatgttacttaataaatagaagtcctagtagagctattgatctcaaaacccctaaagaattgtgattatccattgttacaatcctaatagtcaaagattctctatagatgatctacactgaatagggacaaatttaccgttctacccttcaa

SEQ ID NO: 354442 - DNA, 542 bp, Cannabis indica
agatcaaagtttaggttttcaaacccaaacttgcataaatccaattccattcaaccaaaccagctacttgaggctaaaattaacttaaattaagctcaaaattcgaaccctaaacatttctaaccctagcagcccctatattgcaaaatcattactcaagcaaaacttaaaattcaagaactagaagatagagatgctaaagcttaccttgggttgatttcccttgaaactctttactgaaaacaacaggaatcagcaaccaatttcttggttacggctggttcgaaagggagaagaaggaagagagagcttttcccaatttttcctaattcttgatttttcctcaaaatgaaaaaggattttcccaactaatcctttgctgaaaattaaaaggcctaggtgtcaaaaagctaggcagccacctatcccaaaccttggacaattaccaaaatgcccatagcttaaagctaaggtgtttctcaaaactaggggtaaaatggtcaaattccttaaccccggtcaatcccgatattttattttct

SEQ ID NO: 354443 - DNA, 620 bp, Cannabis indica
gaaacttctactacactatcatgccgtttggcctgaaaaaagctggtgccacatataaaagggcaatgacagcaatattccatgacatgatacatgaaagcataaaggtgtatgttgatgatattgttgtcaagtccaaaaccaaatttgatcacatttgcaacctcgagaaagcattccaaagaagtagaaggtataagcttaaaatgaatcctcttaaatgtacctttggtgtaagcactaggaaaatttggggatttcttgtacacaaaaatggtataagcatagacaaagataagactaaggctatactagccatgaaggtaccgcaatcagccaaagaattgaaaagctttctcggaaaagtttcatatctatgacgctttataccagctttggcagaactcacaggcccgcttcaatcattgatgagaaaaggtatgtcttttaattgggaagaaaaaaagcaaaaatcgtttgacaagattaaaaatgtatcgtcttcctctcaagttatgatatcaccagtaccaggagtgccactactgttatatttggttattactgaaacatccattgggatattgttagcgcaagaggttgaaggaaaagaaaaaccc

SEQ ID NO: 354444 - DNA, 1697 bp, Cannabis indica
atctactacccaattcgacaattttgtacctttataaccgaatatcttgaggctcttcaaatttgcatgtggttggagtgcagtaagtacttctctttccctaatagaatcatttgcttcaccatcccattccaaaataagctctgtgagataatttttcttcttcaagttgacttccaaaacatcgcttgcttctctaacatgctcaagccctgaaatacacaagcgtccatggagattatccaacttatccaactctttgatcctgtacccgtcatttttgcacaaaacaaaatcacttaacttctggagatttttcatgttgcaaatcctcggcggcatctctttcagtgacgaccattttatgttaagatggcgaaggttgattagcttagatatgttggtaggcaacagagtgagatttttgcaagattccaacaacagtgtttccaaattatacaagagacacacagaatcaggcaactctttgagttttgtgtaagatacatctaagtacctgagatgctttaaatttccaatcgaatcaggcaactctgtgataaaacaacgcctcaaaaaaagtgtttccaaattgtgcaacacacaaacagaagcaggtaaatctttgactttagtgtgcgatgcatccaagtacctcaaatgctttaaatttctaatcaaatcaatttgctctccaacaaaagaaagaactcttagtcctccattccttaacataacttcttgcacaaatttttcaagaaatgaaggtggcattgcctgtaatggtaatcgaatcaggctgcgcaaattcttcattttagtaaagtcgaaaaattcttttgtattcaagaatttcatgtaagatagatggtgagtcttgctacttagcttgtgcaagtcttttttacagctatcatataataaaaaactctgacccgatacatacacagcaagatcatgaatatgatcgtgcatagaaaaagaaccatttcttgtgtttctttgaaaaaatgatctcgatattaaagcattcaagtagtcttctccaacatcttcaattcttcttccttcttgaggctgtaaaagaccttccgccatccatattaaaattagtttttctctatcaacatcaccaaattcgtaatctttgggaaatattgatagataagaaaaacaaggcttcaaataaggaggtagaaatcgatagctcaaccacaaagctggaacaattccgatgtcgcgacaatcgtgtcttttccacacatcactttgtagtacatgtctccaatcttgacaagtttgcatagatcgtaaaagaccagccattgattttacagctaaaggaaggcccttgcacttcttgacaatttttcttccaatatcttgcaactgctccaacaataccttctcgttacggtcaacattatcaaaggcatgctcttcaaataactgccaacatccatcatcagacatggttttaagctcataagttcgaacatttcccgtcttcatcttcaatgcgatatcttcattacgtgtggtcacaataaccttgcttccttttgcaccagattgaaaagagcttttcaaaagatcccacaactcgtatttttcattccatacatcgaaaaacaaaagaaatttcttcccagccaaagcatcctcaagtcttcagaagttgatgtagctcatcagtt

SEQ ID NO: 354445 - DNA, 624 bp, Cannabis indica
atatatatatgtgtgtgtaatacaacttaactaagtgatctcttcatagatgtaaaacattcatattaaagaagtacttactgatatatatgatggtgtgtatctgtcatgttaaccagatgaggaagctaatgaaggagattctcatggctatgcaaatgaatccaaccaaccaaatactcctcaaaccagaaaacttggactttggattcgaatcgggttttattcattccttgttctctctggccagactgcagcaaccttattagggagattatattatgagaaaggtggaaagagtaaatggatgggatcatttgttcaactagctggctttccaatccttcttccttactatctcttccgaaaaatgaagtgtaaaaccaaaaacaatcacaacatgaatactaattacactcttcctcttcaatcaaaaaagccatctatgttagttgttgcctcagtttacttgattcttggcctaattgcagcagcgatttgttatctatactcggttggtctgatgtaccttccagtgtcaacttactcaatcatattagcatcccaattagccttcaatgctttcttctcattctttctcaactcacataagttcactcctta

SEQ ID NO: 354446 - DNA, 609 bp, Cannabis indica
aaattgatagttgaggggttttgccacaaattactctatatattttgaaaaataaaattaaaaacttaataaaatagtacaattacttaaaaaatatgaataatataaattatacttaaaccgtggtttcgaaccaaatcaaaccgttctttatggtttggtttgagaaatttattggtctagtttggtttttaatattcaaaaaatcgttatactggtttggttcaacaactataaaaatcgggaccaaaccaatccgtgaacacccctatcgttacccatgttagtgctctgcattcgaaaaatgaggtgaaagttagaattttatcaattttacctaaaaaatgaaataaaaagacttggaatagtttgagcaattgtaaatttacaacacaattaattttacagattctacaagttgtatcgattataaatgccgtaatggtgttgttaagttgtaaatttgagtttatgcattacaatgattttgatttttcaaaataataataataataataataataataataataataataataaaataaaatattcagcattgcactaaacttcatgaactatatgttggaatttattttaccaggatct

SEQ ID NO: 354447 - DNA, 586 bp, Cannabis indica
tcaagatcttcatctttcttcttgttttcttttgccaagaccgtcctcagctgatgatcggcctttctatgttgcaactctacgcgatagtaattgcgagccaacatctggtcaccatgcaccactcccacaccatctggtgtttggaactttaaagataggtgcttgatcaaacttactgcccctagtccgatcagtgctagatgacccaacaatatgttgtaactcaagggaaggtcgataaccaagaagtcttgcatgacagtagcagttaaaggtgcctcgcctacagttaatgcgagctcaattatgccaaggctagctatgctatccctggtgaatccgcatatattcactatacaaggccttaacttggccttattgagccccattttctttaaagtctccttataaatgatattcatcgagctcccattatctattaacactctcttgatcctcttactggcgagttgaatggttatgaccagagggtcgacgtgagggtatctcacgttcttcttatctttctctgtgaatgtaatagggggttccttggttttcaccttcttggaaggttctgggg

SEQ ID NO: 354448 - DNA, 721 bp, Cannabis indica
aacttttctgcctgctttgagaagcaagcattcgagctttactcttgtctattgcctcatttgttttctggaccaactcagggcctaggtattttcgttctccagtttcatcccaatggattgcggatcggcactttctaacatagagtagctcataaggagccattcctatgatactttgataactgttattataggagaattcaatcagaggcaaatacttgctccatgaccctccaaagtccatgacagaagctcgtaacaaatcttcaagtatctgaatagtttgctcagattgcccatctgtttgaggatgaaaggccgtgctaaatttcagattagttcccatagccttctacaaactcagccaaaactttgatgtaaatttagggtctctatctgaaacgatagactttggtaccccatgaagacgaacaatttccttcacatacagatcaacatagtgatccactgcataaattaccttaacaggtaagaaatgtgccgattttgtaaagcggtccaccacgacccgaactgagtcgtacattcccatggttcagggcaaaccaaccacaaaatccatcgcaatgtcttcccacttccattctggaagtgttagtggctgtaataatcctgcaggtcgctgatgttctgctttaatttgttgacaagttaagcatttagtgacataatctaccacatccctcttcatcccata

SEQ ID NO: 354449 - DNA, 782 bp, Cannabis indica
aaaagttgtttaaaattctgtgaaaccgtatttttgtaatttttttgttgcttttgtgtatttgtgaaataatcccttatgtatagttgtataaatagatgtcatgaggttgtttttcttgttatgtttggttgttttataatttattttggttattttatagtttatttgtagctgatttatagtcatcgtgaggtttatttctcgttgttttcttattttttgctgatcaaagtgtatttttgtaattttaaaattttataagtgtatttttataaataaaaattttaggccgaaaaattataaataaaatatgtgtaacatactaataagtgagtgtatgacaagttatcatgattttgtaacataagaaaggttacaaatttgaaatgaattggtaacctctgattcacatttgataaagatacaattagggtggggtcaagactaaattgttgggggtattacacaatacaaaaattatttataagggtgtgtgtttgcttgtaagtgtttaattactagttactatgtaacaccttaactagcataggcgtattaacgtgattttaaacatactatgtagctcgttgctaatcaacgagattaatgaaaatcatgattaattaaaattttgctatttaattaaaacttataatattacatacaaaatattttgggatcccgtttacaaaatactttacaaaagtttgctagtcatttacaaaatatttgtcgcccaacgactaacaacaaaagccctgatgtcccgaggatcgtac

SEQ ID NO: 354450 - DNA, 621 bp, Cannabis indica
acttccattgtcaattaagactctggccaccactttatttgcgatgggggtctctatgaccaatgggtcatgatgagggaagcgcactgtcttggcgtcttcttccgtgaacgtgatgggttggtccatcagccggggcctttgagctgggagttgagtaacttcccacacctcattatgtttcgcggcccctgcgtatcgcttaagctccttgcgagtagttcctccgatatggggacctccggagatcatggctaccctcccattaggcctgggcggcagaccggggatgtgctgggcgtcgcccgtgggagcagctggagctaatgcccctgctgtaccccccggtgttccctgaggcatacccacagtcgcctggcccggattaaggtggggcaacctatttttgatccactcgtagaggtggcctaaccggattagattttcaatctcgtccttgagattcttacattcattggtgctatgaccgatgtcgttgtggtactcgcatcttttgctcggatctctccgggagctatccttgtacaacggttgtggcctccggtagtgtgtattttgcctagtagcaaagtacacacgctcttgggagtccgacaactc

SEQ ID NO: 354451 - DNA, 560 bp, Cannabis indica
taataaggaagtatcctccacccagagcatagacaagggaaaaaacattcccaagtagggaacttcccaaggcggtgatgaagatgtggatccttgacttggggacccaagcagtaatgttggacctgtggaagagttagaagagatcaaaatcgatacagatgtcccggccagaaacctaaagatcggaaagggtttgttgctcgaagtaaaatcagaattgataaaatttctgagagtaaacctagacatttttgcctggtcacatgcggatatggtcagaattgatccttccatcatttcacacattctgtatattgatcccaatttttggccactacagcaaaagcgaaggctactggacaaagagcgagcactagtcctaaaggaagaagtagaaaagctacccaataacaatttcataattgaagctttctacccagcttgggtcgcaaatcttgtattggtgcccaagccgaaaaagaaatggcgagtctgtattgatttcacagacctcaacaaaccatacccaaagactgttttccacttccaaggatcga

SEQ ID NO: 354452 - DNA, 1157 bp, Cannabis indica
ctcagtgacatccacaaacttagtccactgcctatttaagatttgatctctaatagatgcaaatgcaggaggaatgtttgcagtttgactcaggtttacaatgtctatccctctgtcttcaatgaatgccctatctttcaatttcaaaaaccgctcttgagcatccatgttggtaaaccttactctatcaagattagagcgacccctaggtgggttggatgatgaagctcccccttcctcactcactcttgacctttttggacccatatcacccaaatttttctaactctcaagatttttcaaaatttcgacagcacttccccttaaaaattcacttcccgggaattaattccctctcaatcaaacccaattctattcacacaaacaattttcaacaatgtatatagcaaaaatcccaaatatccaacaaattatccaaaactatccaacaattcacaaattcttcaataaaaattggattggaagtcttagaatcaatacctcaatgagaatcctcctttaatcatcctccattgttgaaagcttgaagttcttgagaaagaagaagatgaataagggttttgaaatttttgggtgaggttttagggatttggggttgattttgagtgggaatgagtgtttgatgagagaaataagggtttatgatgatttaggatgaaagtttatggttagatttgatagaatggggttttgaatgggatttgaagaagaaaaatggtgtagaaggtggttttcggcgtggagaggttaaggatttgaatgtggtttgatttttgaaatgttagggatttgcccctttttaaacaattctgaccattctcgccgcggtatagcctcgccgcggccaaaacccgtgaaaaaatcaaccattctgtaaggcttaaatggccgcggcggtatgttccctcgccgcggccaaaattcgtaaaaatcctggtggttctgtaaggcttaaatggccgcggccagatgtcccctcgccgcggccactgggcaattttttttttttaaacaaaactggtacagaaccaaaaaaaagaaaataacagtaaaatactaaaaaagaaagttcaactaaatcataaaaaaaacttggttgactccaattagcgctactttatcgtcgcatagctaga

SEQ ID NO: 354453 - DNA, 806 bp, Cannabis indica
tttaattgtggtgtaaatttagccaataatatattttgtactaaatttggcctaacttttcgaatatgccaaatttgatacattttttacaccatgaagcttcattttttctaaaagcatttctaatatatacagtgttataaatatagtgtatatgtctttttagctttaatgtggccaaatgggctttcacaaacaaccgctatggtaggttgggtgtttcttctatcccgaataatatcttatgtaatgatcgtgaagtctaatttctatccatgcacgtttttattttccaaaaaaaatgtatttttagcctattttcacaaaattgaactttaatggtagtgtataatgtgatttaaattttccacgtactaaaagttgtgccaattttagtataaaatatagggaattttacaaaaatactgctttttgaccaaaagtttacatttatactgggacacggcaaaaacaacttttgtactgcccaagcccaatttcattacttttgtactgcccaagcccaagatcatttcatttctactgtgaacagtaaaacacacgggaaacagccttgttcgtgtgtgaggagacgccggagacggaaatcaccaagaaaaaaccattaaatccggcgaagagttttttgaaaaggaatcagaattgaagaacaacacgaacagaaaccgtcccaacaaaataacagaggtaaacacaacaaacccaaaaaataatttaattcttaagaaaccaaaaaaattaaaaataaaaaaaaaggatttagatctgaagttttaaacaaaaaa

SEQ ID NO: 354454 - DNA, 1020 bp, Cannabis indica
tctactttgtagtccgtgaactcgtggagcagctcccggactattgttacatacgcagccattcgctcgccacgtgtttggtattctcctgatatctgatttacaaccagctgggagtcactgtagacttctactcttttgtcccctacggccttcgctaatctcagccttgctatcagggcttcatattcggcctcgttgtttgaagctgagaagtcgaaccgtagggctgcctggagtcgaagtccggtcggggatatcattgccacccccgctccggatccattttcattggaggctccgtccacaaacacttcatgtggggattgatggtgttggcgtattcgcggttgcctcggcttcattgcattcggtaatgaagtctgccaaggcttggccttttatggagattcggggaacgtagtgtaagtcgaactgacttaactccattgcccacttgaggagcctaccggatgcttctggtttttgtaggacttgccggagtgggtgattggtcagtaccttgatcgggtgtgcttggaaatatggccttagttttctggaggccattaggaggcagaaaaccagtttttcgatgatggggtaccgcgtctccgctcctatcatgcgcttgctaacatagtacacgggatgttgagttttctcttcttcccggactagggcagcgctgaccgcgtgctcggagacggccaaatataggaataggtcctctccgagaacgggttttgataggatggggggcttggccatatgttctttcaattttttgaatgcctcctcgcactcgtccgaccattcaaacttttgacacttcttcaatatgttgaagaaggggatgcacttgtctgtagaccgggagatgaaacggctcagggcagcaacctttccggttaggctctgcacgtctttatgcttcttgggagatggcatgctcaggagagcttggattttttctgggtttgcctcaatccccctctggctgacgatgaagcccaggaa

SEQ ID NO: 354455 - DNA, 737 bp, Cannabis indica
acttatgaaatagaaaactgtcgtcctacgtgccatttgaaagaggtagagcggcagaacgctaaattagagcgtgatgcagccgcggcgagggcggcacaggggactaacgctcaaaatcaagttgaacctagagtgagaagaccacgaggcaggcctcgtgggtcgcgaaccaggagacaggaaaatgcctgggaagaacaacccatggaaaatgagatacccctttaaaatcagaatgatcagccataaccctctcacaaaaatgagattaggaggaaaccagaaactaatggacgggaaattcctcatgaaaatgaggaggatcttggaactcaacctggagaacgtaggtcacctgcgagaaatcaccagcattcttcccgaacccatagagcgagggctcatacatactcaatgggggaaatacgacaaaccacactcaagggaaaagaacagagcgtgaagaagcaagtgtgacctcgaggcggtcaaggacccacagtcgatcaactcgaagaggagaaagtactcaatgagctaatgatcgagagagcatgggaaccagtaaatccgtgagtcactcaaagacgaagtccatgagcaggacgaggtctgtgagtaggacgcgatctgtgagtaagacaaggtctgtcagcaatgactccaaactgtatctacgagagcacttgaatcaaaagaaacctgaccttcgccaacaactcggtccaaagtaa

SEQ ID NO: 354456 - DNA, 561 bp, Cannabis indica
tggctcagattctaacatttttttctctgtgcagactagtctgaagatggcctacacttatttttgaactaagtctgttgcctcaaagaatgctgccatgtccaacaccatgagggcggaagtagacttggtcaggaaggacgctgatgaagccagggttcaatttggagccgtccaaatggaattaggtgtggccaagatgaccaaggatttggaggcttccgaccaacttgaggctgccatgacttctttgtccaaagaagtgactgacctctaggaagaaagggaagttcttcgaactgttttccgcaggttggaagcagagaagaagtccaaggaggagctaacgctgaggtagagaggctcaaagggaaggtgaacgccttggagacagccggtctcgagattttttatgacttttggaaggctaaccctcaagtgaattttgattacctgggcgaggccaaaaacatgtatctcgagtactgtgcttcccaagtggcctatggagagtccgaggtaccacttctacctccggtctgaacgttgacatgcctcccg

SEQ ID NO: 354457 - DNA, 762 bp, Cannabis indica
tttttttatatatattttatgtcggtgctaaatagttgtcatagttaaaaaataaataacaactattatctcttttctaaaaaaagtaaaagaagaatatgattataccaatacttgatgtataaattaaaaatataataatattttttttttcactataccaaaatatataaacaaattaaaaaaaaaaaaaacaaattaatatctcatgcaagatacatgtgaaattaaatagaaaaaaatttaaaaaatgtaaaagcaaactttcttaaaaaatattacacttcaacgcatacaaccaaaacaaaatacacttttcaatcattaatccatacacagtaatttcaaccttcttgaaagactttaaaatatttttttgtacactttcaatgtatgcaactcattttattctgatcaactttgaagttcatcatcacgaaatcaagtcatgtagcagttaaaacaacattaaacaaactataaaacaaatttctactatgatttattttcaaatgaatgaactacaaccatagaatatttcaaacaagacaaataaaaaaataaagtataaatcttgacaatatttttctttggaatcttccatttgtcaacaacatcagagatcttatcacgcacctgaaaagatcaagataacaaaattaataaaacaatgaactgataaaaaatacgattaatagttatacaaaactctaagtatatcatgtattgaacaacataaaaataacaatataacaactaaaa

SEQ ID NO: 354458 - DNA, 736 bp, Cannabis indica
ctgggtccaggtcccggttattgtgtgggttcgggtctcggtcggttcgggttcgagtcctactctcggttcaggtttaggtctctgtctgggtttcgatctgggttcgggtttgggtttaggtcctggtcctgttcctaatcctagttcagttctagttccatttgtaattcttagttcgagtttgggtttgagtgcaggtaggaggtcgagtcctagtttgagttcgggttcgcgtccggatttcagtcttgttccagatcaggctccgggtgtagattcgcgtcttgggactttgtctaggttgggtccagccccaatttccaatccccatcttagactagattctgttatgggtctaagtctttggttctgatcttggtcagggttcgagtttttgtccgggtccgggtctagctttgggtcagattctaggtgtgggtttgagttcgggtctgagtctgtgattgtgtccgggtttgtttctaggtttggacccggatttgggtctagtttctggcctaggtcaaagttagggtcccgagtgcgggtccaagtttgggtctaggtcaggatctcggtctagatctaggtcatgaatttcgatgcctgactagctcttggtctgagtccaaattcgtatccggatccctatctaggtccaagtctgtgtttgagattgtgtcccaaaatttaggtctaggtgcgggtctcagttccggtctgggtacacgac

SEQ ID NO: 354459 - DNA, 991 bp, Cannabis indica
aaaaaaataaattaaaagtatggagttgaatattaataatgacataataattaaaaaaattattttatacatttgcagttttaaacatcatttaacaaacttttaaaaaaaaaaaaaaacatcatttaacaaatttaatatttttattctaaaaaaagtataaattaataagataaataattgtatagaattaattaccaatcaaccaagtggacccaattctatcaaagattcatattttgatgatgacgtaattttcgtaaaatattaaaaaatatatataatttttaaataattaaaaaataattttataatcattaaaatttaaatatttattctttattatacctttttaatttaaacatcacttaacatataaattattcatttaaaataatatataaataattgtatgaaacctattatcgagtgccaagtgtaaatttttcttctcagcacattgatactgttgactggatttttagccaaccaacgcggagtcataataaatgagatttaaactaaaattacagtaataaatacagttaataatattgaaatttaataaatttaaataaagacacggaaatttaaagaagttcggtcctagatgtcggtaatagcctactctcctgtcgatccccctcccagatcatggatgaccccgcttctcgctttaggagacgcgaccaacgcggctgtctccttgatttttggagatagttgaagtttaatttttatgataatatctcgctatttttatgggttgacaactgtctttaagcctttcgtgggatttgaacatttgaaagagttactgacgacgagggtctcttatgggtgtgacatggtcgtcaaccacctttggggatgaagcccataattgagggcaacacccccgagacccaacttgagggaggtgatagtcgtcatcgttgggtgaccccctgagacccaacttgaggggggtgacagtcgtcatcgttgggtg

SEQ ID NO: 354460 - DNA, 1093 bp, Cannabis indica
acctacgtatatatatatatatatatatatatatatatatatatatactagaacacacttcacttgtacactcaagttatcactcagctcatcatgcaccaccaaagaaccaactcccttatttatactactcaaaggatagtatattattatgctagaatgttctagcaaaatgacataattatagcttaaaacttttttgaaagtttgtatgactattaactctctataattttatataattctataatattactaaaataataaaaaattctacatacttataaataaagtgttgatcctttttgtcaattgctttttttcttttttgtcctttttaatttgcttttagatgacttgactttaataataataataataataataataataataataataataataatatatatatatataaatatatgtgcagggtagcatgtatgggattattttattatgggctgagagatacaacagctacttatgcaacaaatttcctcaacttagttccgattgtcacctttgtcttatcaatcctactcaggtaagatcattacataaatatctgtatatatatatgtataatgtgtaattaattaagacttttgttttgtgtaggttagagaggttgaatctacatacaaaaggaggtaaaatgaaatgtattggggcattaatgtgtgtaagtggagcacttacaagtggtctttacaaaggaaaatcgtaccaaattgataagtcatcatcatcataatcatacttcaaatcattcccatatcacttacaattggccacttggcactctcatgttggttggtggttgcttctcctattctgcatggttcctcgtacaagtatgcacttttattatgcacttttattattaagaggattgctattaggcatggtgcctaccaccttctcgacatgtcacgttgtgattggctagcgatacttcctaaaaagtgttatattaaattatgtgggacccgatacttagttagaccaatagcgatatggtgccctttagtatttctctattattaaatatggtgtcgtttagtaaaacttttgttttttaattttt

SEQ ID NO: 354461 - DNA, 1316 bp, Cannabis indica
attaaataaaactaacactacgtggcttggcacgtaacaatcacctagtatatatataaattgtaatatctataaatgcttttaaacaaaaataatacactcactatttaagttttatactataatagaaggtgcaagttgcatatactatgacggttcatattgaaatgtcacaaccatacagattatgaaaaaaaaaatgcatggttagagattcatgaatcataacacaaccataacaataacaataacaacaacaacaattagctacaatatgaatatgatggtgtctaaacccaaagcataatttcaagagatctcacaacaatgcaagttacattagctaacttggagtcagggccggcccacccaacacaagcgtcttaaacaaatcttttttaaaatacacatatatttttagtgattttttaaaaaatactatttattattttaaagggaactcacaaaaatatcctattattttaaaaccagtaaaacacaaaacagaacttccgagtgaataaacaaaaatttgtgtagtttagaaactctaagagagtgatactgcaagacaactattattatagttaagaaaagtagtcagcaataaacaacataattcgtgtagtttaatattgagggaatttttatttttatggtttttaaattacgaatttgtaaaaatatgtctttttttttaaaaaaaaatatattttatgagaaaatttaaaaaaagaaaaaaaagttaaaaaaaaaacaataaaccctctaatggttactcttacttgatttttcaatattttttaattttttatttaattttcttgtaaaataacctttttgaataaaaatcttaattatgcaaaggcataaaaattcataaaaattgtaatatctccttaatacgagtaggttgatagctaagaatgtcaatcgggccaggccaggcctatcctgccgcaaacccggcctggcccgatatcactttggcccagtccgataaaaaccggaatcagtcgggctaaagttgtagccttagcatatggtgaggttgatccttctaagctatatttgggggtaagttgaaaaatgcctcttttattcatcaattaatcaaatttacctctaattttatatttatttgaaacaatacctcttttttatatgtattgtacccaaaatactcttatgtaagagaatcacatggagagtatcttaaagtgacaggggcaaaattggtacaatgtttaaaaaaagaggtaaaaatgatagattttaaaaaagaagataaaaataaaagagaacaatataaaaaa

SEQ ID NO: 354462 - DNA, 980 bp, Cannabis indica
catttattgatcgaaaatgtgttcgttaccgtagtaacttacatcagagctatttgatctaatctgatcttttagcttaacatgaaataaaacaaactgttggaattagaaatcgtactttaaatggtggtcattgtttgtcgaaaccttgagcgtagtccgccaagcaggccattcacttaaaagtaaatgttctttcaatacttagtatggtcgtccgatctggtactttattggtagtattttcttaaatgttccccattctaataccgtgttactagaacaagtcgcaaattttcatcatacttacctaatttgtatgctccggattcgaggacttcgaccacctgatatggtccttcccagctgggtccaagtacacctgccatactgtctttggtgtttagaaatacctttcttaggaccatatctcccacaaagaacttccgagccttcacttgtttattgaaatatcgagctactttttgttgatgggctatcaactttaagtttgttgtggttcgcttctcttcgataacatcaagtgattaggccaggagtacgagattggtatcttggttgtatgtcaatctcctgtgagatggtggttcgagttctatgggcaacatagctttatatccatatgccatggcaaatggagtctgtccgattgccgttttctcagttgttcgatatgaccatagaacttcaagaagttattccgaccaattttctttggcatcttcgagtcttttctttagtgtatccttcaaggtcttgttgactgcttcaacttgaccattcgcttgaggatgtgccgctgcggagaaacttttgatgatgccatggttcacgcaaaaatcagtgaaggattggctgtcaaactgcttaccattatccgaaactattttgtacgacaatccgaaccggcagattatttttttcacaataaagtcttgaactttctttgatgtaatagt

SEQ ID NO: 354463 - DNA, 924 bp, Cannabis indica
attgagtgagcattggagagaacagacaatttgcacagtttttctctcggttgagagtgttggaattccaacttgacgatcaatgtcttatccacagtttaaccttttacctgttttttgaggttataacagtgtatcaactttgttcttgtcttttcatagtttaacctttaccttgcttttaaggttttaacagtgcatcaactttgttccttttttccttagttcagtttggcttttagcttctcttcttgctttggtcaactgtttattcctttcctgtgagtttctttctgctttctctcaagttccgtttgtcttttcctggtgtgtcaatgggggacaataatgagggttcacgtgctcttgcaaatgaaaatcctgtcccttcacaagaggtccctgaagtcattatgagcattgattcgccccaacaactatctcatgttaacagtggaggagttaaggaagctgatgctgggggaattaatgatgctgaggtgggaggtataaatgtagctggtgtagaggaagggggggttgaagtgcctaacggtattactgataagtccaatgaggaactcgagagactacgtaataacttcctacagtctatgaccatcgatctggagccatcttttgaattaacagctgaagtagttagtactggtgtactagccagtttttttgatggtaagggagtttcaagaaccaggcttaaagatatccttagccagatttggaagctcaagggttattggaggtttaagactctgaagcctggggtttggggcatttttttcgacaaaacagaagatcgtgaggatgttctccgaagaagaccatggattatcaatgggaagatgctcataattaaagagtggccagaggatggtgactggtttaatgctgatatgaggaaag

SEQ ID NO: 354464 - DNA, 501 bp, Cannabis indica
ttaatcacataatcttgattactttccactgtgctgatgacacaataaacaagaatataaatgtgataaggatttggatggatttataaatcaaataaactaataaatgataacatgaaccaaatgacacaataagtgatgaaaaatacttttgtttctttatggatatttgaataataaagattacattgaaatggtattttattcagggcattaaacccaacacacagtacatttaaaatcacgttaacatgcctaattagttagggtgttacaaattggtatcagagctggtaggttgttttccaaagatcatcatgacatgtacaatcatcatcagcagtcagctcgtttcacagttcagtaagcttttattgctttagtagtttattttaatagtatgatttaagaaaagcctattaggaagcatgttagtagcctgttagtagaataggcgcatgtttttaatttccaattaagcggcattagtaagttttcctt

SEQ ID NO: 354465 - DNA, 655 bp, Cannabis indica
attgtagggtggaagcttaaaaaaattcgattgaaaagtgtcatcgatttgggtggaaacggtggtgagcgtctttgtttagcttccatcgaaaatccccataacgagaaaccaacatcgtcgatcgtctttgtttagcttccatcgaaaatgcccataacgggaaaacaacatcgtcgatcctccattgctgacttagcttcgacctctggcgaaaaatcggccaggtgcattctagtatctatatatactagttggaacaacacgtgctacgcacgtgtaatctttttggaagtaaatatataatttttattaatttgctaaatcagttaaaagataagattcttccttaatagaaacatcgctcttgttgaacactcgaattagaaaagaacaagatgctcaagcaaaactatgagcaactatcattaataaaaaacaaggaactattgtgtaaagatggaagaagtttacgataatcttctataataacctcaaaagaagaaaacataggtaatgaatttcgaatagcttgtactgctactaagcaatctgactccaactccactttctgccaaggttgagttttaattcagtatagcatgcgtcatgtacaaattaaatgtttgcataaaatataacacaatttttatat

SEQ ID NO: 354466 - DNA, 835 bp, Cannabis indica
atgatttctattcattttagtaatgtacattgctttatttttgtttttgtaattttttttgggattttttcattttattacattatgttgttgtgtatgtgcatgatggccaaatttttgtcagaataagtataaagtaaaaatttatatagtatatatgtatgtattttgtgttttattaaatatatgtgtatatatatattatgtattgtttagacaatatatattgtgtattgtgtgtgtatatatattttatatattgtgtgtatatatattttgtactgagagttttaattagtttaaaaaatgatattttttaaaaatttttattagtgtgagatataatttattatatatgtatgtatatgtaattttttaaaaaattcatgtatataatttactaaatagtaactagttacttttttcattcatatttatatattttattactaagtatttatttattagtaacaagttactcataaatgatatagctagtaagtagttaaataactaaaattttaatttgattgtatttcattatattgtagattgtgagcaaattttgaaggttttcgaataatttagagttgatcaaattttagcttgttatacatgtatatacattcactaactttttgttattaattatttatcaatattagtagagtttgaatatttacgatatattatactgcggtcggatgagtggaataatgtacatgttagttgagtttgagtatcttaaatattcaaccatagtgaagtaggttctacgaatacatgtactgcggtcggatgggtggataggttttgtattgttaatgttattatt

SEQ ID NO: 354467 - DNA, 533 bp, Cannabis indica
actatatactcgatgttatcgagagtatttaatcttttggatagaccttatgattttcttgtaagacggtttggaaccgtaatgcctagtggggagttggttgtctctaataggcgtattaggtctatgcccgttacgatcgaagatagaaagttaagcgttgatcgtatagaactggaattaattgagtttgacattatactgggaatggatttttctgtccaagtgttcggccagtatagattgtaagcagaaaatggtgacttttcagccgaaggtgaagatccatttgtttaggatggatcagtccaggggtcttggatctcagttatctttgtattaaggattagagatttactatgcggtgactgtgtagaacttctagcagtagtaattaatatcagcagacccgaaacatttgggcctgaggcagtcagggcggtaaaagattttctcgatgtattttctgagaagttgtcggggttgccgcgtcaccacaatgagaaattgattttgtaattgatatggcacct

SEQ ID NO: 354468 - DNA, 702 bp, Cannabis indica
tacgacatactgaacccaaccctccctcacatgaacaaccccacttgtgaaggcccattttccttatttaaataattgtattaggctaattatactagtttaacataattaaaattgcattagctatataattaattttaaaataaatgaaattaattttttattggattatttgaaaattaatttagataaatacacttagtttaatgaaatattctagatagtgatttctagtaagtaatttatattttctaatatttaattaactagaaaaatatatttaagttgaaaattaatttattaattttagaccaacttaaattagaaaaactttcttagaacttaaatagaattaataattaagttgattttattcaagatacttaattatttgtttctatttcatgaaatttaattaattagaaaatatatttaagttgaaaatgaattttttttagttaattttggaccaacataattagaatattttcttagatattaaaatagaattaataattaagttgattatattcaagatacttaattatatctattttaatgaatttaattaaatagaaaattttatttaagttggaaatttttcaatttcagaccaacttaaattagaaaaattttcagaatatattttattctattttaataaatattttcccacctaatttcgaattgcatttatttatt

SEQ ID NO: 354469 - DNA, 561 bp, Cannabis indica
gcatttttacgaaattctacgtaaaaacccctatttcaactaacggagcaacttaaattgcaactaaaatccgtatagcaacttacttagaaactacccgataaactatcttaaaaactcaaactgtaaatttgaaaaaaagaattaaaaagtaatatataaagtaatttctcttcttttttttttaatcttagcacttgaattaatccaagcacaagttgttagaatttggggataagatgaatgaggttccatctcaaaaccaattgacaatgggaggggtagctcattcatcttatatacctcaatttatttccacacattagcaatgtgagactaactctaatacacccggcttggaaagtgtgagtataacgaaagacctttaaaaaaccacagggtcgaacgtgtcatttgaaagaatccgacaaggccatatatcgggaaatttgtgggtgtacacgtcgggaaatttgtggattttgaaacaggtcaaagaccccaacactggaaattggcacacatgggccgaaaggtcccaaatggaggttaaggagagac

SEQ ID NO: 354470 - DNA, 446 bp, Cannabis indica
aaagagagattcttgacttcaaaattaccgaagtgctcttatactgactgcttgttggattcacgttgctcacacacagacacttgatcttcgagtaagtctctggtttcctttatgcttatctttgcatgtttatatgtcaagtgcatcctctactttgctgtagaaaatgtttaggaaaccctaggcccagaaacctttctgattctcctttatcatgactttgtgcgtttttacagtcataacatttgtttctgaactgcgtaacgtctgtcttccatctttcttactctaagcatcatgaacttatttgccctaactcgagaaaatttagacttcttgagttctgacttttcttcaaacataatcgttctttaatctgttgagtactcctggtcgacatattttcttgtttatcgtttgatatgttggattttatgccctaa

SEQ ID NO: 354471 - DNA, 948 bp, Cannabis indica
gctatctggacttccacgaccaatgggtcgttgtgcgggaagctgatgttgatagcatcttcatcatttaatgttatggtgggctcccctgcccgttgttttttggttctttcttcgacggccagaactacttcttttgctcatgctatactgttcgggcatacctttcctgggctttacctaaatgtccatctatgtgcggccctccaataatgacttacagatgtccatctactggtggtggtagtaaatcttggttgttatcgcccctctgattctgatcggctttgacatacttcagtacatgtggattattttttcttatcagaaattcaatttcgtgcttgaggttgttgcattcattggtgtgattgccataatccccatgaaaacagcaaaacttggtcatgtctctcttgcttacatcttttttcatgggtgcgggcttcttgtacggggctaatgattgagtagccatttacacactttctatatcttctgtcaggatagaaaacgcagtaaacttggtaggattctccctgggagtttttttggtgttaccagcaaactttccctttttcccatttccttgcctattgttgttgttggaccgtttaccacccaagcttaaattgcttgggtattgggggagctagatggatgtcccaacagagggagcttttggccggttaggtttttgctcaacctttgcccactgaatagcttcttcaagcttaataaaaccttctgcacggtaaaggaagacactcattgaattaacaggtccgttcttcctgatgtccttccaaagttcaccaagaactcccccccagtattgtgaacaactttccgtcttcggtcacccgtacaaccttagtcgcctccgtcatgaatctactgatgtaggctcggagaggttctccttgtctttacttcacttcgaccaga

SEQ ID NO: 354472 - DNA, 718 bp, Cannabis indica
aaatgctcatatctagaacggtttttaataataattttttgacgaccacactaagagcactaatctcgtgattgtttatgttaatagcaaaattacttttaggtagagccaaatacataatctctaagtaaaaatataattttaaataattagggagtagtcacaacatctttaattatataaaattatatatcaattaaaattcaccttaatggacataacttgtaattaattatgtaggtataataattttacctcacatggattttattatatttatataattaattaggataatatataaattaaattctcttatttatcccacaaggagttataagaaactaaattaatagtgttaccataaactttaattaagatagacttcattcgtcattttcctaaattaaatatttcattaaatttatcataaagtttatacaattttattagatttaaaatttagcctatagaaaaaattttattttcttcatgtttctacattgataaaacatgaattcattaaaacatcaattattttttacatctaatttgtaatcctattcttgtggctatttcatccacttctaaatacgctaaaaccactgatgaaatccctgagcgtaggagtgacaatttcaaaatctggaaggaacaagttcttctccaccttgcttgcattgacatggactatgcaataaggaaagacgaaccagtt

SEQ ID NO: 354473 - DNA, 874 bp, Cannabis indica
taaggcataaaacccaacaggtaaatcatgtatccagagaatacgaggctcgaggagaaaagatgatagcatatctaagaaaaatacatgattttctcacacaattcaaaagctacggtttaagacgaattccaagggaataaaatacaattgctgatgcgtttattcgattggcaagcagtaatgtaagtgacaaggcaaacttggttcctatcaagttccttaaagagcctagcatcactggcatagaagaaatcgagatgattaatacatccccaaactggatgacaccaatagcagcctacctcaactctagagaactcccagataacctaaatgaagctcaaaaaatgagaaggaaagttgcacggtatattatagtagagggaattatgtacagaagaggattctcgatgccattgcccagatgtgtgactcaagaagaagctacacggctcctatctgaagttcacgacggattctgtggaaatcatgccgccaagcaaagcttatccaagaaaattctaaggcaaggttacttctggccaacaatggttgaagattcaaaagcctatgtgaagaagtgtgacaaatgttagagattttcaaaaatagcacgagctccacccaacgagttaacacagatgcaaagtccgtggccctttgccatttgggggattgacctgatcggacaattacccaaaggtaaaggaggagtgcagtatgcagtggtagcggttgattactttactaagtggatcgaagctgaaccacttgcaaccattacatcaaagaaatttcaagactttattgtgaagaacataatctaccgattcggactaccgtacaagatagtttcagacaatggcaagta

SEQ ID NO: 354474 - DNA, 591 bp, Cannabis indica
attttttttccaattttaattaaaaaagtctaacatggatgaaaattcagagggcataatttagtacatgtcaaaattcgagaggcatgatttggtagatatcaaagtctagagagcatgatttagtacataaaccatcactaaaatagtaaaattgaatgaaattaaataaaaatccttaaatctaataatatcaatagttcaagagacatttttaacgaccttaaaaatttaaggaacatgatttgatacatgtcaaaattcaggagcaaaaatcttaattagccgtacaaaatatcacattgaaacagttagtaattatgtggggttattactcttatctattggataaattatctctatttttgtcaacaaataagtagtacttctactcttctagtatgttttcaaatatttaatttaaattttgagagaccaactaatcatccaatctttaagacactactcatcacgaacgaacagacgcatcacatcaatctctttttagatcaaagttcaacattaatgatgtctttatgtagaatatggggttaggttaggcaacatagtagtggagagagagagagagag

SEQ ID NO: 354475 - DNA, 1191 bp, Cannabis indica
ttttgtagtagtgtgtattcaccatttccatgttaaacagtttatggagagaagcataagttgcaggcacatttgttttgcggactcgtaccctatcgttctctgcttccggccaattgctaaaaattcaagagccagagtctgattgattctttctggaatcttcactaattgctcccattggcgggtctgaatttgttgcctcatggtctcgaataatgggctattcggagtgggatttccatcatattcgatacctcgatccacgatgaaagctctcttttgcaattcgaagtatctttcttgcgctttcaaactcacaaatctatctttttcataattagactttgacgccggtgttggcggttttgacgatgacgcacccgattgccccgttctagaacgcttagaacccataacacacttcaaaattaccacacaaaaattttggggaaaaattcggcagcacttccccttaatttcttcacttcccaaaaatcacaataataccacaataatctcacaacaacaatatttcacaaatattcaacaatttctccaaaataaatccacaaattcccaaatactctagataattattcaaactttcggaaaactcacttaactaatcaaagttttgacaagaaagagacttactaagcgagaatgccgttcatccaccaccattgttgcacatccatggagaactcaaggttgaagatgatgaatagtggaaaattcggatttgggtgaaaaagggtgatttgtggtgtgatttttgaagaaaagagaagatttatgagagaaatttgtgtttttggtgatttggatggaagatttgaagagaatgagaagaaatttgaggtttaatggtggaatgaggttttgaggctgagaaaagggggaagaactcgggttgtatggtgtttgatggttttatgagggttatgtgcgatttgggattttaaaggctgaaaaacgtgtcccgtcgcgacgggcaatgtgccccgtcgcgacgggagtgggcagaaagttttcgattttagtcacgccatcccagtcgcgacgggcaatggcccagtcgcgacttctgggattttttttttttcacaattttactgtaaaattacaaatgcaaatctatcctaagtgcaatgaaacgaattaaaatagccacaaaacacttgtaaa

SEQ ID NO: 354476 - DNA, 1153 bp, Cannabis indica
taaacaactgctaatttccaaattaactaagcgggctttacaatttttgtcataatcccttttgaaaaaatacatgtcctctgattttggcaattttggggtttcgaggtgcatcaacattaaatgaccatcttttccacttctattttgaattctgtccgtaggatcaaacatctctctgatccgacaaaactgacttcaagagtataatgtaagaaaaatgagccacctttgcattatttcctccattttagaaattctgagaatctcttaagcttctttgctaagaaacagcatcgagtttgcccgagaatttgcatgccatccctgtccttgacattttttttttgcgagtttcctccgatttcatcttctcgaagaggtccttactatattcgaagatttgtaagccgaacaaccgtctatcgccccaaaccctaacttcaaacagtaagttgcttttcttctttatatcttacatgcttgttacattgtgtttaattgctgcatcatttgtttgtatcgttgccatctcatttggttttagtagtatttggggttgaattgtctttgggtcaacattagggttcaggcaatacgtaggttttttcacaaccttcaactcaccacctttaggtttgataaaattcttgcaagaaatcatcgaaggcaaacgccatttcttgcgagatgcagcttggccagaacctccaagtgtgtcctttattcctatggctaagcctttgtttttacccaaagtcacgattgcatttgaaccaggttacttagactgtgaaataatgtctcccaagccacgtacatcaaagactcctcgggatcccagcgtcacctttgaagctgagttaatagaatagaaggtgcgaactatctctggctacacaggtgatataatgaagacctgtggaatcgaacttgggcgagtatgcctgaagacccctaagagagctagtggtgagaccagtaccagtggctcgactggcattggtgcctggagtctcgaagacattagcgtagggggcacactccctcttcgtgactacttcaagaattaataaaccaccttggggttgcccattcaagatgaatcctatttcctacaaaattctcgctagtttgaaggtcttatataaaa

SEQ ID NO: 354477 - DNA, 504 bp, Cannabis indica
tgtatccacttttcatacataaccttgtaagactcagccagagactcctcacagatgtcagattcatcagaatcagaatcagaattttctttttcaatggtattattcaaacataccaatctttctttcacctgtgaatcacaaacaaacttagaagaaactgaggttagtgcaacatttttagaaatatcttcatcactatcagtttcatcgtcactccatgtgacattgaaacttttcttattctttttcagtgtatttgcacattcagattgaatatgtccaaaaccatcacattccctgcactgaattccctttttgttagtcattgaaggttttgaaaaaatattacctttggagaattttggaaattctttttgtcacttatctttttcatgtatttttgaaagtttttagttaaaacatccatctcatcatcttcttcatcatctgaagtttctttttcagcaacattaaaagcaatacctttacctctatcagcaa

SEQ ID NO: 354478 - DNA, 1025 bp, Cannabis indica
gctaagattcgagactttgctagggccgaattagagagtcggggtaggactagcttgattacttttttaagtgttcactgctttcacagatattctaacacttaactcttttctcttgttgtaccagctaatcccatggaggcgatcttggccactcttgctggagcccatagtcttgatgctgcttcccttcctcccacttcttcccaaatggtcacccccatgaaggcttcttaccagtgcccctccaaacactattgacttagtggatgaggaggatgtacttcttgaggaagctaaagaaggtcaagaagatcaatgggctcttacctggggaagttgaagaaagtgaagaagagcaagaggttgctctcgtgcgcaagcgcaaaggcaagatggtgcagaggagtcctacaaatcagccgcggagggtggacactccggccccgagtcatgattctgggatccctcccgaggcggaggagtttacgagtgcctcacggcatgtgctgactccggtccccagagatgaggcgaggcaagatcttcggatagccaagtacaattacgctcttgacgaatactcccgggggcatgctgaggtggaggccttgaggagggttttgcgagaggaggtgcaaaattccctcaacgaggagaactatcagaatccgtgggatctaaacctggaccccctgacggattggttcaaccgtttcctcgggcccaccttggctccttttgccgctgagatgactggtgagtacgtctcccagctgactcggtgcgcgccgaaacggtacgctgcttgtgcatccttgaactccgtcttccaagttcaggatctcagccatgccttggccgcggtaagtaccttgtgatttacttcttttcttgttattttatttaaggccttcactaactcttgcttcattttccagattactgcagaggccgaccgcctttccaaaaccataattaatcacggcttcgtcttgtccaaatttaggggcatagacgaagtc

SEQ ID NO: 354479 - DNA, 610 bp, Cannabis indica
ttactaatttttttattataattcaaaaaacaggttaaaacagtcgcgcgaaaaagcggttatattacctaatttaggagaaagtattatttttttaaatataatttaaaattttcagtacttcaaaattctacaatattgaataaatgaaactctacagtgatatgtttttccaattctattagtgagaaataaaaaagaaaattggaaaaataattactcatattattatggtaaaattataaataaaaaatgttagattaaaatttaatataattttattactctattatcatttaataaaaaaaatatataatttttgcaaatataattaaaattttcataaataaatagaacttcgttacatgtaggggtgagcatgggttggaaataggccgaccaacccggccaacccaacccgaaatgggccgaaacatgatcatatttagtgggtcgaacctcacatgggttgaaaagagcccaacctgcaccaaatgggttgataatcgggctgatggttttttaacccaatcaacccaaactcagccggccagcccaacccaactaaaaataattaaaaaaaaataatatatgtataatatttttaaaa

SEQ ID NO: 354480 - DNA, 571 bp, Cannabis indica
atgagattattgggataagttgattttagaaatatcggggtattttagggtactcgaagttgaccaaataccctagaaatagagattttttagtggctaagaaataataagataactattaataataaagtttttattaatattattattaatattatattattattattattacatataaaaaaacgaaactgatgtttcgtttcgttttaaatatatatatattaagtttttaagttataacagtaaagaataaacgaacgaactctcgttctcttcgtttcgataaaaccttctccctatatatctattttcttcgattttcaatcttaaacttagcgatctaagctccggtagtagcaggatagcaaattcttgaatagcaaaagcttaaggtatggtttaattacgttaaaagctaaaaacgattggttttatataggggctttatgatttaaaaaggttatggagattcatacttcgtagaattgttcattggtaactatgggactagtttatatgttgacttgttgaatttgaggtgcttttgagttagaaatcgagtttggaa

SEQ ID NO: 354481 - DNA, 903 bp, Cannabis indica
gcaaggtactttgccaatggtactttcctcacgacaacactaggcaataatctaagctacatttggcgaagcgttttggaggctcaagatctggttcgagatggagtaaggaggtttgtgggtaatggctcaaccgtgagtatactcaaagatccgtggctcttagatgatgttaacccttttgttgagtctcaacaattgtgcttagtggataaaatggtggactcactcatgaaagttaatgtgcgtgagtgggacgaggaagtcttacgggatgtgctcacggtaagagatcaagaattagtgtggaagattcctttgtcatcggacgttgaaagagatggttggttttggaataaggaagcttcgggtctattcacggtgcgaagtgcatatagaattctgcagcagcagaaattaatcacgcaccagccggttcttactggtgcatggacgaagctttggcagctcaaattacctccgaaagtcaaagattttctttggcgtgtgtgcacaaatagcctccccacccgatttcagcttacaactaaacatgtccccattaattccgactgccccatgtgcttggctgccccagaaacctccttacatgttcttgttcggtgtccttttgctcaaaattgttggcggcagacgcaacttcctgctgttggtttggctgcgatgcttttctgtagctggtgggaagatggtttacaagtatggaaggaagccgaatgcttggaggcaagtatgattttgtggtccatttggaaggttcgaaatgaggtagtttggaatgaaaagcagcctacatctgaagaagtgctatttttggcaaaactaaactttgttgattggtataatgctcaaaatcaagagttaggatctcctaatgaaccc

SEQ ID NO: 354482 - DNA, 699 bp, Cannabis indica
atcaaggaaagattggtcaagaaaattagatgatgcattgtgggtatacagaacttctttcaaaacaccgattggcatgtccccatttcggttggtatttggaaaggcttgtcatctaccggtggagttagagcataaagcttttggggccatgaagactcttaacatggaattaaaagctgcaggagaaaaaaggctgctacaattgaatgaactagaggagtttcgaaatgaagcctatgagaatgcaaaaatctacaaggagagaactaagaagtggcatgaccaaggtctactaaggaaggagtttcaacctgggcagcaagtgttactattcaattcaaggttgaaattgtttcctggaaagttgaagtcaaggtggtcaggaccattcacagtagtcaaggtgtttccttatggagcgatggagttaaaaggtgaaggtccagcaactttcaaagttaatggacaacgtttaaagctctacttgggaggtcaatttgaccaagccaagtccgccatgattctggcgccactataaagaacacagctcagcgtccggctataagacgataaagacaacgcttttgggaggcaacccaagtgttttctttaattcttcagactttttgtttatgtttttagtttatgctttagtatttttagtattttcaatttttagctaagtaccagacatta

SEQ ID NO: 354483 - DNA, 533 bp, Cannabis indica
ccattctcatttgatgccccatcaacatgtaacttctatgtttctgcctcacgctcaacatctgagccttcttctgagtttgctccttcaattagaaagtcagccagagcttgtcctttgattaatactctctggtggtaagttacgtcaaattatcccaactcaatgaccattttatcaatcttcatgaagtattaggttttgataaaacttgccttaatggctggtttgttaagactttgattggatgtgcctggaactatggtcgtaatttgcgagatgcatgaatgaagcatagtgcaagttttataagaggtgggtatctcgactctgcccccagtaaccttttacttacatagtaaacaggttgttggtgcttatcctcttctcgtactaaagccgcactaatgacatgctccgagacagctagataaaggtataaagtttcttaagttattggtttggccaaaactggggggttgacagatgtttctttatgcctttaaaagcttccttgcattcttctgtccatt

SEQ ID NO: 354484 - DNA, 849 bp, Cannabis indica
tttattttattttaaagttcatttcttgaacatattattgtaaatgaatcactagtgccatccaaataataacgggctagaattgttaaaatccttccactaagataaggtactgtgattctatgtctaaaaaattttagtggtatctattactatttgaacatatacatgatcaagaattagttctactagtttgctagtttgtttattatatttatgtctgatcaaaatatgtgttatagagattttgtagtgttttgaatataatttagagttcgatgtaaaagatctttgaagtgtatatattaataacttcttccacccctatcagatcacaagatcttttattaaaccaattcttaataattatttaagaatggacaattattcataaacattgaatttaaattctagtatttatgtggtattatctctttgcagagattattatatcatagactttgtaccaataataaatttaaaatacataaaagcttgataaatagataaatataatttggcatacaagaatataaagctcaatttcataaaagcaactcatgatgaaattattttaaagagaaaaatttaaattaatactctaaaatatatcacaataaattatctgcaataatataaaataggaaataaaattctcaaactaaaattaaaactaaattgttcgagaaataaaataattaattcaaaaagatataattcgagcttcatcttcaagcttggacaatctttgtccctctgtccaactatccatctcaacttgctaggataataacccaagtctaagcagctggagctaaaataagaagaacataaacatggttagtagat

SEQ ID NO: 354485 - DNA, 705 bp, Cannabis indica
ctggatgatattcctgtcttccttcggcaaccgggcaagtttttgagctctatccctaagagcaagagtgaggggaggacggtaatatgtcagaatctactgaaatcgagtctcggtgatactcggatccttcaccatgaagtactcatcaataaaacgccctattttcctgatggccttgtcgtccgtgccgctcaaccacttgaagcctggctaagagaagtagaaataccccgacctgccttgcttgggggtacacttcaggtcgaagatccaagcgacctcatggggagaaggagcatcccatccttgggaagcgtagaagacgaagagagtcgacaaatacttaatgccctttggagtaatttgggtcgggcagaggccaaagaagtccgccacatccctaaactacttttgcaagggcatcaacgccccttgctggccattagcccccgaccaggcgcacattccattatcaggacttgtggcgcgattgtcgtgggcgggaatataacagtccagctcgcccaagtacccgtcctggtcgagagttcggaggacttacccacctggcgcccaaggcaccttgcctcctatgaggaaccgcctcagcaagctcctcactgacgtagtccacgccctcaaccaggacgtctccgtcagcatcgactagctgcctagcctcattgtactccccgaagttag

SEQ ID NO: 354486 - DNA, 576 bp, Cannabis indica
ttttagccactttcacttaataataagtgttcagattagtcattagttgaggtgatctctaataagtcaattacaactttcaaccaataatctttatggggtcttatagagatgacctaattgaagatcattataacaatttttaagtatactcctttacagatgtagattattatatacacacaaacacaacaaacaaagaaagaaacttgtccacagccagaaaaaaacatcaaacaaataattgatgaacattcatattcagttttgggaatttgggtcagtcccaatcatgaaaaaaaaagataccctttactgggttagtcatcaattcaattataccaatctccagaaacttagaagagagtcattatcctatgcataataatatgatgctctttcctttaaattattatgtagcgtggagaacccaccaagtagtttctttccatatctcaacccccatacttgaaaagaatccacaaagaaaaattaattaataatgaaagttatgaacaacaacatcaacaacaatagtaaggacttatttggcattgttttagatattcgttttta

SEQ ID NO: 354487 - DNA, 539 bp, Cannabis indica
ttaagctaatgtcgattttgctgttgttcttatttgtagaatggattgaaattttaacttgtgtgcttgatttttttttactctttgaaataatttggatgcttgtaaaaattttgtattgatgtaaattgccaatagttgtattgtatcataattattttactttggtttgtggtaagattaattgaatatgatagaacttgcatgaattattttttaaggcaaaatccttgacagtgcttgtttggaaaatgatgaggcaattttattttggattgtttgggcctttcaagcttacctttatctttattatccctagtttgcctatttgagcttagcctattcaattgtttttagctactgtatgagactaactttgaatccacttgcaattctctatccttgtcccttgaattataccataagcttagaaataagtttggggaagatgaattgtgtgtataaaattattgtttaaagtgggtgattgagacaatgtgtgaattgtaaaaagtatttttcaacatcactaatgttat

SEQ ID NO: 354488 - DNA, 808 bp, Cannabis indica
ataaggcaattaactaaaaaaaaagcggtaaactaacactgagcgcttcagcgttttctctagatttttctgtttgaaactttaaaactgtatagaattctaaataacttaagcttttatttataggaaggtaaaagaactaatgtgcaactaaacttattaaaaattacatgtgggtaaaaatgcaattacccataagtaaactttggagtgccacgtgacatctgttgattggctgtaaaaaatgagttggtgccatgtgtcgcaaggaggaaaagccacaaaatggtggttggtgcaagtgggagacacagagagagagagagagagccccaattgcagtgctggtggtgaggcgcacgcacggcctcagcctcatgcgcgtgtggcgtgttgaagggggaaagcccctgctggtgctggcggtggcaactgcgggcgaatgggaggatgccacgtggctgccttgtttgctgggagagggggattcgagccaattgggccatgttgttttgggttgttttggcttttcaaaaatgccaaattttatatccttgtgccattttttgtcaacttttcatttcttatcttttattttcacaaatgctatttttaacataaaatatatcacaataattttaatgaaaatatttatttaaatctaaatttgcaattcttttgataaaaataatgtattttccttaacttttttattttttccccattatgccataaatattaattatgatttataaacaaaggtaaaattaaatctaaataaatatttttcaacataataatatattgc

SEQ ID NO: 354489 - DNA, 1021 bp, Cannabis indica
aataataataacaaaaaaacatattcatatttactttttagaaagtccggcagcataacggctgtattttgaataaatctaaaaatcataacttgcataaatatttgtacagaaatatatttagcactccgtgccccaaaacaatccagaaaaatgtgcaaattaaaattttaattttttaaacaatttgtaaattataaaaattggaatatgtctaatgttatttaacacatataaaaataagtccaataatcaatctaagtccctacctctcccaagtcattaaactttgtccaaaagaggatcttaagctctcaagtcccgagcttcaattatttagtccaatcttagatatcactcttacctataccatcaaatggctaaatattatcatcattgcattctactttcaaaactgagtctaatgacatcgaatatgagtatatttaaaatttagagttctgaaacctcacctaagcggtgcacattaactatcggtggcggtagaaattagtgtattgaaaacatcgctgaaaatggggatagtatatatcaaaacgatcacatcgacgagtagatcatacccatgccaaccgtttgtcaaaacagtacactatattgccagaaattcaccgcaaaaggggcggagctacaaaaacatcaccaaaaaaattagccagttgggcgaaatggcttagtgtaggctgttttcctagatgagctgagtttagtggtgaagacaactcgtcaaacggacaccagatgtgctggaaaatccgttcaaagtttgaacctccaaactttgacttgtgatcctgggctaacggcggcgaaaggggcagcaccgcttgggggttgaggtcgccgacacttggggttcgattggtctggtgcatggggtcagacgtggccagagagtggtcaccaaaaagttgtggtggtggtagttatggcttcttttgtggtctagagagagagagagagagagagagagagagacaagcagagagagagagagaga

SEQ ID NO: 354490 - DNA, 968 bp, Cannabis indica
tgagtgatttaaatcactttgtacaaaaaaaaaaaaaataaataaagtgtaattgatagtttgaacattattttcggcaggttaaattttcttaaatttttcaatattttataaaatattttaaataactacaatttacacaatgaaataaagttagacattttataaaattttcctaatatataataatgacagttagaaatcttttctcctccacgcacgattatactcacacaatcacacatttaatcactcaagataacctcaaatggcatgacacctctaaattactttttataatcatatgtacacttaaaatatgcatcaaaatattaaatgtgacaactttttatcattcttttttttttttttgactaattaggatttttaccctttgaattttgacatgtaccaaatcatgtcccctgaacttttaaggtcgttagaaatgccccatgaactattgagattgttggatttaaggacttttgtctaatttcatccaattttactatttcagtgattgtttatgtactaaaccatactcctcagactttgatatctaccaaatcatgcctctcgaactttgacatgtactaaattatgcttcctgaatttttatccatgttagacttttttactaaaattagaaaaaagactttaaatctaacaatctcaatagtttagggggcattttcaacaactttaaaaattcaagggacatcattttgtacatgtcaaagttaaagggacaaaaatactaattagccttgttcttttgtcattcgtccatttggatttttttaaaaaaattagggtaatgtttttttttcctttttatataactaatgatataaatttattttctattatgaaatcacgacgcattaaaaagtgagattattattgttgaccgaggttttcggcaaccaataaaataataagaaattaaagagctgtaagaaatt

SEQ ID NO: 354491 - DNA, 1123 bp, Cannabis indica
catattcttgcgagcaggtacatcgagttgattccacatgtcaccatcgtgtgatgccacatcagagtgcaaaaattgggatgacatttgccccccgagtctgtacgggactttcgaagttgcatgtagacttcacccgagctgtccttgcgtttggatgggtgacacgtgttaggcgcgtctgtttgcgattcgatgtgaggctgaccaggcgtctcttcaattttcaactaattaatgctctgacacaattaatgcttcaaacccaattttctctcaccacgtttgacggttacacttgattatatttgattcccaatatttgcttttgggggaaactgatgcgtctaaggcattcaaaatgattaccctttttcattcttttgcctataaatagggctgagcatcattcacaaattaacttttaccaatttctccattgagtaaactcagagcaaaaaggaggttcttgcctcaagtctgtcgtaaaatttctactataagcatccgagcagcttcgtttggactggattcagacgtcgatcagtgagtaagttctcaaatccttcctcttttactttgcatgtttaatttctggatgcgttcttgaccttgctgtagaagataggtagaaagtctaggcttaaaacttcacgatttcctttgtaataatctgtgaaacttcacggttcatggtgttggtctttgatcgtacattgtctgtctttcaccttgcttattcaaagcttcatgaaactttgccctaaacccaaaaatttcaaacatcttggttttgagttattttttgaatgctttcattctttaatctgttgagtactcctggtcggcatatttacttgtttattgtttgatatcctaaccaaacactcatctcgtgtgttgtcttttgtagatgaaccctggagagttttggggaagcgaacaccgaattgaccaggacttgcttcaacttttgtacgaggatcgccctcgtctttgtgccagtccttcctcttcaagtgacggattttccaattcaagctttctgtccagctacaggatgatggctcgaacaaagcagacgatgcgtaaggttaagcatctgatccccacgtggcccagc

SEQ ID NO: 354492 - DNA, 667 bp, Cannabis indica
atttgcatgttagaggagtaagtattgatcttgagagagtttgagtgtgatttcttgatttaattgtggattatatggttgtgttcttggctgagttttcagggaattttctaagttgaaagtacatgtttattgttgattttgttgctggaaaatatggggattgttgagttgaagctcaagttcttgagcttgagttttcttggttaaatgcatgatttagaatagattgtgtaatttgaattttgagagttgttgttgatgttatttgctctctgttgtgatgatttttatctgtaagaagttaattttgggtatggtttaattaaggttcgaatatatggaaaagtgagcatttttagaccttaaattctggtattctgggtttttcgaacccagtggccgcggtcagatttttggttgccgcggccaaaaacccagcagagagccatcacttttcccgattttgttttggccataacttttgacttgggactccgttttggatgttctttatatcgttggaaagctcgttccaagatctatatgattatatgtattttgaatgtcatggttatattttatgaaattagaattagggattaaccatatttgtaaaatcttgaattgtgtgactaggattaccggcacctgatcaggagcaccc

SEQ ID NO: 354493 - DNA, 617 bp, Cannabis indica
ccacatctttcttcatcccgcaccaccagtagaagggttttaaatcttgatacatcttggtagtgccatgatgcagtgaatatggagtggtatgagcttccttgagaatttcttttctaagttctgcactacctggaacacaaactctggttttgtataatatcatctcgctacctgacaccgtaaaatctttagctcgaccagctaaaacctcttctccaatctttaccagttctacatcagttaatagagcaattctgtctaacagatcgaattgcaatgtcaaattatgaagtttgcctacaaaaaactcaatacctgatctgaccatatcatctgctagttgaggtgaaatcttaagcactagttacttgcccggagaccctttctgctcagggcatctgccagcacgttagccttcctagaatggtaaaggatttcacagtcgtaattcttaaccaactcgaaccaacgtctctacctcatatttaaatatttatgggtaaggaaatatttgaggctcttgtggtcggtataaatctcacacttctctccgtagaggtaatgccgccaaatcttcaaagcaaaaattagtgcggtaagttctaaatcgtgag

SEQ ID NO: 354494 - DNA, 768 bp, Cannabis indica
agggatagaaattgcaaactctctatttttacaaggttcgacagaactaagctacctacgtccttggtcttcaaaattatggacctagctttgagttcaactatcgagccaagttaacaggcttgactaacccttacaatcggggaattttttaccaattttttcccaaatctctcacaatagttttcttccaaggactatcaactccaccggtggattgttgtagtgccaatctcactaaccgagttgttttgccactagtgccaacttcacctcaaccaatagtttttcaaaggactatctacctcttgggattgttgaagtgtcaatctcactctcagattgttgtagcaacaatctcactcttctcaagttgtttacaaaatcggcgtccatctcacctacaactgagttgttttactatcagtgccaaccacacctctcaatacaatggatatgtgatttttaaatacaaagaaaatctctctaataagtaattacaatgtaaaatcctagagagaattacaggcaaaatagagaagataagaacaaatttgacacaagtggttaatgatgttggaaattattttaccaggatcttagatctactcacaagtatgttgattaataccctaaatatgaactttctaaaacgatgaaataaacacatataaagtttagtaaaccttacattgggtgcagtggaattaaatgactccttccgttcagatatctagcccttgactcctttctgtagcagagcattat

SEQ ID NO: 354495 - DNA, 518 bp, Cannabis indica
ccaaatagaagtaaaagtttaacttcaacgtacttaattacaatccctgtgggatcgacctcactcttggtgagtttactacttataatgatacgtacacttgtgtgtgcaaaatatcacaacaagtgtggtggtggtggttacgtgtattctcgattatttattgacatattctcgataggttatcgacaagattgttaaaaaaagtttgtttttgtctttttttagttagatcgattatatattatttatgttgaaatacattttattttgatgacaatttctttaagtttaagtaagtttgattatcgacatattgtcgatggattcttgataggttctcggtagtagtaattagtcttttagttgtcatgtttgatgagtgtatacttattatcgatgggttctcgacagtttctcgataggatttagtggttatagtgttttctgatctagtgtggtggtggtggttatgtatgttctcgattatttatcgacagattctcgataggttatcg

SEQ ID NO: 354496 - DNA, 831 bp, Cannabis indica
ttcaaagtcttcaaaaaatacaacatgaaactcaatcccttaaagtgctccttcggagttagctcgagtaagtttcttagttgtattgttaatgctcgaggtattgaggccaatccagaaaaaattcaagccttcttggatatgaaatcgcctataaaagccaaagaggtccaaagcttaactggtcggatagccgcactcagtagatttgtttcgaagtcaaaagataagtgtgttcctttcttcaacatcctgcgagggaataagaaatttgaatggacgatggaatgcgagaatgccttcaagagctaaaaatacaacttgcaaaacctcttgtactctcaaaacctctggacggagaagaactaagaatatacctagttgttatagaacatgttgtaagtgttgtgctgatcagggaagagaacaatatccagcatctggtctactacatcagcaaaagaattgttgaagctgaaggatgatatccgctgatagaaaagctcacttaatgcctaatcttagcaacaaggaagctaaggccttactttcaagctcatcctgttcgggtatacactgagcaaccattacgccaaatactacaaaaacctgacacctctagacggtcactcaaatgggcagtggaattgggtcaatacgaaataatctttcaaccccgaataacaatcaaaggataggctttagcgaattttgtagttgagtgtacgagcaaagaagaaagccttttaaaaaacaaaccggagctagtacaagaaccttattcgagcaacaatgaagacaaacctacctgaaaattacacgtagatgggt

SEQ ID NO: 354497 - DNA, 698 bp, Cannabis indica
ttaattcagaagtcaagagtatggccgacctgggtggaaaaacaagctaggcaatcccggtcctatgtcacgacaattgaaacacaataaataccttaacttaaaattccggattaaaaccctaatttaaaaccgattagacttagccttcaccaactttaaaataactcaaataactcaaaaacattcaaaggcaggtactaggttcaaccccgagtcaaaacagggttcagagaaaacccgagaaattttcccctgctgtaaccggtcgaccggttctggtacatcagaaccaaccggtcgaccggttgctgtcagaccagaaaatttctgggttttcttccccagctcgaaccaaaaccatttcagacctaaattgcatttccagaacagttcaatataccaagtacaacatattcaacacatcattcaatcacaattcaccacttaactcaaaatcaccatctcacatgaaaattaagctcaaattgcttaatcaaatacattcaatctaaacagccattaaaatcacatgatgcaaacttcaacacaccccaaaagagacctaaaaacaccatcacaacccagactaaacctacagccacgaaatcctaaaaccctcatccaaaaccaacctaaattagtgaagttttcaatccccaaggaaaagaacttaccttcaaagcttctaggatgat

SEQ ID NO: 354498 - DNA, 711 bp, Cannabis indica
atgtttctttaattgagtcatattacttcttttttcatatttagagtctaactaagttggtacattatgttgcaggtcatttgccaagatttctaccgtgtttggtagaatgcaaagaaagaaaagagttgaggtcgatgtcgatagtaaacatgtcgctgaaatcaaaagattaaaagctaaaattaagaggctaaaagcacaaaaaaatgcacaaacagaagagcttcaaaagttagacaatgaatatagagatgaagagtgacatgaagactattatgaggaccaagaaccgaccggcatctatgaagaacaagaacaacccttggcaaatgaagaccaagaaccgaccggcatctatgaagaacaagagcaacccttggcaaatgaagacaaataacagaccgacatctatgaagaacaagaacaaaccttggcaaatgaagaccaagaaccgattggcaactatgaacaccaaaaacaaccaatggactatgaggatgtaagtcaatgtgtaaaattatgtccgggtaactttgataatgttgtggctgagggtgtcataattgaggcggttgatttcttttcatatcatggtgacataattacaaatgattatgcacaggttcaaatcacacaagttattcaaggggaaactgaaatcccatatccaaaaggtgcaatacgctatgtttatgatgcatgtaacaa

SEQ ID NO: 354499 - DNA, 844 bp, Cannabis indica
tgcacaccaggcgcggtttcatccacaggaagtgttacaccactgcccacgttcgccgtctgtctaggattaacagctggcggaacccttgtgtttcttggattttgcaaagcaggatccaccgtctgtgaatttgctggatcagtcaaacctctacgagtttgcaccatcgtatctgtgatcagattttgagtagagagcgatccttgattcttctctcaatgaaagcaccaaaatgttgacttcgcttttagccaacaaaatgagtctattttataagcgataaatgatatataataacagatatatgatatagcaataatgagacataggaattttatagaggctcagcctcgatcagttcagtaatagcctaatcctcgttacttgtattgacttaagatcaaggagaaaggttccttttcttatagctcttacaatcgtatctctgaatgtataattcttagataatagtatagtcttagcttaactgcttttcgaccgatcaatccctttgcccagtgaacatacatcactatttatagggcaagtaaacttggagaggaagattttcccctctcgttacaatgcgtataaacagaaagaatgtgggatcaatgcttaatacaaggatcgtgggattgaggttgaatacaatgatagtgggatcgtgtgtatgccatatccacgtaagttgctccctgagttatagggactgtgctgatgtctcacgatgcggaagttgaattcgctaagtgttggctgctctgcgcggattgctaaatactttgttgggaataatttaccaggatctagatttactaccaagtatgtttcattaaca

SEQ ID NO: 354500 - DNA, 579 bp, Cannabis indica
tgaaagtcgactaactcctgaatttcaagtacgctaattatatttgtactaagataaactcttaaatacaagtacatgtatctaatgtgttatagtgagatttttctcacctagaaacttgagaacggactcctatttaaaggacacgtgtactcaatttccccaaagaaagctgagatgttaatgagagacccctcgagtacgaacctcgcctgaatcagactcagcgagatgaagtacgaccaagtctaatcgcattcgtatgactcgcattatgtaggaccaagaaacggctttaacccgcatatatcaagatatatgcgagtatccccacgatcctcctggaaaaactttgagatcgattctctatgttgtgagctggtcctgttgacccaacagcctcgataaaccgatatagactcgcatgtcttggttttattagctcgttatatgatgtccgtaaaagcgacttcaaggacgcaaacatcctagactctctcgaaagcatcttaagcctgggagcttatgcaagatatgaacaggcaactcgcaaatagagaagtcgcatacgttgctgta

SEQ ID NO: 354501 - DNA, 548 bp, Cannabis indica
attgagagcctctgtgaaaaagttcagaaaaaaccctcctttcttttgaagaaaaaccacctccttcatggctagaaactcagaaaatgttaataccccacatgaggaaactcatcatcgtcctgggaaaaagcccgtgggctacagaaggtctatcaacccacagtctagacggaccgcccgttctaggaggactcaacttgagggtggccccagcacacgaaccacacgctcccagaggactcaacgtgtcgttagtcctagtacgcgaacaacacgctcgaggagaatttagtgtgggagtggccagaaccctgagacaagggatgaagagcccaatcgtggaggtacccagtctatgggagaaggtacttatgaaacggaaaactgtcgcctaagacgccgtctggaagaggcgcaatggcagaacactgaattagaacatgatgcagccttggccaaggcggcataggtgacgaatgctcaaaatcaacctgaacctggagtgagaagaccacgaggcaggcctcgtggctcacgaaccagga

SEQ ID NO: 354502 - DNA, 433 bp, Cannabis indica
gctttgcatgtagctctgttgtgccttgtaccgtgacatagcgagcagtgatgaggttccattaccacctgaccattggacggttgacgcttcgtcggtcttctacctgcattgctcttcctaggccgacctactggttttttatccactagtaccccgattcttatgttcttgatgtgttccggtagtacccactcatcctcctccccaacaatattaattgtggcattgtagatcttcttccacgtttcttttgtgtaatatggagagcaaagtgtgtacacgctcacattctgactaactgctgcgacacatgcatggggacaagggattttgagcgtttggaaagtccgcaactgcatgttctctccactaagttcacatcaccacctctctcaccttgaggactcgtaccaacgttgaacaattgggc

SEQ ID NO: 354503 - DNA, 1608 bp, Cannabis indica
agtagtaaaatgaaggtaaaaattaaatatagaaacaaaaagtgggtatagagtgtaattttctcttttttatcttgtttactttgttttcactttttcccgtatagtataccgtatatatttttttaagaaacagtcgtaacttttaataaaaaatgtgtaatttccactcgaatcaaaattcccatttaaaaattaaaccaatctaattctaacaagtcaattaatttaatttatgttaaatatattacttttgtttactcagttaaaatttaatttttttaataaataaaaaattaattaacatgttaaacttaaattgatttaacacacaaatgcaaaagaaatcattttcactccattctcttgtttagttgcattttaaagtattagaatgttatttcaatggaatgcactttccaccattttgttggaatgaatattctattttaaaatagaaggaaagaccattccaatgtaacatgaaaaaaaaaatattttttatcaatttttaagcaatttaaattttattttattctattctattctcattcccattcccctaaaccctaaccctgaactctgacccatgacacctgacccctgacctcaaacccctacccctaccccaaaccctaccccctaattctaacctctatcccctaaaccccaaccccaaccctaaaccataagccctaaaccttaaaccgtaaacctcaaaccccaaaccgcaaaccccaattcccattctcattctgatttccattcccatctccattcccatctccattcacattcccattcgcattctgattcccattcccattcctatttgcattcgcattcctattcctattcccataccccagcccattctcattcctattcccattctcattcccattctcattcccattttcattcccattcccattccccggcccattcccattcccattcctattcctatttccgttcccgttcccattcccattcccattaccatccccatccccattcccatttccatacccattctcattcctattcccattcgcattccccgacccattcccattcccattcgcaattgcgttcccattcccaatccccagcccattcccattcctgttcccattcccactcccattcccattccctggcccaatctcattcccaatccctttctcattcccattccccggcccattcccattccccgacccatgcccattcccattcccattccccaaaccacaaaacctcaaacgctaaaacctaaaaccctaatggtatatttactaataagtaatggcaatcaatggtaaggtaatcattctcgtacatttgattacttacattattaaaattaggaaagagagaacttgattaaccaagggagaaaagaaagggagaacttctcccaccaattttataaggaatgccattaatggcatgtttactaataagtaatgggaatcaatagtaaggttatcattcccttacatttgtttacttacattattaaaattaggaaatggagaacttgattaaataaaggagaaaagaaagggagaacttcccccaccaattttataaggaatgtca

SEQ ID NO: 354504 - DNA, 554 bp, Cannabis indica
ttaaacaacatacttgtgggtagatctaagatcctggtaaaataaattccaacatggtctccatatgtgtccctcttgacacacccatgtagcaactgaagcattccatgtctattccaaaatgaatcatctcggtcatcaactctcgaccactgttgtgactaacaataatctggcggtccactaccaacaagcttccttttcaacaaaagtgcctcctgcggcttacgatgtcactcaggcaaacttgacctagtgtaccaagcatgcagtatggactacccaatcaaccttgtactatgccaacgagtttcaaatattctactgcgcctctctacaattgcacgtggtagttgtctttctagcatccttccacacgcctacatcccctctaggataggccaaccaggttcacctcccatttagatgaactttgctctgataccaactgtcacgggctcaccttttcaggcagcggaacacccgtgcggtaccttgacttctctaagccaaggtcagccttccaaccatccgagtaacaattggctcatttt

SEQ ID NO: 354505 - DNA, 535 bp, Cannabis indica
aatattttaattgctttttaccacgtttaaattttttattaaaaaatattaattaatttttaacaaaagcttactttacgtctttttttgaaataataactttaatgttaagtatcacataattataactaaagaacattgttattaggtaccagtggtgcacaacacctttaataggtgacaccttacgattggttagcgatattccctaaatcttattattttttttaagttatatgagacctgctactttattaaactaatagtggtatgataccaaggagggttgccttttagcatttctcataattaacacatctttcttcagaaaaactaagtgccttttctccctaaacctagccgccactttaagccttcttcttcaccattaaaattcgaaacccttgagtgatagagtagtgcccacacacatcaagtggtacctcaatcatagtgagtaagatcgtgaagaatccaatttcaacaagaagggcattcgggctcagatcttgataatactctgcgacaaaaagga

SEQ ID NO: 354506 - DNA, 396 bp, Cannabis indica
tgaatggcaaggactgcctgccagttagtactcccctctccgaatcagttggcgcatgaccctggggaggggctgtgtgcatggtcccgtcgccatattacttatgggggggcactcccccttcataattttttcaaagacgtggctgattattttggccttagtccggggcagttttctcccttggccatacgagtcctgactggcatatttgttttatataagctaatgagatggaagtggccaacaggccatgaggtacactatctcttcgatctgagaccgattaacagcgagtatcggtcgggatattacgcatttcagcatgcacacaggaatgttaaattccttcatggtatggagaagtcgtcgaaggaactgttgggttttatgccc

SEQ ID NO: 354507 - DNA, 609 bp, Cannabis indica
tttagaataataattatttgtgtttctatatatgtaaatatgaatattgtttactattaattagtttggcttcagatttaattatagttggagtatattattgtttacctcttaaaataatatatttatatatattagtattattatatattttggttcaaacaattaaattcaaattttggtgttagtttatgtctaatattttaagtaaattaattaaaacaatatgtcaccaaagtgacctcttttgtgtagattaatttatttaaatattatgatggttgtgtgtttgtaattgatgcatatattggctaacttaaaggtaagtaaagatttcgctaaatttcaaacatagctttgacaataaatgtatgacaattataaggtattttgtatgaacaatacgttagtccaagattaatctattgtttgacacagttttattgtcaatgtttgattgttacaccaactaccaagagtactgcttaccgttaatattactgtctaaagacttgatattaatgtgtgtttggtatcttgagatgggattaaccaatttttaaatttattatttaattatgcatattaatgtgagcttgttttatttgt

SEQ ID NO: 354508 - DNA, 745 bp, Cannabis indica
aaaaaatcaatatatgaggttattctcctaaaaaaatacagtaaaatcccaacataaaaatagccttggagtcagtgtagcacgtataattattattttttaattaggtttaattaagtgatattaagttatgttcaatttttttaattaggtaatgcatttttattttttaatttttgaaatagggtttaagattttggtctttgaaatttttttttagctattgcggctatattggtatgctttttactctttagatgtgattttatatacacaataaaagaataaattttattgttacacgtattttatatacacaataaaagaataaattttgataaaatttgagtttgattaaagaattaattacttttaaaatacattttatatattatgtctaaatatatattttttaaaaaataatgatagtgataaatacaatattcttaatttgcagttaggattgtgtggttataataattataaagtgtacaaattattaaaggcatatatatatataatttttaaaagagttatttgcggcataacctccttaagaggtcaggtttttgcaactagcccctaattctaaaatttttgcggtaaaactccctaaactcaagttctgttaccacttagccctttccgtccatttttagctgttaagtgccatggtggaatgtccacgtgtacacagtgtacacgtggcacaattttattggtccacgtaaataaatattaaaaa

SEQ ID NO: 354509 - DNA, 218 bp, Cannabis indica
tatataaatatatagattaattaagcattaagcattttatatattataaagctaatgaaaaatttaaaaaaaatagagaattaaggagaaaataaatagaggtatttggagtgattttagagtgacatatctgtcggaattattttaccaggatctagatttactaacaaatatgtttcattaacatcctaatatgaatttctaaaataatgaaataa

SEQ ID NO: 354510 - DNA, 754 bp, Cannabis indica
tttagggcataaaacccaacgtgtagcacgtgccttgcttttctgatcagtggccgagccactacctcctctactaaagcctgatgtaggaaaggtcggagccccgccaacaaccggagtctcacgagactcaactatgcatcccactgccccctcagctcgcagtgccttatccaccattttagcataggtggttctgtcgtcggtagtaatcatcaagtcatgtctgatcttcgcatttaacccatccagatacttctctttcttactaaaatcagttggcacaattcccgaagccaaccttgccaagcgatcaaactgagtcgtatattgagtaacactcatattatctttctgagtcagttgtgtgaattcttttcttttggcacttctgactgcctcgttataatacttggcataaaagctcgtggaacttttcccaagtcattgttgtaacatcgtgaatgatggaccccatgtcccaccaattcagagcgtcttcttgaaattcgaaagtggcataggccaccctatcattaccagtgacgcccataaagttcaagatcctggtgatcacagttagccattgctcggatttcatgacatcgggacctcccaggaaaacttgaggtgcctgcttacggaacctttcatacaagggttccatcgggttcattgcgacaacgggttcggcctgcacagcaggggtaggagctactggtatctctagtgcaggaactgttggaaattattt

SEQ ID NO: 354511 - DNA, 519 bp, Cannabis indica
tgaagcaacagtggtaaaaaaacaaattcagatcagaccaccatttacaaagaatgatgcttactttcagaaatcccttgtaagaatcgcctataacgatcgacattatctccttgatttggattaatcggatgatcttcagtcttggaatctttcgtttccaatttaaactgaggtttgatgtttttgggaatgttggggaaagataggtgtttggtatattccagagctacaagttttgcgggataaatttctgaacctggatgggacatctttgcaagagaataacaatccaatttctggattaaattcaccaaaaaccaaaagtttatggaatatgtccagcctaaactaccattttatacttagaacccagtaacggtaagggcaaaggttgggaaatctaacgattgggagcgaggtagaagatgaaagggcaattcgttaatgctaataatgaccttcgaaaccgtgaagccataaaatttaagggcatgcgtggtcttgaagaaagggatt

SEQ ID NO: 354512 - DNA, 685 bp, Cannabis indica
tgtttgtgttttccaggcaaactcaatggaattcggtctaattgagataaaatatcatcccccgtcaatacaggaggtggtgctctcttctcaggcttaccattgtactttttgcttctccttctcggatcactcatttcgagaaaatatctgtggccaacatatccaatcttactatttaggccaatggaaggagtgtgttcattgcaagtgggacacgccatatacccttttgtgctccaaccagacattagagcataagcaggaacatcatttattgtccacaacactgccgcacgcatggaaaacacagttttgttgtaggcatctcgagcttcaacacctgtctcccataattgttttagttcatcaattaacggtctcatgaatacatctatgtctttcccaggagatgatggacctggaattaataaggtgaacaacaacgatttagaattcatacacttccacggtggcaaattatatgggacacaaataactggccacaggctgtaagagttgctcatgttgccaaatggactaaaaccgtcagtagccaatcccagtctgacatttctaggttcaacagcaaaagacggatgaaggcagtcaaaatgcttccattcttcagcatccgcaggatgcctaagcacaccgtcttcttttggtctctgcgagtaatgcc

SEQ ID NO: 354513 - DNA, 541 bp, Cannabis indica
ttaaaaataaaaataaaaaagttatgggtattaatttttagtgacccttcatagttttagtgacacacattacatgagactaataccaatatttaaagtctaattatgtgtgtcactaaaaattattcctaactctatagtgactgacactttaatgtgtgtcactaaaaggccatattgtagtagtgcatggagcacaagggttccgcatgctgttaatcctggatagccggcaagcgtggggaatggtgaaacagttcctacagatggaattgcgcctggtgtgcaagagactgggaataacagttccgcacccaaccagggcgtccataatacgactattttgcctggaaccaacgcccagacgactaccggagatgccactgaattacgaaatctccgtgacgcgctcggactcatgtagggtcataacaacaccctgcatcatgatcaggacgaactgcgtgctgcagtaaatcttgcgttcgacgaacaaaggcgtatgttccccaaatagagagataaagagatggaggcatta

SEQ ID NO: 354514 - DNA, 572 bp, Cannabis indica
agatatttttacgtggttttgcagttaaatcccacgagtctatcttatttatgatattttatgagtacaagatacaattgataatatattttttttctctctaaaattctctgtccctttttcaatggaatctgccctttttttataggaatataggttggtagttatttatatttgggatcaatttgaaatgtaaccgttcatgaaacgtggataattcccacatttcatttaaatgcatgtgggataatacaaaataattgcttaactgctttttattcttaaccttatcgatggttaatgctaatttggacaattgtatcttgcttatcttcgagttgttatccttgtctatcataatgtgaaaaaaaaatgctaagtgttagcagatggttcgcctcgtcaagttttcttagaatagcgaggtggttgtctcgctattcgtaactcgaggttgctttgcataactatatttgctcctttgaatatatgaattgttagattttatgccctaaataaaactccatttcaatgtaatctattttattcaacatcaataaagaaacataagt

SEQ ID NO: 354515 - DNA, 719 bp, Cannabis indica
agccctccgtccagggttactgaggcgcgcctgcagaccctcaaccagggtggctacttgggcgaattggacttttaaattcctgcccacaataatcgtgccacaaacccttaaagggggatgtgcgcttggtcgggtgttcatgcccagcaaggggcattgctgcctttgcaccaatactttaagaatgtggcagacttcttcggcctctgcctggcccagttcactccgaagggcattaagtatctttctgccctcttcgtcctttatgcctcccagaagtgggatatgccttctccccaagaagttagttggttctttgatttgaagtccaccgctaagcaaggcaggtcagggtacttctatttctctcaaccagacttcaagtggttgacgggcactgaggattcggccatcagcaaaattgggcgtattgttgatgagtacttcatggtggatggcgcgggcatcacccgtacttagttccagcagaccccaacgtattaccgccctcccctcactcttactcttagggatagagctcaaaagcctgctcgactgccgggggaagactggaatatcatccagttgaccttcgaggataactttgtgaagtacgggctctctccgaaggatatcattcctaagccagtgaaggggaggaagaggaaatctggtactggacgggctgaacgagctcatcaggataatgaactcat

SEQ ID NO: 354516 - DNA, 607 bp, Cannabis indica
tttggttactttcagatttcgccaaactttctcaagttttccagagagaaaaagaaacccttgaacagaaaccctcaagcaccatagatttcttacttatcttccttcgccgctgccaatcaactcttcaccatcgatcaacaacaacacccagttctcaagctttatgtaagttcatcgcatcttgtactttagtttactgtttgtgtttatcgcatgctttactgttcatctactttttttgggtttgatgtttgagtttctgggaatttccgttttgaacttttgtgtaacacgttatattcctccttcgtggtgttcgagttacttcttttcttcgtatttttagtcgatgacccatctttttatcacgtaatgacattcaagggtttagagtagactttgacttctcgatttttatcccttttcttttacttattcgtaatgtcaccatctgtgggattcttgcacccgattcttgtcagggaaaaccttctaaggctttctttttgacaagtgtccggaggggccctctttcgagcggttaggggacccccattcccttttttcacttagggtttggtttggggcctgactgctggatttt

SEQ ID NO: 354517 - DNA, 501 bp, Cannabis indica
gtgtcgtttttagtttgtgttgtgctaattgtgtgttgtcttttgtgttttgcaactttaatgccatgtcatttatgtacttgttagtttgacaatgagagatttaagaggtttttcagtggtctagtgttctgcttgatgatgatattttccgctcattccatttatgttgctgcctaattttatatgttgcctttgcatgttgaattgttggttatcatggatgcttctccttagtctctcctcaatggtgcatacttttattttcccaccatgctttgtatttttcatacgatttcttcctatgtaattttagcatctagaattggttagtgcatctcctttaagtgaaatcctagctagacttgtcccttagacatgatttaggccatctttggacgtttgagcctttctaaccttccctataaaataaaattttccctagtcacccaagtttgagccgtttagcctattcttgttgtgcaacccgatcatacatat

SEQ ID NO: 354518 - DNA, 643 bp, Cannabis indica
aggcaatggtcccggtgaaaacgctattcccatccaacaggagttcgacttatgatccaacaacaaacaaggctttattacaagaagcgttggatcagattgatgaactccgggatgagtctcaaatacgaatggcagcttatcaaaagaaagtggctaaacactttaactcaaaagttaaaagtagaaaatttgctattggtgatttagtcttaagacatgtcttcctagccactcaagaacccagagtgggggtacttgggcctaattgggaaggatgatacgaaatcgaggacgaaatcgactctgagacctacaagctcaaaagaatggacggaaccatggtgcctaggacctggaacgccgatcacctccggaagtattaccaatagccaagaaatataaacttaggctctgtaaagtaaatttttaccaaccaagtatgtgcaacctctaaattaatatttgtaaagttgagtgccctaaaaacaattttcatgacacttagggggttaataaggcatactatacggacaaatgtaaaacaggccaaaagtttaacgaaattaaaaagcaaagcaaagtatgtatttaagcataaatataaaatgttcagacgtagtagcaagctctaaaaaaatat

SEQ ID NO: 354519 - DNA, 549 bp, Cannabis indica
tgtaattttgatactttattaattgatttcattctctgagcgtggccccgtggactaggagtgttcgggagaacactgataccacgtataaatctcttgtaagttatttgattttctacaaatattttttatattctgcctgttctgttttgtcactgcaaaactggtttctgcagcaacagaattactttctgcttctacagaagtatacagatttatattttcgtatatttaattgacatttgcaagaactcggtttttcgtttggtatcagagcgggacactaaactcttagtatgatcctttttaacgttttcttctatttttgcaatatgtttccctttacaggaggaacttctattgttcgcccaccactcctcaatgattccaactatccttattggaaggttagaatgagagcttttatcaagtctcaagatgagaaagcatggaggatggttctttcaggttggtctcctcctgttgtggtagatttcgaaggtaattctaaattaaaatatgaacttgaatggtctattgaagatgata

SEQ ID NO: 354520 - DNA, 680 bp, Cannabis indica
atgaagaatgacaagttggggagctctaatggtgagctgaacttgagtagaggaaggcctcatgagaagaagccttggaacaataggggaaggagtaatagcaaagattcttccaagggtggaagatatggaaatgggaagtctccatcaagaggacagaaagatcctaaaggctgctatcactgtggtaaaccggggcatatcagaagagactgttatttttggaagagaagtaacagagaagaacagatggtagcaatggtgactcaaatcagggagaaaatcatttctcaaaggaaaagggaaagaagcatgaagccaatctaagtgatggctatgagagtggagaagtttacattactgcaactaaattcaaagaagaatggattttagattcaggatgcacttttcacatgactaataatagatctttactttctgatttcagggaatctaaaggagggaaagtcatcttaggcaacaaccaaacatgccatattgaaggctcaggtaatgtgagctttaaaatgtatgatggtattgtaagaactcttacaggggtaagatttgtgcctaacttagcaagaaatttaatttctataagtatgctagatgtgttggaatatttattttaccaggatcttagatctactcacaagtatgttgtttaaaaaccctaa

SEQ ID NO: 354521 - DNA, 596 bp, Cannabis indica
cttgactaggattgggacatgagacttgggacccgaacctagaccgggacctagacctgacctaatcctaaaccctcgccaagacctgagaccagcgatcgagtccaggatccagaccctgataaggacccaaacttgaacccagacaaagactgggaccgagacctggacccgaacccatactagaaactggactacaacccagactcgagacccgaacacgaccctgaacccaaaccaggataagaacacgaacacgaacccataataggaaaaacctgaacccagacccgaacccaaaattggacccaaccccgggactcaaactcagacccagaccaagaattaaacccaaacctagacctgcacccggacccaacctcgaactcagactgggatcagaacccaggacttacacccgaaactaaacacagactcaaatcgagatcgaaacctgggactcagacccgaaccttgacccagacccaggaccctaacccacacccagagcctgatctagacctagaccgagatccaaacccaaacccaaactcggaccaagactcgaaccctaacccaaactcgaacttggaatc

SEQ ID NO: 354522 - DNA, 696 bp, Cannabis indica
gataactaatcagattgtaaagagttttatttagggcataaaacccaacacatacaagcttcctaatagatatggatctgtagtgttataaggtcatgccatttgctctcaaaaatgtcagagctacattccaaagattggtaaacaagatgttcaaagactagatcggacgaaacgtggaagtgtacgtggatgacatgctcgtcaaattcaggaaggctgggggcatatagatgacttggaggagtgcttcaaagtcctcaagaaatacaacataaaactgagtcccttaaagtgcacggttcacatttatgttgcatggttcacatgatttatttcataattatatatataatgtataaattctatttaagtctagaacgtatgaatttgttaatgattatatgttcgaaagtttattccctgatttgtcagttcactggatttagactggcatgataatcaacgatatgtattcttacaccttggataagtggtatgtcctttccagggcattgacaaagtttaccagtatcagatgtatggagtatacatcggaaaggaccgatattgaactttgattagatatgttaaaatttaccgtaatatctattcaattcaatatcacctgttgatcctcgataaaatgatcttaatcttgatatggttaggttcgatctcaagagtactatacat

SEQ ID NO: 354523 - DNA, 1212 bp, Cannabis indica
catcacagaatggtgacacgtggcatctacttagagcacctggtcggatcaacatgccgagcaggatgcctcgctggcatgtccatgatggaatactcaacgagccgtgcagaatgagcaacacttagcgaattcaaccaagcacttcgtgagtcaccagctcaatccctataactcagggatcaacttgcgtggatgtggcatacacacgattccactatcggtgtatacggcctcaatcccacgatcctagcattcagcaatgatcacacgatctttgtgtttatgcgctttgtaacgagagaggaaactcttcctcctcaagtttcctgccctataaatagtgaggaatgttcactgggcaggggagatcgatcgaaaaactgtaaacagagatcatacgccgaaacgctataagctaaggctatctaagaattatatattcagagatattattgtaagagctataagaaaaggaatcttcttccttattcttaagtcaatacaactaacgaggattaggctattaccgaactgctcggggctgaacctctataaaatttctgtgtcttcttattattattattgctttattacgtattcttattacgacatatcgtttatcgcttatcaaaaagactcattgtcgttggctaaaagcgaagtcaacattttggtgctttcattgagagaagaatcacagatcgctctttcgacacgatggtgcaaactcgtagaggcctgtccgacccagcaaactcacagacgctggatccgatgttgcaggacccagggagtttgagggttccacccgctgtcaatcctggacagacaggaagagtggtgaatgatggaacaactactgttattgaaactgcgcctgctgtgcaagagaccggaaacaacagttccgcacacagccaagacgttcataacatgactgttccaccaggcatcaacgcccagatgaccatcggagatgcaaccgaatcgcaaaacctccgtgctgcggttggactcatgtagggtcacaacaataccctgcatcacgatcaggaggaattacatgctacaataaacctcgcgtttgatgaacagaggcgcatgttcgccgagtggagggagaaagagatggaggcattaagggctcaccatgcagaaatcgaagatcgtagtcggcaagccaatatgctgatacgaagagcctatcag

SEQ ID NO: 354524 - DNA, 967 bp, Cannabis indica
gcatagaaattgataatagggagataatcatattaggccataatcaatagaacaattgaatttcgaaaccttatttttattaactgttaatttccttattagtttaattgcttcttctttcactatttatttattttctagtttaaatcttttctatctttttatttaaccaaatagaagtaagagtttaattttaatgtacttaactacaatccttgtgggatcgacctcactcttggtgagtctattacttgtaaacgatacgtgcacttgcgtgtgcaaaatatcacaacaagtttttggcgctattgctggggattgttagttaatattattaaaaattaaatttcgttctaatttggtttttcttttcagttttagtattaattttgttgtttcaaatttttatctttttagtactaatttaggtttttttttttttttaattttactaatgttttacttatgagtttgacctgcaagataaatccagatgctatatcttgaggattttgtccaacaacacaatgaaccattctattctgcttggaggagatttaaagagcttggagagagatgttatcccactttctcaagtggatgttttacgtggctcttttataatggacttaatgatgaaacaagaaatgaggttatgatgtaataaatctgctgaataatatggcagaatttgattatgactagcattgggatccatcacttcagggttggattcaccaatacccaccttatttgccaaattcaactcaacaaactgaaaaagaggagcaactactagcacttctacaatcacttccaagagagattaatcgcttaactgacatggtgagatccttatgtgataattcaatggctcatgattcagaatgtaataactccaatgatgaaagttatgagagttgttggtacaatgaagaagggtcattatttgaatacaaggaagata

SEQ ID NO: 354525 - DNA, 646 bp, Cannabis indica
attggtagcttgttttgttgttagacaaagtttgagttttggaactcaaactttggtctttaatggtgaattttgattttgagcatgttatgttgttctgttgcttgggttatctttattgggtatattaagcaggtctggaaggtttggtgaggtttggattcaaatcggttgagattttgaatgtttgggttaccttaaccagttttacaagccctgtaaaaccgattaatcggatcagcagttggatttccaaaatttttgagttgtcgattcatgttagtttcagagctttggttggttaattctttaacagtttagggtattgccatgttaacttttagtaggaaacttttggtttaaaacctaagtctccaaatgtgatttagcttgttacttacccgtgttacgaatgatgagatttgggggcctgtaattcgccgagcagttgttccactcgttggccggcacacctaaattcataaacaaggtaacattagtataatattatgcatatgtttatacatgtttagcgtacatgttagttgacgtcagaatacgcaaatctatgccatcatattagcatatcaaggcatcggtgaggtgtacatagagatgcaccgagatgcctattggaatttatttt

SEQ ID NO: 354526 - DNA, 646 bp, Cannabis indica
aagaggcgaatgaagctgcaacaaatcggtggcgactggttttggatcaattttaggtacgagtttgtgcctaccttttgctttatatgtggtataattggtcatacagagaattattgctctcgtttgttcattcaacctgcttccaccattgttaaaccatacggtacttttatgaaagctgtaccaagaaaaactcagtatgctatgggggcaaagtggttaagatcgggctcttcaagttctggtgggcatggaggttcggtggcggctggaggcggtagcgttgggagggagtcgttccagggaaatcacggatttcatggaatatctatccctggtttttcggctacagaggtgggtggagatatgattgatgataatgggagaaatttggggaagcaatcgggtgaattggctgggagtaaggagggagatatttatggtaatattgtggctagacaggtggaatccatttcaaatttggatgaggagggtttgcttttcatggataataaaagaaagagattgggtaaggaagtggacattgggccgagtgggcctaaagaaggtttggatatggacatagggcttgattcaaatactcactcaaaaaacgttataatggcgagctcaacggaccggg

SEQ ID NO: 354527 - DNA, 1311 bp, Cannabis indica
atctgaaaccgcatcacagaagtcagctcccactgaatcccaatagtgtttgtagaacagaactgacatcccatcaggaccaggggctttatggttactcatggcgaagagaactttcttgatttcatcagggctagggccactcaccagggccatcgcatcttcgggagagattctttcagaaattaactgcgcgcaattgtactcaacaatattgtcagatcccgcaaaaatacccttaaaatactcaatgaattcacgcccaataggtcctcgaccagtaatccagactttatctttattcaaaatactctcaatggcatttcttctgcctttaatggcagctgagaggaagaagaacttagagcacttatctccatcctttagccaagacactctggctctctgcttccaatagatcgcctttctttccaaggattcattcaaagctcggcgaatgtcgcgttcctgattccaatcccgggacccagccgggaggctttgaagagagttaagtttttgctcaagctcttttatggttacgtccaattttccaaattgggaacggttccagttcaggagggccaccctggtggcaccaaccttcttaaaaaggcgagatggagcccaactgtgattgacggaattccaagcatgtgctactacaagcttgcttcgaacgtcacgcgtccaaccttcctcaaacttgaaacatctcttgaatttgggctccaagtccgaagtgaaaagacaaagaggtctatggtctgaattactcgtatgggcagagtaaagtttagcctttggaaataacttaatccaagccccattcacaaggcccttatccagagcagatttcacgtggtgtctcccagaccgatggttatcccaagtcaaaaagtccccttggatgggcaagttgataagacctctaccatcgatgagagtagaaatgaaagggataaaaggatcacggccagatgagccttctctttcagatccgctaagaacaaaattagtatctcccagaattaaccaaggcccaccaaacctatcccctagtttcaagaactcagaccaaaatttcttcttggcattcatgtaaggaggaccatacacacacgaaagaagccacgggaaggacggggggtccgagtacacgagacccgagatgtgattactcgagcaagagatacattcaaaactaaaacccgacttccaagccaaaatgattcctcccgcattaccaatagacgggacacaaatattaaagtaaaagtgtaaagactttaagatacgtaccagaggatt

SEQ ID NO: 354528 - DNA, 897 bp, Cannabis indica
aataataataataatgtatatttcattgcaagcctttaaatttcaatcacttataccaatgagtcataacacttttatatacactggataatagacctattcattctcagtatatatcatgtatctacgtactctatacattatatatatttagaggtttctctctctctctctctctctcttaaaatgagaactaataatatatatttatatatatagggtatctttaaaaaagaaagcatgtaaaagtgaagaagaagaaagaaaaacaacaaaggaagaaagtaaagaaagacacacattttgtacgtacgtagatgtacgtaacgatctatacaaccaaagaaaatttagtatccaacgtgttttattattcacctcaaaagataaaaagtatatatcgaatcgaatcatatatgagagactagaacttgtaattaattatagttttgtaagtatcatagcatcatgatttatataaatactaagtattataggatcaaatgtaatgcatgtttgtttaccggtattagagtaactattacttaattattaatttaaataataataataaaattaaatctaatataatttaattatatattttttaaaatatataaaatttttagttttaaatttatttataaaaaaatatatctaactaattttataaaatatttaaaacaagtaaatagtttaaatatttgaaataaaagaactaataaatttgttatacataaagtataattaattaattaaattaaagtctaattcaaatttaaattaaaatttatataaaaaaataaattctttaattttgttgataattttaaattaaatttaaatatttaaaattatttttttctaaaaaaaaagataattaattaattgatttaa

SEQ ID NO: 354529 - DNA, 753 bp, Cannabis indica
gcttcataatttctgaattgtgtgtgaatttatattgaaccttgtgattttctgttattaattgtagtttaatttcgcatgttcattgttggtctaacttggcttgttgttcttaatgggacaaatgctaatgaattgtcatctattagacaaacataatagtgttaggtctcgatagataaatatttgtaaatgcaacatcaagctgttcatcaatagacgacgtcttagacaagtatttacaatatgaaaaaatgaagaagtttataaaaataagaataactttgactcttgccaatcgggacatcgttggattcttatttcaaatttaaaattatcctttaatttttcctcttagcttattcattttgaattagcttaaataatatatcattggacgaatggtttataaatcatttgcttatgatatcattctgttttctcataagaaattgaatagcgcatatgattatattccagacattctatcctgaaatgatataaattcacgatcttgaatctcctattgtatatatgtttactataggcaatttaaacttagagatagattagtagtagtggtccaagctataataaaactcattgtatatttggtataaatttaagtctttgactttaaatttcagactccaaatagaaattttatatttctatttccagaatacaatacagttcaactttcacaagtgtttaatatctattttctgctaatggatttaaactgtttgttaa

SEQ ID NO: 354530 - DNA, 1357 bp, Cannabis indica
cctttaagtgttaattctaaaactgaaaatgttaactcgaaaacttaccctggtgacatggacatcagtgtttgacacatggcacgaaggatggcatcacagagttgagtagacccgagtcataacattcgacctgggagggaaccctagccctggacccaggttgatatgggatctctaggatggaagttcgaacttcaatagcttgaatccaacccactatctttcaatattatgtaccatgacaaaatggagcaacctaatccaaggttcgagagctaaaattacacgaacctgcaacccgaaagcttacttgggcaactagggctttcacctaacacctaggttgacatcctcaactagggtttcggtttctgggaccgtcttagtgcaaagtggccaaaacttgcattgggacatcaactagaaataccacatacatctttaacattagaataagattcagagcaagttaattttttagcacccaacgcccagattgacatctatcaatctgggcgtctttcaagtgtctgatcgaagatcctacttttgcattgaatctgtcttcatcaaaaacgggaaaatgggtcctttcagaggaaaaataacaattcctgggcataaaaaaaaaagggccaacgcctaggttgacacttggggctggccctgcatccagattgacacctgggactggccctgcgcccaggttgacaattttccatccttggccacaagtatgttgaattaacatcccaaatatgaattctctaaaacaatgaaaataaacatataagggtttaagaaagtgttacattggttgcatcagaataatatgactccttccgttcaagatctctagcccttgattcctttctgtagcagagcattatcaagatctgaagttggatctctttctcttctttaggtttggttaccaccgtcttacttactatgattgagtacttgacttgctatgtgtgggcgtatcactctttcactcaaggttcgaattggagaagaaccatacaagaggtttgaaatcactatggaaggaactctttcatctaggttggttgaatagtcaagttgacaagagttgacaagttgccaagaggatgagatgagagcatcatgttccttttatagtgtttcaactagggcattgggctgaattatatggattaaaaaagaataaaatattggacaaaaacacacttaaggtcggccacttaaaatgaccactttttagttacaattttgccactttatttcaaccacttattcttctttcaataataccatattttccaattcattcctataaatgccaaaattatttatttaataattataa

SEQ ID NO: 354531 - DNA, 820 bp, Cannabis indica
atggtccttcccaatttggcccaagtacttccactccgggttcctgagtggctgggaagtcccttcttaagattacatcaccaatagtaaatttcctatctttgactttggagttgaagtgtttagccaccttcttttgataagctgtcatccgtacttgagactcatcccagagtttgttaatgtaatccactgcttcttgtaataaagctttgtttgttactggatcataagtcgttctcctatgggatgggaacaaagtttccaccgggaccatagcctcacaaccgtacgccattgagaatggcgagtggccggtgtggttctaggtgtggtccggtaggcccataatacttttggcaattctttaggctagttgtttttgcagtccagcagcttcttctttagaatgacctttaggattttattgacggcttctgcttgtccatatgtttgtggccttaccactgcgaagaaaattttaatgactccgtgttggttgcagaagtcggtgaattcttcgcagtcaaactgctttccattgtctaagactatcttatgaggcaggccatatcgacacactatgtttttgataacaaaatctagtgcttttttagcatttatggtcttcatgggctcggcctctgtccactttgtaaagtagtccacggctactatagcatactttacccctccctatcctgttggtaacgacccaatgagatttatcccccacaccgcaaagggccaggggctagtcatcaaagtaatctcgttgggggggctcttggtatgtcgtgaacttttggcacgaatcaca

SEQ ID NO: 354532 - DNA, 640 bp, Cannabis indica
ttgtttgaaagaaatgattatttcattcacagctgggatttgaaatattttatcagtaatgtgatttacaatcattaatctcaaaagaacttccccaattcaattatttattttatcaatcttccaggaacatctggttttgataaaacgagttttgatgtccagggtcaatcccaaacattctcccacaatcgtttcaatattcagggtcgatctgacatatactggggttctaggtggagtaatcctggttttagttctgtctttgactgctactggttgacgtcctgttatggtaaccataacgatccagtatctactcaggtcgcaattgttttacaagtttgattttaccagagtaactgccttttgtactcttgttaccctctccctcttgagataaccaaagtgtcccttcttctcatggaagagggttataatcttcagtcactcaagttattgggcaaatcgaactgattatgggcatcttcctgcccctttatatatcgatgaaggtgtccttgcaatatgatactttttatctcatctttcaactgacgacactcttctgtggtatgaccaatatcaccatggtattcacaccgcttacttggatccctcttgcgcctcgcatgtttca

SEQ ID NO: 354533 - DNA, 780 bp, Cannabis indica
cagcaacttcagagcaccaccgccggttttcaattgggtaatttaatatttatttatttataatctatgtatagatagttatatatttatttatttatatataaatttattttttttcaagctgaatgtatatatttatttgcaaaaatatttaggaaagaaaattaaaattttaatttatagttataatgtgtgaaaatttgatgtattttaaaaatgtaatgtgttataaaattaagtgttgttgttaaagatttaatgtgtatgtaaaaaagatttggagaaaatttttttgaatagaaatgtttttgatatgtgtaaaaagcttattcattcaattagtttagttataattataaattattattaggtaaaacaaaaatttagttaaaaatttaactattctttatgcgttaagtttaagtttaattagttttatttaatcatttaattaattattaattgataattttgtgtatgtatttatttgcaggttttgggttctttgtgttgaatgaaaattgcgaaattgtagctttctttattggagataggtataatctttaaaactttataattctttgtttagtggagtttgaatatgttagatattcatccttagtgaagtaggttctgcgattaattgtactgcggtcgtattggtggaatatatatgcatggtagaagagtttgaatatcttaaatattcatccgtagtgaagtaggttctgcgaatacatgtactacagtcagatgtgtggataattttatattgttaat

SEQ ID NO: 354534 - DNA, 703 bp, Cannabis indica
taccagagccggaagtgctggcatcaagagccctcgtattcggcacctggacggtaggccttggcctgggagccctcttctcaaccgggctcccaatgcgaaggggtctcccggcagccgcctgagtcctcctctcaatcgggctcccaacgcgaaggggcctcccggcagccgcctgggccttagtgtaagccttctcctgggccttccgatagaggtactctcggtacttcctcttccgcagtagcaatgatctcatctcggaaggtcttctccgcggccggaacccttacgttcgggcagataaccttggaaaggttggagtcgtccaccgactgatgccccaggatcagcttggccttccgacaattctccgtcgtgacctatcccccgacctcaagatccgtcttgtcataagtggcgaaggtcttggcccgttggaggaagagctgagtaggcgcggtctgctcatatggagggatcctaacccattccgtgagaagctccgggtgttccacagctcggaacccggaggagaagaagaagcgatggtgatactctttgacgtgtttttgctggttgaaagggaccgggccctcattcaaagggtgggtccggaagccgttaaagccgtccttaagtttgtcccccttcttggggacagaaacgagttcataaaaatacaaaatctctgccggactgg

SEQ ID NO: 354535 - DNA, 898 bp, Cannabis indica
accaaattgtaacaccgtaactattttaagcatgttaacgtgatttttgacttactgtgcagctcgttgctaatcaacgaggttattgaaaatcgtaatagattaaaattttgcttaactaattaaaaacataaaatagcatacatatataattctgggatcccatttacaaaagcatttataaaattttcactgtacatatacaaaagtttgtcacctagcgactatacaaaataagccctgatgtcccaaaaaccgtacgctccaggcctaactaccccgacatgtacaatccccatctgctcactctcactgctgctcagccttagccttgccctaacctacacatggaaataacacttgtgagtcaatagactcggtaagaaaagcataacataaaacataataatatcccgggttataatcagtcgtccatacacccgcccgtgtcccacacagtaccgagtctagaatttgacaatactatcgaccataatggcaatttatactcaatatgccagtcatactccagccatgttaatgtgacagcatcgatcagtatttcagccaacatacatttatcagtaatcaatacaactctacgtatactattactactatcaatgtactctaacaggcataaacaacatgtatgttaaacatgtaattacatatggatgacattatactaatcttaccttatttccgaatttaggtgtgccgcccaacctgagtggaacaacagctcagtgaattacaggtccctaaaatcacatcgatgataacatagataactaagatgtggttgtaatagccaaacaacgcgttccaatgttgtcgggcacaaatatgcaaaattataaaattccctatatgacatataaaatgcattcttaat

SEQ ID NO: 354536 - DNA, 504 bp, Cannabis indica
gttgactttgaaacaaatctactcagtgcggctatctgacaagttaagctttggacttccttagttttgttggcgatttcatatcgaggagggcttgtatttctctgtattggcttcgataccctgagcattaataataaaaccaagaaacttacctgatctgactccaaatgagcagtttaagggattgagtatcatgttgtattttgtaaggattttgaagcattcatccaagtcctctatatgcccccccagccttcctggatttgacgagcatgtcatccacgtatacctccatatttcatctgatccggtctttaaatattttgttcaccagcctctagtaggtagctccaacattttttagaccgaacaacataactttaaagtagtacagacccatatctattcagaaacttgtgtgttcttggttggtggatgcattccgatttgattataccccgaataggcgtccataaagcttaggatctcgtgttcggctat

SEQ ID NO: 354537 - DNA, 1136 bp, Cannabis indica
agcctaaattgcaacaaaaaaatgtacaaaaatccttattacaactaacgctacaaccactttagaaatccaaaccgtaaatttaaaagaaaaattaaaaaaatagtacactgaataattcttaattttttttttaaatgtaattcagagtagatgatcaagtgcaatgcattgtatattattgtcagatgagagaagctctaagacgcaaaacagagagttgaataatgtggcaatgaaccttgggacttggattggaggggccattctatgtggtatgaccttaagctttttcaaccgagaaatttaagggcatttttggaatttcaaaacctaatcaaacaaacagcactaagagctcatttggaggatgaagacaaaaggataggtcaaagagtcacaatgtcacattctctattatttgtttgataagtaagattagactcaactagactatcttatcgacatatagaatttcactaaattagattgtataacttatctaattttatgtttggaaataactaatttagttagtcccattcttttatccatatgggtgatcttctctttttattattattttttttaaatggaatttatgatagataatcaatttacatccgcaattataatatctcgtaaagaagaaggagcattatgctcatagaaggtacgatctgacgaaaaacaagaccccctagcaacacaataggcgaccctattagcagaaggattaacaaaataaatttggacattatttaaagtagataaaattaaacgacagtttccactaacaaatcaaactgagatggcatatgaagtatactagttattgcttggacaacaactaaagcatcagattcaacaaccaccttatcccaacctttacccttgatccaactcaacgcttccttgataccaattacctcagcaatttcaggaagcacacagcccaacctactccctgaaacagcttcaataagagtaccatttgctattccgagctacccaaccaaagccaaacttctgttgcgcttcgaagatggctccatcgacattcaccttggcagtatcatgatctggtttagcccaaagattgctattagtaacatcacccgtagcaaaataagcat

SEQ ID NO: 354538 - DNA, 607 bp, Cannabis indica
tcataaacaattaaacaaaaaattgctcatttataacttcaactaaaatatttatttttacaggtagaaacgtcaaacctgcttgtatacaaagtacatgattataccgactattacatagtaaacctagataacaaaacttacagatgttagaaatttgaatatgattaaatgccttgctcacatacaatgcttgtataaagctcaacacacatcttcttcctagtaaactctgaaccaaattcataaccattaaactccttcctcataccatgcacaaaaaggtcaacacacatcttcttctgaacaacattcatattcaaagatttggggacatggttgataatttcatgtataaagtattcaacatactttataacgaatataccacactcacaacaaaaaatacaaaaacaacacacatataatatcgtaaactatataattaataaatatatatataaagtaaacaacatagttaccactgatcttgttgtgacagtatatccacaaacacaacttccaacgaatctgtctcactactccctaaaaataccttgtgtttctgtcaatattcgacctctgaccatagaagttcacatgagat

SEQ ID NO: 354539 - DNA, 600 bp, Cannabis indica
aacttgcgatgcatattgttttcgacttcattaacaagggcagcaagtagttggtttgacaagtttaccaaccattccataacttcttggaagtaattgtcaaaagatttcaaaaaatagtttcaagctacgagagatcgtccaaaatcatcttcattgactaatgttaagcaacaaccaggagaatcccttaaggcgtacttaagtcgttttactacagttgtagccaaagtcaaaaatttgaatgacaatatttaattaacatcccttcaggctggaattacaactaacttggcaatcgcagggggagagttatgggatgatttgcaaggacgtcctataagaaatataaacaaattgaatgaaagagtgcagagttttgtgcaaaaagaagaggcacaaaatgaaatcaagctgttaaagtcaggctcgggagataaagccagcactagtacaacaacagtgagcactgtgaccactaaaatggaaactccaaatggttagaataccaagaggaaggacgagtcaagagactcatccaaggataagaaaaagcaaaagaaacataaaaagtatgttcctatttattcagtatatact

SEQ ID NO: 354540 - DNA, 848 bp, Cannabis indica
atctaataatgacattaatgtgttagaggcatcccatctttttgctaatctggctgaaggtattgctccacccgctaattatgttattaaaggaaaagagtacaatatgggttattatttagccgatggtatatatccaaaatggtccactcttgttcaaactatccatgatccacgtggtccaaaaaagaaactatttacaatgaaacaagaagcatgtagaaaagatgttgaacgtgcatttggagtattgcaatctagatttacaattattgctggaccagcacgtctttggaataaaacggttttacatgatataatgacttcatgtattattatgcataatatgataatagaagatgaacgtgatctaaatgcaccaattaaagagcgtgtcgaagtgccaagtccagaagttgagatgctagaagatgataatgctcggtttcaagaatttcttgccagacatagaaaaattaaagataaagaagctcacattgagcttcgaaatgcattaatcgaacacttgtgggacgaatatggtaactcacaaaattaatataatttaattaatttcaagtgtgtgtttcaagtttaatttaatttaatgtaatttttttcgtcatgaatgtaatgtttgttctctagtaatgtaatatttatgttattgcaatatgatattttaatttatcgaatttcgccgattttacagtattattgtctttaatcacattagtaagtttatttaaattattagttaaatataacaattgtggtaatttttgttaattaatatgatattatttttttattttattaaaaaattaatataataataaggaatattt

SEQ ID NO: 354541 - DNA, 535 bp, Cannabis indica
ttttttagtgtaatttttggtgttgtggttggagtagaaataatttttgacaccaaatttggtgtctccttggagatgctcttagacacctaatatgtactccttctcttgcagttacctcatccaccttaaaatacgttaaaatcattagtgaaattcctgagcctttaagagtgataatttcaaaatctggaaggaacgagttcttattcacttagcttgtgctgacatagactacacaataaggaaggacgaacatattgttgtcattgcgaccaaaactgctgctaagattgtactacgtgagaagtgggagcaatctaatgatctttgaatcatgttcatcatgtctaaaatttctatgggaatgtctaggttggtggagccacctgaaaaggtcaaagacttgatcaaattgatggatgagcagttagacatctcttataagtttgtattcaaaaacctcattcaagagttctcatccacaaaactcactggtgttaaagaagtttgagaacacatctcaaagatgagg

SEQ ID NO: 354542 - DNA, 602 bp, Cannabis indica
tgcaggttcaccctggaggaatagtcaagaccggtggcgtagtggacttgcaggaacagacttgcacttgcggcttgttccagtgcatgaagttttcttatcctcatgcatgtgctgccgctcagcaatgaagtattagcatgtatgcactatgctcgccatattacacaacagaatataggaggagcacatatgaaggtacaattatgccagttggtgacgaggatgattgggaattgcctgatgacataaagaacatgacagttggagtgtctgttgagaaacaaccagtatggggacccaagaagcaaaaggttggaagaattaagtcaaattgaactgcttgtaatggtgaaaggattatcataccacaaaattgtggcaagtgcggtgccaaggggcacaataaaagcacttgcacataccgaggttaaaaatgaatttgtaatttacctgtactgggatgtgttatactattatgtattgttattgaattcatgttggacttttttaaacattataatttgtggtattttcttttttgataactattataatttgtggcatagttggaaggcctaaaattgttatgagctaataaa

SEQ ID NO: 354543 - DNA, 688 bp, Cannabis indica
ccaatatatttaggactcacaatataatattggcttacaatcagtctaaaattcaaagtaacctgtaggggtggatatataatgtagtttaaaatgataatattcgggatggtattgttaatcttataacttggcactgaataatttatcaatgaaatttgcacattactaaaagaaattgactttttctgcctcaaaaagattataaagtatatgaattcattggagtgttctcgttattactatgaacagaatatggacaacagattcctattgatgttttaacgtgaatggtcgatcaatccaatgaatttcctatgctgtgacatcaccatctgcctttataaatggctgtgaatattatctaattcgtttaatatacattgttttggtcaaaatattattatttgcttctgataaaattaacaataataaactagataacttattcaacatgaatacatactcaggttttttttttgtttttttttttttttttttttgtttattttttacggaattatacagagaaatctctattgcaactagcgctgcaaccactttagaaatccaaacgagaaatttaaaaaaaaataaaaaaaaaataatatattggataatttttatgtttttttttttggaaaaaattacacattccaataatatttataatatgatattgaaaaac

SEQ ID NO: 354544 - DNA, 1347 bp, Cannabis indica
tttctgtgtagaactgggtaatcttagaaaaataggcctgaaatttgtataaccgtgggctttaggaaggtaagtttgaatattcgcacctttcctgcttgtttatttcttgaatacacgtgggtattcggatgaacacttcgaatactcgcatacctgcttactttaggttttacatagactttatcactcctagtcattgtttagaacctaaggttttatattctctgcatattttgtcgtgggaacattggttaagtctttcaaatggtgggcgtgtcgcaatattccattgctcatacatgcgatcgtatgttccttgagatactacgatacgcccagccatttacgacatacgccagtatttcctgttccagtataagcgtattcttcgactagtaggtttgctcgaaatcgtgggtgtttccaagtaacttcagggtcatactcgaaaatgtatgccccttgggtcactgggatacacccagccattttttgaggtacattgctagtcggatatgcgtgacaaattcgcaggttgtgattggttaggttcctcgaaacggtgggtgtcccccagccgttttttgagatatccttctattcgcacacctgcgatttcgtgccttggtgggctgattggttttcgcaagaattcgaatcagccttctaagaaaattttaaattttatatgcgggtgaggtcacttatcttgttttggcacattcaccacgctgaaaagatcttctatctttcagatgagcgatctgtcggacagccaaatgcttggctcaggaggcgacgcattcgatggcgatcaggaccattaggagaatagcttcatcccgacttcgatctcagaagatgagatccctactgcggagacacagagctgggtccgttgtcttctgcggacatcgagaggatggtacaagagatcgctgaactagggactatcgagattcgagatagcgagtctacgttgtcagctcgtgaccacctcgttcattccaggcatgctcctgacgtcgaggtcgaggagatggacgaagactggatggccccagatcgcgagtgagatgaggaagaggatgcggaggaaagtgggactgattcagtgggtaacactcaattggatgagcctttctcatgcgagaactcgttctcgcgagtcaccaactcggatcttacaacttttacaagattaaatctgctgcggcttgcttccttgcatcctcgccctacccagagagcgcacctttcttttactaacccagcggtcatacttcagaggatgtggtagtctcaatacccattctttcgatgtggagtatcgatccctttcca

SEQ ID NO: 354545 - DNA, 1010 bp, Cannabis indica
ttttaatcgacgaggaagaggaagtagaagaagaaggcgagattctccctcccttggaccggaagcgcaaaggaaagacggtggagactgaggttgctaaaaagccaaggcgagtagacactccggctcccagctttgacttagggattccgtccgaggtggacgagtatactgttcctcctcgtatcgtcttaaaccccattcctactgatgaggaaagaacccaactctggatcgccaagcacaactatgccacgacagagtacacaaaggggaacgccgaggtggagaccctgaaaaagattctgagggaggcccaagatagttttactcgtagtgagtacgtcaggaatgtctgggatttaaatctggatcccttgactgactggttcaatcgcttcattggacctaccctggctccttttgccttagaattgatgagccactttgctgtcggcctggttcagctcctgatgaagagatacgcgacctgcgcttttaccaatcccgtctatcaaatccaggatgtgagcgcagcccttaccgcggtaagttcctatctatttagagatatttttaagctttttttgacacctgatatcatgtattcatatatattttttgttgtcagattgctgcagagaccggtcatctttcgaagactttaattaaccatgggtataccatgtccgagtttgggggcatggaggaggctatgaagagtcttcgggagtcagaggcgcaaaagagggctatccgggaggaagcccagcagaaagaggcccttatggagcagagccaccaggaggcgctgaaggttaaggacaaggcgttgaaggccaaggatgcgactgtggccacaacgaggcgggaccttcgggattctaaagaggcagtgcaggaattgaccgccaagttgaagtctctagaggagctgcaccaagcgaatttgcaaacgacaaccaacctaactgttgaagtgaaggggcttcgtgagtttaaggagcatg

SEQ ID NO: 354546 - DNA, 776 bp, Cannabis indica
tttttttggggtttttttttttagagcttatgttattggggttcatatcgttgttactaacggtgggacaaagtccgatctcaaatatttgtatatctgagaaaattggggggacatggcatccttgtaataaagaacaagaagagaaattgaataaaggggctgaagaatctgatgtcgaacatgaaagtaacagtcggagattgctggcctttttagagtccggcgacggtgctgccagtgtccggcgaattttggcggcggccgggactgataagtgtgctgaaaaggtaaatagtaatccaaaatcttcttttcttcttttctctctctttcttatccttttatttggacagattcgtccaatcatataatattataggagttttatttgtattctaaaaattataaatcaaccttcaaatttatatatttagtttttttttttgagaaaaagtcttatatatttataaaaaatatttataaaataaaagtaaattatattttaaatattataaaaaaattaaaattaaaattacgtgaaattttattaaaaaaaattatgaaagtaaaataaaattaaatatgaaaattaatataaaatacagtgagaaaaattttaaaaataaattttaaaattattagatttaattttttttaaaatattaaagtgtatttattatttttatatatttatgtgtataccccttagagcaactccaaagagccttcaaatttaaggttgcagtgggtaatcttctccaacgtagcagcat

SEQ ID NO: 354547 - DNA, 1117 bp, Cannabis indica
tactattttgtcaattcaaaataaatttttccgaacatatttatacaactctttattcctacccttgacagtatttcaaggtggcgattcagggaccgtggacatataattttaagctccaataaactagactatacatttatttagtctcatcaaccaaataattcctcgtttattaattccatgattactccactataaatatggaattgaattcttagtaattatagaattatatttactgagttttactgtagtgtccattgatataatcaattccaatgattacccctccatgtgttggtacgtaattagttttggtcaaattaccattttacccttctaattatttctttatcctttagttctattaattcactggtggaagtataattcaagatcccatccaaatttgcacgtaactttctagtaccaaaataaacacgaaccaacattcgacctgttaagaaagtcaagattataaaattgtagatcatgttccaagccatctatattattagattcctaaaacagaagttgtaagaatcatcttctctgagaaactttaacgagtaaatcaaaaaactaataacatgaataggagttcatgattactcgggatttaagttgatctactattaatcatcattataatatgaattaggtctttatgataaacgacgtgttaataatgatagctttattcatattaattcttgtcatatataatctctattatatacagcacattcacttagatatctcactgtacatcagttatccgaactaagattacttgcaccgtagaacagacatcaatgaaccttactagcaacccttgattaaagttccataactttaatatgttgctgattgtcttattcatagttaactggtcttagttttttgtacaactacaaaccacaacctcatatatgaataagggaaatttgaaaaactatccttaaaaatctctaaatttatttccctaaatctatacctattaaaattgtccatttatgactccatttgatttttccccataatacccctcccatttgaaaaacaaatcccaatcaaaataaaaaattactctctctctctccctctcggtgac

SEQ ID NO: 354548 - DNA, 1038 bp, Cannabis indica
aaaaacagcccttggttttgttgttcagttctaattttgttgctgtatttttgtggtgtactgatctgatgttatctctgttgttgtactgatttggtatttatatgtgttatagaggaatgcagaaaaacatgagagttagttacaaagtggttaaaaaactttgtaactaacttaagtgttttgcctaggtatattagaggtcgaaggccacctagggaatatttttttactatttgtaatctctttttaaattttggtttttacagtgaacatggaatgagggggtttataccaacaaagagttatatcttagatcttcttaaatagatgatttacatattttaaataggatgactcacatatctcgaacatcttagatcttgttaaatagatgatttacatattttaaacaagatgactcacatatttcggacgagatgacttatatatatcggattggatgactaacatctctccgacatataattcacatatctcaaacaaatcgaatcacatatctcaaataagatgattcgtatatttcggacgtatgacttacatatcttagacggaatgactaacttatctcttacggatgacataatgatttcgaataggataacttatacatctgacggatctcaaatgagatgagttacacatatctgacggatgacttatacatctcggccaatatgagagattttcttgaaaggaagagaatatagaatatgaacactcaagagaggataaatgagacatgtaatgatgtaaagatatgtaatgcacttaaggttgacaactaagaataaaagagaatgataaaaagaagtagaaatagagtaaggagcgtcaaaggctgaaaagaattaagaatgaacaaaataaatagttccaacaaatacaaattaactgagatctgcggtcaaaacaattatttcttcatagtatatattattatcatataagtatgctattcttttttctatatgtatctattgtgtaggtggtgtttttattaagtttttttttttt

SEQ ID NO: 354549 - DNA, 655 bp, Cannabis indica
ataccatattttttctaacataagggcccaaaaaaattttctttccctatggcccactttgtttcagggcgggccctgcatccaaccatggtatatggttgggaaattttgtcactgggttgcacattgtggatggaattgaaagaccacttaagttgtattgtgacaataagtcagttgtattgtattccaacaacaataggagctcggcgaagtcaaaacatattgacattaagttccttgttgtaaaagaaagggtacagagtggacagatttgtatagaacacttaggtacaaactccatgattgtagaccctcttactaagggtttgccaccaaaggtctttcataagcacactgctcgtatgggtgttttagattatgagaatatctagattaagtgggagtttgtctttattatccttagtgtgttttatttgtttcatgaaacatatttatttggatagttttctgatcgaaaattatgttactaagtttatttcactttgtacatttaagctaaagttttgatctccataaagtaaagtaggaccaattgaaaattgacatgaatagatcaccatgcatgtaattttcataccacattatcttgattgatgtatgtcatttggctatgttgatatatgtgaccatt

SEQ ID NO: 354550 - DNA, 548 bp, Cannabis indica
gacggggactcacccacctggcgcccaagggaccctgcctcctgtgaggaaccgcctcagcaagctcctcactgacgtaatcaatgccctcaaccaggacgtccccgtcagcatcaattggttgcccagcctcattgtactccccataattaggaggttcaatctcttcctttccgtcagcagcgggagggctgctcggacgcgcctcatccagctcctcaacctcctggacttcggcgtccccctcacggtcctcctccattaggaccaccaaattttgttcggcgtcaggcagagtggcaagccgagccacctgggggtcagaagtgtcagccagaaacgtagttttcttcgtacgagccatcatcctatggctgggtacggaatcagaagaatatccttctcttgaaggagaatcagcacgaagacgagggtggacttcgtgcagaagttgaagcagctcctggtcgatttgatgctcgggctcccaagactcacctgggttcttctacaaaagacaacacgcaagatgagtgttggatggagta

SEQ ID NO: 354551 - DNA, 677 bp, Cannabis indica
cctcatggtccgaaccatccagcccagttgatccttgtcaacctgtcgtccttcgaggacccattgtcggaggactggtaaaaccgaggcctttgggtctcggatgtgttgaatacggtggaacagagagtctgagccagaagaagaagaagaagtcgaatgaggaggtttctcaggggttttagcagagaagaggggagtataagcccgagggtagttgtgaagattgtactggaaccgaaaggaagcgggcttgatcagatagtgaagcttcatcatattcaatggctaatggcttcgcttaactggctcacaaactaacacttgtttttttttttttttttttttttctaaacaagattacattctaccggtggcgggtgttgcagagtgggtggattgtaattttttttaaaaaatgacgcatatcaaagttttgtaatttcttaaactgcaattgtattttcataggttgtacagtcatgatgtctttatatgaaacttttggaaacatatacaagtggcctcttatgttttgtattatggtttaccctgattgtttacggtgggcaagtctccatggtaagcagaaagtaattctgttactgcagaaatcagttttgaacaaaacagaataggtagaatatagaaatatttgcagaaaaataaataacttg

SEQ ID NO: 354552 - DNA, 475 bp, Cannabis indica
ctagaaaagaagtaaagtttatgtgggatgatagttgtgaagaagctttcagagaattgacggaaagattaactgtagtgtctgttctcactgttcctaatagtgaggaaccatatgtggtattcactgatgcttcaagtactggattaggaggtgtcctcatgtaaaatggcaaggtggttgccgatgcttctcgataactgaaaccaaatgagaagaattaccctacgcatgacctagaacttgttgcggtaatctttgtcttaaaaatttggagatgttatttatatggtgtaaagtttgagttatactcagatcataagagcttgaagtatctttttactcaaagggacttgaacttgaggcaaagagatgggttgagtatatggaggactatgatttcactttgcagtactatcctgggaaagctaatgtagtagctgatgcactagcataagcctcatggtactttggc

SEQ ID NO: 354553 - DNA, 749 bp, Cannabis indica
tttttattattattattacttatgtgttatttttcagtttcttctgagttaacgaaatatgttgatgtctaactaattttttaaattagagtggattattctctagttgtttatttgttattatttagttgttcaattaagaaaaaaataaatatatttaatatttcatgggcatatttattaagattatttttatgttgattttataacaataaagtctcatgtttgttacaaaactagtatgttcttagtcaggaatatgtattttaatgtggttatatctagaataagcatccataaaagtcatcagctcgtgtcctgttgttgcatccactaactggtcgatcctggtagtgggaaacaacctttaagacacgccttattcaagtctaaaaaatcgatacaagtccttcaagtaccgtttggttttggtacaagaattgggtttgagatccacaagggatagaaggcctcgtgtatgatgtcatcagtcaacaacttgtcaacctcttctttaagtgcctcttgtctctcagagtctaatggtcgtcgtttctgtctttttgttggatagctggggtcgatgtttaaatgatgacaaattacattaaggtttatccctatcatatctgagtggctccaggcaaattgatcctggttagcctttaaaaaatcaattaattgctattttagtttttcttccaaatttttccagtgtatacacaatctgtgggattatttggatctaa

SEQ ID NO: 354554 - DNA, 1204 bp, Cannabis indica
gcaggggtgtgtgaactaggtgtggtagtagcatttatttgaagttgagttgaggtggagtcatccattagaagaagaagacgattaaaaaaattgtaatttgcaataagttcaggtttaaattcctagctctaataccatgtaattttatagaattggttttcttaattttatttcataacagctgcataagcatatatattacaaaaaatttaacaattcaacaaaataaaaaccttaaaaataggagctgactaacaattaattcctagatttatagtaacaacctaagaataactttacacgatttaattcacatataaaaatctcttgtcaaagtataaatataaagttgggagaaaaattagcatttcatataaatatattagttttttttttaacgtaaagacccaaaaggttacaaagggaaagggtatgggtcttggctattccaacaccatgtgttatctaaccctatggacatttgtgccaaattatgagctgttgtattcccttgccgtcgagtatggtgaagggttacagtggggagtgaagataacatccgtcgaatagcattgattatggttccatagcttgaaagattatcatcagttgattgtaaatccgtgagtaggttgttgcagtccacttcgatatgatcaatattaattccattgtcacggctccatttaaggccttcccacaaaacccagccttctgctactttaggttgcatttgtcccacgcgactgaaagctgttgctgcaattattttcccagtatggtcacgaactatcaccccacctcctgttttattctggtggctagacactgcaacatcagtgttgagtttgagggttcccactggtggtggttcccaagtcaaattttttaggtctgaggtagattggggctgttgcatctgcttgtcttgagctgcttgataaaagtccaagtaatcttgggcttcttgttcaatgcgcattggatttgagacttggttcctgaaaacagctgtatttcttgcattccaacacttccataacatacaaagaaaaaggttaaaggcacctgttgaaaaattaagctgcatgtataaaatgatatctaacatgttcaagtgtttggtatcctgtatggtagagttaaaagacgtacctgaccaagccttctttatattcttgcactcaaacaaagcatgttg

SEQ ID NO: 354555 - DNA, 512 bp, Cannabis indica
atttataattgtgcaatataaagatgtaaaaaaaatataattattattgattatcatttaatattgtattgaaaatatacaaacatcattattttttatttttttactgcttaaataatagtaatatagtaaataaaaaagataaagttatgtaaaagtcaataaatcataataattagtgacattataataaataaaagggtagaatttattgtaggctaaatttggtacaatgctatattttgtgtcaaattttttacaattttcagcatgtgtcaaatttggcacactttttagaatactattgggagcaaattacactttataccctttttatattgttctcttttattttggtcctttttttttaaagtctatcatttttacctctttttttaaacattgtaccaattttatctctgtcacttcaagatactcttcatgtgactctcttatgtcagagtattttgagtacaatacatataaaaagaggtatgtttcaattaaatata

SEQ ID NO: 354556 - DNA, 621 bp, Cannabis indica
tatcaggatctaaaaccctacttttggtggtataagatgaaaagagatgtggtagactacgtgtccaagtgcttaacctgccaacaaatcaaagctaaacatcaaaggccagcagggttattgaaaccattatctcttcttgagtggaagtgggaggatattgagatggatttcgtaactggttttcctagaaccacaggaatgtatgattcggtatgggtcatagtggacagattcacaaaatcagctcactttctgctagtgaaagttacttatgcagtggatcagcacgctgaactgtatgtaaaggagatagttcgtctccatggagctcttaaatccattgtttcagatagagatccaaagtttacatcaaagttttgggtgagtcttcagagaactatgggtacaaagctgaagtttagcacagcttttcacccttaaactgatgggcaatcaaaaggaacaattcaaatactggaagatttattgcgagcctgtgtcatggactttgagggttcatggagtaagttcttgcctctaattgaattctcctacaacaatagctaccagagtacaatagggatggctccctacgagatgctatatggtagaaaatgt

SEQ ID NO: 354557 - DNA, 676 bp, Cannabis indica
cgggcagcttttaatcccggtactatatgctcttgttatccttaatgaatttcattctctgtttataattgtcgtgcaattgtgattgttttatgtttaccaaatgctttgtacaggtataggtgccccccaagtgaccgagcagacgtatgactcttggtcacttgtctttcgcaaatatattgcttttctgttcggtgttttgggttcgactaaaccttttgtacgcactttaggtaaattataatcatgctgattttttcgactcaatagaattggaaatactatctttattcttttattgatcgaaaatgtatttgttaccgtagtaacttacatcagagctagtgatctaatttgatctttttagcttaacatgacataaaacaaataagaaactgtactttaaagtggtctacccgacctgagtactttgtttctgaagcctttgcgcgtagtccgcccaagaggccattcacttagaagcgaatgttcaatagtactttaatgtggtctacccgacctgagtactttgaaatggtctatccgacctgagtactttgaagtgatctacccgacttgagtactctattggtagtatttccttaaatgttctccattccagtaccgtggtactagaatgagttgcattttttcgtcatacttacccagtttg

SEQ ID NO: 354558 - DNA, 565 bp, Cannabis indica
tgaagaagggaatgcatttgtctgtggaccgggagataaaatggctcagggcagcaacctttccggttagactctggacatctttgtgtttctttggggaaggcatgctcaggagagcttgaattttttctggattcgcctcaattcccctctgactgacgatgaagcccagaaacttccctaaattaaccccaaaagtgcatttctttgggttgagttttattccgtatctccggactacttcgaagcattcttctaggtcgtgcgcatggctagtgcacgcttttgactttactagcatgccgtccacgtatacctcaatattttgccccaggcggcctttgaacatctggttcaccatcctttgataagttgcacccgcattcttcagttcgaaaggcatgactaagtagcagtatacccccttcgtgcattttaatctggttgtaaccggcgtacgcgtccatgaaggacagtagcttggacccggaggtggcatccaccatctggtcgatccttggcaaagggaaacaatcttttgggcaggctttgtttagatcggtaa

SEQ ID NO: 354559 - DNA, 660 bp, Cannabis indica
tctccaaaaggtggattaggtctatgtcgatcagaattgacgatagggagttaagtgctgacctaatagagatgagcttagtagattttgatatcatacttggaatggatttcctatccaagtattcagcagtattgactataagaggaagatggtaatcttccaaccagaaggtgaggaaccgtttgtttttgtcggttcggttcacggatctcggatcccggtgatttcggccctgtcaactagagaattattgtgtgacggttgtctagggtttctggctgtggtggtggacaccactcgaccagacactatttggccatcggatatcaaggtggttcgggaatttctagatgtttttcccgaagaactttcgggtttaccacctcagcgggagattgatttttttattgacttagcacccatagtggaaccggtttccaaggctccttatagaatggctccagctgagcttaaagaattgaaaattcagcttcaagggttacttgacataggctttattcggcctagtgtgtcaccccggggagctccggtattatttgtcaagaagaaggatgggtctatgagaatgtgcatcgactatcgggagttaaacaagttaacagttaagaataaatatccattacctaggattgatga

SEQ ID NO: 354560 - DNA, 1300 bp, Cannabis indica
taataattaatttttagttattaaataattagaattggcatttagatggttaaattggaaaattgacattttttagaaaatgagatgtagaaatgataaaatggcaaaattgtaaagtggggcccattatcctttaaatggtcagccactatgtagtcaatttatcatttatttttttctattattttaattgccaaataaatctaacctaaccttaggtggtttgctataaataggtagtgatggcttcaggaaaaagaatgatgcatctcattccttcagagaaaactcaaagccttcttcctatacctagccgccaccttctctctcttcctctcttctgaaaactgaacccaatcatagtgtggaagattgtgaagaatccaaattcaagagaaggacattcgggctcagatcttggtgatactctgctatagaaagaatacaagggttagagatctaagtggaaggagatattatattccggtgcaatcaatgtacggtttcttgtactttgtatgtgtttatttcatatcgttttagaagttcatatttaggatgttaaataacatacttgttagtaaatctaagatcctggtaaaatattttcaacaaccatatggtaacaagtaaagcctaagggagcaaccaagtaggcagaacaaattcgtcaaaactacacccgagcaaataagaaaggtggagcccgtaccaaaacatactttggcgaagagaatgaggaagaactcaaaacctctaacgataagaaaggtcaacaataatggccttaaggaacgacgacattaagaggttttctatcaataaataacccagaaccttgtcgaaaaggagttgcctacttgtcaaatatttaccaactggagctacctccagggacagtaaaaaaggaccttgcaagcatgttctacctgttgggctttgtgccctaaataaaattctatttcaatgtatcttttctattcaattatcaataaagaaatagatttattttcattacttattgagtatgttatttggttcatgtgatcatttatatgtttatttgatttataaattcatctaaatccttatcacatttatattcttgtttattgtgttgtcagcatactggaatgtaatcaagattttgtgattaaatgtattcctatgatttatcagtacacagggtttgactgatatgataaactacaatatagtactttacttgcaccttggataagtgttatgtcctttccagggtattggttaaagtaagcttgggtatgcatggagtatgcat

SEQ ID NO: 354561 - DNA, 724 bp, Cannabis indica
atgtaccacggaatacattcggtgaaagtgcatcacgggacaaaatcatatcccataatttattataatattattactattgttactgttttttttattattttttaagtaattttttaattacgaatagtgttgataaaaactaattagttacctttatatacaaaaaattttttatatcatataatatattttcattacctctaaaatttatatgtatacatcttagttattaattagttattttttaagttatattgtggtagattataatttaaaatacatttatataatcttaaaaattactttagaaactaatgagttatcatgttatataatgaactattatttttaaataccaattatttacatgtatttttgttattttaaaagttatttagggtgcgtttggaagtaactgtgtaattactaagtagggtaattactagggtgataattacacattgtagtaattacactatattttaaaatgcaaggtgtgtttggatatgaggtggtaattacatatgaattcttaatatcttgtttggcaaaatagttggtaattacatgggaaaataatatttttagtagttaatgtttaataaggaaagtttttagtaattacacagtgtaattacatttaattctcatgggggaccatgagaattggagagtgtaattggaacccctcaattacttccaattacacagttacagtgta

SEQ ID NO: 354562 - DNA, 534 bp, Cannabis indica
tcctgaaccctagtatggacctatataaaatttaaccctaaaaactaccaaaactagatgagatgacaacgatacaaacaaactaagtaataaatccacacaatgtaacaaacatgagaaagaagaaagcaacttactgtttgaagttaaggcttggggcaatgattggtactctgtctgcaaatcttcgaacgaagcaaggatcacattgagaggatgaagtcggaagaaactcgtagaaaaaaggtcaaggacaaagatggcatgcaagtcctcggacaaactaaatggtgatccttgatgaagaagcttaagagttttttcagactttctaaaatgaaggaaataatgcaaaggtggtcccttttttcttactctatgcccatgatagtggcttcgttagatgagagaagggtttgatcctatggacataattcaaagtagaagtggaaaagatggtcatttaattctgatgtacctcgaaaccgcataaccgccaaaatcaaaggacatgtgtcttttcaaaaaagagga

SEQ ID NO: 354563 - DNA, 607 bp, Cannabis indica
cctgatgcaatttctaagtataaagaagctgagacaatatttttgaagttctcactcagaaggaggtgttttggcgtcaacgatcgaaacaattgtggcttcaggagggggataaaaatagcaaattctttcatgcaatggcttcttctcggcgccgtatgaatgctattgataaactccaatgtgaagatggaagctgggttgactgggattcgggattatttgatgtcatgtgttcttacttccagaatctgtttactagctctaactgttctatggatgatgttcttgatgggatttctgcaactgtgactccacttcagaatgactctctcttgcaacccttgacggatgaggaagtgaaagaggctttatttcagatgcacccagataaatcccctggacccgatggcatgactccgggtttttatcaaaagtgctggtcaattgtgggtaatgatgtcatcaaacaggtccgctcttttttcttatttggtcagctgcctacgggtctcaatcatactaatttagtgttgattcctaagaagaaaaatgccactactatgggtgatatgcgcccgattgctctttgtaatgtcctctacaa

SEQ ID NO: 354564 - DNA, 773 bp, Cannabis indica
gtgatgaacacctcagtaatttgtttaggctcaataacacgcactccatcttctctaacaatagacaatatctgattttgtctctgcctctgcttgatgctcgcatgaaagagagctgagttgctatccccttgttgaatccaagcagccttggccttctgctgaagaaaggagaaataattcttaatagcagcattatacttctctcgcgcatttgattctacttcatgtaagtcagcattcaaagggtcatgttggagcttatcttgcaggtcatttagatcagcttttgattgttcaaacaatgcctggacatcagaaaatccttctctattgatctctgtaagtgtaacctttaactccttcaacttgcttatcaactggtacatcctagttcctctcctttccttgtgccaaacttccgaaaccttattaatataattaggatgagaagaccacatcctaaaatatttaaaagcttttttcccgcttctccatcttggatgtaaagataaaatggctggagtgtgataaaaaatcccttcatttaggagcattgcctcaacatttggatattgatccagccactcttgattagctaaaattcgatcaatctttgaacaaattctatctcttccttgctgtttattagaccatgtgaaataacagctagttgctttaacatcttcaatttgacactgctgaacacattgtatgaaatctgcatccggatgatagcatactctatgtcccactctttcttctttggctaa

SEQ ID NO: 354565 - DNA, 890 bp, Cannabis indica
agttctcctcctctcgccaacattcgttgcatctgggagacctggttgaagtcaagcaaagactaggcgaacctctcagagcatatatcagcaaattcatgacggaggcgaccaaagtttcacgaataactgaagatggaaagttatccgcgatactggggggcattgaagtggtcggtgaactttggaaggatataaggaagaatgggctggtagactcattgagtgattttcttgaccgtgcagaaggcttcatcaagctcaaagaagccattcaacgagtagaaggtgaacaaaagcctggcaagtcgaaagcttattctactggaatatttgcccaactcccccattactcaaataatttgaactcaagtggtaagcgttccagcaacaaccacaggcaagggaataggaagaagggaaagtttgctgagaaatccgaacaagctccctgggtgaatcaagcaaagaacattgcattcactatcttgactgaagacgtagaaagtatttacatggcaactcagtcgctggccccatataagaaacccgggcccatgaagaaagatgtcagcaagagggacatgacaaagttttgtcgattccacggagactatggccatgaccctaatgaatgcaataacctgaagcgggaaattgaattcttgataaggaaaaacaacttacacttgcagaagtatgtcaagatcgatcagggtcagaggaacgacaataaccaagagttactacctccaccggtagatgggcatcggcaagtcatcattggaggcccgcatattgctggagattcgagcaatgctcgggagaggtatgcccgaacagcacagcacgaacacgaagaagttatcgccgtggaagaaaggaagccc

SEQ ID NO: 354566 - DNA, 604 bp, Cannabis indica
aggatataattgtatgtattactattaagaatgttatattaccattttatagttctaaccattacacaaaattttatttttaatcgtaacaaaatttgtatttaaaagtgaaaaaaattgtgactaattataatcattattatattatgatgtgaccagtgatagacccagaatttttactttgtgggggtttatttatcattaaaaaatatatatacttatattataattactcttactaaatttatttaattttgtaggggcttttttttattattttggtctataattatcaaattaaaaaaattacatttaattttttaaaatgcaatatttttattagtggggactatagcccccacattgataagagtaggtccgtccttggatgtgactaaaagtgcaacgccctactaggcacactatcatgatttcaagttattgtgcactcattcgttaataaaaaaatttactgaaaatataaataattaaaacattcataattaaactcaaatcttaaatatattgcggataatgctggaggcaaggctagacgatacactactaatccaaccttctcgagaatctcaaaaggccttataaa

SEQ ID NO: 354567 - DNA, 680 bp, Cannabis indica
taaaattcagaattctagtaatcgtgttagccattgctcggctttcataacatctggacctcccagaaaaactggaggtgcttgcctgcagaacctttcatacagaggttccatccgattcactgctaccactggttcgtccaccacagcagggacaggtgccactggaatttctggagcaggcaatgcaggagcaccctgtagtctcaatcgttgaatttcattatcttgttcctcgattctggcttgcattgctgcaaacctatttaaccaattttgggcatcctgagtagcttgggcaacctgtggcggatttacatcatcccgaccacatgccctgcccctgggacctctacctcggccacggacatttaagggaatctgagctccctgccagcattagatccaaccgaattgctctcgctcttggcatttcgcctggcgtccatactagtctgaatatcctgcgtaaccaagagctagtctggtcagattgtgatcaaagagaaacttactaataccgcttctttgaaaattaaaaacatgtgcttattgtactattaggctaataacatgctttctaacaggcttttcttaaatcatacaatagaaaataaactactaagtaataaaagcttactaaaccatgaaacgagctaactgctgatgatgattgtaca

SEQ ID NO: 354568 - DNA, 1251 bp, Cannabis indica
ttatatagtttacatttacttgtctttttgagtcttgagttgtaactcttttcttttatttgtattttatgcttttggattgtaaatctttatttaatatattgtccttgtaatattttgtttagagttgtaattgtcttagtcttttattcatcttattttattcttccattgtaatctctttattatttctaacaatattgtgaatgaaaaatgtgctataagagagtatatatgtatgtattttctgctgtattgaatatgtattgtgtgtgtatatatattgtgaatgagaaatgtgatatataggagagtatttcatatattgtatatgtatatattgagtattttaaactaatagttttgttaaatattttgaatgagaatgagataagagagtattaaaataaaagtttcaaaattattttctaaaaaaaatagaatagaaacaatagtttagaaattaactgtattttgtatcaatttttttctattttcaattttattcatgtgtttttattttttagtggctaatagatagttaattacaactacgtcgcaagttaataattttcattctattcatgtatttttattagtaataaattaactagttaactagttactcgtaaattataaaactagtaagtagctaaataaaaaaaattataattttgtagtatttctttgtgttgtaggttgtgaggtcaatttgccaggatttgacttatttggtgttgatcggtttctagctagctcgatgtatacattcattaaattttattataaattaataatgaatgcttagtagagtttgaatatcttaaatattcatccgtagtgaagtagattctgtaatatattgtattgcgccggatcgatgggtggaataatatgcatgttatatgagtttgaatatcttaaatatccatccgtagtgaagtaatttttgtgaatgcattactgtagtcgaatgggtagtaaatttttatattgctaaatgttatggtgattattttatattggtttgaattgtgttttgttgttattaataggtttgaatttttcagaaacgttcaattatagccgttatgctgccgaaatttctgtagaattaagataatatttgattttaatttctcttaaacttggttgttaggattttatcggaagtgactttatcgaaagacaagtacataatttttggtataaggtatgctttctttaacttacttttataagaattttttt

SEQ ID NO: 354569 - DNA, 830 bp, Cannabis indica
ttagagagtcatattgtatatattttgatgtatgttatttgttcggggtgttttgttaagtgttgaattagcgggtttagaaatgactatttagcccttgagtggtggtaactaatttattttgtttaaggggtaattaggtcttttcttttcctaacccttattttggcttctagtgggatatatggctggctttttatcatggtattattaatttttatttgaggagtaaagggattagtgaaagaattagtctagaagtctcaagttgcacctctctcttcctctctccttcgtgcaccccaaagaaccagcaagggaaggaatttgttgctggaattgtagtgttgctacctgaatcaaagaagattcaagttaaggtattgattcctaactttcctatgttgattttagtaagtataggttaggttttacttgtgaatttaggttctaggtggctgtgtggattgaaatggtataatttggtattctggaaatggtttgaggttgtttaagcctatttgaattgaaattgaaggttgatttgaggtttgagcaaagttagagtttaagaactcaaacttagctctctaatggtgatttgagaaattgtgtgaattgttgtgatttgctgcttgggtttggtttggaatagtatatgcaggtattctggaagtttttagaagatttggttttgatttgagtaaaggggaggagtttttgggttcccagctcagaaccggaattccggttcctggggccctgttgcaaccggtcgaccggttggtgccaggaaccggacttccggttggcaaccggtttgccggttg

SEQ ID NO: 354570 - DNA, 765 bp, Cannabis indica
tagtgtgggagggcaaaatggtcattttgccccataggtattttgtcctttagtggacttagttttatttaataaattgattcttatgagttatatgttgttcttaatgtgttaataaagcatcatttatccatttcatttacaaaattgaaaatttggaaaaatcaagagaaaagcttttctctctcaaactcactctctctttttcggatcccctagagcagctagggtttggggtgtgattttctgcatttcaagcaagtttcttcaaggattaagtgttcttaagttctaggtaaattcttgacgttatcctgttaagtttcttgagttttaaggaattgaatttatgcatgttttgagttgttggttgctgtagttgctgctggtgttttgtatgcatttatgtagttaaattatggttagaaatgtttagttttgcttgttttgatggctggtttattgtttgatcaagctttgagttttagaactcaagcttggctcattaatggtgaaattcgattctgagctttgattgttgttttgttgcttagaaatactttattgggggtataatatacaggtctgaaaggtttgaatttgtttggaatttttttggttagggtttgaagctttttgggttttctgggtaaaaccggctaactagttttacaatgcttgtaaaacaggttacccgaattttgcagcagggaaacccaaaaattcagcttgttgtttcgcgtctattttaggtttctagttggt

SEQ ID NO: 354571 - DNA, 998 bp, Cannabis indica
actaataaaaaaactattaaacaactattttttttgacaagaacagtaaatgacattgaatgcaactgtagttggtctattgtaaattactcattttgttttatcaaattgtataaatagtttaagtaattatttttatctatcaaagcaatttttaaataactgtttactgacaagaaacattaaatgatatagaatgcaaccgtagttgttcatttgtaaactaattaatttgtactttgtaatttgtagtttgtttctctaatcccaaataaccatttttaatcttcaaaaataacatattaataaatgtttactgagaaaaaataataaatgacattgaatgcatcaatattttttcagttggaaactaattacatcaatttcttcagatcaactaattttcactatgatttatgattaatttgattttcaaacactaaaaaaaatattataaccatgaagaaaacactgaaaaacaatataattaggaagaaaatcactaaaaaatttgttaccttgtattttttgtagattcgtttttgggtaagattcgatttctctttgatcttgttgtattcaaattatctgcacaatatgattcgaattattgctttttggttatttttgtgtatttttgaatcaatggaggtagaaatctctgttttcgtattttttttagtttaccttttgatttgaatttgttgagattagatcatttttttgattgagatctacattgtgcccatagtattacacacctttgacgattttcgttggatgctgaattacctcgggtgagaaggaaaatcgtgaaaatcgagatggatctgattcaattgggaaatgaagaaggagcaagtttctcatactggttgttcatttcgtatttttgaaaaaaaaaggttttactttctattttgtttaatttttcttatcgaaaaaaaatgtaaaatagtaaccaaaaattaggggtgttcataaaatagctgatccaa

SEQ ID NO: 354572 - DNA, 548 bp, Cannabis indica
ctgaacctatgtaaggaactcgagtgcactaagactagaactgagaaaataacatgtcttattgatacttaatgttttacaatgtgttgtgtaaactagaaagccaattggctatttatacacataggaaacaggtatgacactaactaacataactgttaaaaacagttatgacagttagtgtcctagatatagggaagagtattagtaggcacactagagttaacatgggtgaataacaattaaattatttatttttatgagcttagatgcataaattattttatttaaaaatatttaatttaatctaatattgtgttaatttttaaatttagtgcatgaattaataaaatatgaaatagaggataacaagaccaaatgaagattggcccaaatcatgtccatcatatctcaaatggtgcgtggaaggcctcaattaatatgatgtcaataatagtttaagaagttcaaattgggtactgtgttaagtttcttctgttattctactattattttttagttgttccactgttgtttttagttgttct

SEQ ID NO: 354573 - DNA, 640 bp, Cannabis indica
ttaaaatttaaaatttatttttatattttttttcttttctttttttttccttttctttcttcttcttcttcctccttctaaccccagccgctcttcccaccttcgcacctccattcactaacccagaaacccccagccactcgaaccacactaatcagcgactcccccacctgcaaacgacccaccttcaccatctctcatcaccacgtcccacctctgttcaccaaaatcgccactagcaagcggacccgaagccctcatcacccaaaccgaacccaacagcaaaaatctaactacccagtaacctccattcacccgaagccatttcgtgaatcccccaccaccaagcgaaccacctagtcgaccccactccagctccgactctgttcgcacacaccagcaaccgaggaagcaaacaagcacctccatttcaccattccagtcgaaaccatccgcgctctgttcgcacatccacgctcttgttgaactctggttcgtcgctgacgaagtcccttactgtcgatccgtctatgatcaagtgaagatggggacgatgatatgggcgcgacggacgtggtggctccgggcagagtggttacgagattggttgcggatcgaacctgagtgggaagcaagacgt

SEQ ID NO: 354574 - DNA, 591 bp, Cannabis indica
aatacagcaacgtatgcaacttctattgctcgagttggctgttcatattctggtttaaggtcgcgggcttaggatatacctaacatttagttaagtctaagatgcttgcgttcttagatagtcgcatttacaaacatcgtataatgagctgatagaacctggacgcatgagtctatattggtttatcgaggtttttgggtcgctgggaccaactcgcattatagagagctgatctctatgttctcgcaggagggatactcgcacatatcctggtacatgcgagttaaatccgttctttgctcctacacaatgcgagtcacacgaatgcgattagactttggtcatattcgcatcatctcgctgattccagctcacgcgaggtttaaacccgaggaggctctcatggacatctcagcttttcttggaaaactgaatacacgtgtccttcaaacaggagtcttgtctcgagtttctaggtgagagaaatctcactataacacatgcccctagtttcgcgatttgacagatgcggtcatgagggaaactatatgggagagacaggagaaaggttgtcacgaggaggtgaccttt

SEQ ID NO: 354575 - DNA, 767 bp, Cannabis indica
ggaactcggttacaaattcaactatggagtataagcaataaaaaaaagtactctctcctccacacaacaacatcgctcaaacaaaccccaacccaaaacttccccccgaataacatgaccaccatcagcatagagcttcgttcctctccaaactctctctttctctctctagccattatcggatttgattcacaaactgaagggtttaatgtgagaacagattttagcttagctcagaatgtgataatgttagaaatactgtaaatctgtatatagccctaattaattcatgagaatcaaacaataagattaaggaatagcggaagcgtaccggagtccatagaatcgacctttaaatgatctttaattggtatgatcttccaatttgcatcaaacctttctctgaaactttttctcttggtgatggggatacaagagtgaaaagatacgatgcaaatggggaccattacccgttatattaccaacagacaaacctgttggtaatatttattgactatttctatttggcccctcatcaatatagaaattgtccttatggtatccacatattaaaatcatgacaatcatgcccttaagtcataaactttattccaaaatagaccacataaatttgacttatttatttgatgacccaacacacattttatatatacaattgtgaccccaataaattctaacaatctcccactgggtcacatatgtatacatataaatgtgttaaccttattgagctcataactttgtca

SEQ ID NO: 354576 - DNA, 722 bp, Cannabis indica
agagatcttgaacggaaggagtcatattattccgctgcaaataatgtaaggttttcttaaacccttatctgtttattttcattgttttagaaaatttatatttaggatgttaataaaacatacttgttagtaaatctagatcctggtaaaatattcccaacatgatctcaatcctgagatagttaagttctagcttaattgtactatatgtgttctttgaattgttcgttaccagtttacccgtagaactagctcatacatacattttgaaaattcgaaagtgtaattgatttggagcgttaattatagatatagaatttatagcttctgtaactatttggaagtgaaacgatggtttccttaaagcttagctaaatgcgataaatgatatatagagcgctcattttagtaattatattattttattaaaatatcatttccaagtagctaagtgctttaaggataaaatacatcaaaggataaacaataaatatgtccctactcgatgtaatgtatatagatgatccttgattgtttaggttgtaacaatagataattcatagtgtatctataattggtatatagcgttctatgtaatcaagtgtaacgccctaatctatagggacgccacatgtgtaattttatatctagtttaatactaatagattaattattaaaaatcatgataatattaaaaaattaactaaaacaaaacactaaaa

SEQ ID NO: 354577 - DNA, 395 bp, Cannabis indica
gtggctgatttgaactttaaattcaatcgatatatatttgtctcattattacaattaactaaaatgaaataattgaatgtaaaaataaaaaaaaattaaaaagaaaatattagtggtcggtttggaactgaccaatttcattgggcgggttattattttcctatttcttagttgggcgggttgcacttaaatttttgtaactcgatctttacattgggctgaataaaatgtaccataaactgaccaaacagaccgacgtacacccctagttaatatgtattaattctggaaattaataaaataaatacattaacttgaaatagtgagtgggagaaggagtacatgtcaatgtaacctacgacctccattattggtcaacaccgaaggagtataga

SEQ ID NO: 354578 - DNA, 836 bp, Cannabis indica
agtagtttggtacgaccatagaacttcaggaagttcctctggccagtttcctttagcatcctcaagtcttttctttagtgtatcattcaatgtcttgttgactgcttcaacttgaccattttcttgggatgtgccactacgaagaaacttttgataataccatggtttgcacagaaatcagtaaacgactggctgtcaaactgtttgccattgttcgaaactattttgtacggcaatctgaaccggcatattatgttcttcacaacgaagtcttgtacttttttggacgtaatggttgctaatggttcggcttctgtccacttggtgaaataatcaactgcaatcactacatactgcatgccacctttgcccttgggtaattgtccgatcaggtcaataccccaaatggcgaaaggccaaggactttgcatctgagttaactcgttgggcggggctcaaggtatcttcgaaaatctctagcatttatcgcattttttaacataggccttggaatcttcaatcatcgccggccagaaataaccttgccttaaaattttcttagataaactctgcccagcagcatggtttccaaaaaatccatcatgtacttcagacaaaagtcgtacagcttcttcttgggtaacacatctgagcaatggcatggagaatccttgtctatacataactccctctactataatgtaccgtgcatcctctaattatactattaccacacttacatctataagtaaataactacaatatagaattatagataaatggtatattgtaaatatgatatcggtaaaatattaatatactataaatataatatg

SEQ ID NO: 354579 - DNA, 717 bp, Cannabis indica
ttgttgttttctgaatccacaacagaaaaagctaggggaaaatatgtccatttgaatgttgtgtataagcaaagagcaatgtccctccatatgttgatttaaggaaagttccatcaacaactattatgggtttgcacttcttccatccttttattaaagcatctagtgtcacaaacaagtacttgaagttgttatcttcttctgtttgcatgtgtataattgtttcaggattagttttctgcagcatgtgcaaaaaacttggcaacaacttgtatgatttgtttactttacctcgtaattcttcttgcgcgtgctctttgcttctccatgctttcatgtagttcattcttacatcatacttatgtttcatttctcctctgatgtcttatggcgtttgagttatttttatgttggtaaaccttggcttgatgtagtttccaatcaactttgttttagcctatcttttgtctgcaaatcttatgtttagatcacaagtgtaaatcacctttctgtcatatttatgaattatgaatgacttggttggtccgtttcttgatgtcgtgagtgcccacttgcattttggatccaagcaacaaattttgtatgttcttgcacgagaatttttcaccttaaattggaaattgtttctaattgcatagaaaccaagcacactttgaagtgtttctttgtccttgtatatttgtgcttcttctattt

SEQ ID NO: 354580 - DNA, 745 bp, Cannabis indica
gatcttcattccgatcttatcttaagtgtcctcaatgcaagaaacaccatcagggtgaatgtcgggccaagacttgtttccagtgtggcatggtgggccactttatcagagattgcccttaggccaagaaagaggagcctaagaagaatgttactcagaactcgggatgactttttaccatgacttaggctaacattgatgctagtctatcagtggtgacaggttagttatctataaatggttgttcctatactgaattgtttgactcaggagctactcactcctatgtgtcgagtagagtaatttaaagtttccataaaccatgtgatatttatgcttcggggtttggtaccctgatacgttcgggagatcttatagtatccactaggtgaattcgatccttgtctttttggattgatggttgtgaattaaccgccaatctaatagaattacaacttccagattttgatataatattgggaatggattttctatccaagtatggggcaacgatcaactgcaagcagaagatggtggtgtttgagcccgatagtgctaacctagcggtgtttgtgggtaaagttcagggggcacatataccaagaacaacacttttgaaagctaaggacctgatgagcagaggttttctgggattcatagtcactgcagtggataccagccaacctgtgacatctagacctgagaatacaagattggtatgtgagttccttgatgtctttccaga

SEQ ID NO: 354581 - DNA, 900 bp, Cannabis indica
ttgtttacaaaatattacaagtcttttctcttagccgaccaaagcggcaaaacagagttacaaaagtttcaacaatggtagaccccaacccgcttggtctagtgtggcctgaagatgtacattcatcgcccaactcccacagtcatggcttattagaaacaaatttaccctttcctacacactagagcacccatgagccaagcctagcatgacagtaaaatatatagataatcataaatacacatcacataaatattaatgccattcctttttttctatatgacacagacccgccttttacgctcacacacctatttatgtctatgtggcatagacctacatgttacgctcacacgtctatttacattaaggccgtagaacggttcatctcggttctagttaccgagtccaacccgattatgtcttgaacacataaccctttacttcaatatacatttatatatatcattgcataacaattacatattaacaatttacttgggtaataaccctaagccatataatgcgctcactttagagtaataactctaatctgggtttctattttctcatatatatcacattcgatataagcagcattgcgcatatctcaacgtgctaagtactgtcttacctgatgtccgcaaatagtgagattccaaatcctcgagtgctcctgactaagtgccggtaatcctagtcacaatttcgggatacacaagtatagggttaatcctaaaatccatttccacaaattataaactgggcatctaaattccaaatattcacatagagctcagaaatagctttcccacgatataaagaagtcccaaacggagtcccgagtcaaaagtatgaccaaaacaaaaacccaaagaaaaacacaatatgctgccataa

SEQ ID NO: 354582 - DNA, 532 bp, Cannabis indica
ctcgtgtgttgtcttttgtagatgaaccttggtgagttttggggaagcaaacacagaatttactaggacttgcttcaacttctgtacgaggattaacctcgtcttcccgccagtctgtcctttttgagtgacagactttctaactagagctttgaaggttgggaggtgagtagtgattgttctcctactccagaacccatagtgcaataacattattattctgagcagctcgccagagaggggtacgattgctttatttgggaagtgaaaaaaggttagaggcgttatgttccgtccaactggacatacattgtccagccaggtgttgatgatacacttcttattggctgtccaatttgggtaacttcggcatcccaattgttgtccctgctgttacggttgcacgacatacacatcaatatctgtccaggagggaggataatggacaacacaaagtagacgatgcggaaggtcaacacatctgatcctcatgtggcccagcttgccacattgccaagtgccgaacaagatc

SEQ ID NO: 354583 - DNA, 667 bp, Cannabis indica
cttggggacccaagcagcaatgttggacctatggaagagttagaagagatcgagatcgatccaactatcccgaccagaaagctaaaaattggacagggtttgttgcctggtcacatgcggatatggtcggaatcaacccttctattatttcacacgtcttgaatatcgatcctaacatccggccaattgagcaaaaacaaagattgctggataaagaacgagcagcagccttgaaagatgaagttgaaaagttgcgcaaccacaacttcatcattgaagctttttactcagcttgggtcgcgaacccgtctcgtgcctaagccgaacaagaaatggcgagtctgtattgatttcacaaacctcaacaaagcataccctaaagactgttttccacttccaaggatcgatcagctcatcgatgcaacagccaggcacgaaatattaagcttcatggatgcttattcgggctacaatcaaatcaaaatgcatccgccagaccaagaacatacaagtttctggacagacatgggtctctactgctacaaagtcatgtcgtttgtcttaaaaaacgccggagctacataccaaagattggtcaacaagatttttaaagaccagattggtagaaatatggaagtgtacatggatgacatgctcgtaaaatcca

SEQ ID NO: 354584 - DNA, 1778 bp, Cannabis indica
gatcctggtaaaataacttccaacagtatttgtacccgtttggggttgctttctggtatgctttctttcttacctgtgcattctaccacaatgtgtgcaaaggcttgccctttgattgctgttcggggttggaaagtgatttcatactggcttttgcacaaagtctatcacaaagtctacctcccacttgagtagccatcaagaagcttctggcttttgcagtatttggcgtagtggttggtcagtgtatacccgaacaggataagcttggaaatagggcctcaacttccttgttgctagaataaggcagtaggcgagtttctctattaatgggtatcggtcctcggccacaatgagtcttttactgttttaatagattgggtgttgtacgctgttctcttctgtgatcagcacgccacttagggcatgttccgtggcagctaagtatattcccagttcttctccatcaagtggttttgagagtacgggaggttttgcaacttgtgcttttagctcttggaaagctttttcacactcttccatccatttgaactgcttatttcctcacagggtgttcaagaatgggatacacttatctgttgattttgaaacacatctattcagcgcggcgatccgaccaatcaggctttgcacttctttttttttgttggcaagttcatatctaggagggcttgaatcttctctagattagcttcaattcctccggcattgccaatgatgcctagaaactttcccgagctgactccgaaggaacactttaagggatttagtttcacattgtacattctgaggactttgaagcactcgttcaggtcatctatgtgcccccggcctttctggatttgacgagcatatcatccacgtacacttccatatttcgcccgatctgatctttaaacattttatttaccaatctttggtatgtagatccaacatttttcagaccaaacgacattactttgtagcaatatagacccatatctgttcggaaacttgtatgttcttggtctggtggatgcattttgatttgattgtagcctgggtaagcgtccatgaagcttagtatttcatgccctgttgttgcatctgcgagctaatcgatccttggacgtggaaaacagtgtttagggcatgctttgttgaggtctgtgaaaatcaatatagactcgccattttttgttcggcttgggcactaatacgggattcgcgacccacgccgggtagaaagcttcaattatgaagttgttgttgcgcagcttttcaacttcttccttcagggctactgctcgttctttgtccaacaaccttcatttttgttgaactagccgaaagttgggattgatatccagaacatgtgaaatgatagaaggatcaattccgaccatatccgcatgtgaccaagcaaaaacgtctaggttttctctcagaaattttatcaattccgactttacttcgagcaacaaacccttttcgatctttagctttcaggtcgggatacctggatcgatctcgatctcttcttattcttctacaggtccaacattgctgcttgggtccccaagtcgaggatcaacatcttcatccccgccttgggaaattccctacttgggaatgttttttcccttgtctgtgctctggctggaggatacttccttcttagccttagccactggaaggttataacattcccgagcagactgttggtttcctcttagacaccctactccattctttgttggaaacttcaggcacgagtg

SEQ ID NO: 354585 - DNA, 736 bp, Cannabis indica
gcttcggtcataaacctgctgatgtaagctcggaggggttctcctagtatttactttacttcgactatgtctttaaggtgcgaaggaagttgacgagatgagggaaactagggtgtggaactccgatgagaaggcattccatgagttaaaccttcttggaggcaacttcaaatactattgttgtgcggcctctacgagtgtggcaagaaagatcctacactgtacatcccctcttaccccttgcaagtccatctgcatctcaaaatacttcaagtgtgataaaggatcttcttttcttgtatacatattctaggttggcattttgaactttgagggtaattcaaggacttcaatttcaggggagaagggtgatccacgtgcccagtctagttcgagatcagtgagtttttggccggtcaggccttgtaccatgttttgaagttaatccagttgtgcttgcacaaatggatgaacttgttcggcctattgaccggcctgtgtcacattgggatctcttggaactggatcttgggctcgaatgcctggtcacacagttggtggaacatattgttcgtccaggccccttctacgatttaagtcagtcctgaggtcatgtgcagcacccaacctatcaaatactgaagtacggggtggccttggtgtaatatcccgataagtctaaatggtaaataattagggtttatatttatactatgagttaaatcaggtaataagt

SEQ ID NO: 354586 - DNA, 1014 bp, Cannabis indica
aggcctaacctccccgacatgtacattcttcatctgcttgtactcacggttcctgagctttggccttgctcttacctacacataaacatagcactgtgagtcgacagactcagtaagaaaagcataaatcatataacatacacatatcccgggttatgatcagacgcccatacccctgatcacaaccctaatccccgtgtcccacacagtactgagtctcaaacgttcgtacgacggtacttttgacatagtaacagcctatactcggtactctagtcatactctagccgtaccgatgtgttacagtatcagcctatactcggtatgtcagtcatactctgagcataccgatgtgatacggtcaaacagtacagtaccatcgaccataatatcagcctatactcggtacgctagtcatactctagccgtaccgatgtgatactgtcaaatggtacgaagccaacatacatatctaatgtaatctaacaggcttcctaacatgcacgctaaacatgtaaatacatatgcatactgttatactaatcttaccttgattccgaattcaggtgtgccggtcaacctgagtggaacaatctgctcggcgaattacaggctcctaaatcataataatcgcaacactgataagtgatacgctaaaccacttctcgaggacttaaacttgaaactaaaagttttcctatcgacaaataacatggcaataccctaaacaacacaaaaatgggaagaactacggttcccaaattttcccaactggcagaccggttcctcaaccggaattccggttctgggaggaaatcctggaagccaaccagaattctagttcctacaggcctctctgaacaggaattccggttcagtgcaggaaacactaaaaattccatatctcaatcaattcaaccccaatccactccaaactttgcagacctgatctaaacttcctagaggtcaaaaacaaagcaataaaacacagcttcatgcaccataacaaaaatc

SEQ ID NO: 354587 - DNA, 674 bp, Cannabis indica
ccctacatatttcttcatcaaggtcattgagtgagaatgggcagttacaagtagtatctgggtattgaaaatcttggatgattggatcattatagtcaacctcgttttcctcagcgtagttttttttataatgattcatatcttcttctagtcgttggagatactctagcggataatattcccatggtatgtcatcttcgggttttggctagatggcatttggaattaccatgctaatggcaaataggtgtttttccagctgtcttatttctgagctacctatcacaaaaagtgcgtgtttgcttgacttgtgtattttgacacttaccgtaaataataaatcaggattgacctgtagcctgagtagcaagactgtaaagcagcgcaatggacttgccatatttttagtggctgggaaattgagtcccacaggtctcttgttgcggaccttttcccactctagtgtaaggagtgcgtcccattagccattggatgttggtaggcaggtctaaggtcagggcgttggatatagctacggactgatgtccggagccctattgtgtggattttgaccgcaatagtgtatgagcttgccagataccaatagagatctgtcatcttttttggcataaatatgttgtttttcatgtgtaacagtttggcaaatgggtagt

SEQ ID NO: 354588 - DNA, 450 bp, Cannabis indica
cttggaaatatatcaagttccacaaagaattccttaaagactttgcagttgagttctaaccaacttggtgggttaattcttaatgactttgaaaactcctttccttctttgactgatctttatcttgacaataatcaattggaaggtcattttcctaaccgtttgaaaacatttcccaatcttgaaagattagatgtaagtcataacaagttcgtaggattattgcctgacctttcatcaatgccaaatctaattagtttcattgcatccaacaataagttcagtggtactttaagtgagagtattggcaagcttgacaatttaagggacttagatgtctcttcaaatcatcttagtgggtatgtctctcacgtactaaatctacaatgcccgagcttgaattacctagatatttcctataacttagacatgacatctaaattcaactcc

SEQ ID NO: 354589 - DNA, 1359 bp, Cannabis indica
cattttaatagtaactccagtaaatctctggaaagacactcataaattctcagaccattggaacgtattctggtcccataggtattcttcataatatatatcttactacttaagaaaccgatgcatccattccacattaaatctcttgccttaaacactaaaattaattaaatttaggactcttgaacctttcccacaaacacgaatgggtcctcaccttctggtcaaagagttaccatctttctttcacaatcgataattccattaaactttacaaatcaatccattcctaattcattctcaggattctctaatcttagctcaactattacaaccaagcattccctccttcccccacaactctggaagggatttgaaccacttgttgtagaataacttgttctatagtaaaagtagagtacccgaacctcttagcaacacatccttaactttacacaatcttctaatcacctttcttgaaatataggattacgttacacaaaaattaattaaagctatcaacaaggtatgttcaatagaagtttaacttgtcacggtagaaagactagcaccagtctcagtctaagtcaaacaaacacccaaacaagaactaaaattccatcacccctttttaatccagtcacgacaataatagacagcttattctaaatggcctacttccccacactgaaaacatgctctcatgtagcattcactttgctagtgtctcttacatctcgaccttacactcttggcaaaagaggttagatcaacaacctgagcatagaactagacaacccctagttgttaaacaactatatccacattcagagcgatatatttttcccaccttcaactagattagactgcctagcggccttaacagccgctcccttaaaatagaaccttgccaatcggtctagtttagtgtcattctccatcaccacgctacccggaatcaactatttatgttctacgatcttaccactcaggtaatctcttacttcatggcatacattttctcctagtcttgtgatagtgagaaattcataccacactagtaactccgagcctggtaagctcgccattaaccttactagatcgccccaggtacttcttccagtacacttgcgaccatttcttttcatcatttcaaatcttttgaaccagaattaatgctaataagcattaccacataaacatatttaacaatttcatcataacctatcatgcttaacaattttatgtcaaattatcatacttctctaatagcttacacatttcggataagcaacaattcaagcaatcaagaaataatctattaataaactaacaagtagcacttactaagccatgagt

SEQ ID NO: 354590 - DNA, 625 bp, Cannabis indica
ctgcaggaaaagtttgtgggcgacgagttcatgtccaaggtggagagactccttctgaggagcttattccgtggtctgtagagttggcttcgcaatcaatgaccatgttcataaaagcctttgctgctagctctaaggaagccgaactgttaaagaggcagaatgctcagcttcaggagagcgtcaagaagctgaaacaggaagtggctgacaaggacaaggagcacgaggaatttcgtaaacaagtcgaattcgaagctaggaactccaaggcgtagattgaggaggtgtctcgcgacttagaggtcaagaaggagaatggaaagaagcagtacgaccaggcggtctctgattacatctacacaactctttccaagattccagacttcgacttctcgatccttggggcgaaggcagatgagatggctgaggcttttcgagccatgtcacccacgcagacttagggaggtggaggaaatcttttcgccgagtatgctgatgctgccgacactgaggaagtcctggacgaggctgccagcaaagtcgctaatgagtctaccactccaactgcccccattgctcccaatgcttagcttttactttattacttttgccagactttttt

SEQ ID NO: 354591 - DNA, 710 bp, Cannabis indica
gctctcacatcctgtgactttagtgtcaaaagctgacccactaagatatatcctatccaagcccgtgttgtctggacgacttgcgaaatggtccatgatgttggcagaatttgaaattaactttgtctcataaaaagcaataaaatgacaagctttggctgattttctggcagcacacccaattccacatgatatgaagttgcgagaagatctcccaaacgaagaagtcttcacagtttatacttcatcgtggcaattatattttgatggggcagcaagaagtagtggggcaggtgcaggaattgtctttgtgacaccgtcaggaggcctggtaccttactctttccatattctagctatatgcacaaataatgtagcagaatatgaagcattagttatcggcctcgaagttgcactcgaaatgaaaatataatcattggaggaatttggcgattctcttttggttattaaacaaacgagtggtgaatttgcggtcaagcatgagaatttagtcccttatcatgaaaacgctaaatatttgcttgaccaatttcaagatataactctaaatcacatccccagatcaaaaaatggtaaagctgatgcattggctaatttagctccatcactaacacttcctgaagaaagggatatccaaattaccataggggaacgccatgtattatcccaatctacggaaagagttgaag

SEQ ID NO: 354592 - DNA, 1074 bp, Cannabis indica
tgctctgtggtctcctcagcctctcacaaatagggcaggaaacctcctcaaaacccattctcttagcaagaggggctcgtaagggtagcgcattggaaaggatactccaccaatggaccttatgccgctccaaaatctttgagttccaaagtttgttccatagtgccggagcaatgttgcacataggagcccgatcaagggcttgaataagatatgcagacttggttgaaaacagaccatttgattcttttgtccagacccatctatcccttccctgaccactcggaataccgcctcttaagatgttactaacagtttcctggtcaaaaaggttgtggagcttgggtgtgtcccaattcccgtcaggtagcagtaaatccgacactttctccaagccccgttgttgacgataattagacttagggtaaaaatccgtaccgtggataacccaagggtcgtcccaaatacttgtctctcgcccatcggatattagcttgcacgccccttttcttaaaatctcttttgatcgcaccacatttttccaaaaccaagaatcggagctcttaacctcacagtcaaaaaacggtttacccttaaggtacttagatctgagaacattacagcacagcgactcttcctcagtcagcagagcccaaccccacttggcgagcaatgcctggttcatctccacagtctttctaaatccaagccccccacgggacttaggaaggcacaactggtcccaggctttaagatagatgcctctattaccttgttcacagccccaccagaagtccctcaccataccatcaatcctagatgcaagctttttagaaagctttgtcgtctgcatcgtgtaaataggcaaagcaagtcccaccgatttgatcaatgtagcacgaccagcctttgataacgattttaacttccacccatggagttttgacaccagattatcaagaatgaagttaaaatctgcatccttttggcgggatctaaaaagcgggagtcccaaatagtttatgttacccaattcacagttcaatcccaaagcttgcctgatgcctcatttca

SEQ ID NO: 354593 - DNA, 546 bp, Cannabis indica
ttttattgtaatcattccaaacaaaattggggaaagagatgtaatccaaataataaacagattttgatttgtgttgctggggagtcttctttgttctgtacttttttttttggcatgtgttttgtacttggttagtggttgttgaataaaatttatttttcttgttctaaaaaaaaataataaccaattcaaattaactgatccaatccacacttttgcgaattaaattaaattaaatttaaactattgtgcgagttgaattgaatctaaaatataaatctatacttaatgcgaatcaaatgcactataaataaaataattcatattaaattagatgaacactcctacaaacctcaccaaatgaactttttcaataaattacttttactaatgaaaatacgtagccaattatttagtacttaagaatgggccttttgatattactttattaattagaacactgaatgaattatttttattgtgattatatgcagtcaaaacattaaaaagccatgtgacatgatgtgagactgcagctatcattta

SEQ ID NO: 354594 - DNA, 571 bp, Cannabis indica
aaataaatgatatagtaatataaatattaaatttttttaaaaataaattatgctaatttattaataatagtcagctaaaattataatttacaattcaatcaggacatctcttttattagagacacaattagaattagaaaattaaaaaaaaaaaaaacgagcaaaataatcagccgcttaattctcagattatttgacaaaaaaaaactaaaataaaatttattaaaaagattacatcatcacaattaccttaaaaatacttatactcagtttcttcgactgctcagaagacataatagtaaaaactgttgcatcaagttcattcaatcttgtagcttgaacactcaattattgtgtaaggtacgtaactgcactactaacaatctctttagtctcagagaaccatgttattcacaaatactagcagcgatttgatgtcaaaccatcaaaaaacaaagaagaatcaacgacgaaacaaaataaaagaaaacataacaatgtcacacagacaagattaaaacactcaaaattaagtcataaagataagtctaatcgtaatagcaaaaattaa

SEQ ID NO: 354595 - DNA, 423 bp, Cannabis indica
tattattcttatcaaatttctcataatttctgtgcttaatttaatacggaaaaggcttattaattagttaacaaaaatttgcattaacagtttggtgctttcattgagagcctacgtgataaaaactcagaaaaatccctcctaaccaacaagaaatttgtccatggcttatgataattaaaacgatagtagtcgtcccaaagagactaatcgtcgtcctgtgaaagaaccaatgggttcacaaaggccacctagtttaggaacaacacgttcaacacattcaagaagaagccaaggtggtcatgaacaaaaccaaaaaactgagaatgaggaaaccaatactaatgctggtggttatgtacctaggagcgaggatgcctatgatcccactaggtatgtaccgttagtagaattgaaaaattg

SEQ ID NO: 354596 - DNA, 874 bp, Cannabis indica
attacatttttagcatacatgttgtttatccctgttagagtacattgataggagtaataatatacatagagttgtattgaatactgataaatgtatgctggctaaaataatgatcgatgttgtcacatcaatatggctagagtatgactggcatattgagtataggctgacattatggtcgatagtattgtcatatgaacattctagagtcagttccgtgtgggacacggaataggcttatggtttggtgtatgggcgcctgattataacccgggatattattatgttttctgttatgcttttcttactgagtctttcaactcacagtgctatttccatgtgtaggtaagggcaaggctaaggctgagtagccgtgggagcgagcaagtgaaattgtacatgttggggtggttaggcttagagcgtacgttctttgggaaatcatggcttattttgtatagtcgctaggcgacagacttttgtatatgtacagtgaaacttttgtaaatgggatcctagaatgttatatgtaggttactttacgtttttgactaaataagcaaaattttaattaatcacgatttttgataacctcgtttattagcaacaagctgcaaagtatgttaaaaatcacgctaacatgcctaaataagttagggtgttacaatttggtatcagagccgccaggttgtcttttaaagatcgtcacgacatgtacaatcatcatcagcgatcagctcgttttacggtgcagtaagcttttattgctttagtagtttattttaatagtatggtttaagaaaaacttgttaggaagcaagtttgtagcctgatagttaataggcacatgtttttaatttccaaataagtggca

SEQ ID NO: 354597 - DNA, 657 bp, Cannabis indica
caacttaaaaaagataaaaaaaaaaaaaagcacaatgtaaccattaaagctttactcaacctgataatttatagcttctttgattaaaaaaaaaaataagagacatttactaagtaggaggcgagatggtctgaacacgagagaatgaaaagaggatagaaatgtagggttaattattcaaggttataattgtaatttcatcatcaattttttatccaaataattattttgctgactgtttatgaaaaagaacatttactatcttaatttttaattgtgaatcattttccatctcaacccaaaaaaatattcctaaaacaaaaaatcttacatgtttaagtctaacaaacatgtttttgtctttgggaaccaattaattactatgttgactatactctaaaattaaaagtgattttaagcacctatttcctaagcaattgtactataattaggaaataatcactaattaggccttggatcttgagggttgagatacaaaatggtcttaaatttagtaactaagttagtaaatgtccactttttaaaaaaattaagaaaatggccaaatctaataaattagctaataaaatttataaaaatagatttatcacatatttttttttaaaaaaactatatataataacaaaattaagttac

SEQ ID NO: 354598 - DNA, 1013 bp, Cannabis indica
catacattttaatttaaaaataactcattttttttactggtaagctgtttttgtaaaatttaatgtggtagtaaccagtaaccgatttctaaaaagggagggaaggtggggaaaaccccataaaaatgtaatcataataataaatcgatagaaagcacacaaagctatttttagcatttatgattttttttttttttttttgtaaaaaaaatagtaatctcctcattaagataaatatctaatcctttctcaaaaataaaaaaagtaaaaaatgaaacaaagaaagaagaagaagatatctactttgcagagtcatcataattacatactgggccttcaatacagacccatatatcccataactgggctcgaagtcccaaattttcagatgacaaattacaaagttagctattataaggtagctactaatattttctcatactaaagaaaaagctacttattttttttttagtggcaaatatcaattatatcttaatatgcataagtttgacaaagtatatgtcactgaaaggtttcaacttttccatcatatataggttactacagtccttttaaagaatgaacaacatagtaatagataatttactagtttgtaaaagatttaataactatttatataaataacaattttataaatatgtacatgtgtcagcataatgtgtagtgcaattttggaaatctcaactccacaattttggatttggcccaatacaagaaaaatatgggatacatttcgaagccagttgtagtggtaagagtaattatatgtaagaataattacataaggtactattttttgtaaaatatttatatttttacgttcaaagaatatatttttatatttttacggttttccaaaaaatacacgaaaacaacataaaataacaaaaaacaacataaaagtaacatcaaaataacaacaaaataacaacaaaaaataacatacatataacaaaaaattaacaacaaataaacaaaatttcaacataaaa

SEQ ID NO: 354599 - DNA, 1259 bp, Cannabis indica
tattgtgaaaaatgacaggacatggaatctataccagttctcataaagagcaatggacaatgggaaaaagaacataattatttcaagagaatgtgacaatgctcgaaaacaacacaacaatacttgaaaacaacacagcaacaacagaatcatacacattggaacaccaattagaagaaggaggagagtcaaaaacaagagaatttgaaaacgacaaattcgacatagttgactatgcgaagctggttgctaaaaaaaatggtagaaaaacttgaaaacaacagtaaaaaactagatccaaaaatcgacatcaacaacgcgaagctaataacagacaaacaccacccagaagttgaaaaaggtcaggcatacaaagacaaggaaacactgaagaaagtttaaagctactacgcaatcaaaaacaacttccaatacaggttttgaaaacatatttaattgggtttcagcaagaatttttttaatatcttctataacagagtaataaccagagtttataaagaactagtgacttttacacaaacagtcaaaaaaaaaacaaaaaaatagagcttaattaaaagacagtacactgtcgaactaacaaaaaaaaaaaggaaatgtgtaagaaaatggggaatgtgtacataaacaactcatgtcccaaacagtcaaaaaaaaaaacaaaaaaagtgtgtacacaaaaggcagtacactgccgaattaaaaaaacaagtaaaaaagttaatacccgcgtgtcaaagaaaatgggaaaatttagtaatctatgtaaatttcccataatatattgtaagcatatattttttttgggtcttttttcataaatgtacaaaaaaaaacaaaataattacaaaaaatgtgcaaaaaaaaattatttgaaaaatttatacattttgaaaacttattacataaaaccatacattttaatcattaaataatataaatcattaatgattaaactaattaccataaatagattaatgtaattaatgtttgtaatattattttataatatcttatccttatgtttattatattaatattttaaaaattattaataataaaatatgtttattaaaattcaaaataaataattccgtaaaattaattaaataaataataaatagttttataaaaataaacaaattaaatatttattttattaaagaataaatgtttattatctattttagtatgaattattataatttaataagttttttttcaataaaatacaatat

SEQ ID NO: 354600 - DNA, 842 bp, Cannabis indica
atttcaggggattattgttgtaagatatcagttcaatttgtagttaactgccttcctatgtaactataaataggagcaggttacactaaaaaggagacaaaaaattcactagagaaaaagctctagaattgtatcagaaatctaataagattgactcgtggactatgcaaaattttaactgcaaaaccacgtaaaaaatccttgtgttcttattttttctttactgcttttattttctgtgccaatctatcacgatttaggcttaaatatagttaacgaaaatctgcgttaacatcttaatatctaaaattaattttaattaataataacattaataaaaattaattttaatatgttaattaggtttaaagtttgaaaataagaatttacataaaactaccaaaatttgaattttacttcattaaaatgattttcaaaacttgaaaaattaagaaaatggcaaaattgagtagtatactctccgcgcgcacaaagggtgggtcatggctgaggaaagaggctgctggcagggtgcatggggggcatttcttggacatgccttgtctgaatggcatgttcactgagcattaggtagatatgcgcgcgcgcatgtagagtttaaaccctagccaaatttcaaatcttcaaagaattatatctttttcaatttgaaacaaattcaatttcgtaaaaggttactttgcttattttttaaccaactttccaaataaaataattccaagtcgaaaatcaaattatttttcataaaaaattttgtaataacacaatcaatcatcaaactcgcacaaacaaaccaccatgaacacatccaaatcaaaaaa

SEQ ID NO: 354601 - DNA, 522 bp, Cannabis indica
tcttgaaattaaaaaagtggcacagaccactctatcattctaggtgacgcacatgaaattcaaaatcttagtaatcactgttagccactgctcggctttcataacctccggacctcccagaaaaactgaggtgcctgcttgcagaacctttcatacaaaggttctatccgattcaccgctaccactggttcggcctggacaacaggggcaggtgccactggaatttctggtacaggcactgcaggagcaccctgctgtctcaatcgctggatttcattatcttgttcctcaattctggcttgcatttctacaaacctattttcccaattcggggcttcctgattagcttgggcagcctgggcagcctgtggcgggttagcatcaccccggccacgagccctgcccctgggacctctacctcggccacgagcatttgggggaaactgagttcactgaccttcatttgacccgacggaattgttggaatttattttaccaagatcttagatctactcacaagta

SEQ ID NO: 354602 - DNA, 639 bp, Cannabis indica
aatacccctagagtttaataaaatctccgaaattgagaaattataactctaatgctcatttctaatattggggtccacaaataattaatttcataaataatcataaacataacagaaatcagtgctaattacctttactaattcaaattactaaagcggtcattacatggacgcttcgtgtcacctatcccttgcaacatggaattgctttttgaagtccttagacaactgttcccaagaaatgatggagtgatgagtaaatttattgaaccagttgcttgctgctccaactagtgatgtggaaaacaaaatacaatgtagattgtttgtaacattgctagctcgcatgatagtgttgaaattattcaaatgcaagaccggatcagtggtcccatcatataacgagacgtgggggttttttaaatccctgggaaaaaggagtattcatgataactggatggtatgcctcgagtgttggattttattgttttaccaggatctagatttactaccatgtatgttatttaacatcctaaatatgaatttctaaaataatataatttaaacacatataaagtttgagaaaccttacattgggtgcagcggaatttaatgactccttccactaagatctctaac

SEQ ID NO: 354603 - DNA, 885 bp, Cannabis indica
gtatttttgtaaaaatccctaaataaatggggatactttgaatctggttgaggttcgtgttgaaagtgctcaaaattttcattcggacgaggaggcggcccttatcatgcccccctttcctcgtgaaaatcttttcgtggaattatcggggccttgcaagggacccgacaagtaaaaaaatacaatctacggtataactgcaaagaaattgagcaaaaggttcaaaagagcaaaatggaggctttgacaaagaaatcgaggtacttcgaggtttgttgtataagtgcaaatgttctctcgggaggctcttgtttgctatggaatgacaattttaaacttaatgtggataaatgttttgatgattttttcgaagctactgtttcggacttctaaatcaactattctgttaaatttaacgatattagtaggttaactttgaaaaatatattaaataattaaaccaaaaaattaaacaatctttttttaaacgtttaaaccaataattaaacccaaaaaatattaatattaatattgttacacgattaacttaacagattaggattacacgattttttttttctaaacccaaaaattaaacaatctttaagcccaataattaaacccaaaaaattaaacaatcttttttttttaattaaaaagaactacaccaatacccaccctaaataagaatcatcaatataaaatttaaactctgtacaaaaaaatcgtttataactgttaactttcaaaaatatacaaacaattaaatcaaaaaattaagcagtcttttttttaaacgtttaaacccaattattaaacccaaaaataaacaatcttttttaaattaaaaaaaaaaaactaacactaaattcttaaacaaaaact

SEQ ID NO: 354604 - DNA, 680 bp, Cannabis indica
ttgttttagaattaacaattattcataaacatagaaatgaaattctaagtgtttatgtaacattaactctttgtagagttgaatatactatagaatttgtgtcaataatagaacacatacacatactaacattaaaacatataaatataattgatactgccacacacaagataaagtaaatgaaactcaattcataaatgcaattcattttttaaaatagaaaactttattataaaattctccaaaataaaaggaattgtctgcaataatatgaaaaatagggaataaaaatcccaaactaataattgaaattcaaattgctctgaaactaaacaattaattcaaaaataaaagaagattttgagcttcactttcatcttggattatctccacccatctgtccaaccatctgattcaactcgctaagatagcagctgaggctgaaataagaagaaaaacaaataaacatggttagtaggtccagaattaataatccaagtggataataattctctaaaactcatcagtttatatgaaaagaaataccttgtttctttgatagaaatttaggacattggggtttccagtggcccttttcattgcaatagaagcattttccttttggtatatcaccagtagtagcagcctttttttttaactgttttcacagcttgaatagg

SEQ ID NO: 354605 - DNA, 557 bp, Cannabis indica
ctggggaccatgaacctataataccaaactctaataaattagattatttatttaatctcaataatcaaatgatcctatttattaatcccattattactctagtaaaaatatagaattgaactcttagtaattatagaattatatttattgagtttactatattgtccattgatctaatcaataccagtgattagccctccatgtattgctccataattagttttggtcaaattacagttttcctcttctaattatagtataattttgatttgatctaaatttgcacacaactttcagttctaacattaacacttaagggaatcaatactcaatccatcaagaaagttagggttaccatattttctctgagataaattttaacaagtaaatcaaagaaactaataacatgaatatgacttcataatttctcaggatttaggttgatctactaattgatcatcgttgtgatatgacttaagtctttatagtaaacaattatatagtttgacaaatacatatcccaactgttgggttttatgccctaaataaaactcttt

SEQ ID NO: 354606 - DNA, 586 bp, Cannabis indica
attaaaggaattttccttattacttcttctctagttccttctaccatgtagaaagaaagtaattgagattcatccttatttagacttttcttttttctcaccttttgacctctcataggttcaatgggttgttctacaactttagcagaattctcctcttgagatcctcttttagaagtagaagcttgagaattatttttatataaaatattctcacctagaggtgtagaattttgagagttgtcctcatacaacttattctcaaaaaattctacttctttagattcaattaaaacattggattccacatccaatagcctatatgccttactattgttggcataaccaacaaatgcacattttatggcccttgaacccaacttagttccatttggttccgtcttcttacaataagcaagacacccccacactttgaagtaaccaatatttggttttcttcctctccataactcatattaagacatgtcatttttcttcataggtattctattaagaatatgacatgcggttaaaagtgcctccccccataagttgttgttcaacttggagtacactatcatagaat

SEQ ID NO: 354607 - DNA, 487 bp, Cannabis indica
tttttgaagttttaaaaaaagattggggtggtgtcaccccatgcgcgagcggatccgagtgatcacttggtcacacgcgcctcagataagggcctgttcgagttttctcggtctgaatcccctgttatatctgaacgttgggcttccgcgcgcggacgaggctgcttgcagcctctcaagccgaggtttctcggccgtgcactccttcctgcgcgcgcggatggtatgcactgcataccatcgcattaattcaattttttttttcaattttcttcagtttttcatgctttttaatagaattaatttcgaattttttgtgtaattttgtatttagatttttatttttcatatttcaaatctaattatcagaattaaattaattaaaattttttaaaattaatttaagatattagtgaaatttgaagcttgaaaataagtaaaaatctaattttttttttttgcttaattaattatcttattttttaaa

SEQ ID NO: 354608 - DNA, 576 bp, Cannabis indica
tgaagattggtctttggtgtatacaagaagacccaacaattcgtcctacaatgaagaaggttgtctccatgtttgaagacactttagtagacattcctattcccccatgtaacgattcttcttcctatttcttggatatatcagattcttaaatttgttattataaatagaataaatgggatttgtctcccaattatgattattcttgtaaagttttgaagtgaacttataaaaaccattgcaaatatattatttataggcaaacctcctaactgactctgcactcctaatttagtgttgaacacagaaaataaataaaaaaacaagataaataggacaaaaagacaaattcattacttttaaattgcgtatttatatattaataataacaatgcaacttaaacacaactatggtaaaaactactcttaattacaacttaattagtagctcaaaagctactgtttttaagagtattaaaatatggtaaaaactaaaataaaaagtcactaatttagatactacatgtgacttttttcactttacactctcactagaacactttcatacttttgttg

SEQ ID NO: 354609 - DNA, 1020 bp, Cannabis indica
ccagaagttgatcttttgtcatcaatatcagtagcccaatcagcatcacagtaggctttgatttcaagatgttgaggctttgtgagatgaagtccatagtgtatagtgcctgtaacatatcaaagtatccttttgacagcaagccagtgggaatgaagtggtttttccatgaattgacatactttgttcacactatatgacaattctggtctggtgatggtgagatactgtaatgctcctacaattaatctgtacatgtgaggattatcaaagtattcactgccataaaagctaatagttgtaaaaataataataaaaaattgttgcagattgttgttctctggttcatcttctcagtagtggcgacaacagataaggatcggtggttttcggcctttaagacactagttcagtgggttgttgacggtgaggacatgtaagaatcatagggcgtgtgtgcttttgaatttggggcttcaagagatgggagaagaaaaggtggcactgaaagaacttagggctttggtggggggacttccgaatggtggcgaaaatgacgggaagggaacttagggcttcagggggtttctgtttagatctaaagagagagaaagagagagatgtttttaattgaaaggggtagaatgcgtatgtaaaaataactaattatagattgctatcaattattttgagtaaatatttttagatatgtggtaaaattttttttttcttattttaatgaaatttcccaaatataattgacacttttgtttttttaattttttaatcacaaaatgaaaataaaatttttgttttttaaaaacagaaaataaaagtgtgttctgtaaagtttatttttatattcattttttgattttatttacgtcgggtctaggtccggggtcggattcgggttcaagtcagaggccgggtttagctccagggccgtaaggggatttgggtccgggtctgatcgaagtccaaaatattgattaagaaaaaaaactatttaaaaaaaat

SEQ ID NO: 354610 - DNA, 668 bp, Cannabis indica
ttcgatcagactcggacctaaatcccctacggccgcagcgctgaactcgacctctgacttgaacccgaacccgaccccaaacctagacccaacgtaaataaaatcaaaaaataaaaataaaaatgacttttacaaaacacacttttaatgttttctgcttttaaaatttaaaaacaaaaactgttacagaacgtatttttattttttaaagataaaatttttaaaaacaaaaactttatttttattttataatttaaaaattaaaaaacaaaagtgttaccaaacgccacagctataattcacaataattctcatgtatcttttattgtgataataacgatatggattttctacaacaataattgacagcgtacattaagaaatatttgatcagattccaagaaacttcacattaaagttgtgtattattaagctgtactaataaccagatataattttatattttgaattttgttataaagacgacccaacgatggcacttacacctaccaagtagtttttaagaatataaacctaagttgagtagcactactacaaaaacaccctttagaggcggttttaaagccctttaggcgtcggttttcgcgaaattcgctaccgacgcctatcagggcgacgctaaagggtttatttgaaccgacgccata

SEQ ID NO: 354611 - DNA, 664 bp, Cannabis indica
attacactcttgattacatagaatgctctatataccaaatatagttacgttatgaattattcattgtttcaatctatacaatcaatgatcttctatagatggtttacattgaatagggataaatttactgttttacccttcaatgtattttatccttaaaacacatagctacctataaatgacatttcagtaaactaatataattaccgaaataagagctcttccatttatgtcattaagccagactctaaggaaactatcgtttagattttatatctatgattaatgctcactcaattgcactatcgaattctcaagatgtaagtatgggctagtcttacgggtaagcgggtaacaaacaagtcaaagaatccatatagtatacaattaagcaagaacttaaccatctcatgattaagattaatcgatctaagatcaactaagtgacattgacttagaaaagatattacagcaagcttattgtaaaaccctggaattaagaaatggattagaaaaactctaattagataattgtgaataattgaggaattatattattatatagttcaatttatgtgaattaatatgatttattatatggtaagaccccgttggtgagccaggggtattttagtaattatgacccgagaagggtaaaatgatg

SEQ ID NO: 354612 - DNA, 754 bp, Cannabis indica
catagtgagtaagacggtggtaaccaacccgaaggagagaaagagatccaagctcagatcttgataatactctatgacagaaaggaacaagagttagagatctgagcggaagtagtcattatattctgctgcaaccaatttaaggttttctaaactcttaagtgtttaatttcattattttagagatattcatatttaggatgttaattaacatacttgttagaaaatctagatcctggtaaaatattcccaacaattggcctcagagccatggtaatgatttactttcttgaaaatatagatttaaaacaatgaatattttttattgtgttgatttaaatgtattcatgttggtttatgtgttatttgataaatgtatgtgatttacgaaatttttccatgaaaataatttcattctgactctaaaaatattttatttggattccttgtgaaaaattaagcaattttggtttttacggaactcgattttgataaaaattgaagaagttagggtgttttgaagtttcaggttgaatgggtgtcgagatgctcaatagcacgcgcgcgcagggctttggacaaggtgatcctgccgagaaaactcggtgcaacaccttgcagcatcccttccccgtgcgcgtaggaggctgcatgcagcctcctcgtgggtagtttgcatgattgcacccaaaaattcgattttttggggatttttcacccatttttggatttttcaattttcaaaccctaatat

SEQ ID NO: 354613 - DNA, 896 bp, Cannabis indica
ccattcacttacaatttcttctttgaacttgttgtcataaacaagtccaatgtccatagatcccttcaagtatttgagtatccatttcacagcagaccagtgttccttaccagggtctgctatgaatctgctaaccatgctgagtgcataggccaagtcaggtctagtgcacaccatacaatacatgacggcttccaacacaagaagcatagggcatagaatccatgtatatcttttcttcctctgttttcgtgactgattctgtgttagcttgaaatgctgagctaaaggagtgctaactgatttggcttcattcatacagaatttgtcaattagtttctgaatgtaagccttctgagataatgatagtctttcaggtcaaactcttttgatgtcaatcccaagtatcctcttagcttcaccaagatccttcatttcgaattcagcacttagattttgctttaacttgtcaatagcctgtctcttctcaccaattatcagaatgtcatccacatacaacagtaaccagattggttcactgttgtagtacacacatggatcatagttgtttctgttgtacccaatgctcatcataaattcatgaaatctcaagttccattgtcttggagcttgcttgagtccataaagggatttttgtaataggcatacctggtttggtttattgcttttatatccatctggttcttccatgtagatttcctcttcaagtttcccatgtaagaaagttgttttcacatccatttgatccatttctaggtcatagttggccactttagtcatcatgatccttatagatgttatctaaccacaggagagaaaatatcattgaaaatcaaaaccttctctttgattgaatccctttgcaactagcctag

SEQ ID NO: 354614 - DNA, 599 bp, Cannabis indica
gggtggttgcatgtttggttgcttagaattggtaccgaccgatttttacccctaacaggattttaaagaggttcgacccctttatttcggtaatagcctactccccttagcttgtattaactagagaacaaagaatacaattgtttcctctctcaaagctctcacaatgaaaatctctgagtatttatctcttacatctctctaaagtaattcttttgaccccttttacagtgaggatggatcactatttatagggctaaatgcatgacggaagttttcccttttgcttacaatatctataattggtgagaacacacattacatatttagaatacatgaaatgagagattcagatatcttgctatatccctttgatatgatcctatgattgtatggattgcgtttatgcttcacgatattagtcttgaagttgctaagccttggtacattgtttggagaaatgaccttatttgttgtccagatcatatgcccttgccctgtccggtcaggcagactttgtccatacagatatttagttgatgtctatttggaatatctcttcagccagacgtaggaaatagcagacacgtgtcaccagt

SEQ ID NO: 354615 - DNA, 867 bp, Cannabis indica
agatttttctcttaatttgcttatcttgtaggtaatgactttgtgaaggtttttattatatataacaattatttgactttgtcaacccaagctttatttggcgaagtatttgggcggctcaagatcttgtaaagcaaggagctcgacgagctattgctaatggaaatacggttagcattttacatgatccttggtacccaatgattctaatccctttattttgtcctctaatccgggcctagtggatcaatctgtgtctagtttgatgataactggggagcgatcttgggatgttgagcttcttaatgatatgtttgaagagcgtgatgtcaacttaataagaagtattcaacttagtcaatctcgggctgttgatggttggtattggagtatggaatcttcgggtttctattcagttaaaagtgcttacaagtttctccaagcatcgagaggaaattggttgttcatgcaagacgacaatttttggaagaaactttggaagctgcccgtgccctcaaaagttcaccacttcctttggaaggcttgctctggttgcctcccaacaaaggtacaacttcattcaaaacatgttaatgttgatcttttatgtcctttgtgtaatatgcatgtggagacaattgttcatgtcttggtggactgctctttctcacgctcttgctgggctttatcgtctataaaccagtcagctactggtacaaatgctgaattttgtgactggttttttgacattcttgctgccggcagtgaggatgtagcatgtgaagctgccatgttgtgttggagtatttggaatactcggaatgaagtgcaatggcaaagcaaaaaccgaactgttttggaagtggt

SEQ ID NO: 354616 - DNA, 572 bp, Cannabis indica
caaatagtttaatacgagtatagcataataaagcaaataaagatactaaaattttatagaggttcagccttgagcagttcggtaatagcctaatcctcgttatttgtattgacttaagaacaaggagaatggttccttttcttagagctcttacaattatatctctgaatatgaattcttagaccaaatatttcgacccttttcccagtgaatatgactcactatttatatggctataagcttgggaggaaagtatttcccttctagttacaattgatataagtagaaagattgcatagtaaatacagaatacactaattgtgggatttggacagctcgccatatctctgtaatctgatcccaaagttatagggatttctttgatgactgacgatgcaaaagctgaatttgctaagtgttggcgtgttgcacggattgctcactgcttggctaagaggacttcgtctgagcaaatgtatgtggtgtcttgttcggcatatttcttgcgatcaagtacccagagttgattccatgtgtcaccatcgtgcgatgccacgtcagagtgcaaaaat

SEQ ID NO: 354617 - DNA, 773 bp, Cannabis indica
aggagataggaaaaggcccgggaagaacaacccagagaaaatgagataccccttgaaaattaaaacgaccagccagatgggagacaaccgaaaactgatgaacgagaaatccctcatgaagatgaggaggatcttgggactcaactaggggaacggaggtcacctgctagaaatcaccaatgttcttaccaaacccatagagcgagcaatcgtatagaccctaatgggggaaatacgacaaaatgctctcgggaggaaagaacagagcttgaagaagaaagtgtgacttcgaggcggtcaagaatccatagtcgatcaactcaaagaggagaaagtactcaacgagctaaggatcgagaaagtatgggaaccagtaaatatgtgagcctcttaaagaaaaagtctatgagtaggacgcgatctatgagtaagacaagatctgccagtaattactcccaaccggatctgcaagagcacttgaatcgaaagaaacctgaacttcaccaacagcttggtccaaagcaagaggatccaatccaattgtggataaatgagctggaggacaagttcaggagatatcaagttggggaattagggaaattatctggatacgactctgacgaggagcttgagtcgtgtcatccaaacataatgaataccccttttcctttgggattcaagaacctgcatgtctcgtcatatggcagaaccctgatccggtctcgcatttgaataactttaatgcgagcgagtaatgtgacgaacaatttacg

SEQ ID NO: 354618 - DNA, 1107 bp, Cannabis indica
ccatcaaattgagttccattatcagatactatcttgattggaatgccaaacctacatacgatgttcttgatgacaaaatcaagaacctttttgcatgtgaagaagtcgactgccacaacaacatactttgctccacctcgccctatgggtaaagccctaatcaggtcgattccccatatcgtaaatggatatggcgaggtcatcattcttaactaggttagtggtactcgaggtatatgtgaaaacctttggcatttgtcacatctcttgaaaaatttgtgtgtgtccttattgataattggccagtagtatccttgacggattatcgatccttttagataagctttgccaacctgcttgatctccacaaatatcttcatgaatttctctgattatttcactagcttctgctagtaacacacatcgcattagttttcttcttcaaaagagattacacacacgtcccctactcaggtaagtgttcatattctctctgtctgtgcgagaaggcctttgtggatgccttgggagtcgaccattggacctaggttgatttctaggatttcttccatgattacgagaaatttcctagtttcctggtcgcagttgtctcgcctctacattcatgcaagatgattttggtatgtttgtccattcattcctttggttcgcaaatctataggaagttcttgaaacatctcgtcaatgttcttgattttttgtattacctgagttgggttgattttctctacccattaggacctctcttacattcccaggttgttcttcctgagtatgtgggggattcctttggttattttcatgtctcctagtcctggagcctcaaggtcttcctcgtggtctccttacaaatggatcaggttgattttagaagttccctgtgcagccctggctgccacagattttcattcaaactcagaatttcatcggtttgattagctaggcgttgtcgaagttgcctattttctaattctattagagtggacatatctggtaggatcataggtatcatcactccttctttctgtaatttgatcaccagtagtattaaaattaccatcgttcctccctgaacgtggtgtttta

SEQ ID NO: 354619 - DNA, 783 bp, Cannabis indica
cccccaggtgtgacaagggtgattcctgtgccggacagttgatctatagccgacccgtccaaatgtagtttccaagtcagcttgtcttcactattacttggctgtggtatttgtactggctcgaggttgccttcggatatgctttcttccttgcctgtgcattctaccacaaagtctgctaaggcctgacctttgattgctgttcggggatggaaagtaatttcatacttacccagttctactgcccacttgagtaaccgtccagaggcgtccggcttttgcaatttttggcgtaacggttggtcagtgtacacccaaataggatgagattgaaaatagggccttaactttcttattgctagaatcaagcagtaggtgagtttctctatcaatgggtatcggccttcagcctcaatgagtcttttactaatgtaatagaccagatgttgtatgttgttttcctctctgatcagtataacactcacagcatgctccgttacagctaagtatatcttaagttcttctccgtctacaggtttcgagagtacaggaggttttgcgagttgcgtttttagctcttgaaaagctttttcacattcctccgtccactcaaattgcttatttcatcgcaggatgctgaagaatggaacacacttgtctgttgattttgaaacaaatctgttgagtgcagcgatccgaccagttaagctttgcacttccttcattcttgttggcgatttcatatccaggagggcttgaatcttctctagattggcttcaatt

SEQ ID NO: 354620 - DNA, 555 bp, Cannabis indica
accgagtctagtttaattatgccttaagcgcataattcataatctcaatatatacatatatacgacatggcatagtatttacacaacatatatcactagggtaataaccctaggctattaaccgctcatattagggtaataaccctaatcccggttacaattactcacatatatcatattcaacataagcgccacacgcatactctacgtgcaaactactatcttacctgttttcctgcaataatagagcttccaaacccctgggtgctcctgatcgggtgccggtagtcctagtcacacaaccccgaatttcacaaatacggttaatccctaatttcactttcacaaaatataaagttggaattaaaaatacagataatcataaagagctcggaacgagatttccaacgatataaagaacgtccaaaatggagtctcgagtcaaaagttatggccaaaacaaaatcggaaaaaagatggctccctgccaggctttatggccgcggcgaccatagatctggccgcggccactgggttcgaaaaacccagaaaacc

SEQ ID NO: 354621 - DNA, 707 bp, Cannabis indica
gtttagttcataatcacaaacataataaccacaataatcatgttcataattaaataactaaacaaagaataaagaagaagaagaagaagaagaaagaactctaatgatgatagttgatgatgattgcttgaagtctcttctcttttgctcttcaatgtattttctaatctcaaagttgcttgtttctatctctctagtcgtctctcctttaatttgatttagatccttctttatataggccaacaaagatagatcaatcctcttagaattaggaatttttttaaaaaatgatacgtgcggcgttatagcgcctatacctcgcgttataacgcccaagagaaaaaatcccgaacttgtgctaaaattttcataaaaaatcattttttccagccgagcgctatagcgcagccccccgacactatagcgcccagtacaaaaattttctacttcaaccttgctcactaaatcatgcataacttgtgcgtcaggactccaaatgagatgatttaacatattttggaaagctgggaacgaggtctatcattttagatttcataagctcttcgagaaaatgataaaatcattgtcaaaaatgggctcaaagatcttattccatcgcgaaatgtctttttcagcacaaacctacacacttggagaaaatacaacaaatctatataaaaataaatactaatccatctaataattga

SEQ ID NO: 354622 - DNA, 1131 bp, Cannabis indica
gcctttactaatccaaattactaaagcagtcattaccattatccccccgtaaaaaggatttcgtcctcgaaatttaacctgaataactctggatgttgagtcctcatctcagactctaaatcccaagtggcttcttccaccttgctatttctccagagtactttgactaaagcaatggtcttattccgaagaaccttttcctttctgtgaagaatctgaacaggttgctcttcgtaggataagtctgattgcagtgcaatagctttatgaagactcatccaaaattttgatgtaaaccttggatctctatctaaaacaatggatttggacacgtagtctatcacgtctcttttcatcccataccaagtgcggttttagatcctgatacattttggtggttcccgatgtagtgaaaaaggtgtggtgtgagcttcatcaaggacttctttcttaagctcatcaacactgggaacataaacttgagctttatacaataacattccattattcgagattgaaaagtctttaggccgaccagccatcacgtcatctcgaatcttgactagctcgggatcttctagttatgcctttctgactctttctaacaaatcagactggagtgttaagttgtgcaactttccaactacaaattcaatccccacactgaccatctcagaagccagttgaggagttatcaaaatagtggttaaaacctgcccgagacctcttttactcagtgcatcaaccacaacattggctttcctggggtgatacaaaatctcacagtcataatccttaacctgttccagccaccttctttgcctcatctttgaatctttctaggtgaaaaagtacttgagacttatatgatcagtataaatctcacatttctcaccatgaagataatgccgccatatgtttagagcaaacaccacagcagcaagctctacgtcatgtgttgggtagcgctgttcatagtctttcagttgatgagaggcataggctatgcctttatcagcttgcatcagaacacatcccaaaccctatctggatgcatcgcagtaaacaacgaacttttctcgatctgatggcaattctaacaccggagctgttatcaaacgttgcttcaac

SEQ ID NO: 354623 - DNA, 557 bp, Cannabis indica
ttaattgatggttttaatgatgccttggttgattgtggactttgtgatatggatctttttggctacgcgtatacatgggaaagacatcgtggcacggacgattgggttgaggtgcgaattgatagagctttggcaactcaagcttggttggatttatttcccacggctaagttgtataatttggaagcaaccacttcggaccattgtcctcttcaccttgcaacccgtaatgcgatgacagtggctttcaatcgcaagttcaggtttgaaaactcctggctcaaagaacctctttgtttcaagattattgaagaaagttggtctcttttaccaaatcttgaagtgttggaaaaaattaaaaattgtggagactcgcttcttgtttggggaaaggattataccggcaacttttcacaccgtatcaaggaatgcaagcagaatattagaagatggaagaaaggtagagatatggtttcgttggagcagtacaaacaagctgtggctcaactcaacaatgttctccttcaaaaggaaattttttggaaacaaaggagcaa

SEQ ID NO: 354624 - DNA, 854 bp, Cannabis indica
gccgggatcgagttctggactaattttaagtatgaacatctacccactttttgctttatttgtggaattatggggcattccgagagtttttgtccacgatgttttgaggttggagagggtcagataatcaagctgtatggggaatggatgcgagtgagacctatacgtagaaaccacatgatcggagctaaatggcttaagcagtttaatgctgccatggacgatgtttctgcagcaaaaaccatggctcatggtgaggtgtctcgatcgacgatggcaatggttgaggggaatcgtggtgtgttagggtcggggctgatgatagtggaggacacttcgggtcaatgtgaggcaggaataggttcatcaaaggttgttaatggggattctatagttgtgaaagatatgttatcaactgctccgaataaggaaatatcaaatgatatcaatgaggaggcttgtcttttggtccttgatacgaagaggagaagaacgactttggaagatattggtggggcccatgtgaggggtgaggtggcaacgagtcaagaggtaaatggttcaaagaacttgagtttggtgggtactggtgtccaggcccaccaaccattatgaatatgttatcttggaattgccatgggcttgggaacccatggactttacaattccttaaggatcttgtgatccaaaagaagcccagtattgtgtttctttgtgagactctatccaatcgttctcagatggagagagtgcatgtgacgttgggatttgatggcatgatagtcgtagatgttaatggtaggagtggaggtattgcgttattatggaaacttgaggatgaagtgtctttgctt

SEQ ID NO: 354625 - DNA, 730 bp, Cannabis indica
tatatataaatttacattatttatacatgaaacagagagagatatatatacaactcacgaagaggctatgaaaagaagagatcagcaagttaaaatctaattttagagcaagatatatagaaacatttattatatagacaaatttttggttgttatacacatttattgttaaaatttgggataagatgaattgaggtttcatctcaaaacaaaatgttaatgtgaggagtagcccattcatcttatatgacaatttattttcacacataagaaatgtgggactaactaccctccatcacgtttaggccaaatatcgaaaaatttgtagattttaaaacaggtcaaaaactcaacattggaaactgacacacattggccgaaaggtcccaaatagaggttaaagtggagatagtgaaagtatctttttagaccggtaacactttagctcacaacagatcacaaacggctttttagaccagtagcactttgggctcacaacagatgactttgatatcatgttagaatttgagataattaagatgaatgaaattttctcaaaactaattggcaattaataatgggagactcattcatcttatttatgataatttatttctaataatataagactaactctaatatttatcaaatattattttaagtaattgatggttgacttaaatatctttatctttatatattaaaagtgcctatctaacggcatttcttg

SEQ ID NO: 354626 - DNA, 568 bp, Cannabis indica
agctgttatcaaacgttgcttcaactcctaaaaacttgcttcacatttttctaaccatacaaattgttgatttttcttagttaactcagtcaatggcatatagatcttagagaatcccttgacaaaacatcgataataccctgctaaacctatgaaacttcaaacttctatcactaattacggcctcggccaactcttcactgactcgatcttgcttggaccaaccataattataatctttctgacaatatgccctagaaaagatacctttgacaaccagaattcacactttttgaactttgcgtacaacttgtgatccctaagtcgctgtaataccatttgaagatgatgctcatgctcttcttctaactaagagtacacaaggatgtcatcgataaacactatgacgcagttatcgaggaaatccttgtataatctattcataagatccataaaggtcgcaggagcattagtcaattcgaatgacattaccagaaactcgtagtgcccatatctggttcgaaacgcagtctttggtatatcttcctcccgaattctgagttgatga

SEQ ID NO: 354627 - DNA, 691 bp, Cannabis indica
gatttctactgagccaaacaccggattccaaagtaccgggcaccggaaatgcaaaatatgaaaactactgaatgacataaaatgcattactgaattcaataaataacagtataataaattatttaaatagctataaataattttcataattaatcataattaactgctaatttccaaattaatctaagcaggccttacactaggattcatagtcagtgcagtggataccagccaacctgtgacatctagacctgagagtacaagattggtgtgcgagttccttaacgtctttctagtagatttaccgagattgccacctacccgggagattgaatttcttattgaggtgctttatggatcgaatcccatatcaaaagcaccatatcgaatggctctagtggaattgaaagaattgaaaatacaattgcaatagttttcgaatctgggatgcattagaccaagctactaaccttagggtgctccggtattatttgttaagaagaaagatggatccctgtgaatgtgtattgactaccaggagttgaacaagcttaccatcaagaacaagtatcctttacctcgaattgacaatctatttggtcaattgaaggggaagacggtcttctccaagattgatcttcgctcaggctataatcaactgagaatttgagacgaagatatcccgaaaact

SEQ ID NO: 354628 - DNA, 623 bp, Cannabis indica
ctaccgaagaggactcagcatgccatgcctaaggtgtgtatcggaccatgaagctaagcaaattatgctagaggtccatgaggggttctgcggaggtcatacaggaggcccgagtctctcaaagaaaatattgagacaaggatagttctggccaacaatgaaaaacgattgtatagactatgtcctgaaatgtaattcgtgacaaagattcgtgaatataccaagagccccgcccagtgagatcaccctgatgactagccctggcccttcacgatgttggggatagatcttattggatcactatcaataggaaagggaggggtaaagtatgtgatagtagcagtagactacttcacaaagtggacagaggctgagcaaatgaagactataactgctaaaaaagcactagactttgttatcaaaaacatagtgtgtcgagatggcttgcctcataagatagtctcagaaaatgggaagcagtttgactgcgaagaatttaccgacttctgcaaccaacacggagtcatcaaaaccttctccgtagtggcaaatccacaaacaaatggacaagcaaaagccgtcaataaaatcctaaaaggcaccctaaagaagaagctgctggc

SEQ ID NO: 354629 - DNA, 780 bp, Cannabis indica
gaacttggaattgaatatcaatatactgtctcaggcactccacaacaaaatagatttgtagaaagaagaaatcacactcttttggaaatagctaggtctatgcttagctatacaactctgtcaacgtccttttggggatatgctatttagattgcaaataatattttaaatgttattccatctaaatcagttcccaagacacctgtagaattatagaattgtcgtatacctactttacgctattacaaaatcttgaggtgctctgctcgtgtcttacaaaataaataaggcaagctagaaacgcaaactgaagtttgcatgtttctaggcaattttaaagagactagggtggactattttaaagtcacaaagataataaagtgtttgtttctacaaacgtcacattccttgagaatgactatattaaaaacttcaagccacaaagcaaagtagtattggaggagatactttcagaattaactccaactaatgttccatcgtcctctactcaaataaacgatgatcccactccctcggttaaactaatgcaaattgacacaactaagaaaactatcactaatgttctagttcaaaagatcatgattccttgtcgtagtgggaggatttctacaaaaccatcttgttatggtttagatggtgaaatcaatatggttgttggtgatggtattgatgatgacccattaacctataaacaggaaatgcaagtctggaatagaaacaatggtcaatcaacatggattcagaaatggattccatgaa

SEQ ID NO: 354630 - DNA, 805 bp, Cannabis indica
aagctagccttagtggcttgaactaaagattgaactttcttatatatagtattttattacatgaattttggatttttatgttatgttttgatttttatattattatttagatagacctattacttattaggttaaatatatactttgaaaaaataaaagtaaaaaaattataaaaaatataaaattatttaacaaaaaagtaattaattataaattctgctcaaatcgtgatttcgaaccaaattaatccatttttaatggtttggtttggtttaatttagtttaaaaaaattattactctaatttaatttttaatattcaaaaaatcattatactaatttaattcaaaaaaaaaatataaaaaattagaccaaaacatcataaacaccttaattacaatgcaatattgtttactatttattcaaaagaattagggcacatgtaataaattacattcatattttctatatttggagggtgtcatgtcatctaattatgggttatgtttatggaaaattttgacgaatcaatgatgttgtgattgctgtcattttctaaaacttttagtggttttattttgttttgaaccatttttttaaagctttattttgtgtatgtgagtgagtcattcaaataaaattgtgcgtttttttttattattaccgaaaataatttgcggcataaatacttaaattttaactctaattgcaaataaatatttaagtttagtttttggcggtaataatacttaatttatatttttaaaacttctgtaggtaagcattaagtaaattgtcatgtgaca

SEQ ID NO: 354631 - DNA, 1033 bp, Cannabis indica
ttttgttatagtatgatgaaatagatgttatattgcttatagaaattagtcacttttcttgcaatcacagtgacctagggatgtaagaatatgtatttataatgatgcataattagagtgctttatgaaacactgaagttgtttgaatatgctaacgtgtgaagtagaatgctttatgaagcattgaaagtaagtctttatgataatgtatgattagaatgttttatgaaacactaaggttgttggttatgtataatcttgtaataagattgctcgtatagactctgaattgtatatgtacgttgaaagagtatgacctattggtatgtatattcttttatctagtagattttcttactgagtcaatgtgactcacgggtgcttcatggtgcaggtatgaagttagaagttgtgttcgaccatgagttggaggttttcccatcaatgtacatatccgccgtggtgttttggcttctaggaagtaagatcgacttcttttctctatatttgaaaatgtaaccttgatttcgtaatagtcgttttgtaaattagttgtaaagaaattttattagcaggggatccccatattacgacagtgtttgaaatgaaagtttttattttagatttactgaaagattttaattaaaccacactttttcctaactaataaacctgtaataatgcgtttgtaaaagcacacacgtggcaaactgagagtcagggcattacaacatggtatcagagcgaccaaggttcaaagatcctgaagactgacttgatatgtacagtggctgcgaagactcgttcaactcatggcttagtaagtgcttcttgttagttgatttgtagtttatttattgattgtttgcattatttgcttgtctaaaatgtgtaagctattagaaaagcatgataagtggttataaaaattgttaagtatgtttatgcatatgtggtaatgcttattagcattaattctggtttgaaagattttaatgatggaaagaaatgatctcgagtgtactggaaaatg

SEQ ID NO: 354632 - DNA, 515 bp, Cannabis indica
gacccagaccaaaacttggaccgggacccaaaaacacacaataaccgggacctggacccagaataaagatacagacttgggaaacagaactacgactgggacctagtacccggcactagaaatggaaccagactggcacacgagattgggatctggatctggccccaaggcttagacaaaacccgtagtcggtgtctggactagggatctagcactggaccagaaccctgagaaggaccccaacccacacctggacctgaacctagtcccaaacccaaaagttgacccgaatcataactgaagttgaccgggactggaactaggacttggacttcgaatcataactgaagttggaagtagatccagaaccgtaaccggactaggactcgtactccaaatcaaatctagagcagaattgggagctggacccggatcccaaccgaaaactggactcgggacccgaacccgaaccttaactcagacccaaacatggaaccagactagggacacagaac

SEQ ID NO: 354633 - DNA, 773 bp, Cannabis indica
tcatggtggtgacatcatgaatctgagacaccgtgtcccaccagactaacgcgtcctcttgaaactgaaagttggcacacaccaccctttcattcccgctgacacccctaaagttcagtatccttgtaatcacctttagccactgctcggctttcatgacatcaggacctcccagaaaaactggaggtgcctgcttccggaacctttcatacagggattccattctgtttgtcgctaccactatctcggcctgagcaacaggggcaggtgccacaggagcttctggcaccggcactgcaggagcatcctgctgcctcaacctctggatctcttgatcttgctcctctattctggcttgcatttcagcaaacctagtttcgaaattctaggcttcctggttggcttgagcagcctgggcagcctgtggcgggttatcatcaacccgaccacgggccctggccctaagatctctaccacgacccctagcatgcgggggaaactgagctccttgtccctgattttaccctactgagttgccctgactcctagtctttcgcctggcgtccatctagtttgaacagcctgcgaaaccaagagttggcacatcaggtcatgatcaacgagagcttactaatgccgcttaatttggaaattaaaaacatgtacatgttctactatcaggctactaacatgcttcctatcaggcttttcttatttcataatatttaaataaactactaaaacaataaaagcttactgaaccgtagaacgag

SEQ ID NO: 354634 - DNA, 595 bp, Cannabis indica
tttcccaagttcaccaataaaattggctacgtctccgtttgagctgctcctcaaagttgagagctcaattccactatttcttgttgatcagaagtacatcaatggagattccaagtcacaggtaattttcagactggtaatctcttatttaatacaagtattttgtgtttaatccctctctcccttaatatctaactctctgtttgttttcttgtgcatgcgagatcatctccttcttctccttcaagcttaaagcacctggatcttgaagtgaaccctcaaccgtacctggttgagtttagatgcaggtatatatagatctagggtccttatctcttgcttctacatttgttagttagattagttacagattttagttaggcgtggattaccaaatccattctaactaatttctgttagggattctagaggccgaaggccaaattagggattttcttgtaattacatttctgtccttgtattaagttaaatatcagtgtaagtggaggtttactccaataatttccacctaagccttcactgagctgatacattagtggtcgagtcaaatctgagggtcatagctctgtgatcc

SEQ ID NO: 354635 - DNA, 804 bp, Cannabis indica
aataatttccaacagttctaaccaccaccccttctccacggtgtcgaagcccgtcaatccgcaatgaagaattagatatcccgaccgatccgaaattttggcattgtttcacgcgtaaaagatagcccatgatggtggaatatgtaatctttaggcatgaaatcttattaaatttttaaaattaattttcagatatctcaaaaaaatattttcacggtattttctatctctaattttgtagacttttattatttttactactatttaatttaaaaagttttcatttttaactgtaaaattaagattttttcttttattttaaattttatatattacatatatttattttctcgtctattctttccttttttgtagcttttatgatttaaatacattgtgatttagatacacttgaccttcgttttaggttttaaatattcattaattttttaaatactcaattttagggattggccgttttttaaaatttatgatttaattagattatttttttaaaaaaaattattcattaattctttatatctattttatggttgtatttatttattaattaaaataaattaagttattttaaattattttctctactgttttattctactttaagtatatagtatttatattgcttttaaacgtttttgttattttgatatttaaagtaatttttgtattgcagtgtaataattattattttgttcctttccaattttaattttattgtcggtattaatttatcaattttttattttaattttgattgcatggtattaaatttaatataat

SEQ ID NO: 354636 - DNA, 588 bp, Cannabis indica
gtttcccggattagggttttcgatcatgtgatttacccagtttcattatgtgattagggcatccatttcgcacaagactttccgttcaggttggccagcacactttaatctggaaggaaggtaagaactgtatataatgtgtaatatgaatatctgaatgtaagtatatgtttagtgtatgtgcattcttatatgttgtgattcatatactaccaacacttgtacggttgagttacggagagcattggtaaagtgtatgatgtctgaaagaacatcgtggtgttacaagcacttgtatggaaaggtacaaggtgtttgtggaacaacacttaacaatactcaaggtgcggtcaataccctacctacactagtacaaaggtatactcagtgcatgtggtacatggtacatggtcatatccttagtagaacgttcttactcatctgttgagccttgtaaataggtgtatgggcgcctagatacaaatcgatattatatgatatgttatatgcttttcttactgagtctgttgactcacaattctgcttccatgtgtaggtaaaagaaaggcgaaagctgagcaggagtga

SEQ ID NO: 354637 - DNA, 942 bp, Cannabis indica
acagtaaaattgactttggaggtcggtcttcaatttctagaacttgagtcgtgttcgcaggacccactttgggtaagtagtagcttaaatttgtaactctcttgaggacgaaattagagttaagaacttcataattgtgattagattaagtatgatacatgacttgatagatcattgaaatagcttcgaaactcaagttgaagtgcgtcaatcgaatcaatattgagtgagttacgactgttttattgaaggttgttctcggaccagagcctaagttgacatctagcacccaagttcacatatgatgtcaactggacgctaggtgagtagaaaaacgtgttggggaatgtttttttttttatgcctaagtgatattttgacatcacttagtttgtttctatgttttggtgaagttgttcattagttctcagaggtgttgttatttcgcgaaattaggagactttaaactgcccaatttgcgagtgagtcacttttctaaaaagtgaaaatatgaagttgtgatttgacatctgacttgatagctctcagttactataaaaaaactagacgaacgctcgagacagaattagaatcggataagcagaacccaatgcaccaggtcacatgtcaacctaggctatgggtgctatttttggagcttccaggatgttgtttttatactttccaggttcttaaaattaaggacaaggtcttaccctgtttttgaccatttcagagagaattctcgtagcagagtttacatttggatgatcaaaaccagcgcaccaggttgattgccaacctgcgcgctgggctcagttttcatgcccctggaattcttgttttcttcttgagtttacttgtatcttcattattttcgatgatgaaaaaaatgcctaaaatacttttttggaaaacatgattggaaacagcccaagttga

SEQ ID NO: 354638 - DNA, 515 bp, Cannabis indica
gatcgcttggcaaggtttgcctaaggaattgtgccaacgaattttagtgaaaaggtgaagtacttggataggttaaatgcaaaaaatcaaacacgatctaatgatcactactgacgacaaaaccacttatgcggaaatggtggataaagcactgcgagcatcccctgcaggtgccaaggaaactcagtgtgaggcctgcagattcctctttgcgcgcgcgtatggggctgcttgcagccttcttgggctacttgtgcagcctcctgggcagccacctaacaacaaccgaattttgtgggatttttccccaattttggatttttgcaattttcaaaccctaatttcaaaataaaatattatttttaatatatttgactttgaaaaaccgtgtttttgcaaatgtcaattatatataagaaaatataaaacagtatgcgtctacagaagcataaagtaattctgctacagcaaaacagaactggcagaatataaaatatttgcagaaaaataaataa

SEQ ID NO: 354639 - DNA, 670 bp, Cannabis indica
ttggaataaaaaaaatagtaaatttgttttggcttacgacacggatcaatataatcacgattatattacactgtgctgatgacattataatcaggaatatatatatatatgttttggatttaatggaatctatacattaaatataagaaaaatactccaacatcttactaaagtaaattgcttgcactgggagctggtattggaaacaggtattggcagcaaaggacaagctctagcaactcactgcagtgcagcagttcacacagagtaagttccaaatctcagcagggtatagcttgctatgtccaattcaaagcaaggtacattggtgtgatgaagtatggggaaggttcaacatccccaagcatagctttatcttatggctagctgtgcagaaaaggctcaaaacaagggattggctcaaaaaatttcagaacattgctaatacaaactgctcgatctgtttgcagcaggaagaaacatctgaacatttatttttcaggtgcccattagctaaatattgtgtggagaaaatcaaggaatggttgtcttggagaacacaagaaaatgacctccacaagcttctcaaatggatacacaaaagcaaaatcagtaagataaagaaaagagttttggcagcagcgattgcacatttagtctactccatttg

SEQ ID NO: 354640 - DNA, 649 bp, Cannabis indica
cgggcattaacataaagcccagaaactttacacgagcttgactcctaaggagacactttaagggattgagtttcatgttctatttcccgaggactttgaagcattcgtctaggtcatctatgtgccccctgtcttgtaggattttacgagcatgtcatccacatatacttccatgtttcgtccgatatggtcattaaacatcttgtttaccaatctttggtatgtcgcccaaccgtttttgaggccaaattgcatgactttatagtaatattgacccatctctgttttgaaacttgtatgttcttggtccggtggatgcatttttatttgattgtaccctgaataagcgtccatgaagcttaatatttcgtgcccggctgttacgtccgcaacctgattgattcttgggagtggaaatcaatacacactcgccatttcttgttcggcttgggtaccagtacgggatttgcaacccaagccaggtagaaagcttcaattttgaagttgttatttcgtagcttctctacctcttccttcagggctagagctcgctctttgtccaacagccttcgctcttgttgaactggtcagaaattgggatcaatatttaggacgtacaaaattatagaaggatcaactccgaccatat

SEQ ID NO: 354641 - DNA, 440 bp, Cannabis indica
tcaccgggaatgatagagtggtctgtgccacttttcagtttcaagaatatgcattggtctagtaggacatggtgtccatgatacacgatgtcacaacgatgacctgggaaaagttccaagaacttttcaatgccaagtactacaatgaggtcgtcagaagtgccaagagaaaagacttcacccacctaacccagaaagaaaatatgagcgttactaagtacacaacgcagtttgatcggttggagaggttggcctcgggaattgggccaaccgatcagtaaaaaggaaaaatacttgtatgggatgagtgcgaagatttgacatgacctgatgattactacagatgacaaaaccacctatgctgaaatggtggaaaaggcactgcgtgcgagggcgcagttgggtgtatgactgagtctgctaggactccagtggttagc

SEQ ID NO: 354642 - DNA, 812 bp, Cannabis indica
gcgccaacctgtcagaacacacctgaaaaagacaacataggtatactatataataatatagtcccataagcacattaataaattaatttcatcattttacccttctcgggtcataattacgaaaatgcccctggctcaccaacggagtcttaacatataattaatcaaataaatcatattaattcacgtatactgaattatataataatataattcctcaattattcataattatctaattagggttttgctaatccattcctcaattctagggttttaaaagaggctctagtctccatcatgaattggagcaataaatcagcttggatattggagcctccactaggactttgttgttgtagctgttgttggttttgttggggctgatttctctgctggtagaacccctgttggttgtgcccataattattattttgggcatagtttccaatggcttttgcttgatccattggtaaattgttcacatccaccggacattcctcataggggtgaggacctccacatagctcacagaccacctgagcttgttttacttgaacagctatcaattttgtcagggcctctccctgggctgtcaattttgtgatggcatctacctcatgcataccagccaccttctttgtctgacttctctcagttggccattgctgattattcatggccatctcttctagcagttcataggcctcgtttgcacttttcctcataaatgccccaccagctgcggcatctataagtgttctagtattaccaatctgcccgttgtagaagttgtggaccagcatccactt

SEQ ID NO: 354643 - DNA, 1183 bp, Cannabis indica
tagtgtgtaagactgtgaagaatccaaacaattgaaggagtgtcgggctcagatcttgattatactctgtgacagaaaggagacaagggttagagatctgagcagaaggagtcatttaattccgctgtaaccaatgtaaggtttctcatactttatatgtgtttaatttttatcgttttagagattcatatttaggatgttaaaaacatacttgctagtaaatctaggtcatggtaaaatatattccgacacatataactatacatcaatatacacaataaacgttagcttatacaatctatatatatgtaaactaaaatattatatacaatatactttaccgtatattatgtatacataatgcacaaattaaatacataactaacctcaaaactcgcgaacataaactataaaatacaaaatcaaaagcaatctatatacaatcatacttgaaatttgataaagcactaataaatactaacaaatcaaaaaataaaacagcaaaaaaaaaatcacaaatatagcattatcttagcccaaatgcttacaagaattcaaacacatactacacccccaaacaatcgaaccatcaatacaccgatctaaataaaaataaaccaaaaaaattattaaaaaaaaaaaaaacaacaacactacctaacctaaacgcttacaagaattcgaacacatactaaatctaattaattgcaccatcaatacaccaatccaaacaaaaataaaccaaaaaaaattataaaaaacacgagttataaataccttaatgctatatggaactacaatcgtttcatcactactaattaacatactcagcttcatctttctccaccacttgcttcatccttttcgaaactcgatctgcatttctccccttcttaaatctatttacattcttctttttctttgttgaagcatccgattccccaataccactatattcagatattgtttccttcatttttctcttctgattcatcaccataaaagatatggagggagaaagtgacaaacgtgttttcaccattactaagaaattacatataaaaaaaataaagtaaatataagaatatttttatttaaggaaatatatttctatttaaagaaataaatttttatttaaggaaataaataaataattgattttctgataaatgaatattttata

SEQ ID NO: 354644 - DNA, 500 bp, Cannabis indica
tatgagtgggttgtctaatatatattcactctttacttaagtctagcatataatttatattaacctaaatggtcttattgggacattatctataaaattatgtatatcttaaagaatatgaaaatagaggtaaaaattaaaataaataaagtaaagtgagtataacaatgtaattttctcattttttttttaagttgctccattaattgttatgtgaattttcataaaaatatatatataaaaaatagtttgaagtataaaaataataaaaaatacaaaaccataaaattacgagtaacttgttaaatacaatactcgtatgaggtatacaaatttacttttggaaatagaagataactccaaaattttacccaaaaaaaggaaaccaaaaaatatttgaagggaaagcgcaattttatatctttatatattaaaagtgcctatctaacggcatttcttggtttaacattcttggtttaacgattaggtttgatctcccg

SEQ ID NO: 354645 - DNA, 746 bp, Cannabis indica
gttgagataatactgcttgcacatagtagtaggtacattgacacactgaacccagtcatccgtcacatgaaccatcctacttgtgaagatccatttactttatttaaataattgtattaggctaattatattaatttaacctaattaaaagtgattagcaacataattaattttaaaataaataaaattagtttttattagattattttaaaattaatttagaaaaacacacttagtttaataaaatatatattcttatttctagtaactaatttatattttttaatgtttaattaattataaaaatatatttaagttaaaaattaatcttaattaatttatatcaacttaaataagaatatttttcttagatattaaattagaattaataattaagttaattttattcaatatacttaattatttgtttttaattttgatatatttaattaaatagaaaaattaatatttaagttcaagacacttaaatattagaaatttttcaagaaatttaattaaataagaaaattatatttaattgagcttgatctagttcaaactaggacatcgtcaccattgttcctttcccacttaatgctctatcaatctcatttgggtcagttcttggtttgctaattctaattccctcaactccaaccatgtactctgaataaaattccgcagcctattcagatatgtagcactcaaccatagaggcttctggtcgatagtggttacacacataa

SEQ ID NO: 354646 - DNA, 907 bp, Cannabis indica
aatgacagagtggcatgtgccacgttccaatttcaggagatgccttggtgtggtgggaggatggtatcccacaccaaggatgttgatgacctgggaagaattctgagatttatttaatgctaagtattataatgaggcggtccgcagtgcaaagcggaaagagtttgttgagttggtacaaggcgagggtatgtcagtgactgaatacacgaccaagtttgatcgcttggctaagttagccttcaggattgtaccaacaaactttagtaaaaaggagaagtacttggcagggttgaatgccaagaataagcacgatctggttactacaacaaatgataccacaacttatgctgaaatggttgacaaggctcttcgagctgaaggggtagtcaagttcttacaagaaactcgagagactactggtgctggtgggaccactactctccctatttctagccctggaaattccactttggagcaaaagaaaagaactttcccatcattgtggagttcaggccaaagtaaaaggttttgaggaaatcagggtaaagggtgatgtcagacttactcctatcctgagtggccacgctgcaagaaacatcatcccgggacttgtaaccggagggcttgctttcagtgtggattagttgggcacctcaagaaagattgtccccaattgaagaaagaggaacctaagcctgaagccaagcgcgcaccatcgcgtgtatttgccatcacttaggcagatgctgccgctagcccttcagtggttacaggtcagctacatattaatgatttttttttaatgttttatttgattcgggtgctacacgatcttatgtatcatcgagagttcttaatcaacttggtaggcctagtgatgttttttgagatgggattcggaacc

SEQ ID NO: 354647 - DNA, 1200 bp, Cannabis indica
ttttatgaaataaatatgtttttacccaaatttaaataatatttgattcacattttaaaaaataaatatgtaatttatattaaataaaataatatataaaattattaaatatataattaaaatgaaattaaaattatataattaaataaaaaaaaatttgaaaaaactgaaaatcgcttgcttttggcgtcggttggtactacccctatggcgtcggttcatataaaccctttagcgtcgccctgatcagcgtcggtagcgaatttcacgaaaaccgacgctgaaagggcttaaaaaccgcctctaaagggggtttttgtagtagtgctatgttagacttttgtactaaaattggacaaaaatccttaaatccaatgaactcaatagttcaggatgcaattttaacgaccttaaaagtttaaaaggcatgatttggtacatgtcaaagttcaaggggcaaaaatcctaattagccaaaaaaatatatacaagtaagaaagaaatgtgggctttagatctttatttaagaaattaatcagcatttgtctcatatgtatgcacattatgaagaattggttacatataccagaatgaattccatatcgcatacgcatacatttatatagatatagatatcaattcaaataggacgattacaacccaaagtactaatcgaaatagtacattgttaaaacaatcacagattatgagtattgaaagaaaatattttactcaccaaccaatattactcatagtaataaattcaatatcaagtatttatttagagcatcaaataaaataaatacacatacctcccaatccatccatatgagccattttgcttcaatgtctccaacaagatcaccaacaagatctcaagattggacccaagccttagagccacaatatagagctatctcttcttttttaattaccatacaccttaaaaccactctatcaccaaataacatatatatatacatcccataccttataaccctaaggggttattcactaataaggcttaagtagtctttttatggtatactataatttaatgggccaattataatataaagggtgctctcatgtgcctctaatacataattaatttatcaaccatcccattatggttatgaacaaatattgggcacatagttaatgattgtgtttatggtattaagcttatgattatattag

SEQ ID NO: 354648 - DNA, 652 bp, Cannabis indica
gaaaagctacgcaacaaaaacttataattgaagctttccacctggcttgggtcgcgaatcccgtattagtgcccaagccgaacaagaaatggcgagtctgtattgatttcacagacctcaacaaagcatgccctaaagactcttttccactaccaaggatcgatcagctcgtagatgcaacagcagggcaagaaatactaagcttcatggatgcttactcaggctacaatcaaatcaaaatgcatccaccaaacgaagaacatacaagtttttgaatagatatgggtctatattgctaatgtcatttggtatgaaaaacgctggagccataccaaagattggtaaacaaaatgtttaaagaccagatcgggcaaaatatggaagtgtacgtggatgttatgctcgtcaaatccagaaaggctagggggcacatagacgacctggacgaatgcttcaaagtgctcagaaagtacaatatgaaactaaatcccttaaagtgttcctttagagtcaggtggggaaagtttctaaacatcatcgtcaatgcccgaggaattgaatctaatccagagaagattcaagccttccaagatatgaactcgccaacaaaaaccaaagaagtgcaaagcttgactcgttggatagccgagct

SEQ ID NO: 354649 - DNA, 726 bp, Cannabis indica
caagtttggtattattagggtccatcagagtttcacttggcttgcatcccataatcctagtttcctgtaaaagatcaaggacatatttctgtttagtgactgagataccttgactggatcttgcaacttccattcccagaaaatatcttaattggcctagatttttaatctcaaatacactggagagaagctgcttgagatgagaaatttcttccatgaaattacctataaccacaatatcatcgacataaacaatcaatgctgtaaaattattaccaactgagtgttttataaataaagtatgatttgattggcattgagtgtaaccatctcctttcaacacttttgtaaaacctgtcaaaccaggctcgaggggattacttgaggccatagagagatttttttagtttgcacacttttccctttgagaatcggtcctcaaatcctgaaggaatgtccatgtatacttcttctacaaggtcgccgttaagaaaagcattctttacgtcaagctggaataaaggtcattcattgtcggtttttaacacttagatgtttatttggaattgcgtttggatcattttgtggaaattttaaaaaatataacttgttttagatttttctttcatgaggaatgtccaacttaggcggctatgatcatcaactagtaataaaacctaacgtgccccactgatattttgacttttggatggtccccatatatcc

SEQ ID NO: 354650 - DNA, 405 bp, Cannabis indica
agtggtacggcgcaaggccaacaaatacaagaaaatttataaagtaatcttggagagggagcatagcctcaaacatcaggtgcgtgtggctctaggctctgaagcccccataattatggttgggcgtctcctcatcccgaggcagccggtgataggtcccggaggtcgaaggcttgatgcctgccaccaccacgatcttctccaggtggtgggcgcaggtcagagtagagtggagctcagctgcctcccacccgtttgcacgggacttgtacccttcctgggccacaggaccttgcatgacctcctccagggtggccaaacgtgcttcccctttctttgaagactgggaaccggatgcggaagtagacattttttggttctgaaaaagattgaaaaaatccaaca

SEQ ID NO: 354651 - DNA, 858 bp, Cannabis indica
ctcgctctttttattttcgcagatagaccagctcgacctacactcgacgcgactcgcagagagacagctgaagttctcgggaaccttcctgtacaagatcgcgactggcgattactgtgtacgactgccaaactacgggaatataagctgattccagagaactccagtcttcaaagagagccggtgtacaagaaaccttctgagaagcaacaagagcgaatagataaacgtctctctaagcaaacttctcgaccatcatgaggtagcatatgcataaattagtgggttagactcttattcttattagcactaatcgttatcctttgttgttattgtcgcagacatgactttcttgaagtccgcacccagtcttaatcacaaaccaaaatctggaacagcaaaaacttcccctatcgttcctcagaagaggaagagcaatgtggtggttacccctgtcacggattcttccaaaaggccagctaagggcatacaagagaaagggaagaaggtcgcgattgacccagcagttcgagcccgcaatatactgactctccaagagaagtttgtgagcgacgaattccagtcaaagattgacaagactcctgctgaggagttgttgcctcactctgcggagttagcttcgaagttcatcgccatgttctcaaaggcttttgttactggatccaaggaggtcgaaattgcgaagagacagaacgttcagcttcaagaagacattaagaagctgaaggaagatgcgacttctaaggataaagagctcgaggaacttcgcaaggccaaggagaaagttgagctcgaggctaagaacgcgcagcaaaaatcgaggagatgtctcgcgat

SEQ ID NO: 354652 - DNA, 522 bp, Cannabis indica
aatattcctgtttttttcccaatcttttattaatgaatattaataatttttaattaattaattaacttatactatatttttttttttgtggtgattaaaattacacataattaatgattggcggcggtactttctcgaactaggataactcatttatctagttgaaggactccattttttttctttcaaaaataaacatattttctagtaattttacaaaatattatatatattttttgtaataaaagcttaacaatatttgtttttaagcttctatgcttagtactagtagtttaccgtgtttaactttttttccatcaatattattttgtttcctttttatttttctttccacctacctcttactcctctcattttttatttcatttttttccttgttttatgtgtcttttttttttttttttcgtattttagttattatttatctttatatttttttttttgccttcatacattttgtactttattctttttcttcataatttttattctttttatttt

SEQ ID NO: 354653 - DNA, 595 bp, Cannabis indica
tgccttgtactattttcattcaaacttaatacaattgtgtttgcttgcatttttattcacaatataaacaactatattttgatcaaatgtacagtgcctttgggtttttccattgctcgtaatcttcctgttgaagtagttagtaatctaccaaactttttaattttttggcagttgtcaatcctgccttgctatagcagtaataatctgccttaagcaaacttaagtatactttaatgattctatcactttgtatatttttaatttgcttgtatgaatatatagttatattatctatccatttcttaggttcaagtacttttatcaaggtatcgtgatgcctcgttttgtactttcttggctcgcgtgaaccgttagtattcagttttatacgggagttataacttttaattttcctttcccgatgggcatgttttaaatcaaaaattatagttgtttgatcccttctttgtcaaaaaggtttgatcaaggtgttataacgattcgacccctttctcgtcaaaaaggtttggtcagggagttataacggttcgactccactttcgtcaaagaggtttagtcgagaacctttgaa

SEQ ID NO: 354654 - DNA, 612 bp, Cannabis indica
aaaaaatatataaatataattggatgaccatgggatgataattggatcggtttggtcggttatctattagatcggatgtcccatccaacaatcgttctgatccgattagattttcaaaatttacatccgatccgatcgaattatgattgaatatccgattctattggatcggttgagattggatcggtcggttgtaattgaattaaatgactttctgtacactcctatttataagtatattttttatgtgcatgaaagtttaatatataaatatatatattttttttaggttagtcatttttcatactttattttgatatttatatctttctatattttacaatttagtacccatattttaatatttatgctgtcttttaatatttttttgaatttttgctctcattgataaaacttttgggtttgcaggcccgtactagggcccaattagtctcgaggcccaaaaaaataatttttcttttaaaaatacacatattttttttttactaattttaaaaatacataatttcaataaaggcccaaattgattattttttgagataagttaaaaactactcatttttattacacattaaccaaatataactctaa

SEQ ID NO: 354655 - DNA, 721 bp, Cannabis indica
ttttattaatgtaataaattaatattgcatgttttaaaagatgacacgtgttaaaaaaattggaaagagctatattttagagttttgggaaaatagttctcgtactatattttgtgttaaatttgacaaaaaagacagtatttactgcaaataaaataaaagaaatcgtaaaaatgtttaaagttcgtgaaactgtatttttataattttattttgttatttttgtgtatttatgaaataatctcaaaaatattattgttttaaatttagcacacaataaatacagtaatttttttaaattataaatttgtaattaattattagtgatagattccaatacacatttttaattaattgcaataattttattaactatgttttaaaatttttaattattaataattattaatgatattttattttttcgaactgatttatatttgaaaatagaataattagtatttttgctctctgaactttcggcactacttgattttaccccctaaaatatacagcttgttaaaattctccctaaaatataacatttacataattatggcccttctgttaagttccttttattttatggttaaaaattagcctttttaccctttaaactttgaccaatgcaaaattttgcccatttttttaaaaaaatgattttaaaaattatgatattttagttttttaaagcaattataatattctattaattctgaaa

SEQ ID NO: 354656 - DNA, 517 bp, Cannabis indica
gcaaccgtgttcatctgaggtcatgaaccacacaaccatatgaactgtggaaaggaaaaacaccaaggttaagtcacctacgtacatttggatgtacctgctatgtcttaaatgatcgagatcaccttggaaaatttgacaataggagtgatgaaggaatactcctaggatactcgaccaatagcagagcctaccgtgtattcaacaagagaagtgggacggttatggaatccatcaatgttcgctttgatgatttagaaatatctgagggagctgctactgaggaagagcttcttgatcccacactccccatggctgttctagtcaacctccctcctggtgtatctgagagctcaattaactcagcgtcagaagcttcacctgatgcatctgagtcatctggaatctctccagaaatagctacagacacagaagtgactagtggtacccttgccagttcatctcattcgaggttgtacaaaaagggacccccatcctggatacagaaggcacatcc

SEQ ID NO: 354657 - DNA, 812 bp, Cannabis indica
ccccctcccaagaccatgtatcaatggagacatttgagcttagtgggatgcccaaaataatatcagaatctcgattattgaacgtatctcgtacaaggtcatagtcccaagagcggctatgcacatgaaaaagggagctaacatgttggttcattaacccagggtgtattgttgaaacatatgggttatcctgtacaggtagccacgggtggtttagtatgcttactgtgtcccctgatccgattattcttctgacacccgaacggagtagagattgggtagtccaaatacctctccagacaaagcttgggttacttcctagctctgctgacaagaaatcagagtggggaaagtatctagctttatagacttttccaacaagagtatctggattgcaaagtagacgccaaccttgtttagcgagcatggcaatgttgaaatcatgcaagtgccaaaaacccatgccaccatcgtatttatgagcagccatacgatcccaagacctccaaataatacctttccctttactagaagatgtcttccaccaaaaccgggccataagtttttcaatttcattacatgtgccaagtggaaggaggaaaacactcatagcatatgtgggagcgattggacaacagttttcaagaggatttctttgccggcacgagaaagaagttttccatcccaactattaattcttgcaattaccttggtcttcagaaatcctagtacaatatttttatttctcccaataatgtttggaagtcccagatagaggcttccttcagaggcttcaggcatatggagaatat

SEQ ID NO: 354658 - DNA, 539 bp, Cannabis indica
gagagagagctttgagagaaatatgattttgcttttttccttattttgtaaaatgattaataaaatggttttatttggattattatcagccaaatataattaatagaatctcataataaaaagcaactaagtacactaaaggacaaaatacatatggggcaaaatgaccattttgcccctcccacactaacacaacataaaaggtactaagggtattttgggaaattctaaattccctaataaactcgaaattcccaatgtctaactataccgccccgctatactaaaatactaagatgtgattctactaagccatacaccgcattccaatattgccgggcactgaacatgcaaaattatgaaatttctatatatgacatataaaatgcattctgaattcaaataaatcactataaattaataatttaaagttaaaaaataattttcataattaaaccctaattatctgctaatttctaaatttaagctaagcggtctttacagttagacacatgtaactcgattggtgaaatagtatc

SEQ ID NO: 354659 - DNA, 1147 bp, Cannabis indica
tctttggtatgtagctccagcgttcttgagaccaaatggcataaccttataacagcatagacccatatctgttcggaaacttgtatgttcttggtacggtggatgcattttgatttgattataccccgaataggcagccatgaagcttaatatcccgtgtccaactgttgcatccacaagttgatctattcttggaagtggaaaacagtctttggggcacgccttgttgaggtcggtgaagtcaatatatactcgccattttttgttcagtttgggtaccagtacagggttagctacccaacccgggtaaaaagcctcgattatgaagttgctgttgcgcagcttttctacctcctcttttagtgcttgggcccgttccttgtctagcagtcttcttttttgttgaacaggctgaaagtttggatcgatatttagggcgtgtgaaattatagaaggatcgataccgaccatgtcctcatgagaccaggaaaaaatgtctaagtttgctcttagaaattttatcagggctgattttacttcaagcaacaaaccttttccaattttgagtttcttggtcagaacacttgggtcaatttcgagttcttctaattcttccactggcccaacatttgtatttggctccccaagtcggggatccacatcttcgtcctcgccttgggcggttccctatttgacaatgctcttccccttgctcgaactctaactagaggattcttcctttttggccttggttagggcaatgttgtaacattcccgtgcaacttgttgatttcctttcaagcaccctaccctattttttgttgggaacttgttgcacgaatggaatattgatgtaacatcttttaagtcatataaggctgaccgacctaacatgacgttaaaggctgataggacatcaagtaccaggaattgtgccatcatagttatgctctttggagcttgtccaacagtgaggggtaggcaaatttgccctaaaggggcaacactctggccggagaaaccatatacgggctgaagacaggggatcagatctttgagttgggtatacattggaagggaccgatattgatcttagataagatatcctaaacttaccgttatatctttctaagtcaatatcaatggt

SEQ ID NO: 354660 - DNA, 521 bp, Cannabis indica
ctattttttatgacatttgttttcattttcacatatatgtgcttaaatactacttattttgtttccattttcagtgtgagttgtttccattttttatgatattcgttttcatttttcttatacatatgagattaaattctagttgtttctattttgaggttaaattgtttccatttcacacagacatactagttgtttctatttttcacacacacataatactagttgttttcatttaaaggttatgttatttctatttttcataatttttgtttgggttatttgcggcaaaaccccctaaagtagggaggtttttgcaactaacccccaattctaaaatttttgcggtaaaaatccctaaactcaagttctgttagcagttagccctttccgtccatttttggctgttaactgctatggtggaatgtccacgtgtacacagtgtatacgtggcacaattttattggtccacgtaaataaatatttaaaaaaattaaaaaattaattatttaaaaataaaa

SEQ ID NO: 354661 - DNA, 888 bp, Cannabis indica
ttttttctccttaattttctcatttttctaattttttttattctactttaatttctcttatttttttaattattttataaattctcttcttaattctcttatttttccaattattttattttaatttaaaatctttccaaattgaaccctatatattattggaatatcaattcactgaccgtgtatatagaaaaatatataacatcatacataaaccaaccgtgtatatattattggaatatattattggtgcaagttatcatcaatcccttaattctattgtttgaaattttttatctctgttgccattccattggctcctctggcctaaccacgtatcaggtatcttatgtcaattcctctccattctttaaatccatgaaaatagaataaaatatgttgattctaatttagagtttatgttttcgtcacaaaaaatttattcaattttgagtttaaaagtacagcatgttgagtattaacaattaaaactttttgtttatggttatgacatgtggttatagattggcagccaagaaaattttgtttttgcaattatttattaccatttcatttattttattttattagtttagttgcatactaaaaatttgttaaggaatattagttattgcttttagtattaatatatattggatatctccatatgatagagaattaagtttatacactttttattttttaaaaaaatatttatacattttctgccttctagctcttctattttttattgttgattattgtatgttttatgtagaaagagacgaaatttttgaaataaagaaggcagagataataaatatgatggtagaagaagtttattacagaagcttataatcacaaaaaaaaaagctatttaagaaaaaa

SEQ ID NO: 354662 - DNA, 1360 bp, Cannabis indica
atgtaagttgatccctgagttgtagggattgagttcatgactcatgatgcgtcaagctgaattcgctaagtgttgatcgccctgcacggctcgttgaatatttcattctggatgtgccagcgaggcatcctgctcggcctatcgttccgagcagatgctccaagtggagtccacgtgtcaccattctcgtgatgccacgtcagagtgccaaatttgggataacatttgccccccaagtctgtacgggacctccgaggttgcgtgtagacttattccgagctggctctgcctttggatggggacacgtgtcgagcatgaccgttcgagactcgatgtgaagctgactgggcgtcccttcagtttttggctaattaatgctctgacaattaatattttgaaaatccgaatttctctctccacggctgacggttgcacttgattacttttgatttcccatattcgcttttgaggcgggaagtcgaggcgtctaaggttcctttgtatacagttacccttttgcctataaatactcatcgtactggcacataactcattttatcacccttcgttgttaagtaaactccagagcaaaaagagagagttttctggcttcaaagttgccgaagtgcctacagactattgctggtttgcttaaactcagacattcgaatctttgagtaagtttctgactccctttatgcttttctttgcatgtttacgctttgaatgtaactatgctgtagaaagaatgcttaggaaaccttaggacgctgaggtccataaggttgaggagctggacgaggtgcgtccgggcagtccttccaaggcggagggagaggaagagactgaagcccctaacttcggggagtacaatgaggctcgacagcaagtcgatgttgatgaagacgtcctggttgagggcgtggactacgtcagtgaggagcttgttgaggcggttcctcataggaggcagggtgccttgggcgccaggtgggtaagtcctccgtcaaagatttcagaggcatgcctccgaactctcgactaggacgggtacctgggcgagctggactgccatattcctgcccacaacaatcgcgccacaaatcatgataaaggaatgtgcgcctggtcgtgggctcacggccagcaagtggcgctgatgcccttgcacaagtacttcagggatgtggcacacttctttggcctttgcccggcccagattactccaaaggccattaagtatttgttgggttttatgccttaaataaaactccaattcaatataatccattttattcattatcaataaagaaacagaagtatttttcattcatgtgtgtatgttttggttcatgttatc

SEQ ID NO: 354663 - DNA, 512 bp, Cannabis indica
tatatatatatatgtctcataattatgagtcaaggtcttttatttacatatgtctcatggtgaggtttaatgtccttaaaataggtgatcactatattattgagtaaaatcaatgtgtattaggctttggctcacaaaaaaatgaagaaagaacgacaaaagcatgaagaagcgggatgaaactctacttgaagaactctaagatcataaaaaatggaataatactcgagaacaacaatgaagtttatattacctattagagacgataaacaattctcatatccaacattgtgtattattatgtttaaatttttttaaaagcactcccatatatattgtgctactgtatatttagacctttatattcgaataaaattttaattttatgtgatctcttctattttatttttctcttttatttaaaaacatgtatacatcaattttttttataattatttttatgccataagttatatataattttagtacaatatataaatttctttatgctc

SEQ ID NO: 354664 - DNA, 502 bp, Cannabis indica
gtacaccaatttttactaccaccaatagttactctgcaccgcttaggtgaggttttagaactccaaacttttaagtatagtcatattatatgtcgttggactcgatttttaatgtcgaatgcaatgatgataattatttggccatttgatggtatatataagagtaatatctaatattggactaaacaattggagctcaagacttgagagcttaagattgtcttttggacaaagtttaacgacttgggagaggtagggactcaacttgattattggacttgatttttatatgtgttgaataacattagacatattctaatttttatgatttacaaattgtttgaaaaattgaaaacttaatctgcatatttttctggactgttctcgggcacggaatgccaaatatatttatatacaaatatttaagcatattatgatttttaggtttattcaaaataaagacgttatgttgccgaattttttagaaaataaaaagaatatg

SEQ ID NO: 354665 - DNA, 602 bp, Cannabis indica
cacaaaatgaaaagcgctggcaaaaatatcttttctcaacgcataaatgcgctggtaaaagttagattttagccactgcaaatgtgcgctgataaaactttgaccttttgccaacacagtttgcaaaatgcgctggtaaaagttacttttatcagcacattagcgaactgtgcttgtaaaagtgacatttcttgtagtttgaagtagaaacattaaaacgactaatacttaggatgttatgatttttctaatgttgtttttggattgttcaactgttgtttcatatgtttaacaaatgttggtttcaaattacacaagttaaaccaaccactgaatatttatttgaggtaaccaaaataaaagaatcatggacagtaatataatcttacctcccattgaaattgtaaaatctggaagagaaaaaaaaaagaggatggaagctggctagaaaaaaaaaaacataacaaagtagcaaatgtggggagctgggacacaacaaaagaatatacaagagaaggcatcaaaaaaaaaaaaacagaacaatttaaaaacaacagtagaatttaacataggaaaaatgaacatattgttggaaatatttt

SEQ ID NO: 354666 - DNA, 521 bp, Cannabis indica
cacattaagttcttcatacgttttcttgaaagtcataaaataattcataagagactgattttgtttctccgcacgataaaaggctttgaatctgattttatctctgccataatctcaaaagcaaacacaatttacagagaaaaggaataaaaagaacaccaaagaatgaacacccaaacacgaagaagcaaaaacaataccgaattacaaccttaaatagatgcgagtgggcttagaagaaaaaagtaaagaaccggcaaaacaacgccgtcgaagacgccgtcacacgcgcctccacgcaccggtgcgtgggaaaatgcacagaaggtttgggcggcgcgtgagccccacgcgcgaggaatccggtgaccggacttcggggttttgtagatcgtcggctgggcaacactcctgagtgggcggtgagaataaattcgcactccagaaaagatttttgaaaaagaaccctaaactcaaaccctaatctcctttttttttaatgaaccctaatttcgaatttc

SEQ ID NO: 354667 - DNA, 554 bp, Cannabis indica
acattctactgataacaaggtatgtagctatgatttcggagctacacgtttgcgaacctttttaacattatcaggttcgagatattctaaaattagtatttctaatgaagtagtgaaaaatctgttgtcgatgttgaaatgttttgagagttctatcttttcatggtcttcagatgactaagttctctgacttaattggtgacctaaaacatcttcgctatttagatctttccaagtctaagattgtggtgctgcccgaatttgtaactaggttatacaatttgcagacattgaaattagaagattgtgatcatcttcaaactctacctaatgatatgcatcatctcattaatttgagacatcttattatcagtagaaatagactggttgagatgccaagtcaaataggcaaattgacgaatctccaaatgctgacaacttttgttgtggggaatgatagtggcgctaaaatagaagaattggcaaaacttcaaagtctacacggagagctttccattaagaagttagaaaatgtggtcaatattacaaaagca

SEQ ID NO: 354668 - DNA, 446 bp, Cannabis indica
agttagagatattccttgaaaattattatattaaattatatgaaactcaatatttaattgtaccaattaagatattggcaccataagaaggtggtaagcattattggtactttttaatatttctcttaatgtaatgtgagaccatggtagacaacttttaagattgttagagtattttttaataagaaaatgtatcaaattttatatggatgaaagtaaataaaaaagtaatacttttagaaactatagatggtatccctaataaaaatgctctaatatctattgatgctagaattctcttttattaagttatgtttatgtgtaattataataagagaagggaaatttgaatttttatgcataaggactaaaattggtccactaatttaaaactttaagaaatttgtaaaatgggataatttttagtaaaacccaattttaccccc

SEQ ID NO: 354669 - DNA, 1193 bp, Cannabis indica
tattctttcaaataaaaaatatatatacaagttatattttactaaaaaaaaacctaaagaaaatatataatccaataagtagaatatgtccgataaacctaatttgcttaattgattttttttaattgtaatataaaataaagcttaattaattaaagagatttctattttctttttttataaagaaaagaaaatgttaaaggggcaaggcataaagaaaaggtttatctttatgaattcagtgatttaaggaacatatattaaattgtataaaatgtgacattgaatatcactcacatatatatgtaaatgatatatatttatttatatagtcacatgttacctcaaaacgaatccaaagtggttcttaattttcttttgttattaaaataaggatttgagtatgagagagtttacatgagctaattaataatatttttaataatattaattctaccaaaatggaaaaatatatatataatagtaataaatattgttattattaggattcaaacttggcctacacaaagtttcatttggattttagtatgcaagctgaaatattcttctcctaaattgtgatggtatttatatatagggttttttttttcatttaataatgattataattaaaaagtgaatttcacattgttaagatagtcaaaaaattaatacaaaaatttaattaaacatgtctgtgaaattatatatatactcatgaatttgacaaaaaatattacattaatcatttatttatttgaattacttcacgatgagataataacttactattttaagaacggtatgtaataaaaaagcacacttttacactacaaaaaatatcacttttagtcataacaaaatttatgattaaaagtaacaaagttgtcattaattataaattgtcattcttacgttgtgattgctaaaaatattaatcacaaaaattataattagttgtgactaaatgtatttttaatcacaatacttgttgtgactataactaaatattatgtttagtcacaagtaatttttttttaggtaaataccattttggaccctgtgttttacaaaagttaccaattggaccatctgttttgttaaatgacaattgtctaaataggacccttaacttaattttggacaactttttttaatataaccaacttgaaatacgaacagatacagaaaat

SEQ ID NO: 354670 - DNA, 788 bp, Cannabis indica
agatgaaccaaaacatacacaaatgaatgaaaaaatacttctgttattttattgatattgaataatctggattacattgaagtagagttttatttagggcatcaaacccaacaggaacaacgtcgctggagtcagagaagagccagagatggagaaacctgagagaggcgacgctggaaaaacgccgttggaagctgccacgcgctgacgcgtggagatagtcgctgcggatggagtggctctagggcccacgcgcagctcagatggtcgtcggatttttgggttttgccgatcggaggtgggagaagcttcttgggtcggagttaagaatagaaaactccttttaattagttttctaagataaagcctccaaatcctaattttaagaaccctaattttaagaagggaaggaatgaaaaaattctttgagaagcttttacatgctctgataccatgtagaaaatgagagaaatgatttttattttctaaagatttattttagtatatacaaatggtatatataatacaatgtgaacacctaaaacactagagtaaatgaaaaaacattaaatgtaaatttacacctagcttgatttcctacacctatttatagtcaaccacctagggttaggttggctttatttggcattaaaataatgaaaaaataaatggtaaataccctacataagtggccggccatggttaaggataatgggccccacttttgcaattttgctgttttatcatgtctacatctcattttctcaaaaaacgccaattttccaatt

SEQ ID NO: 354671 - DNA, 504 bp, Cannabis indica
ttctagtgcactaggattccttttaaacttgctctccttagcgcaaagtcccttgttccatcaaacttctccaactcaaatcttgccattgacaaagttaatcgtttcttcaagaattgcagcagaaagaatcttaattttgcattcttgatcgattactaagctctgatttgtggaaaactataactaatgtgcagaatcaaaccaactaaagcttaatcaacaaacaattagtaatgacaagattaaaaattcatacacaataatttgagattaaacagggatgaacagagtattaaaaccagaaacaataaagcaacaaaatcaaccccaagatatatactagttcaagtcctatagatcgatgtgatctattgctctactccagttctggaataccgctgaaatcctctttattggtcaaacaagatcagggtacaatataatcgagatcaattctctgttggattctcacaaagtatttatttctcacactcttaccca

SEQ ID NO: 354672 - DNA, 664 bp, Cannabis indica
ctaattttactaaacaaagtctaccgtggatgaaataccccctgattaggataggcatgtaagatttactccacattatgcgggtaggtcttgatctataacgatcgagtaagtttaaaagcatattatcatagagaattacagttatttgagccatcccttgagtagctagtttctgctacctgatcggaccgtgcgatagttctgaaataccccttaattagaataggcgtgtatgatttactccacactgtgccagtaggtcttgatctataagatcaagtaagtttgaaagcatatcgtcacagagaatgacagttatttaagcgatccaccgagtagctagttgtgctacctgattgaactgtacgatcgttccggaaatactccctaataaggataggcgtgtaagatttactccacatgtgccggtaggtcttgatctataacaatcaagtaagtttgagagcatatcgtattagagaattatagttatttgagagatccaacaagtagctagtttttgctatctgatcgctcccactcaattgaactaccatgttcccaagatgtaagtatccgccagaaccattggttagctttcacgaacaactctaagagcataaataatacaactaagattgaacctaaccatatcaggatt

SEQ ID NO: 354673 - DNA, 623 bp, Cannabis indica
ctaataagataatataataaaatatcttgaattttaaatttagatatttcaatattatattctaagtcttataattttataaatttaaatataacataaataaactaatagaaaaaaataagatattttatttggttagagtattttaataaaataataaaataaaacaagtttgaaaaatttatggtttgaaaccctaaaatatctattcaaacctaaactaaccaaatttttcaaatttcatgttatttttgccaaaatataattttaataaaaaaatgtctaataagataaaatgttaaacctaacatattcctaatcttataattttaattaaaaaatatatatttaaaaaataacaaatttgaatttttttttgatatggttagcaaaatttgaaatttgaacaagattattttaataaaaaaaatattttaatatcaaagtaagatcattcaaatttaataaaaaaatgtaatatctgatcttataattaaaataaataaaataatctaaaattttaaaattaaccataaggctctttttgtgagaaatcaaattttcaaaattgaaagcctattaatatctaaaactaattttaattaataaaaaaattaataaaa

SEQ ID NO: 354674 - DNA, 777 bp, Cannabis indica
taattaaattaatctcaacaatttacccttctcgggtcataattaccaaaatgcccctggctcaccaacggggtctttaacatgttaaattcatataatttcacatatgttgaactatataataataataattccccaattaactcataattatctagttagggttttgctaatccatttcttaattttgggtattacagtgtttgtctttattaaaattatttttgaaaaattgatttaatctttaaccagttgtaatacattaatcaaaatactataatataggcctgaaaataatttaattaatactacattactttttgatttttaaaaataccatattttgaaaaacattggttaattatgtggctaacccttgaaataagtcacttggtatgcattatcctgatttttgcccacctgatgtggcatgtctatgtggccaacattagtgccacgtggcaatatagctcatcaacaagaaggccaagttatctactcaacactttaatcaacgagggatccaagtagtcaagcgggagacaaagtgacgaaccagccaccttaagggggctggccagccctaatctagcataggctgaccagcttctggtcatcccatggccggcgagcatccagcctaaaggtgcatggccgaccagcctttggcctggcaggattttggtgcacagctttcatacgtggacaacaagccagaccacgaattgggccttaacaaaccacaaaaatagagggaaaatatctatttttgagggg

SEQ ID NO: 354675 - DNA, 821 bp, Cannabis indica
aaactatcatctacaaacaacatgtgaatgacataaggggctctacgagccacacgacaaccatggatccacttattttcttcataaagccgaattagtgctgagagaccctctgcgcagatgatgaaaagatatggtgaaataggatccccctgacgaatccctctagttggaacaatcggcccaagaacttcttccccatggacaatgttgtaagtaatagtatgcagacactccattatcatcgaaacccagccagtggagaaacccatgcgaagcaagatagaatgcaaaaaagaccactccattctatcgtaagccttgctcatatccaacttaagagccatacaaccgtgtttaccttgctgtttacgtctcaagtagtggaggatctcaaacgagaccaaaacattgtccgagatgagacgacccggaatgaaagcactctgaaactcagaaatcaccttagacagtaaacccttgagacggttagccaaaactttagaaataactttgtacagcacattacacagagcaataggtctcaaatccctcataactacaggcgttttcttctttggaataagcacaaaattggtagcattaagatctttaggcatcaccttattccggaaaaaattctgaacaagtcgaaccacatcatgacccacaatatgccatcacttatgataaaacgcaggtgtcatcccatcaggacccggagacttatcagggtgcatttgaaacaccgctgagcgaacttcctcttccaagaccgattgaagcaacatagcattatcgtcatcacttatcgaaggctg

SEQ ID NO: 354676 - DNA, 261 bp, Cannabis indica
aaagtctgcaatgaaatcagctaatacctgagattttaaggcggttcgtggcttgtaggagatgtcatattcgctgagctccactgcccacttggtcaatctgccagacaactctggtttatgtagtatggtcttgaggggaaaggtggtgagtactgtgattgggtggcattggaagtatggacgcaactttctggctgcgtgaatgagtgccaatgctaacttctccagctgactgtacctagtttctgcatcaagtaa

SEQ ID NO: 354677 - DNA, 912 bp, Cannabis indica
tggccttccgacagttctccgttgtgaccaacgtccccaacgtcgagggccttcttgtcgtaagtagagaaagtcttggcccactgcaggaacaatcgggtaggcgcggtccgcatgtaaagtgggatcctgacccactttgtaagaagctccgggcgatccatggcctggaagccagagggaaagaagaagcgatgacgttactccttcacctgcttctggtggttgaaagggacggggcccttgttcaaagggtgggcccgaaggccataaaagcgtctttaaatttatcccccttattggggatagaaacaagtttgtaaaaatacaaaatttcagccggactgggcgaaccctagctccgggtggcataaaaaataaataagcctgaaagcaggcggtaagcttgagggattagtcggtatggcgcgaggccgacaaaaacaagaaaatttacaaagtagtcctgaagagggagcatagccccaaacattaaatgggtctggctccaagcttcaaagcccccgtagttgtggttgggtgtctcctcatccctgggtaaccggtggaaggtccaggaggctgagggtttgatgcctgccaccacctcttttcaagttggtgagcacacgtgagcgtggagttgagctcaaccgcctcccatccgttagcacgggacttgtagttctcttgggccacaagaccctgcatgacctccttcagggtggccagttgagcctctcccttcttggaagacttagaaccagacgcggaagcagacattttggttttgaaaaaaattgagaaaatccagaagttaggccctaaaccaaattctaatgttcaaaaaagggaatgggggtcccctaaccgctggaaaaaggccccctccggacacttgccaaataagaa

SEQ ID NO: 354678 - DNA, 564 bp, Cannabis indica
cttgccacaacagcaatacacatactatccaaccccacttttacatcacaattcagcttaatccaatcccgaggaggaagggaccaagcttcctttaaagctggggtaggactttggagcaaggtatcaaacatatcttcataagaattacaaatattatcaatgcatttgttaatatcaacaggacaattattatggaccttctcattgcgcaccctccaaatagtatccacaacaatagaagcatataagaatatatcatcgacacgagctcctttatgttttagatcccagatgaacttgacccaatcccaagctcggatgcctgtatcacacaccggatagataccccaaggagatgaacgccagaaatgaagagccacctcacaggatagaaacaggtgttcaatggattctacacaccttccacaaagtggacagctttgatcatctatatggaatctagtaccaatcacagctcttaccgggagggcactagacaggatacaccaccataagaccttatgacgctccaaaacttttgctattccagagtttgttcca

SEQ ID NO: 354679 - DNA, 555 bp, Cannabis indica
gtttgtacctgcagggttagtatcttccattcctgcactagacttttcattaggtaaacaaggaaaaatattttcttggaatataacatctctactattcatagttttaaatccccctttttcctttacccaaagtctatacccttttaccccttcggggtaccctaagaaaacacactttaaagccctaggttcaagttttcctatgctttgatgtgcataagctgcacatccaaaaactttcaaatgagaaaggtttggaggtttacctgaccatttctcctcgggagttttaccttcaattgctcttgatgggcttctatttattaggtgaactgctgtcaaggcagcttctccccaaaacccttgagataatcctgactgaagtagcatacaccttactttgtttagtatggtgcggttcattctttcagccaccccgttttgctgaggtgtaatcctcactgttctatgtcgctgcaagccattttctttacaatagaggtcaaattcattgttacaaaattccaaaccattatcagttcttaaagtttt

SEQ ID NO: 354680 - DNA, 827 bp, Cannabis indica
aaaaaaaaaaaagagaaaaagggacaaaaagggcaaagccgaaaaggcaagatctactctaagccctaaaatcgtcattacgtaagatgaggatgattcctcaacagaaacgtagtgaaaagaagtaatctaaacgcaaaaaggaggaatttaacgcatcatacagaaactcaagcaaacccattcctagaagttcgacatccaacccagaaatcataaaacatgctatataaacgaacagtaagcaagtatacaatatacgaagaacttacatgaagtttgaaggctgggggttggtgttgatcgccggtagaacaaagactggcaacgtcgaaggaataaaagcaagaaatctatggtgtttgaagcttcttttctctctgagaaaactctaagaaaatttggtaaaatgctgaaagtaaccaaatgaagtaagaaggctggcttttataggccagaacaggtgtgagacagctgtgatcaaccaccatcgtacggtcaggatggcaatcgattcgaattctacagatccaacggttggattaaacactcatcaaggcggtagaaaacgtttgagtacccgtctgacacccatttaatgcgccgtatcaataaatggacagaaaacgaatcgttgtctgcaaaaagcaaataactgcagtaatgatggtcattaatatgtcaccacgcgcccaaggcacgtgccaggaagctgataaggcaaccagaggcatctaagcaagccttgtttactttcaccaactaggcttgggggtaaatgttgcccctgattttgtccaaaatcgtggaccaaccggatgatgaca

SEQ ID NO: 354681 - DNA, 659 bp, Cannabis indica
ttcttcactttcacatataccatcacccaccaccaccctccacaacctatctgttagaataagttttaccagaatctaaatttactatcatgtatgttatttaacatcctaaatatgaatttccaaaataatgtaaatatacatataaagtttcagaattcttacagtgggtgcagcggaatattaatgactcattccactcagatttctaacccttgtatcctgtctgtagcagggtatcaccaagatctgagcctgaatgtccttctcttgattatggattcttcacaaccttacacactatgattgagataccacttgatgtgtgtgggcactcactctatcattcaaggtatgaaaatatgaagagagaaagagaggaactggttcgaaatcaatagaagaagaaggctcaggaaaattttactgaaggtgaattttcatcatatttaagtgtgagccatcactatctatttataggcaaccacctaggtttatgttaggatttattaggcattaaaataatagaaaaattaaatggaaaataccatataagtggccggccatggatatgggccccacttttgaatttttgccattttacaacaatctttccttattttctcaaaaatgcaattttttccaattctaaccactta

SEQ ID NO: 354682 - DNA, 857 bp, Cannabis indica
gactcacaactgatcattgttggctccagcacagtgtttcttccgctagttttctccaacaccatagcatagcataggagccggaggtggatattatatatatatatataagccattaattttatggagatatatccaggtacgtactggtgtttggaagttcaaacaactttattatgattattttattttattttacttattcaattttttattagtttggtaaaattgttacttttgtaatttttaaatcatggaaataaaaatataatttttgtttttctttttattttttttagagattttatatatcaatagaagataaattaaaatatatcataatttaattgtaaacttaagacaatgattaaaataaaaatttgattacataaatgttacaatatatatatatatacactatatatattatgtctcaggggtcacaacttttgttttggtggagagtgactcaaaaatggttatcaaagcgctgaatggtctacattcatatggaatattgataattgtgtctttttatgtaatcaactctctaaaaactttttatcttgtaattattcgtttgtttcgcgttgttgtaattttactgcccataatgtggctagatgggcgttcgctcggaacattataggttttatggaaccttcctcgacacatgtttctatcctttgtaatgaccaaaaaatctaatttttcctatctatataacgttttattttcaaaaaatatatatattatatataaaaatatagaagaaatgaattacatcacatgtaatattcaatatatgtataatataatgtgaaaaatttaagatatatatatatactcactcacaa

SEQ ID NO: 354683 - DNA, 903 bp, Cannabis indica
aataataaagaagaaaaacaactatagaatgtgacccgaaacttaggctaaaaatagcctaacagacttgaggtgcatatttctatagtcttgaagacaataaaatatttgtgtcaacaaatactaattttcttgaacatgactatatgaaaagtcacaaaccacgtagtcaagtggttatcgagcaaatcagaaataaggagatttttgaactattaattttagcaccattatttgaatgatcgacatcggttaccacaattcctaaaaaggaaatcttggtacattgtcgtactgggaggattgtgagacaacttgtccgctatgaacatgaagcacatgttcttgtctctgacatagacagggacgatccattgacttataaagaagtaatggatgaccctgactcaaacaagtagaataatgtcatggattcagaaatgaattctatttgcaccaacaaggtttgggagtatgaaactccacctaaagatattacacccatagggtgtaagtggattttcaagaagaagaaaaatgttaaagggaaggtagagacctttaaagctaggcttgtggccaaaggctacacacaacgagaaggcgttgactatgataaaaccttctctcctgtggcaatgcttatatctgtttgtatttttctttccataactgccacttatgattatgaaatatggcaaatagacgtcaagatcacttttctaaatggcgatcttgatgaagtcatttatatggaacaaccagaaggatatgtgttaccaggggaagattgaaatgtgtgcaagttgcttaaatccatcattagattgaagcaagcctctaaatcttggaatatcacttttaataaaactattaaagagtatggctttaaacaaacgaaga

SEQ ID NO: 354684 - DNA, 746 bp, Cannabis indica
tgaaaaaaaaatagctgtgttctgttctataatgtatatgtctagtatttttttttatttatttttctataattaaagacttattaattaatagttattatgctaatgattaaaaaatacgtgtctaaaaatgattatccattataaaatgttattagggctgcaattaaggacagatggaaatgcatattaattcatatatttgatatttattcagatttacttatattattatctaggtatatatcggtttatttaattaataaatattattttagtcattttattttgtaaaaattaatattttagattatttatttcgttgaataataaattaaaattaattaatttatttaaaatttatataaaagactaaaaatttgaaaaaaaaaattactaaaatacttttataaaaaaaaaaattaatttttactctttaaacttttttatttacgaaaatatcacttcagtcaaaaaataataaactatttggttaattgttttatagtttgtttatagttgatttttcttagtttttttttattaattttttcgttatttcttgtattttacttttaagtgtacttttgtaattaagaatttagtccgtaaaattataaataaaaacataagaaaaaaataattaaaaattttctaatactattttaaatgtgaaaattgcattgtatatccactttactttatttgttttaatttttaccttcatttctatattctttaagata

SEQ ID NO: 354685 - DNA, 633 bp, Cannabis indica
gagcttaaatggattgattggtactacctatatcaacaaggtgcatcttgtttttcggtagcccatctcaaaagaactccacagttaagcgtgcttgacctggagcaatttcaggatgggtgacctcctggaagttttcctaggaagcgtgcgagtgaggacaaagcacattgaaaacactcgtgttggtctgtagggtcagtcatcagtccaggaagcagccagagtgacgtactcgtgtataagagccattatttccgtgggtgtaaggacccaatggaggcttgaagcgggggcgttacaggttaagtgtataaaaattaaaacagaatggggttttaccgcaaattactctatatataaatctaatcttttgaaagataaaaaaactacaaaatattaaaatagagtattcaaagtataaataacttttagaaaaaaacttgttatattaataaattatgttcaattatatttaatctataattaacacaagttcccacataaaaataaaactaaaacaaaaattttaaaatctcatattattatttagatgctaaaatttattctaatctatataatatattatctgaaattttaataaaaaatgtaatatgtattttttttaaaaaa

SEQ ID NO: 354686 - DNA, 783 bp, Cannabis indica
tccaatattgccgggcacaaaacaagaaaaaacataaaattccatatatggcttatataatgcattttggattcaaataaatttccataaaacgataaatcataaatatcatgcaagtttcataattaaaccctaattatctactaatttccaaattaaagttaagcggtctttacaattattccctcgttaaaaggatttcgtcctcgaaatctaacttgaacaactctagatactgggccctcatgtaggactctaactccgaggtggcttcctcaatcttgctgtttctccagattactttgacctaagatatggtctctttccgaaggactttatcttttctgtctaagatctgaactagttgctcttcgtatgataagtctggctgcaactcaagattctcataactcagcacatgagtagggtctgaagtgtatttttcgtaacatggaaacatgaaatacattgtgaacagctgaaagagctggaggcaaagctgaacgatatgccattaatccaactttctcgagaatctcgaaaggtcctgtaaacctaaagcataacttgcctcttttctcgaaacatttgatccccttcattggagacactcgtagaaacacatgatcccctacctgaaattctacatttctgcgcttcggatctgcataactcttttgcctactctgagaggcaagcattctagccttaatattttctataacttcattagtctgttgcactgattctggacccaaatatttcttttctcctgtttcatcc

SEQ ID NO: 354687 - DNA, 1168 bp, Cannabis indica
caagcttaataaaaccttctgcgcggttaaggaagtcactcattgaatctatcggtccgttcttcatgatgtccttccaaagttcacaaagaacctcaatgccccccagtatcgcggataactttccatcttcggtcactcgtgcaaccttagttgcctccgtcaagaatctactgatgtaggctcggagaggttctcctggtctttgcttcacttcgacctaatctcctaggttcaacggaagttggcgagaagaggagaattgtgcaaagggactagttggtttggcccattagctggccgccaccggtaacttgagtggaagtattaggtataatctctcttgatgaattgcttgacaaggtctgcccgcctaccgcttcgcccacaggtggaacctgtgaccggggatcggacggctgaccatttatagtctgagaggtgtttaccgctggatctttgtctatctcgcccagggggatgacggttgcaggctgttgtccggtagcatgataggcttttcgtatcaacacggtggcttgccgggtccggtcgtcaatgaatgcttgctaagcccttaacgtttccatctccttgtctctccattcagcgaacatgcgcctttgctcttcgaatgcgagatttattgcagcacggagttcctactgatcatgatgcagggtgttggtatgaccttgcatgactctgagagcagcatggaggttttggatttctgtatcatctccgatagtcattcgaacattaattacgagcggaacgacagtgctaggaatgccctagttggctgctgaactgtattcccaatctcttgcacaccaggcgcgattccactcatacgattcgtcacaccgtgacctacaatcaagggttgttcgagatttgtggttggcagaaccctcgtgttccccgtgttctgtagtgcaggatccaccgcctgtggatgtgctagatcaaccacgcatctacgagtctataccaccattgtatttgtgattagatttgagataaagagcgatccttgattctactctcaatgaaagcgtcaaaatgttgacctcgtttttagccaacgacagtgagtctaaattgtaagcgacaagtagtacaatgagtatataatatattaaatcaaataaagacacgggaa

SEQ ID NO: 354688 - DNA, 592 bp, Cannabis indica
gggcacaaaacccaacatgcctcacaggtatgcccgaagtaaagcgatcagctatccgcgcagagcaaccaacacttagcgaattcagctttcgcattgtgagtcatcaaagaaatccctttaacttggggatcaaattgcagagatatggcaagccgtcagacgatagggttgtcctataaaaattgaaaagaagtcaaccctactctgaaaaataaagtttggaaagatatacaagtaaggagttatttgttagaattttgatttgttttttattaattcaaatgttcagtctaactgtgtttgttttccttcaaactagacggggttcattgtgcaggattccttcaaacatgattgtctcatccatgctggaaagttaatgaaagacttcaagaataggatgacaatatacatgataatgcccgctgtggaagagaaggatgtgggacgactagcacaagtccctgaaaagcatcccgaatggtgaacttttgttgcaagtcaactaactcctgaatttcaggtacgctgattatatttgtactaagataaactcttaagtacaagtacatgtatctaatgtattttt

SEQ ID NO: 354689 - DNA, 521 bp, Cannabis indica
tcaaaatattttatttggattccttgtgaaatattaagcaatttttgttgttacggaactcgattccgataaaaatggagaaagttatgaaggtttgatttttttgggttcaatgttgtcgagaggggtgctcacgtgcactaggtactcggacaagacaccttgtccgtgcgcggagctatgacaaatcgtgtctaaaccttgttgattgcacactttcagacacaaaggaggctgcacatgcacgggtatcaaccctgcatgtgatcgagatttactcgatcaaggggtatgcaaaccccttcgtcaggccttctctgcatgcgtgaatggctgcgtgcagcctattacacaccccaaagtttgcagctgagtgattttttcaccaaactttttatggattttttttccaattttcaaaccttaatgtaaaaataaaatatatttttaatatatttaaactaattatcaatttcgcaaattaataatattttaattttaattagattattattattatt

SEQ ID NO: 354690 - DNA, 704 bp, Cannabis indica
agtgaatcttaagatcaagaagaggaactatatgttagtcgattagggtgtatttaatactcttagactacactaaataagatttctagacttgccttagtgctagaaagtctgctgatgagatggtgattactttcctggattagaggagtagacatatagagaggaatttcacaatatcaaggaatttttgattaaggaaatgtaatggtggaggaaaggttgtatataatcagggtacacttgatttggatatcaaggtgttgagattatttgaaatgcacttattattttatattagtgcaagtgggagtttgttgggttttgtgccctaaataaaacccatttcaatttaatcagatttactaattaataaagatcagaaatcattttatgttgcatggttcaaatgatttatttcatgattatatttaatggataaattcaattaagtccataacatatgtatttgttcatgattatagtgttgtcaacacagtagaatataatcatgattatatgttcaaaagtttaattccctgatttttcagttcactggatttagactggcatgataattagcgataggtatacttacaccttggagaagtgttatgtctttccacggtattggcaaagtttaccagtgtgggatgtatgaagtatatattggaagggaccgatattgaacatggattagatat

SEQ ID NO: 354691 - DNA, 748 bp, Cannabis indica
ttataatctgtcattcaccttaataaagggaatagtaattagcattaacaattgggtaattaaattaacatgattcttttccctaatttctcatacttgatcaaacacttttattgcttaattttattttttggttattctttgtttttatcttcaacaaaaataattattgttttccaaataaaaatataagtctaatttagtagtattcaattcaatttcctgtcggatcaacctcacatgtgtgagtactacttgattacgtgcacttgtgtagttgtttataaattttcgtcacaaaaatactaatttttaatggttaattaagaaacggaatctaacaagatgagcataattatgtaactgttatattttaggtgaaatttttaacaagccgtatattttagggagtaggattaggtagtgtcgaaagttcagagcaaaaatgctaattattcatatataaataacaagtaaaagaagaaaaaataaaagggctctagaaattatttcagtaagatgagtatatatataaatatatattatgtgttatgactttaaaataattcaagaactttaacaaaaaatatttaccgtgggcagagactcatgctgataatgtgctatgaagtaatatagaataaaaaaaaatatgacaagagagaagactaaaaaaagagaaaataagaggaatgagaacttataattctttattcaactaaattaatataggtgtcgtttggtaatt

SEQ ID NO: 354692 - DNA, 571 bp, Cannabis indica
tttttatatttttaaaatattctgttaaaccacaaaaattgttaaataaccacattttatatataaagatatatattattaactatattgtattttacatgttgtttatagctttgtgttgtaattttctcttcatttgtattattttttaatttatatgaatattttatttagtgttggtagtattttttaatctataattttatttttcgtattatttatcttaaagttgtatttcttattttgattttggaagcacaacaattttctaacaatataaacccaaacacatactaattaattaaaaatagagatatagtgtccctacaaaattctctcacttgtttagattaggggtgttcgcggtgtgggtggtacggtttttaaccattttttcaaactaatccgcacatgcggtttttctaattttccaaaccgcacccgcaccgcgatactaaaaaaccgcaaaaaccgcaccgcaaaaaatgatgtggtgcggtccggtttctgcggtttatgcggtttgaactatcacaattttttttttgaagtcatcacaaaataattaaac

SEQ ID NO: 354693 - DNA, 1148 bp, Cannabis indica
agactaggaattacccagtttagcacccagtcagggcattcataacacacccacttccgcctactaccaacgtttgaacgaccattggagatgataccgagataccaaaatctccgtgctgctcttggactcatgcaaggtcataccaacactctacgtcatgatcaggaggaactccgcactgacggtaaatcttgcgttcgaggaggagagacgcatgtttgccgaatggagggacaaagagatggaagcgttaaggggctcctcatgcaaggattgacaatcgtagtcagcaagctaccatgctgatacgaaaagcctatcaaactgttgggtagcaacccccgaatgtcatcccattgggtgaaatagacgaagatccagcgatcgaatacttctcaaaactataaatggtccaccgccaaatctctggtcacaggttccacttgggggccaagcagtaggtgggcagaccttgtcgagtaattaatcgggagaagtcataccggataattctaactaggttaacagtgccgctcagcacgttaatcaaccaatcaatcactaagacagccaggcgtatttgtattcgaaaggttgggaaggactcatgatcttaaaaacgatctgaatagaaggagaggagtagacgatcagcttggcaagcggatcgtgcagcccaaaacccgtgctcaaattcccactcagaaagattctgacgtgactcagatcggccaacatgccgaacagtttagtccagctgtgcaggcacaactggacaaactaaagaatatgttccgaggaatggccgaacagagaaacaatgatctcgtgttggactgagcacgtggaacccctttctctcccgagatcaatctcttggcgataccccagaagtttaaaatgccaacctagaagatgtacactggaagagaagatcctctttcccacctaaagtatttcgagatacaaatggatctgcagggggtacgaggtgacgtatgttgcagaatttttcctgctaccctctcagaagccacccagcaatggtatttcaagctggcccctagaaagttcaactcatggaaagctttctcctcggaattccatgcacattctcctctctcgccaacttccgttgcatttag

SEQ ID NO: 354694 - DNA, 552 bp, Cannabis indica
gttggatgcctcgtgactgcctattgttcacatgccccacatgggcctatcatatggcttctgcaagtttgataaagccgtcagctctatcaaggaaatccttcatgttattggtggagattctccagatatctttctagaaatcactcaataggagtatgcgccccagtatggtcgtatatcagccttcttttgtaaggccttggaatttggtagcctcgacaataaacctctagatgtagtctttcaaaggttccccttgttgctatttgacttcgacaaggtcttctagttgtgatggtacaagtcttgaggacgagaattgtgtgtaaaattctcgtgagaactcagcgtaagagttgaatttccctggggtgagtttgaagtaccattattgagctgtctttgacaatgtggctaggaatatgtggcagcgcacatccccagtaaccttctagagatcgagttgcatcttcaagtatttgttctaagctagtgggtcttctcgtccggtatacatcttccataccggcattttgaactttggcaagg

SEQ ID NO: 354695 - DNA, 660 bp, Cannabis indica
tactaatcttacctcaattccgaattcaggtgtgctggtcaacctggctgaaacgaaatgtgtggcggtttacaagctcctaaaacataacaatcacttcccggcgacttaaactaggaacttaaaagttttcctatcgattaaaagcatggcaatacccaaaataacataaaaacgagaaaatctagggttcctgaaaatttcccaaccggcagaccggttgcacaaccggaattccggttctggaaattcctgaaccccatccggaattccggatgcacaaccggaattccggttcctcgcagacaaaactcaaaaattcataacttcatcaaatcaaatccaattcaccccaaaccttccagacctgttctaaataccccaaagaacatttctaaagcatctacacagtccagaacacacagatatcaaaaatgccattaaagctccaagctttgagttcaaaactcaaacttggttaaacaaccctatcatgcatcaaaccttgattaaaatcacatattcatgcatataaaaactgcagaaactgaactcaaacacaatcaaactttacagcagctcttttcacattttcacttgaaaaaccatagttttgagtataaaaattgtaagcttgaatcaaggcaactaacatgcatc

SEQ ID NO: 354696 - DNA, 1109 bp, Cannabis indica
gtaatccctcaacacacattaactcactaagccgagccaacataatcaacaatgtttctcaatacaatttcacaatcccagctttctatctcccagatatctctctccatttctcactctactgtactgtgtctctctacttctttatcttgtgtttgacttgttcttctccctttgaaatgagatgagtagttcactttatataggccaagggacctaatatgcaagttttcctttttgatagttaatttagttaaagactaactaactaaatgattcttggttgttgggggtttaaggaataataccacaaattctgccttatttcatcaaggcctaagaagctaagcatatcggtctaatggaggtaataatgctttcatgtgtagctacttagcaactaaggttgagtaagtccaagcaatgcttgaacttactaacatgtaacaccttagtgccaatatcagcagggttttcatctaacttcactttctccaacttgattacttcttattctatcttctttcttattgaaaacaaccaaatatcaatgtgttttgtcttctcgtggtacactggattcttgcacaaatgaattgacgattggttgtcagaatatacccttgcctttccaactagaagcttcaactacttcaaaattcattgtagccatattgcttctttgaatgcctctgtggtcaccatgaattctagctctgtagttggcagtgctactatggattggagctgtgatttccatataatacaatttccattagtttgaaacacataagatgtagtagacctcctagtatccttgctcgatgcataatcatcatccacatatcctttcaatgttactttctgtgaaactctctggtaagacaatccaatatctgatgtccctctcaaatatcttagtaaccatttgagtgccctccaatggtttatcccaggatttggcatgaacctactcaatatgcttaaagcatgagcaatgtcaggtcttgtgctaaccatgacatacatgagacacccctaaagccattgcatatggaatttctgcctatctcttctttctcttctactgtcatagggctttctccttg

SEQ ID NO: 354697 - DNA, 865 bp, Cannabis indica
acgcctccaattttggcaaaaccaataactggagaggcattatttctttatttagccatcttggaagatgtgattagtgcagatatagtgcgagaagagggcaagcaccaacaacctatttacaacgtaagtaaaaggttactaggggcagaatccaggtatccccctctagaaaaactcgcgttatgcctagtctatgagtcttgcaaactatggccatacttccaaactcacactataaaagtgttaacccatcagcccttgagacaagttttatataacataccatcctcgaacattcatcaagggtcaagctttagctgatttcttgatagatggtataactgtagaagaaatcccacctgatcagcgagatgtggaaacctagaagttatatgtggatggcgcatccaacgaataggatttgggtgtaagggtaataataatatcgctggaaggctttaagtttcactatgctctgagattccaatttgatgcatcaaataacgaggctgagtatgaagccttgattgccggcataaagatagcagaggccttgaaagtcaaaaatcgcatttttcatagtaatttgtagctgatcatgaaccaagtcctcggggaatatcaggcaaaaggcataaaaatggtgaagtatttaaagaaagtttgaaagaacttagaaagattcgattactttaaaatcagacaaattccgatagaacaaaactccaacgccaatgccttagcaaagctggcctcgcagaatgatatggatgaactaaatctggtttcggtagaaatgctgtgtgacagtcagtagtcccgtgatctgtaaggggaaacaccgggtaagctgtgcaatccc

SEQ ID NO: 354698 - DNA, 540 bp, Cannabis indica
tagtagtttcctattttttattggtttcccatttagtctcctaactttgtatataaatatgtactattctatgaaatacacacataattctattcaccattctctacatggtatcagagcattagggttagaattataattcgaaattcaaaattagggttcataaaaaaaatgagggtttgagtttagggttgtttttcggaaacctatttggagtgaaaaaattttctcaccgcccacatagaaggactgccgagtcgttgcactgcaaaaacctaaaattccagcatccaaattcaccgcgcgtgggccccatgcaccgacgtttgccgctgcccagaatcccacgtgccgacgcgtgagggcacgtccggcattgtcttcggtgacggtcgacgcccgtcacactcctgccccttcctcgtcctccttgcatcggtctccggcagttcttggcattttgtggtttgatacttttgccttctttgtgtttgggtatctattcttttgagttttctctcttccttttctctttcaatt

SEQ ID NO: 354699 - DNA, 677 bp, Cannabis indica
aaaaataacattaaaattttacttttttttattcgatggatccaatctaatccaataaatattggatctaaaacactgggtggatctaatcctattcaaaaaatactaggtttaaaatattggataaactcgaattaaaccaatagatatgcatgaaatatatctaattgatagatcgatccaattcaacatccaatggatgttggatcgattggatgactgaaattaattggatcggattggatggtaaaatctaccatctagtatataattggatcggatctggataagcctaaaaatattagatgtggtccaataaataccctaactagacttttatatgataggatttataaaatactcaaaaatattcatataattccagatttaatcatgtttctaaaattattttaatattgaaaaccataagaataaacatattctgctaaatcaaaaaagaagataaatttgagatgataagtaggaacaataacctgaagtcattgatttcatattaggttatgatagggatgggcatcatccaatccaaaccaattgaaccgaaccgatccaatccaattcaattacaaaaggttggatatccaattacaattggattggattggatgctaaaagttggattctaattggattggatcggttattggatgtcaatc

SEQ ID NO: 354700 - DNA, 962 bp, Cannabis indica
ataagattaaagattcaatgtgatgaggcacacaaaatatagtgcacatacatattacaaccaattgccttttgatatttagggtgtctaccgataagtccaattttaaggtgtctattgtagaattacccaaaagtttatttttaaatttttttcctaagccccgaccctaatttggcctactatttataattgtactctaatacacaaatatgtaaaataagtaaaaataatcaattattattgatcatcttaatattttattaaaaatatacaaaattattattttttttatttgtatattgtaaaatagtaatatggtaaataaagataataaagttctgtaaaattcaatgaaacataataattggaagtatataataaataaaaaaatagaattattgtaaaccaaattatgccatattttatctcaaatttgacccacttttaagaatattattagaacatttctaatgaaagatgttaaagttgagctatattaggcataaaaaggagttttgtgatatttttaaatcaacttttattattgtgctctaatgcataattgtaatttgatataaataagcatgttaactaaaatttaataataaaatattaaaaatagtataatggtagatatcaaaacataacatctatttgatgcaaattttgtatcatgctatgacccaaatttagattattttttattatgtgaaaaatttgcatcataatttagtacactattagagtagatttttaacaaaatgagctatattttatatttgcatcactttgcatctttattggagatactctaatagtgtctttttcttaagtaagttaaaatgtaacaatacactacttttttaacttcctattggaaatctatataaaatcatctccattaatgaatgatgtaaattttttgattaaatttgatccaaaatatatcataaagttat

SEQ ID NO: 354701 - DNA, 879 bp, Cannabis indica
ttcctcaattattcataattatctaattagagttttgctaatccatttcttaaatccagggtattatagaggacttacccacctggcacccaaggcaccttgcctcctatgaggaaccgcctcagcaagctcctcactgacgtagtccacgccctcaaccatgacgtctccatcagcatcgacaggctgccacctttattgtactccccgaagtcaggggttccaacctcttcctctccctccgcaatgggaggactgcccgaacgcgcctcgtccaactcctcaacctcctagacctcagcgtccccctcacggtcctcctccattgggatcgccaaatcttgttcggcgtcaggcagagtggcgagccgagccacttgaggatcagaagcgtcggccagacgcgttgttttcttcatacgagccatcatcctatggctgagtacggagtcagaagaatttccttcactagaaggagggctagcacgaagacgaggatgaacttcgtgcaaaagttgaagcaaatcctggttgatttgatgctcgaattcccaagactcacctgggttcatctacaaaagacaacacacaagatgagtgttggacagagtatcaaacgaaaaacaagaaaatatgccgaccaggagtactcaacagattaaagaacaaccatgttcgaaggaaagtcaaaactcaaaaagtcagaaagttttcttgagttagggcaaaaaagttcatgaagcttggaataagcaagatgaaaaacagatgcaatgcagttctaaaataagatctacggctgaaagccaacataaggacatggaaaagaagaatcgcagaagttttttaaccctagggtttcctaagcattctttctac

SEQ ID NO: 354702 - DNA, 603 bp, Cannabis indica
gaattacaataatgaactaaaaaacgttaacattaataaatgaacggcagttactaagttcatcaatgtatgcgtcttccaaatctgcgcgttggctgttcatattctggtgataaactcgcgggttcatcgattatgttcgggatgtctgcgtccttaggtagtcgcctcttgtggacatcgcatgacgggctgataggacctagacatgcaagtctatgttacattataaaggctgcagggttcttaggaccaactcgcatttgtacagaatcgttctcctggtttatacatggacaaggggaggatatttgcatatagttcgatatatgcgagctactctcttgtctcagatgcgattagacttcagtcatgctcgccacctctcgctgattatatcttaagcgatgtttaaaacttcgaggagtccctcagggacatctcagctgtctttggaaaatctgagtacacgtgtcctctaagtaggggtctggtctcgagtttctaggtgagaggaatctcactataatacatgcccctagtttcgcgatgtgacaggtgcggtcacaagggaaactatactcgagagacaggtgaaaggtt

SEQ ID NO: 354703 - DNA, 833 bp, Cannabis indica
tcatctgcccaaatgtgaggactccggctgcggaaagggcactccaggtggagataattgcctcggcggaggaccaataccagaagtacctctttaagagggaacatgagctggcctatatcaaggcccaggcagcagccgggaggacccttcgtctggaagctcctccggagcggaggccccccaggcccaagcctgtgttcccagttcccaatactggtgctcccgacgccagtacttcaggttctggtaagtctcctttaataatacattatgttcctcccgcccgagagtatacccaacttagacccatagggttcgatgagcgccttcgtaggtttagaatgccttccacccggtgggggaatcacgccaaagaatattatttttcccactaaggccattttttgggtcgatcccagataggctctggacctccggcgcctatccccctggaccattcagcccatttgtcttccagctggtttctcccctcagacagttttctcggggatgatgaaggcagcactgtgatccaagactttgctagggctgaattagagagtcagggtaggattagttttattgcttttttgttgggcgtatgcctttctcatgattattctaacacttagcttatttctttgttgcagcagtcaggcctatggaagatctcctagctactcttgccgaggcatacagccctgatgcctctctgcctctggctccctcctagctggtgacgaccgggaggtcctcgttcagtgcccctttaggcacgatcttcttgatagacggggagggggaagtcgaggaaggcgaggtggaggatg

SEQ ID NO: 354704 - DNA, 1629 bp, Cannabis indica
tgtccgtgtccggtcctggtctaagaccaagacttttgtcgggtcttgggtcccaaccccagtctaaagtcccgattctagttttcattttgagtttgagtgcccaatctaggtctaggtcctgggtacagggctgagactccaatcccggtccaggtcttgggtctaggtctgtgaccaagtttgtatctcggtttgggttcgtaacctgagacccaatccaagttttgattctggtctgcccatagttcaggtctgggtttgggtcttagtcagattctagttctaagactcaaaccaagactcggaatcagacccaggtctgggttatgggtctgggtcttggttaggttttgggtctgagtccgggtcaaggtcttggttggagagtccaagtatgggtcccagatcaaaacacgaactacgagttaggttcaagccccgggtccagatctagttcacggtcttgggtccaagtctagttccacttcgggtcccaggtcccgatccaaattctaggtcagggtccgggtccggggtcgggtcctagttctcaatcccagttctaatggtcgtgtcctgggtcacggtcccatatccaagttctagtcctaggtcccggtccgagtccaagacccgagaccaaggtccaggtgccccatccaggtccgagtatcgtgtttagatttgggtctgggtttcgtggcccagttcaagataccccagccagctccgagtcctaggtttcggtttgggtcctagtccaagtttcgatttcgattcagtgtctgggttcgagtttgggtctaggtctgattcctggtctgagtctgggaccgggatcggatcccggtctgggtttgggtttaggtcaaggttcgagttcgggtctcgggtgcgggtccaggtctgggtctgggtcagggtctcgttcagaatctaggttccgagtttcgatcctggtctgggtccaggcctcggttcaagtttaagttcatatctagatccctatctaggtccgagtttaggttttggatagggtcccaagtctaggtatgggtccgagttttggtccgggtctcagtgttggtctgggtacacgacgtgtcagggcccaacttcaagtcacggtttgggtctggggctaggcccgagttcagttctaggtttgggtcaacttcctagtcacggtcctagtctggtcctgagtcttggttttagtccaggtcgcggtacgggttcaggtccaggtctcgatccctatctttgtctgggtttaggttcgggtccttgtcagggtctggatcctggtctgtgttgcgagtctcaggatccggtgagcgtttaggaccaggtcaggtacaggtcccggtcctggtcctagtccatgttcaagtcttaggtctcaggtcccagtcctagtcaaggtctccgtccaggttttggtctgagtttgagttatggtttgggtttggttatcgtcttaggtctgggtcctagtcacaattccagttctgattctgggtccgggtttggttccgggtccgggtctgggtccaagttggtgtcagggtactgagtcttagttcgagtttggttacgggtttttcggatctcggtctggatcca

SEQ ID NO: 354705 - DNA, 518 bp, Cannabis indica
aaaataaaaaaataaatttttttattagacttttagttaagtaaaatttaagggcccgtttggcacaatttttgaaaaagctaaaagctacttttgaaaaagctgtataaaaatgtgtttggtaaacagacaaaaaacagctttttgaaatttttggagaagctacagctgaaagctgaagctgctccatcccagcttttagaaaaagttgttttgattaaaagactataataattttttcttgtactaaaaccatatttacttatttattacatattaaaaaaaataaaaaaaattaaaataaacttattataataaaataaataattattaaatctcttattttttttaaaaaaataatttatactttattttaatattaacaaacaacataacttagaatttttcttatatacttcagtttctattttttttttatttgatagaacataataaacaaatactataaattattttatcaaatgcatataaatttatatttgaattttttttaaaat

SEQ ID NO: 354706 - DNA, 1052 bp, Cannabis indica
aaaaaatacgagttgtgtcgtgccataaaaaataaaggtcgtgtcatgtcgtgtcgtgccataattaaatatgagacgtatcgtgtcgtgccataaaaagatacaggtcggccctaatttttagtgggccataagaaaaaaatatttttgagtcattatttaaaaaaaatgtggtatttttcataatcagtaaaaaaaattaggcccctgaactaggtggaccctaaacacgggcctagcccgcttatacctagatacgtgtctggtcgtgccgtcccgtgcttagattcgtgtcgtgcgttactcggattggcccattttcttatactggtttaaatttgtactatactttttcatattttatttacaattaatgagataattactaaaattatatgttttttataactttaattattttattataaaaaaattattataattattaaaattttattatttactaataaatattcaaattataattattacttttataaaaatatataggatttttaacatgtcactcattcagaaatttcaaccataatttataacaaaagttaaatattttattagactatttttttatatacatagtaaataactatttcaaactttattttagctctttaaatatttgtaaaatttcttaaacattcatagacgaccataaataaagtcaaaacatatttataaataactattgaagatgtcattagtgggtttattataaattttttacattagtgtataagtttatgtttagaatcaaaatgtacaagtcaataacatgagaaatttgattagacacaattaaatttgagaaaaaaactatgttaacagttaaatttgaaattgatgtgtttaatataattaattataaattgataaacaagtgataaataaataggtaaatagtggcataagtaccaaagttttaaagtttgttaaagcggtataaacccaactgtttatttttagttggtcataagtacccaatgttactataattttcctctagttttgtctagtacagactctgttttaaa

SEQ ID NO: 354707 - DNA, 545 bp, Cannabis indica
taatatttaatatataatttaatattatatgataggtatattttttaagtatatgaattggaagaaaaaagttgaaaaaatttagtataactaaagatataaattttatattaaattaaaattattaaaatagggtgcctttagaaaattttggggtgtaaataaaatttccctagattttattgttaaattggcttcgaagttttgttttcacatatacacaggtgtacacagtagtcgtccatcagtatttaacggtgatatttaattgacgtatcaaatttacaaaagtaaacttaatgggattttgccaccaaaaaaaatatatcggcagtaaattcaaaaacaattttttttgtctagcatcttatattttatattttactcacatactcggatcctagacccgaaaccatacccgaacctagacccggatgggttaatgtcatggtatggtgctaaaaaaataattttttttcgtaaaaaaaaatctaaaaacattttttaaaaaatttgtgccaaacaccattaaatttttaaaatga

SEQ ID NO: 354708 - DNA, 539 bp, Cannabis indica
gaaagagtacataaaatatgaactattatgatataaaagactttgtttggatgccattaaatttccaagattcgaaacttcacttaatgctatgcctaaatttgcatatgctctgtgaaaaaaattggactgaaggagagagagttagattgctacaaaatgactgagatttgactaccctgtcccacaatctccaaaatagttttctattatcttatcttattcatttcttttcccttttcttttattttgcttcaaaaaaaaaaaaaaattctcaactgtctataggctggtaatgaccaatatgctttatttgtatatttttattgatccgacagagggaaaacaatgcgttggccatgtttaagtttatgttgtttcttttttcgtacacaaaagaaagtggactctgttgttttgcaaaaatgacaaaatgaaccctgtaattttctaaaatagtaaaaataggaccataagcttaatttttgataactttttttttaacacaaccaacttgaagacaatgcttaatacgaaca

SEQ ID NO: 354709 - DNA, 894 bp, Cannabis indica
tccgcccataagaagaaatcactagccgagcccattgatctcaaggtttttgacaacgagatccaagaacaagttcctcctccaatcgtttccggcgccaatgctcctcgtcccgaggcaacctttgctactgcttcttcgagcaaggccattgagaccttgtcggccgtagcaggggaggtcgggtctgaatttgcccaagcatatggagtcgcctgttggcgaaaacttcaaactcttcttccccctgattgggattttctcaatcttaggagtctaagagagatgctttctttgagcttggattgtcacttcatggtacgttggctttgttattataattatattaatctttttatacctctttcatattcatctgtttgcaattctccaggcttcttttgcttccaatcgactaatctctgagcggcttgaatacttggagggcgaggtccacaagttattatcccaatgcaaggttgtgagcaagcactgggacgacgcccaacaagaaaatacccgcctcaagtaagaagccaagaaagcgaaggaggaagccgagaaggcaaaagtggaagccgagacggcaaaagaggaggccgagaaggcaaaagaggaggccgagaagaccgtcaaagcccaagccgacgagtttgacaagaagcttgctaaaaaagaagtcgagaccatagaatggtgcgacaaggttggttttcgcactgtatatcgggcttggatggcaaaccctaatatggacacgagcttcttggaggagcaggaagaggaaactttagctctttgcgagaagacaaggatggaggaagaagatggtgaggtcaaggaagaagaagaagaagatttgtccaagtcccccagcatgtagacttggttatt

SEQ ID NO: 354710 - DNA, 638 bp, Cannabis indica
tttagggcataaaacccagcaaataatgtataagaaattccttaataagtctaggaatgggtaacctcagcctaatcttcgactcaaactagtatgagtgtaggcatacccactcattttgagaggaatccgccctctcatgctgtttaggaagcctaacttcgacccccgacggaaaaccacacgacaaaactaaggaatcgagttcacgctgggtgaggaccgacggacaactcgacctaacatccaaataagaactacccagagcatgttttttctttttggccttcttcaacgggagaattgctagagtaaccccttcagacggggctgcttggccactaacgcccgcctcgcctccagaatgggaacggggaatgacggaggcgctgcctaaacactcaacttctgggtcgttggggacttcaacattctcagctgcataggaggagtatcagagactaacaacgattcgacgaatctagaagcaatactcgaggaaagagaatcggaaaccgaaggagagacacctggacaatccgtattcgacattacaccatggctaaaacgacaatcggaatccaaagcctacccaaaaaagaaaaaaggggagagaggctaaccctaagaagaaaact

SEQ ID NO: 354711 - DNA, 885 bp, Cannabis indica
aagcgtaattctattccaaaaataacaataaagaagaaaaataactataaaatgtgacccgaaacttaggctaaaaatagcctaacacatgaagacatggagcaacataatctaagccttgggaattgaaattacatgaacctgcaacccataagccaacctgggaacctagggtttcaccctggaccgttttactgaaaaaaaggtcaaaacttgcattgggatattaactagacataccacagacatatttgaggcatcagaatcagcattagagaaaattgatttttgggcacttggggccccgagcacccagtgcccaagttgacaatttgctaatatgggcgccttccaagtatcatataagagatctgacttttacatcttctttgtttttatcaaaaataggaaaatagatccttttagaggaaaaataataatttttaggtacaaaataaaggcccagtgcctaggttgacaaaatggagtttttttaggaattcttttgagcatcttctccgttttcaaaaaatattgagattaaactattttcggaaaccaaacagaatttttagaggggcaaaagggggacccagcgcctaggttgacatattgtcaacttgggctgtttccgatcaaattcaccaaaaagtgttccatgcattttttttgtcatcagaaataacgaagattcatgtaaacttagggagaaacccacaatcccaagtccttagaaacaaggcctagcgcccaggttaacaatcaacctaggacactgccttcaattgctcaaatgtcaaattcgatgcgaccattgaatccaaaatgatcaaaaacaaggtataaaacctcgtcctcaagttcagaagccttggaagtatcaaa

SEQ ID NO: 354712 - DNA, 1063 bp, Cannabis indica
agatctagaactttcattcataatatttttcctggaagttaacagatcatttaaaaattagcttgatgcttcagactttattttcgatcacaaacagagcgtattgagtatcaatgtaatatcccgataagtccaatggttaataattagggtttatatttatattatgggttaattagataataagtgagattatgattctactaatttatttcagcataaaatttaaattttgctataagtgagtaaataagcgtaatttttaaattacaaagatttgcatagcatgtgtgaatataatatgagttatatgtggaataaaaatattttcaggttcggcgaccctgaagactcgataagtggatatataaattaattacggagatttatttgaaatacgtgcatataatatgagttatttatgaaataaaaatattttcaggttcggtgaccctagagacccgattgggggtcaaaaatgtcacaacagttttagttaaaaatattgatggaattattgggataaattgattttagaaatatcaggatattttgggatactcgaagttggctaaataccctagaagtaaattttttttaatgactaagaaataataagctaactattattatattattaatattaatatattattataatattatttatatatataagttagcgttaagttaatttatatatattaagttatcagtcaaacagaacgaacgaacgaacgaaaccctcgttctctcccttcgacaaaactttctcctcctatattcattttcttcgattttcaacccaaaacctagtgatctaagctccagtagcagcaagatagcaaatctttgaaaagggaaagcttaaggtatggtttaatttcgttttaagtttaaaaacaattggtttcgtatagggattttgtgaattagaatagttataaaggttctgaccttataggattattctcgggtagtcatgggactagttctaatgtttacttgttgaatttgaggtgattttgagttagaaatcgagttttaaacttttgaaagctta

SEQ ID NO: 354713 - DNA, 1585 bp, Cannabis indica
ccaagaacatacaagtttccgaatagatatgggtttatattgctacaaagtaatgtcgtttggtctaaaaaacactagagctacgtaccatagattggtaaacaaaatgtttaaagaccagatcgggcgaaatatggaattgtacgtggatgatttgctcgtcaaatccagaaaggctaaggggcacatagacaacctggacgaatgcttcaaagtcctcaaaaagtacaatatgaaactaaatcgcttaaagtgttcctttggagtcagctggggaaagtttagaggcttcatcgttaatgcccaaggaattgaagctaatccgaagaagattaaagccctcctggatatgaactcgccaacaaaaactgaagaagtgcaaaacttaactggtcggactgccgcgctcagcaaattcgtttcaaaattaacagataaatgtgtcccattcttcaacatcctgcgaggaaacaagcagtttgagtggacagaggagtgtgaaaaacctttccaagagctaaaagcacaacttgcaaaacctcgcgtactctcaaaacctctagacggagaggaacagggaatatacttagctgtcacagaacatgccatgagtgtcgtactaatcagagaggagaacagcgtaaaacacccagtctagtacatcagtaaaagactcattgaggccgagagccgatacgcagttaatagagaaactcgcctactgcctcattctagcaacaaggaagttgaggccctatttccaaggtcatcctgttcgggtatacaccgactagccactacaccaaatactgcaaaaaccagatgcctctggatggctagtcaagtgggcggtgagaattggggcagtacgaaatcaatttccaaccccgaacaactatcaaaggccaagctttggccgactttgtggtggaatgcacaggaaaaactgaaagcatcccagaaggcgatcccgagccaacaccacagccgaccagcactgaaagcaagccgacctggaagcttcacgtggatggatcggccacagatcagctatccggcgcaggaattgcccttgtcacacctggggggcaacacctgcatgcagcggtcaaattcggattcaaagcctccaacaatgaggccgaatacgaagccctaatcgctggactcaaactagcgaaggaaatgaaagccgagcacatcgagatctgcagtgactcacagctagtggttaatcatgtatctggcgaatacgaggctcggggagaaaaaatgatagcatatctgagcaaaatacatgatctgctcgcacagttcaaaagctacagcctcaagcagattccaagagaggaaaatacaactgcagatgcgctagcccgtttggcgagcagcaatataagtgacaaggcgaacctggtcccgatccagtttcttgaagagcctagcatcacaggcacggaagaaatcgaaatgatcgatacatctccgaactggatgacgccaatagcagcctatctcaactctggggaactcccagataaccgaaatgaagctcgaaaaatgagaagaaaggcagcacggtaca

SEQ ID NO: 354714 - DNA, 552 bp, Cannabis indica
gccctctgatacgaaatgatttttttatattccctctcatttccaccttcctcttttcctttttctctgaatttttaaggactcacatccttcatccagatttcttccttttcttcttgaatctcttaagtttcagaagtgatcgaaaccaatcactgggagaatcgtcaaaactaaaggttagtttcgaaactacttgcgtatttggtttctgattttgaaaaagttgcatttttgggttttttgacactttgagaagttttaaaatgcatgtttagttgtagggaatacacatagagttttactcctttgttagaattgggtaatccccaggagaaaacagacctgtaattggcataaccgccattttaggaataatattttgaatattcgcacctttttgaatgcttatcttttgaatactcgcgggtatttggatgagaatctcgaatactcgcatatttgcttcctttagaaattctagagactttatcacttttacccgttgtttagaacttagggttttctttatattctctgtatattttgttg

SEQ ID NO: 354715 - DNA, 540 bp, Cannabis indica
agagagagagagaagagacgtacatggtgaaaacctggagagtaaaaagattatttgcagcattgtcaagaggtaacttatgtaatcgcttgaaaatgtcagggtgttgtaatttattgctctaaattatgaacttgcaatgtctcaaaattagcaagaataagaacttaaaggaccaaaacacacatgtgttagaattttaagatagatgagttctattctaaaactatttatgcatcttatatgtgttctgttatatttttacatcttagcaatatgggactctaactacactcgaaacataataaaaaaatttagtaaaagtaattaagcatcaaaacatacatgcatccacacagattattttctttctccaaattgtgtctctccccatgtcacaccaataatactctcataagttataatttataaattatatatttattaattgggtaaataccattttggaccctgtgttttgcaaaagttacagattggaccatgtgttttgttaaatgacaaaatggaccctgtatttct

SEQ ID NO: 354716 - DNA, 540 bp, Cannabis indica
aaaatttaatatctaattaatgtttttttaataaaataaaatctaataactttataattaattttattattattttaatatgtaagataataaaaaaataatataaatatttcataatttaatgtgatagttaaatatactaataaaataatagaaatgacataaatgtaaatgaaaaagtaatacatttattatggtgtaaattgtacaacatagcaaatgttgtgccaaatatacatcactttttgacacactattggagcacattttttttgttaaatgagctatattttagcttttcaccacttatttacatctccactggagatattctaagaaaaaatatttttttttaacttaaaatttaaggaaatcatagtaaatagcctcaaatcataagactatgttagtaagaggaatgctaccatcaacctcctattaggggtgttcatcaaaccgctcaaatcgcccgctccgcaccacaccgcggtttgaaattctttgcggtgcggtcgcggtttgaatttttcctcaaccgcg

SEQ ID NO: 354717 - DNA, 778 bp, Cannabis indica
atgtgtagctcgtcactaatcaatgagtttattgaaaatcgtgtataattaaaactttatttaattacttataaatactaaaataaataacatatatataattcagattccatttacaaaatatttacaactgttacacagtgcgtaatacaaaagttttcgcctagcgactagaaaaaatacaaccagctatcccaaagattgtacggtccaggtccaaccgccccgacatgtacaatcttcatctgctcgctctcacagctgctcaatctttgctttgcccttacctacacatgaaaataatatctgtgagtcgacagactctttaagaaaagcaaaatcaataacataactataactcgaattataattaggcgcccatacacccaaccataaccctatccccgtgtcacacacaatactaagtctagaacgttcatacgacagtactatcgacaataatatcagcttatactcggtacgctagtcataccctagccgtactaatgtgatagcttcgatcagtatctaagccaaacatacatctatcggtatccaatataactctacgtatactgataccgctatcaacgcaatctaacaggcttaataaatatgtacgctaaacatgtaaacacatatgcatatcattatactaatcttacctcacttttgaattcaggtgtgccggccaagttgagtggaaccgctgctcgacgatttacaggcccctaaatcacattaatccaaaaaacttgtgagtgacacgctaaatcac

SEQ ID NO: 354718 - DNA, 890 bp, Cannabis indica
gatgatgaacacacttgccttcagtcaaattttacaagggttagagatctgagcggaaggagccattataattccgctgcacccactgtaaggtttctcaaactttatatgtgtttatttacattattttagaaatttcatatttaggatgttatacaacatacatggtagtaaatctagatcctggtaaaacatattccaacaactggcctcagagccatggtaatgatttactttcatgaaatatggatttaaacgatatttgtgttgatttggatggtttcatgatggtttatgtacttatttgatgattgtatgaaaatcatcatgtatgttgtaaaatatttttttatttcgtgctggaaatatttttattggaaagtagacgaaaaattaatgaatttaggcttgtacagaactcaatttgatttttttttatgaattagttatatttcttgaatttggatgaaaatatctgaatttgggtagcacacgcgcgcgcacaagggcatcactcagcttcctcacgcggtttcagaaaacctgaccgaggaaaatcggacacgggttgtctgaaactgtgtcacgctgagttcccttagccattgaggctattgtcttggtcagcttcctcattccgcgcgcgcgcactaaaattgttttcatcataacttttgattcgaaaatcgtttttcattgacacaaaattcaaatgttggtagaattttgtgtagaatctaaattttcaattaaaaatctaattatcagaataaaattaattttattaatttttattaattaattaaaattaattttagatattagtaggctttgaatttaaaattttaatttttcctacaaaaatagccttatggttaattttgaaattt

SEQ ID NO: 354719 - DNA, 575 bp, Cannabis indica
atgctagtccatcaatggtgacatgtcagttatttataaatggctattcttatactgtattgtttaactcggaagctactcattcctatgtgtcgagtagagtaattgaaagttttcataaaccatgtgatatatatgctttgaggttttgtacactgttaccttcgaggaccttatagtatccactaggtggattcagtctatatctttctggattgacgattatgaattaaccgccaatctaatagaactgcaactgtctgatttttatataatcttgggaatggattttctgtctaagtatggggcaacaatcgactgcaagtggaaaatggtggtgtttgagcccgatggtgctgacctggtagtgttttgggtaaagttcaagagacacgcataccaaggatgacacttttgaaagctaaagatctgatgagcagaggttgtctgggattcatagtcactgcagtggataccagccaacttgtgacatctggacctgagaatacaagattggtatgcgaattccttgacgtctttcaagaagatttaccgggattgccacctacccgaga

SEQ ID NO: 354720 - DNA, 660 bp, Cannabis indica
tttttctaaaaaaattattttatgaaaaaattaagaaaaaaattagaagttatgataaaactcgtataagataattggttattttaaagagataaatggttattcttttggtcctaagggtaacaggttatcttaaactgttttataattgtttagaattttttccttaagaaatttaaaaaaaatataaaaaattatagggtagctctacaatgcaccccactaaaatgggtgtactggtgcaacctctaactgttttggcatctagaaaaatttaatagtctaattttttcatagtcgtgtatgttatagttatttacttatttatgacatgttgtaaagctttaaaaaatttagaataatttacaatctaaaatttaatgttcaaactgtctatttcacacgagcataaaataaaaaagtgacttgcacaacaaacttcagacttaattttttttctaaataccgaaacagataagagtgtatcagtacacacgctgaccatatctcttaagctctgattatgaggaaaagaatattgagcaatgctcaatatgagaaatgttaaagggtaccagtggtgcctagcatcctcctacgtgttaatatcgccattggtttaactaagtatcgggtcccatataatttaatataatagct

SEQ ID NO: 354721 - DNA, 716 bp, Cannabis indica
ccttccttcccaaaagccaaagcccgctccataaaaattgaacgtgactctcgcatgcgcgttgttttttgtgaaggaaagattattggaggtatgatatttcttcaaccctccttccaagaatggaaggactgcttgacatctatcctactccccgtgatgctttccctttgatcttttcaagtgaagtctaagtttgaatttttatgaaacttcagtcttctttcccgaaagtacaagcttgctccataaaaattaaacgtgactctcgcattcacgttgtctttctcgtgcaagaaatatcattgggtgcatgatacgtcttcaaccctccttcttggtatggaaggactgcttaaattctgtcctacttcctgtgattctttccttttgatcttttcaagcgaagtctatgcttgaatttttatgcaacttcagccttccttcccaaaagataaagcttgctccataaaaattcaacgtgactctcgtatgcacattgtttttcttgcaagaaaggtcactggggttacgatgcgtcttcaaccctccttgtcggaatggaaggactgcttgaagtctatcctactccctgtgatgctttcctttgatcttttcaagagaagtctaaacttgaatttttatgcaacttcaaccttgcttcctggaagcgaagcttgctccataaaatttacatgactcttgcatgcacattg

SEQ ID NO: 354722 - DNA, 738 bp, Cannabis indica
attgaattttttctggaattcttttatttgatagtttgaaaaaattaagcaattcacttttttaaagaactcaatttcgattttatttgaattagttatgattttttaaagttttgaacgaggatagggtgatcaccctcatcccacgggcgcggatcacccattcgctcggtcaagagtgtgtcaggacaaggttttgtccgagcgacacgcccagggatgtctgaatcccttatctgcccgcgcagaaatcatgcagggaccccaagcgctgagtttttctcggctaatcaccttgtggcgcgcgcggatgagtatgcaattgcataccatccgtacagctcacaattttttcgttttcttcgatttttcatgctatttcatggaattaacttccaatttttggtgtatttttgtatttttgatttttacttttcatatttcaaatataattatcagaaataaattaagtggattttttaaaattaatttaagatattaatgtaatttgaacttgaaaacaggtaaaaatctatctttttgcttaattttttttatcttattttttaaatttgattatttttatcttattttaaatttaaggtcagctattaatattttttaaattatcctaatttttaaattacttgacattatttaaatttaaaataagattattataatcatgatattttgaatagaaataacatattttgctaacttttaaattttgttatt

SEQ ID NO: 354723 - DNA, 672 bp, Cannabis indica
aattcttcaaagtaccaattcttcttttgcagctttgaatcctctctttaaaattacccgtcaaatcatgaccccaagttgccagaggttcctgaacaaccacaatcttatccacaaaaagacattatattattaattaagtactaacatataacttttaaaattaatttttaaagaatatcgctaaccaatcgtaaaacactacctataaaagatgatttgttatacaaagttaagtagtatttaactatcaattctgtctcaatggttgtgtaaagtgttgacttgccactagaggtattcattggaacacattcaatattttttggcctatccagatctaatcaaattatatattagatgatatattttatcattcaatccgatccaattaatttcagtcatccaatggatccaagatccaatccaattaattagttggattggatcggttatatcattggatatatttcatgtatattggtttaatttatgtttatccaatattttagacctaatatttattaaatcgaatcggattcatctaatattttagattcaatatttattggattaaattggaccaatccaaaaaaaaagtaaaattctaatgttaatttttatatatacatatatttttttttacatataataacaacataaaatttaatt

SEQ ID NO: 354724 - DNA, 754 bp, Cannabis indica
aggcgcaagcctcaaatattcaattgaaaaaatatttttagagcacctaaaaatatcaaaaatgaaaaatgcattataatactcaaacatactataaaatgtctcataaaactcaaacaaaccataaaatatctcataaaattcaaactaaaataaactttaggcttaattaagatttttgccccccaactttgacatattccaaattatgtctctcaaacttttcaggccgttaaaaatttttctcgaactattgagattgatttgaggactttcgtccaattttactaatggaagtctaacgtggatgaaagttcagggggcacgatttggtacatatcaaagtttaggggaatgattcggtacaagggaaaaatattcacgttagaaaaattgaacgaaactggataggagtccttgaatccaacaatttcaatagttcagggggaatttttaacgactcaaaaagtttgggagcatgatttggtttatgtcaaagttcgggggtaaaaatcttaattagcccaaagtttgactcttcttctactctagaatgaagcttcaactattaggaaagaagaagaagaagcttcaacttccagctgttgaaggaaaaagactttaacacttttttttggttatgttctctgaagtctggaagtcacgattgaggaaggagggaggcgggaggagaggggaacgactgccaagtttataatatattttgagggtttttagtggaattttttttaat

SEQ ID NO: 354725 - DNA, 988 bp, Cannabis indica
taatcaacgagattattggaaattgtgaataataaaaattttgtttaattatttaaaacatatactcaatatgctagtcttactctagccataatgatgtgacaacatcgatcagtatttcagccaacatacatttatcagtaatcagtacaactctcgtatactattactactatcaatgtactctaacaggcataaacaacatgtatgctaaacatgtgataacatatgcataacattatactaatcttaccttgattccgaattcaggtgtgccgggcaacctgagtggaacaactgctccgcgaattacaggctcctaaatcacatcaatcataatataggtaagtgacacgctaaatcactttccggggaatattttggcaataccctaaacatctaaaaaatgggaaaaactatggtcccaaaaatttccccaaccggacttccgattcagaggggtttcctggggaccaaccgtaattcgggttcctacaggtccccctgaaccggaatttcggttcagtgcaggaaaccaacaaaaattcataactcgctcaaatcaaccccacttcaaaccaaacattccagacctgatattaagaccacacagaacatatctaaagcaacaaaacacctcaacatgcacagaatcaaaatatgccattagagagccaatcttgagttctaaaactaaaagcttgctcaaacatcaaaccagcaatcacaacaagcctaaataaacatatctaagcataattcatccactgaaaacaataacgaacactagcagcaactacaacaataaaattcaccaagcatccataaatccataacttagaacccaagaaatcaaggaggaggtcgctagagactataccttggcttggattacacttagaactgctggaaatcactggaatgaaggagaaaatcaagaaccctagtggttctaggtgggttcaaaaagatagagagagagagagag

SEQ ID NO: 354726 - DNA, 574 bp, Cannabis indica
tgactttttgtcacaacaaaaaaaatacttgcgattaaaatataatatttaaatataagttatcactaatttaattttatttacaatagatattatgattaaaaattcatttaatcacaataaactccgatttttatgactaatacatttagtcacagatattttaatcataatataaaaaaataatttataagaagtaacaatttttgtatttttaatcacaaattttattatatataattaaaaataaaaaaatttatagtgtttttcttctttaataataataaggtcacctaatattaataatattgtattattatttttggttattgacttgttgactaatgtttttgcaaaaatatatataaatatatatattatttaattgatcaaacaatttttcttttgattgagccatggctgaataataaaattaaacaaatttaatatattgattattctgattacaagtgtagttttactgtaataattaatatatatatatatatgcacttttaatgggtattacttatgaatggataatattagaaaattttgagtttttataattaat

SEQ ID NO: 354727 - DNA, 718 bp, Cannabis indica
ttaaaattgtacaatataatacgctgagctaatttttcgttaaaatagaacttaataataccttacctaaagcctaaaggtgttatgaccaaaatgtttgtattttttgatttgtttgtgctaagacttggctttaggttgattatatcaaaagagaaaaattaatgaaaaattgagttcataatattattttggaaaatataagatttaatttattttttaactgttgggaaaacctattgcaattaaccacaatattttccctctttgtatgtcaaaaatgagatacttatcaaacaccacaacaagtaattattaaatatcaaccaaagcaccacaagcaatataaaatgcacaaatcaagaataaaagtgagacatcaagatttttacgtggaaacccaatgtgggaaaaaaccacgggaccgtaatctactcaaatcatccactatcaccaaagtttaataatgggattacaaagttcttctctactaaaattagaggctcacaacaacatcaagattaaacaatcttggatcaccaatacaatcatcatcgtcatctctaaagatggatatacaaaagaaaaaagtttgggtctcaccaagtgggtattgtagaagagcaccttagagaggacaatcgccaaatcggaaccggtagattggtagagcgccttgcaaggattcaccacccaaaatttgagctaaaatggatga

SEQ ID NO: 354728 - DNA, 599 bp, Cannabis indica
ttaaagtattagaaatatcattctaacggaaaggaaacaatctctattcttatttctttgttcttttttgtttggttgtcatttttttttgttcttttcactattagaatgacaattccattttgaaatagaatagaaaggaaaggaaacaatctctattctattcctttgtttggttgcatattaaagtgttggaatgtcattccaatggaatggtctttctcctattttggtggaatgacaattctattttgaaatgaaagaaaagatcattccaatgcatgatgagaaaaaaatcaataatttttatattaattttttatatgcattttaaattttattctattcctattcttattcccattcatattctcattcctatgttttcattccttccaaccaaacgccacttaaattttttctcttgctacattggaatggtctttcatttctttttgaaaatgaatagtcattgggaaatttgattttctatacttacatatacctaatattttatttctaaactaatacatatcatcattgaaaatatatgaccactttatctaaaacccaaaaatacccctcttaaattttccata

SEQ ID NO: 354729 - DNA, 521 bp, Cannabis indica
aataagttttgccaaaaaagtcaccggaaaatcacagacgccgaaaaagtcactggaaagtcaacggaaaagtcaacgtcggcggaacagtcaatggaaaagtcaacgtcgctggaaaagtcaccaaagtaattgtctcagatataactaaaaatataaccggttatatgaataaaaattaataactcaaaccggctataattaaaatataacctgttatgtaacataataaataaatacaaataacataaaataaatctaaccagttataattaaaatataaccggttccgaaacagaattataatgaataaaaataaataacacgaaataactcaaacaaattataactaaaataaaactggttatataacataatgaatacaaacaagtaacacgcaataactcaaactgattacaattaaaaacaaagaagaaatcagttcctaaaacattgaaatataaattaaaaacaaaactagttccacaataaaatagatcataatacataatacctcataa

SEQ ID NO: 354730 - DNA, 998 bp, Cannabis indica
ggagctcacactcctgacgctccacttcctttaacttcttctcaagtggccactcccttgaaagcttcttccagtgcccctccagacactattgacttagtggatgaggaggaggcgcttccggaggaagctaaagaaggtcaagaagagcaatgggctcttcctaaaaaagttgaagaaagtgaagaagagcaagaggttgctctgattcgcaagcgaaagggcaagatggtagccgaggaggtacccaaacggcagcggagagcggacactccggcccctggccctgattccgggatcccttccgaggcagaggaatatacagtgcctcccaacatagtgctgactccggttcctggagatgaggcgaggcaggagctccggatagccaaacacaactacgccatggacgagtactcccgggggcatgccgatgtggaggctttgaggagggttttgcgagatgaaatgcaaaatacccttaacgatcagaactaccagaatccgtgggatctaaacttggaccccctgtcggattggttcaatcgtttcctcgggcccaccttggctccctttgccgcggagatgaccggcgagtttgtgtctcagctcacccggtgtgcgcccaagcggttcgctgcttgtgcatccttgaactccatctttcaagtccaggatctcagccactccttgactgtggtaagtatttcgtagtttacttttttcctcattatttttcttaaggactttactcactcttgcatccttttccagcttgctgccgaggccggccgcctttccaagaacataatcaaccatggcttcgtcttgtccgaatttgggggcatggacgaagtcatgaagattcttcaggatctgactgctgaaaggcggacgtaccaggaggatgctgagcgacgggaggcccttgccaaggccaagttcgaggaagaggccaggcggagggaagcccaagcggaggcgatgatccgggagga

SEQ ID NO: 354731 - DNA, 836 bp, Cannabis indica
aaaaataaaaggccatgtgtcaacgcctaaggcagccaccattgactcccttggcaaaagactaaaatgcccttgggtgcttaattttaagctatttcaaacctaggggtaaaatggtcaaaaactacaaccccgctcaatctcggtattctatttcctccaatatgcatcccactaagaaataaagttctagacctacccatgtgatcaagctagccatccatcgcattttcggttgttgccgagcaaaaattgtaaaaattacataatttacatataattcaaataatacaccgagagtttaataaaatcttcggaattgagaaattataactctaatgcccatttctattaatgggacccacaaatggacccacaaataattaaattcataaataattatacaaatatcagaaattagtgctaattgttttttctaatccaaattactaatgtggtcattacatgtaatgtaactaaaagtttgaaataacgaaaacaacaacattgtcaactaataaaatataacaaaaacttcatgaaaatataaccaagtattacaaatttaatgaaaaaaagctactaaaaatattattattatatatttttttattttattactttttatatataaatcaatacaaataattttggtgtttttacaaaattagtattttagggtaaaaatttataattttattgtcatgcgtaatttttttacaaaaatactgtttttttttataaaacaaccgtaaaacaacaaaacagaacaattaaaaacattagtagtttcaaaaaaaaaaaaaaaaacattagtagaacaactaaaaacaatc

SEQ ID NO: 354732 - DNA, 682 bp, Cannabis indica
tttctgtccccaagaagggggacaaacttaaggacagattttatggcttccgggcccaccctttgaatgagggtccagtcaccttcaaccagcaaaaacatgtcaaggagtattgtcaccgtttcttcttctcctccgggttcctggctgtggaacacccggagcttctcacggagtgggttaggatccctccttatgagcggactgcgcctactcagctcttcctccaacgggccaagaccttcgccacatatgacaagaaggaccttgacgtcggggggttggtcacgacggagaattgccggaaggccaagctgatcctggggcatcagtcggtggaggaatccaacctttccaaggttatctgcccgaacgtaaggattccggccgcggagaagacatttcgggaggagatcattgccacggcagaagacaagtaccgagagtacctcttccggaaggcccaggagaaggcttacactaaggcccaggcggctgctgggaggccccttcgtattgggagcccggttgagaggagggcccaggcggctgccgggaggccccttcgtattggaagcccggtggagaggaaggcccccagaccaaggcctactgtccaggtgccgaatacgggggctcccgatgccagcacttctggttctggtaagtcccctttaacgat

SEQ ID NO: 354733 - DNA, 686 bp, Cannabis indica
tgaagcacatatatccattataattttttttggccattatatctcaaatattcttctgccagatcatttatacagggtacatataaactaaatatatatatatataatatcagtacatataccgagacccacatcaaacccctattttcataactttggtgccattattaaatttataccaatatatattcacaaagattaaaatttggcatatatatattgtatacggtttgtgttttttttttaaaggaataatttattcattgggatcactttgcacatcatgaattaatatttttttcataacagatatattgagcctttgttttttttgcttgggcgatttcgaatcaacggggttaatcgccaacccttttttttacagcaacttgtggcaccagtgaggtatgaatgtaatcagtgtatttattatatatttttttttaaaaaaataattttgataataaatctgtgaatgagagcattcatttttttgtggaatgagggcattccatggatgagggcatccattttttttgtggaatgagggcattcaatggatgagggcatccataaatttaatggaatgagggcattttataaatttaaatttagtggaattagagtattccatggatgaaagcatccaattttttggtggagtgagggtattccatggatgaggg

SEQ ID NO: 354734 - DNA, 1035 bp, Cannabis indica
gaaatttattatgtataaataatatttaaaaattcagtgtatcattatttgtataaatatgtagatgattatttaatagtcatactaaaaatataattatgatagttaaattatttgataattttacataggtaattaataaggtaaaaaaaattatttttaaacttaattatatacttaaaataaatttaattttttaattaaaatatttaatattgtaatttaatatttataaatattttaatttaaaataatatagattacgtacaatcagttataagtaatttattaagttaattaataaattaatcacatttgttttataataattcaacaactaaaaataaatgtaattaaagtagttacatattttatataaataatgcttcagtagagttattgaaaacgactttatgcaaaattaattttttttttaatatgtgttattacttcattttatgtccatattaaatattatttccttacttaatttttatatataattatttataaaaaacactatcattagcacttctttcttcttctctctctctaaaattttttaaaaattgctcctcaaattagcactcaaaattgtaatcaaaactaaaggctttgatatttcattttaaaataaaaacagagattgagactaaaaagaccgagggttctctaatggtgaagtcaaaaaataataaaaaaaaaataaataaattgtacatcgatctgtctcctctcaaatcatatacaccaaaaaaggtttttgcaatattttttgactctgccattaaagaacttttaagtctcaacttttatttttcttttaagggtaaatggcggcaaaatccccaatactttcgttttggtttcattaaacccccacaacccaaatttgtaaacccccacaactactattctgttagcaatttatccttcccgtccaaatttaactgttaaatgccaggttgacttgtccacgtggacacaatatacacgtggcacaattttattggtctacgtaaataattatattaa

SEQ ID NO: 354735 - DNA, 876 bp, Cannabis indica
ataaaatagattacattgaaatggagttttatttagggcataaaacctaacaggttgtgggtggtggggttgtgagtctgagtccttggagtgagttcagaagcaagagaaataagggaagaagagagagagttaggtgttcgaaatgagaggagtagaattgggttttataaaatgttagcctattctacaaatatgggttaacttaagtttagggaaataattttaatctaataaatgcataaaaattcaaatatccctgataaaatgagtttattgagaatatcatcttgcagtttttttgaatgatatcataaaatatttactataaaatatgaagttagttagtatttattgaattttatttcaattttaaattttggtaattatttgtgcacaaattataaaataaattgaaattttggttttaattttttttttttttgaattgataaaaaaatatacaattttcatattttaagtttacaaaaacatattttaagataaaattaattgggctagaaataaaaacataaaatctgagtttggatattaagtttacaaaaatatggtatatcaaataccataaaaaatcttaaatgtaataaataccatagaagaggggcaaacttataaataccatatttttgtgactttttttataaaatcccatatttcatgtaattttccaaaaaataaataaataaaataatgggaaacccctattattggaaggttttgaagaaactaaaagaaatgcatatatcatatatgcaaatatgtgaaaaagaaggccaatattgacgaaatttaaattattattatttagaaaaaaaaaatcaaattattaaattaatttaaaagcttaaattaaaa

SEQ ID NO: 354736 - DNA, 651 bp, Cannabis indica
tttcctatataaagccgccccctctctctacccttagtaggtttttgatgcttttgaatgctttgatattcatgcaatattgtatcacacgaaaccaagagagaaaaagagagtgaattttgagtttcttgtgagagagatgtgcccacacatagcatacagtacctcaatcatagtttgatagactgtgaaggatcacatccaactgaaggacattcaggctcagatcttgattatactttgctacagataggaatcaagggttagagatctaagtggaaggagacacttaattctgttgccatcactgtaaggtttcttaacttttatgtgtttttgtttatcgttttagaagttcatatttaggttcttaaatcaacatacttgtgagtagatctaagatcctggtaaaattaattccaacaccctacacaatggctccaacagagctcaaagaattgaagatttagcttctggggttgctttacctagggttctcacaaccttgtgtgtcaccttggggagcttttgtattgtatgttaagaaaaaatatgaatccctacgcatgtgcattaactacagggaatcaaataaactaactatcaaaaataagtatcctttacctaggatcgatgacttgttcgatcagc

SEQ ID NO: 354737 - DNA, 851 bp, Cannabis indica
ttgtgacatttttggcctccaatcgggtctccagggttcccaaacctgaaattatttttatttcataaataactcatattatatccatgtattttaaataaatctttgtaattaataaattacgcttatatatccacttattgagtctttagggtcgccgaacctgaaaatatttttattccacatatatctcatattacattcacacatgctatataaatctctgtaattaacaaattacgattatttactcacttatagtaaaatttaaattttatgctgaaataaattagtaggatcataatcccacttattgcctgattaacccataatataaatataaaccttattatttaccattaggcttatcgggatattacaagcatacctagcagccctgacaggctctggtgtcccgagcgcctacgccagaatgtcattttggccacagacttgaacttgtccctgactaacttgctcctctagttgagcctaatgcatgtattcaagcaattagtatatgatttatatatattaactcattattagtactaaatcaacgattaatatgtacttactatctttttggcaattttcttgtcataatcagtgacaagtttcattctcttggtctgagatttgatccaaagacggtggcatgggaaatcttgaaccttaaggtccctgttttggccggaaaacagtcaagatttctttttaagggttcttcttttttttttcagttcctaatcccttttcttttacgtgatcattctttatatatcatctacgtcttttttgcttgcatgggttatttttcctttgccattattttgctgacacgtgttctt

SEQ ID NO: 354738 - DNA, 675 bp, Cannabis indica
ctctcgaacttttacatgtactaaatcatgttccctgaactttcatccatgttagacttttttactaaaattggacaaaagtataaatccaacaatctcaatagtttaggggacatttttaacgaccttaaaagtttagggagcatgatttaatacatatcaaagtttagggcgcaaaaatcttaattagcgtaaataaaatatatctcactctataacttatgaaatgttgcaaaaaatgctcttaccgatgataacaaaagtgatactcttacctagtaattttcgagcattgctattggacatcagtagtgtccaacactttttataggtggctcttcacgattggctagcaatattttataaaagttattttcgacctgttggaactttgtatgaaatatgtaaaaatagaaaagtgaagtgtgtgagtaggagtcccacatgggatagaaacactacattttaagtgtatatctagtgcaagtttgagatatgggtttgggccccaaggggtacccagttttgcgcgcatgggtgaggactcacacactggaccaccacacgcgcgcgcgcgccgccgccgccgccgtccgtccgagccgggccgggttggcgggtgaggtgtcactttattttttgaagaaaaattatttaattaaataaagatttatt

SEQ ID NO: 354739 - DNA, 507 bp, Cannabis indica
tgtaaaccagaacacgtgtgacaatagcaaagttagttaggtgttctgttagattagttgttgtgtttgttttctgtttaaaaagttagttaattgtacaaactttgtaattactaaactatataaataaatgtatcagctaaccataatggttaagctcttttggcacatttactctgtttttctttgttcattgctctgcactttctttcttcctttctctacctttgagcttctacaaaacagaataataagacgaaacctaacagaagaactaatctataaatataaaagtttagaggagattcttaacaaattgtatattttagaaaacaaaattaatattgtcaaaaatttatggagtaaaattactaattattcaattagatattgcttctaacgacctatctatcaatgtgttgataaagattcatccttgagcttctggtatagctaataattaattttttcagaggtccaaacaagtaatgatgcaaaatataaaat

SEQ ID NO: 354740 - DNA, 858 bp, Cannabis indica
tgttcctatacttggccgtctccgagaatgcggtcagcgcagccttagttcgggaagaggagaaaacttagcatcccgtgtactatgtcagcaagcgcatgagaggggcggagacgcgatacccagtgattgaaaaactagttttttgcctcctaatggcctcgagaaagttgagaccctacttccatgctcacccaatcaaggtattgaccaaccattcgctccagcaagtcctacaaaagccagaagcgtccggaaggctcctcaaatgggcaatggagttaagcaaatttgacctgcactacattccacgcatttccataaaagggcaagcgctagcagacttcatcacagaatgcaatgaagctgaagctaccgcaaacataccccaaccatcagtcccatcgtggaaggtatttgtagacggagcctccaacgagaatggatccggagcgggggtcgccatgatatctccgaacggacttcgactccaaggagccctacggcttgacttctcagcttctaacaatgaggccgaatacgaagccttaatagcagggctgagattagcaaaaatcgtaggggctaaaagagtagaactctacagcgattcccaacgggtggtaaactaagtgtcgggggaatatcaaacgcgcggaaaaagaatggccgcatatgtagcaatagtctgggaactgctccacgagttcgcggactataaagtggaaacaatccgcagagaaaagaatgctcacacggactgcgtggctaagttagcgtcagacagcgaaatcgagaaactaggggttgtacctgtggaacgcttggcagagccaagcatcaaaataaaagaggcca

SEQ ID NO: 354741 - DNA, 1076 bp, Cannabis indica
atgggatcatggtggatccgaccaagattgaagttgttcgggattggccaacaccaaaatcagctactgaggtcagaagttttctaggtttagctgggtattatcatcggttcgttgaaggcttttcaaagattgatgtacccttaacggagctaacccgaaagaactagaagtttgtttggactgatcggtgtgagaaaagttttttagagttaaggtagcgcttgattactgctccagtattaactcttcattcagataaggaaaagtttgtgctttattgtgatgcctcgagacagggtctcgctgtgtgcttatgcaagttaaaaaggtaatagcctatgcttctcggcagttaaaagagtacgaacaaaggtacccaactcacaatctagaactcgtagcagtggtatttgcgctaaagatttggcggcattacctatatggcgagaaatgtgagatttacattgatcacaagagtctgaaatacttctttacccagagagacttgaatatgagatagaggcgttggctagagttggtgaaggattatgactgtgagatcctttatcaccctggtaaggccaacgtagttgctgatgccttaagtcgaaagggtcagagtcagttaagcactgtgaagcaaatctcccaacagctagcaaatgagatgacccgagctaagattgagttggttgtagggcaattggctaatattaccctacaatccactcttttagagcgaattagaaaagtacaaatgcaagatttgggaatcgtgtttgtgtgcccatggatgagagtatcaagagagagatcatgaatgagtctcatacgactccttattcagttcatccagggtcaacgaagatgtattaagacttgaaagccatgttctggtggccaggcatgaagaatgacattgctgagtaagttgcaaagtgctttacttgtcagcaagttaaggctgaacatcagcgacctgcagggttgttgcagccactgaacataccagagtggaaatgggaagacattgctatggatttcgtggtaggcatgcctagaaccacgggaca

SEQ ID NO: 354742 - DNA, 946 bp, Cannabis indica
tcccacttttgaactatacggattgcaggaagcaccttttagagaaagtgcagagtacagagatctccaaaaagttatttttgagaaaaatcagactattccactagaaatttggccaagaatagaagatgatgccccatgggaaatgtttccctcagattattcacgacgcatagcaagggctctagaaaagttctgaatttccgagaatagtcataatcaggtccaagcccctaaagcaaagaagaaaaattcatcactatttaaagaaacagacactgtaggggtcccactccgtaagacaagtatttttgaagattcgcaagatccatacatggactaagaaatcaaccaggatccctatctcttttagtacaatggattggaatgggagattgtttattctgattatgatgcatgtccacaagctggaagttatgaagaggatgaaccatcaggttggcacccacttcaagaggaccccaattatgactcaaactacaatgctgatcacgagccaattatcgactgctaataagaagaacaaaaaaattacacatctcttatttgtgtaagatagcaataagtaaaaaaattcatgatagtcatgatgtttgtaggaattttttctaatcgtctgtttgtcaatttggcattttctatgtttttcagtttgtccatttgttgtcagactgtccttttctctgtttgtcattttgttggtttgtccttttgttgtcagtttgtctttttgtatgtttgtttgcttgtaggaaatttctagaaagtttcctattttgtatcctacctcatgtaaattgctatatatagactcatccttttcattgtaaggacactagaaaagctttctactaaataaatttttatcgttcttctcttaaaatgttcttctaaattttctttaagagatttcttaagtagtgat

SEQ ID NO: 354743 - DNA, 1206 bp, Cannabis indica
caacaagcgaggtgggaaacaaatacagtgtaaattgttcgtcatattactcgcttgcattatcgtgttaaagttattcaaatgcaagaccggatctgtggttccgtcataggacaagacatgctggtttttgaatcccaaaggaaaaggggtattcataatatctgggtgatacggctcaagctcctcgtcagagtcgtatctagatgatttccctaattcccccacttgatatattatgaacttatcctctagcttgtttatccgcaattggattggatcctcttgcttaagaccaagatattggcaaaggtcaggtttcttccgattcaagtgctctcgcagatctagttaggagtaattcctggcagatctcgtcttactcatagaccgtgtcctactcatagaatttctctttcagtggctcggggatttacttgttcccatactttcccaatcattagctcgttgagtactttctcctcttcgagttgatcagctatgggttctggatcgcctcgaagtcacacttgcttcttcacgctctgttctttcctcccgagagcgctttttcgtatttccccccatcagggtatgtacgagtcctcgctctacaggtttgggaagaacgttggtgattcctagcaggtgatctccgttctcccggcagagtttgaagatcctactcattttcatgagggatttctcgttcattagtttctggttgtctcctttctggctgttcatcctgattctcaaggggtgtctcattttccccgggttgttcttcttgggcctttttctgtcttctggttcgtgaaccatgaggtctgcctcgtggtcttctaactccaggttcaggttgattttgagcgttcgtcccctgcaccgccttggccaaaactgcctctcgttttaactcaacatttcgacgctgcgcctcttcctgacagtgtctcaggcggcagatttcagtttcataagttctttctaccatagattgggcacctccacgattgagctcttcatcccttgtctcaggtttctgaccattcccacggtgagttctcctcgagcgcgttgtctacgtactaagaccaacgtcgggttgagttctctggggacatgtggtccctttggactgcggattggtagatcttctagagcccatgggctcttttccagaacgatggttagtttcctcat

SEQ ID NO: 354744 - DNA, 541 bp, Cannabis indica
acaatgtttaaaaaaataggtaaaaatgatagattttaaaaaagaaggtaaaaataaaagaggacaatataaaaagggtatagagtgtaattttctcgtaccttcttatgtgttaatatcgctattagttcaattaaatattgagtctcatataatttaagataataacttttaaagagtatgtcagctaatcgcaacgtaacatatcaagaaggtgctaaacacccctagtgtttaatagaaatgctctaaataaaattattattattattatttattttctaattaaatataattactaacttaatccaaccttctttatgttggagtttttgttttacgaggagttttccttgtttgctaatatgctcagttgtaattagtaacgtttttctctttggaggttattggtttagtaaattttgactacacatttattttgcattgtgttattatttttatttttatttttattattaggaaaatttgcggcaaaagtccccaaaaagttcacgttgatacagattagtccccaaggtcc

SEQ ID NO: 354745 - DNA, 508 bp, Cannabis indica
ataaacaaaaaataaaatttgaagaaaataattaccttcggattgttaaacaccttttgaattaactcactgaattatgaggtagggttatcctcccaattcaaaatgcgaggaatcttgttaccaattcttttacaatcgaggtgacaaagatggaatgatctcgtacagccaaattaagaacgcaataggatatcctttaagcttataacccttctcaatcttccttttcttagcaagctattcaaaaatattattaccatccttcaatgcaatcttgaggtgctataatgtcttctcccactttctccatccaaacctattcaacacttcaatataatcatccccatcaaccatagcaaaaataaagttgtcaatcttcttgccttggggataaccatataaataaccagaaaagaagtacacaagagctatcttagaatatcttcatcatctttcaatgcattgctaaagaaaaaactagcaacatccctcacagtaacctttt

SEQ ID NO: 354746 - DNA, 641 bp, Cannabis indica
ttaaaaaataggtaaaaatgatagactttaaaaaagaaagtaaaaataaaagaggacaatataaaaagcgtatagagtataatttcctccatgtaatatcagtcatttagatatagcccgttgttgataagattaggcccatatacttcgttgggctaacatgggcaatcgaactgacaaccatctcatgggcaatcaaacgagccttttgtaaattgattagggcttttgagcctttataaacaaaaaggaataagttgaagaatatctcttttttgtatttattaataaaaaaatatcatcatattatattttattaaattatacccacttttatgagtaggttttttaatatatcctcactctctacttaactctaacatataatttacattaacctaaagagtctaatagagacatcatctataaaagatatattttaaaaagtatgaaaatgaaggtaagaattaaaacaagtaaagtaaaaggggcgtataatgtaatttcctcaacaaaaagtgaagggataattacataaaatatcattttttgtaaaaagttacatttttacgtttttagtttttttttgttctaataagacatcatctataaaagttaatatattttaaaaaatatgaaaa

SEQ ID NO: 354747 - DNA, 851 bp, Cannabis indica
ggctcacctgattgggtgatgcagttatgcaagatatgggtgccaggctatggcacgggcttgcctgattaggcaatgcaatataggattatcatatttaagcatcgacttgcttgattaggcaacgtgatgttatgaagatggttactttatgaagtaacatatatataatttatatgattaagtaaatatgaattctattattggtgtaatagttttgtattaccaaatatctatacacattgatgtttattcgtggcagatgccagtagtaatttagattctatcttatgagcaatgtgcgatggtttgattcttattgtatataaatgacaatattcgaatgataaactatatgattattattattacttttcttgttgagtccttgtgactcacgggtgctatgtggggcaaataaaagcttgatcaaccaggaagtgacagtcttctccagcaatgtacatattgacctcaccgacctgcgcgccgagttgccaggtgttgttttgggctggttgtatctactgtgtactttcattttgtgtttaaattgttgtcgtatacatttctttagcaaaaatttttataacagggattcccggaacacgctttttatgtcgttataatgtctgtttttagtgttttactttgatcaagtttttaatattatcacggtttttaataattattaatccattagtattaaaatagtttataaaatcacacatggcgcgtccctatagattagggcgttacacaaatagcccaactcaccatagccacttcttccatttcaccttcgtgccctctgtcgaagatccccaacagccagctgttgaatgttgcag

SEQ ID NO: 354748 - DNA, 531 bp, Cannabis indica
tcttgttgttcctgtttaaaaccgcctacataataacaagtcaaatatacattacataataaaatgcacaaataaataattataatagaaagagaatgataagctcacatgtacagcaagagaaaacagataatacaaacctgttaagtttccataagatgctgcatccctttctgcctcttgtacagcaagacaaatttgttccttctttgccgaatctcccaacacagagttccaatcttcaaacaacagaggtgaggatgagaaaaccatatccatattcatatattgttctacttgtatacatgatactcacaaaaacaacaaatgcaaaaacaaacttataaataaaattaatatgtgcttaccaggcccccattggttcacaaggatgaattatacaaattgacctgtttctgtttcatttaaaaggaaatcaaattaattccagattaatgcatgcatgcatgcatgcttcataaacacattaatctaattaaaaaaaccctaacaattagagagagagagaga

SEQ ID NO: 354749 - DNA, 797 bp, Cannabis indica
accggccgatcacttgcgactgacaccgtcgcaagcgcgacgcgtggctcgagactcctcgtaccacgtagtaagtccgacgctctctcttcttctctctcagcctctctctgtctctctctctcatcctctctctgtctctctctctctctctctctctctctctctctctcgatgcagacaaagagaataggtccaattgctgtcgacgaggaccaccgagccatccgttgacgaggaccaccgagccggccgttgacgaggaccctaacctaggtatcaatcaccgatacccctctctctcacatttagggtttttcataatttttctttgcaatcttgttaatagatctgtgtataaatgttccttttgggtattattgtgatttttatttttcaaatctgtagaaagataatggttgtggagaaataaatttagggttttaaggttcgtgtttttggactgaaattttgtgtatatatgtgtgtttgtttattttttggatttggatttgtttaaattggtttgttttgtgtatatatgtgtatatcggtaggtggtgttttgttttgattttttttttttttgttgatttggatttgaaaataggcagtggtgttggttttggcaccagtaggtggtggtgattttagaaatggtgggtggtgggcatctgtggtggatgatggtggtggtggtgatgatatttttgaagaggagtgatggtggtggtgagatggagaaagagagagagaaagagatgaaggagttacagagagagacagaaaaagaaaga

SEQ ID NO: 354750 - DNA, 526 bp, Cannabis indica
ggggctcctacccctcctgcatcaggctttagcaagggagatagtggtttggccatggatcagaaaaggaaagcttccactgcaacctgtagctcaggtcaaaacaagaggttcagagggaaccagggtcgaggcagtcgccagggtagttctgaaacccgatatacttacccagagtgctccagttgtaaaaggcaccatctggaggagtgtagaggacaaagctgctttcagtgtggcatgccagggcattacaagagggattgccctcaactcagaaccgaagcaccaaaggctccagcgaaacccactccagcaagggtgttcgccattactcaggctgatgcagaagccagtccttcagtggtaacaggtcagctctcgaataacaactctttttactctgtgttgtttgactctggggccacacattcttatgccgcatccaaaatttttagtaaattggatagaccacatgatagctgcgaatcagggtttggtaccctattacctggcggagagttag

SEQ ID NO: 354751 - DNA, 686 bp, Cannabis indica
aacctgaagcagtccaaaagtaaaaacaacaagcagcaagcggtgcttcgggccggtgaaagggacctaatttcacaagaaaaaaaacccaattaaaatatgaacatacatatacacacataaatatatatacatacacttacacttacacttaaacttacatatatacacatacacatacatacacacacacataaacacatacacatacatacacacacacataaacacatacgtatatacacatatttacatatactctcacatacacatatatacacatatacatatatatacatacacccacatacacatacacatatacatatatatacatacacccacatacacatatacatatatatatacaccaacacacacaaacaaatacatgcatacatatatacatacacccacatccacatacacatacacatacatatatacacacaaatatacataatcccacatacatacacatacatatacatacatacatatatttatacacatatatacatttatacccacattaacatacatacacatacatacagaaatacatacatatacacatctatacactaataaacacatatacatacacattattacactaatccatacctatatataaacattttaaaaaattaaaattaaaaattaaaaaataccttacacaaatt

SEQ ID NO: 354752 - DNA, 868 bp, Cannabis indica
acctcttagatcatcgcctccgcttgggcttccccccgcttggcctctgcctcgaacttggccttaccaagggcctattgccgcgcagcctcctcttggaaagtccgcctttcaacgaacaagtcctgaagagtcttcacgactttgtctatgcccccaaattcggacaagacgaagtcgtggttgattaggttcttggaaaggcgatcggcctctatagcacgctggaaaaggatgcaagagtgagtaaagccgttaagaaaaataatgaggaaaaaagtaaactacagaatacttaccacagtcaaggagtggctgagatcctgaacttgaaaaacggagttcaaggatgcacaagcagcgaaccgcttgggcacacaccgggttagctgggacacaaactcgctggtcatctccgcggcaaaggagccaaggtaggaccgaggaaacgattgaaccagtccgacagggggtccaagtttagatcccatgggttctggtagtcctgatcgttaagggtattttgcatttcatctcgcaaaaccctcctcaaggcttccacctcggcatacccccgggagtactcatccatggtgtagttgtgcttggctattcggaggtcctgccttgcctcatctccgggtaccggagtcagcactatgttgggaggcactataaattacttcgcctcaggagggatcccggagtcatggctcagagccggagtgtccactctccgctgccgcttagatgtctcctcagctaccatcttggctttgcgtttgcagatcagagcaacctcttgctcttcttcaccttcttcaacttccttaggaagagcccattgctcttcttgaccttctttagc

SEQ ID NO: 354753 - DNA, 797 bp, Cannabis indica
ttatttatactttatatatagataataatggtgttatgtttaattaatggttttggtgaataactaattatttagagcattgttattgggtattagtagtaagtagcgtctcaccattagttagagatattttttaaaaattattttcttaaattatatgagacccgattactttttttttgaataaaaaatgtattttattaaagcattttttgcacaattacatcaaggatgttactcggaatagaagtacccaaataactacgatcagcatataaccatgaggctcaagcaaaagtatgagcaacacgattggcagatcgtttaacaaaacgagaattaacattgtttaaagtagaaagaagacatttgcactcctcaatacaactaccaaacggagagaccataatcactgaacttcgaagagcgcttggaccgtgacaaggctatccgtctcaaaccgtaatgttagctagagaagtttgagttctttattgatcaactaagaacctccttcactctaagagtctcgccaaaacccagatccaccaatagtggtattatattgaggagggtgctagacaccaatagtatcttttaacaattttctaaatattatgtctaaattaagattacctttggttgaggctagagctgaaaataattaggtgacgtgtcaattcagtccataatttgttgtacttgtatcttataaagtataggttgacacatctttgtatatgctgttggataaattaacaattaacccaagatctatttgtatataacatagaaca

SEQ ID NO: 354754 - DNA, 506 bp, Cannabis indica
cacttgctagagcaatattttctttttcatcttcactactttcagaatcatcactcccagtaacattcaaaccctttttatttttctttaaggtattggcacattcagatattgttactagaaatgttacctttgggagtttttgaatttttttttatttcaaacagattttatgtatttttgaaaattttttgtcaacaaggtcatttcatcatcagaagtaatattcttagaaacattaaatgcaatagctttgcttttctgattcaaggaactttgcctactctttttcttgatttgttgatttaactcaaaagttcttaaagaacccatgagctcctcaaccttcattttgccaaagtttgttgcctcttccattgctagcaattttgtgtcaaacctatcaggaagcacacgaacaattttccaaaccaagacagattcatctaatttttctcccaaggcaaaaaactcattagagatatcagataatctttcataaaaat

SEQ ID NO: 354755 - DNA, 932 bp, Cannabis indica
attagctcttaagtttaagaacctattgaatgaaggttcgtctttaaaatttaaaaagtgtggcaacctcaagtaagtacagaccatttcaaatgactataaaattttatttttgattacaacttcagtgaagatattagaaaaagaaaaagttaacatcccgaccaatgtgtttcaatttataactaaaaaattaattgatttacgtgttaatgataacagaaatactctcaggtatttattcaattattaacttttattcatatttaaaaaaaataatttaactattcatctttataatattctaatatctttgtgttattaaatgcttatgtgttgtcggtgatattgagattgttggaggttataaaaaaatacatcaaagttatgacaaataattagtaagtattgtatttgttatgacatcgactttaaatgtagtggcgagtgggatacgataatgacaataattttaaaattaacgagtttctaatagacttatcaatcgttatatttttctcccaattctattgttttatataaatttaatcacatcaaaataacattgatccaattactaaaattgactttatatagaattatatgtttacaataaattaattaataattataatttattgagttcaaaataattaaaaaagctaagactctaaaatattaatttatttttatttgtgttattaagagttaaaaaatgaaattttgaatagatactcacaattaaaaatattatataaaatatcaaaatttaaaattaatttaatataattttataacttaattatcattaaataaaatacaaccgcacgtaaaacgcggtttgttttctagttttattataatacgtataccgataaaaaaaaaatgtatatattttctttaatgttaactgacgcatacactttctttag

SEQ ID NO: 354756 - DNA, 816 bp, Cannabis indica
ttctctcacttaggcgattatttaggccggtcccgtgtgggttctggacctccagtgcccgttcccttggactcttcagcctatctatgttctagctggttccgtccctcggacagctatctcggggatgatgcagccagtgttaagattcgggactttgctagggccaaattagagagtcagggtagggctagcttgatttctttttgttaagtgtacactgctttcacagatattctaacgcttaacctttttctcttgttgtagcagccgttcgcatggatgagatcttggccactcttgctggagcccacaatcctgatgtttcccctcctcctacttcttcccagttggtcactcccgggaaggcttcttccagcgcccctctgggccctattgtcttagtggacgaggaggaggtagaatctccggatagccaagcaccactatgcccttgatgaatacacccgggggcatgccgaagtggaggccttgaagagggtcctacgggaggagcagaaaaacgtcctcaacgtggaggccttccggaatctgtgggatctaaatatggatctgcttacggactggttcaatcccttcttggggcccaccttggcttcttttgccggggagatgaccagcgagtatgtcttccacatgacccaatttccgccgaaacggtacactgcttgtgcatccttgaactctgtctaccaagttcaagacatcagcaatgccatggccgcggtaatcacttgattcatttcttttctcaatattttgtctaaggcatttgatctcactcttttctccttt

SEQ ID NO: 354757 - DNA, 601 bp, Cannabis indica
agaaatatatacatcatagatctaaatatatttctaaaagtgctttaatatagaaaaccttaaatcataaatctatatagcttttgccaaattaaagaagaagattatgataaaagataagcggaagcactaacctaaagccattgttggaaattgcagaaaaggttttgatcttcatacactgtattactaaagtattttctctgatgggaaaagagggaatacagaaaccctagtgtttcttggggaccacttgtcacgacccgagccctaggctgtggcagatgtgtaatatccataacttgggtggtcaaaggtcacactttgacccttgtaggaaaataaagcttataaatgatccttttatttatattacaaaatactaatttaaaagatatggattaactcctatattaataagaaaatattagtaacaaaatcaggaccactcatcaatataaaagaacagtaatatccccacagttatgtaatcaccaaatagatagatttaataagtcaataaaataccaaaataatacctagcatccatcattcctcatttttaactagtacatagctaatttaagtcatccagaccatc

SEQ ID NO: 354758 - DNA, 1052 bp, Cannabis indica
aaatacacagcagatacaaccagaccaaaacaactcctgaccactcgacacgcaggccggtaggtcaatatgtatattgctggagaaaactgtcacctcatggttgatctagcttttgtttacctttacctgcaccacatagcacccgtgagtcacaaggactcaacaagaaaagtaataataatcatatagtttattattgaatattgtcatttatacaaaataagaatcaaaccatcacacaatattcataagatgaaatccaaattactactggcgtctgccacgaataaatatcagtatacatgtatttggtaatacaaaaccattataccaataatagaattcatgttcatttaatcatataaattatatatatatgttacctcataaagtaaccattttcataacatcacgttgtctaatctggcaagtcaatgcttaaataggataatcctgtattgcattgcctaatcaggcaagctcgtgccatagcctgacagccatatatcgcataactgcatcacctaattaggtgagcttatgccaaaaacttgcacctatatatcatataattgcatcacctaatcaggtgagcccctgccacaatctagcaccaatatgttgcatcgtctaatcagacgagcctgtacctatgcggtacttatcatatgtcactgacgcccgtatatacacgtcaccaggaggaaatccgacaacggtttcattctatgctataacctagcaattttcatatcactgatgtcgtatctacacatcaccaggagtattacatcacctcatcaggtgagcctatacctacactcggtactcatatgtcactgacgcccgtacctacacccggtacgtcgctaggagtatcacatcacctaattaggtgagcatgtacctacgctgtaacgtgcgtatcaagatggcacgttacaagctaagtgatgcccacaagttggccaagtagtggcacatgttgaggtacatgctagtggcatgttgatgcttagtttgcatggtagtggcattttcgtaaatat

SEQ ID NO: 354759 - DNA, 575 bp, Cannabis indica
aagggacaaactagtgagacccacacaaattagggagaaaacaaagggaaaggttctcacccatttttatagggaatgccttttcttttcctttcttaatttattttaattttaattttattaattaaaaatgaaaaagataaatataccccttaaaaatctataaacaaaaaataattacatgttctaataatggcaatggagatgagaatagataagttctagtatttacatcagagaattgtgtgactatttatataaaattttatattttattttattttattttatttttgtaagggaaatttctttttttttttattaaatatttattatgtattaatatttttctctttattttgtaggtgttctattagtggatcggaagtgacaactttcagttttgagattttcttttctgatattatggttttattgtctagttctcttggggtatctctgcatgtccttaggatagacaatgaactgttatagatggaagaaaatcctcctctccttgcgtaactttgttactttggttattttaacttatatcggtttcccttcaaaaaaaa

SEQ ID NO: 354760 - DNA, 1200 bp, Cannabis indica
atctgggattttcacaactagggctaacctctgattccatactgataaaattcaatcatggtatttaaaattcagataatcatacagagctcggaacgagctttccaatgatataaagaactcccaaatcggagttcggaataaaaagttatgaatttctgaaattcaactcaaaactgcccaaaaacaccagggcgggccgcggcccaagtcatgccgcggcaccttggacgaacccccaggttccatcagcagggcatgccgcggcatatgggttccaaacccagaaaccagcagccaaaatcatgaatttcagcaacacaactcaatcaaattcatcccaaataacaatcaaactcccaaaacatgttcacaacttgctaagctcaaagatagggtacaatatatacaattcatgtatcaacttccaataataaacctcaaaattcagattgccaaatcaactcaaaatatgcttaaaactcacaacttcaagctctcaaacttgagcttcaaacccgcatatcaacaataaaaaaaattcagcagcataacaccactaaaatatgaaattccaacctagaaaacttcatacaatctctgcccaaactcatcaaagaagcatacaacaaccacaagcttaattaacaagatcaagtatcacatctaacaacatacataattaagaacaccacatctatttcatgctcctctttataaaaaaattcacttaataactaaagattaaccaagaaaagttacctcaaatctcaattcaaggctaaactctaacaattcccaagtatcaagctccaattcatgcaataatcacaccaataagaaatcaaagattgaaaaacaagagggttagggagagaaagagggttcgggtgagagggagaagcaaccagaaaattcatctatttccctaaaaaaaaatcaattttattaagtgtaaatcaaatatggtcaaaagactattttgcccctagggccttaatacacacactcaccctcacaagtgtaaaattgacatttcaagcataaataaatcccaattaaattttagattatcacatatcaaataaaatgccaaataaacaaatctaatttgcatttcgggcccgaacccggttcggcctgaaatacctgattgtgactataccgcgccaacctgtcagaacacacctgaaaagacaa

SEQ ID NO: 354761 - DNA, 878 bp, Cannabis indica
acaggctgcccaagcactcaggaagcccagaattgggaaaataggtttgcagaaatgcaagccagaattgaggagcaagatagtgaaatccagcgattgagacagcagggtgctcctgcagtgcctgttccagaaattccagtggcacctgcccctattgtccaggccaaaccagtgatagcggtgaatcgaatggaacctctgcatgaaaggttctgcaagcaggcacctccggtttttctaagaggaccgaatgttatgaaagccaagtagtggctgactgtgattaccaagatattgaatttcatgggcatcaccgggaatgatagagtggtctgtgccacttttcaatttcaagaagacgcattagtatggtgggacatggtgtccatgatacacgatgtcacaacgatgacctgggaaaaggatgctttattgagaatggataaaaatatgatcattactgttaatgaaaatgagtaattacacccttaaaaccgtagatatgtttcttacttattgggtgctttatcgggcaacgatattgacatacatagctcgtggacaacgagtggtaaggatgctttatgaagcatcaaagtcgagttgtgttataagacaattaattgattgtgtaatgccactacaagaaatgtcacttttgccagcacatttttgtgctggaaaaagttggtattgtgctggtaaaatagaatttacttgtgatgtgttggcaaaagggggttggcaaatcaatgtttgtattggaacttttgccagcataaaatgaaaagcgctggcaaaaatgactttttccagtgcataaatgggctggtaaaagttagattttagccactgcaaatgtacgctggtaaaac

SEQ ID NO: 354762 - DNA, 582 bp, Cannabis indica
accgaactaaaggggccaaacctctttaaaatcttgtgttctttattgcttactggtttttgctctatcttaattacatttcttatcgcttattaattgactcactattgttggctaaaagcgaggtcaatattttggtgctttcattgagagcaacaattcaagtttgctctattccttaagttttattagacacacaaaatggtggtacaaactcgcagaggtgtggttgaccaaagtgacccactgttaacagatcacgtattgcagactcctgggaatacaagggtcccacgaggaaccaatcctgaataaccaaacacacaaccacctactgtgggccaggatgtgacatcccctctggctgggatcacacccggtgtgcaagaaactgagaacaccagtttggcagccgatcaaagcactcccaacacttgaatcccgtccacaactaatgcttagacgaaaataggagatggtactaagatttagaacctccgcaatgctctcgaactcatgtaaggtcacactactaccttgaatcatgatcaggaggagcttcgtgctgcattgaaccttgcg

SEQ ID NO: 354763 - DNA, 694 bp, Cannabis indica
actgagtctgcaagcagtattatctcaactagtatggagaccatcgccctgtataatcaagcttccaataaggagatttagaatttactaagtaaattctctaacttattaattcatctttgcgccacaatagattcagaattgcactctgaattatatagaatgctctatatgtaccaagatatagttatgctatgaattatctattgccactaccaaaaaaaaaaggcttatctcgacagccctatctcggcgggctcgcgtgtgcgtgtcgaaataggcctgattttttttaaaaaaaattctaagcatagcaataacggcgagtctatattggcccactgttaatgctattttttaaaactttaaatttgaacaatctcggcgggctcacgtgtgcatgtcgagataggcctgatttttaaaaaaaaatgtaaaacttaaaatttgatcaatctcgacaggccaatataaagcccgccgtggttaccaataacggcgggcctatatttgactgaattttatattgtagtgttatggcaagaaaacatactcaatggatgagatcaacgaagtgcgtgaagaatgggtctcctacttaacagagtatatgccatgatttagattaaactttattaattatatatgactaattatacttattgtcaaacttttgaactaattacaatatata

SEQ ID NO: 354764 - DNA, 562 bp, Cannabis indica
ttccgaagatcgtcacgacatgtacaatcatcataagcaatcagctcgtttcacggttcagtaatcttttattgcttagtagtctattttctatagtatgatttaagaaaagcctgttagaaagcatgttagtagcctgatagctgaataggcgcatgtttttaatttccaaataagcggcactagtaagttattcttgattgcgatctaatcagacttgctcttggttacgcgagctattctagtagtatggacgccaggcgaaacaccaggagtcagggtaacttggtcggattcagtggcggtgagggagtttatattcccctaaatgatgtggccgaagcagaggccttagaagcatggcacgaggacggggtgatgttaacctgccataggctacccaagctgcccatgattgggaaaaacttgtttgtagcgatgccataggacggggtgatgttaaaataaattatcatagttcttgatagaatttatttaggcccatttagttattgggcttattcaattaataacagttgttcttattaaggttaaattcctc

SEQ ID NO: 354765 - DNA, 689 bp, Cannabis indica
cggggttatggaatttgaccattttacccctagctttttgtttatcctagctttatgtgtaagggcattttggtcatttagtaaaatggctaatgtgggttaggtggcagccttgggtgatgacagctgttttattttcagcctaagtgaatgaaaaaaaacgactttactttgatagaaagcaaactaagaaaagaaaaaattaaattagagaaaatatcatttctcttttctctctcttggtgttcggccctcccaaaccagaaggaaaacccagccaactcttcatttgtattgtgttttgagccaaggattcaaaggagaacattcaaggtaaaccctggctcttttccttttaagtttatgaagttgtattttagttttaagaggttatttttggttataggagctgttaaggtttgatgtttgcttaatacaaattctagggttagtatgagttaattttagttcatagcagctggtgtggtgattgattgttagttttatgcaactttgagctttgagttcaaagctttgggctttaatggcaacttgggttttgatggttagttctatgaattactggctggattgtattgtttatgccctaattaggtactctggaaggtttcatggcatttggtggaagagtgagcattgaatgaaatgctttggggaaactggtgcaa

SEQ ID NO: 354766 - DNA, 719 bp, Cannabis indica
ttttttactaaaaattggtttagttcttaagtttttaattaatttattaagttttaaattatttttgaatttattaactttattgtaattttttatgtttttgtgtgtttttataattattttgtgataatatgttatgtgttatttatatttaattttattttagagttctaatttattttatgtatttttaggtgtgtttggtggacagaaaattgggattaaattgaagaaagcttgagaaaagagggtcaaaagcacaatttgtaaaacaaaaattagatcagtccaaaacaaggcctactctcggtcgactctttgacccaatccacgccgtccgtgtgaagatctaaaggcccagaagcgtgcgtgaggcacaccccagacagccgagagtggcaatctgtttcctcctgctgcttttcttccacgcgggacccacgagtcagcttcagctccaatcacggcctgccacgcgtgcgcccagcagcttcctccttcccagctggtaccatctccgtcagcctcccctccaaccagctcgcgccacgcaagctctccgtcagcccctcctccattcaagccacgccaagtgtacctgcaaaagaaaaacaaaaaggaaaaaaatggctgtttaaatttgttacatctcagccaaatacattaccatacaaaatgccaaaattctcatttttctcccacaacttacacctaaatat

SEQ ID NO: 354767 - DNA, 1155 bp, Cannabis indica
actccaaaggaacatttttttcaagtttagcttcatgttatacttctttaatatcttaaagcattttaccagcatatcatcgatgtaaacctccatgttccaccctttttagtttgcgaacatttcgtttaacaatcgctgatatgttgccccagtgttcttcagtccgaacggcatgaccttataacaatagagtcccatgttggttacaaagcttctacgttcttgatccgggacatacatttttatctggttatatccagaatatgcgtccataaatgacataagctcatgcctaatagttgcatccactaactagtcgatcccgggaagtggaacataatcttttgggcatgccttattaagatcagagaaatcaatacaagttctccaagttctgtcaggctttggaacgagaacaggattggctatccatgagggataaaaaacctcccgtataaagtcgttgactaacaacttgtcaacttcttgttttattgccccttgcatctcggaatcgaagggtctccttttctgcctctccgctgggtagtttggatcaacatttaaatgatggcagataatattagggtcgatccctatcatatcactgtggctccaggcgaattgatcctagttcaccttcaaataacttattagcttctatttgagctgcttgtccaggttcttccccatgtatacacaccttgtgggatttcttgggtatagaataatttcttccaattgctcgattggtttcaataggtttctctcatcttgaactagagggtcaagatcttcgtttttcttctcattctcttatgccaatatcgccatcaattgatgtctgactttcctatgttgtagctcaatgcgatagcaatcgcgagccagcatctagtcgccacgcacaactcccacaccttcccattttttgatcgaactgactgcccctagtccaatcagtgcaggacgaccaaacaatatgttataagccgatggaatgtcgacaactaagaagtcttgcataacagtggcagataagggtgcctcgccaaaggttaatgcaagctcgattatgccaagactggcaatgctatctctggtgaacccgcaaagattcaccatacaaggccttaatttggcctttttgag

SEQ ID NO: 354768 - DNA, 609 bp, Cannabis indica
aggctgctcaagccaatcaggaagcccagaatagggaaactagggttgctaaaatgcaagccagaatagaggagcaagataatgagattcagagattgagacagcagggtgctcctacagtgcctgtgccagaagttctagtggcaccagcccctgtgttccaggccgaaccagtagtagcggcgaatagaatggaacccctgcatgaaaggttccgcgagcaggcacctctagtttttttgggaggtccggacgtcatggcagccgagcagtggctaacagtgattacgaagatattaaatttgatgagtgtgaccgaatacacaactcagtttgatcggttggagaggttggcctcaggaattgtgccaaccgatttcagtaagaagtaaaaatagctggatggacttaatgtgaagatcaagcatgacctaatgatcactacagatgacaagaccacctatgctgagatggtgggaaaagcactgcgagttgagggcgcagttggatgtatgtcggagtcagttaggactccagtgagtggcggggctcctacccctcctgcatcaggcttcagcaggggaggtagtggttcggccatcgaccaga

SEQ ID NO: 354769 - DNA, 553 bp, Cannabis indica
ctttttgagactgatttatctataattgctaaagaaacgtggatattcctcacgtttcatttattcacacatgggataatatctaataactacccaaccgctccttattttattctttagacggttatgctgactagaaagattacatctcgttaatcgtggattctccttcttatccatcttaataggggaaacatgctaagtgttagaagcacttcatctcgttgtatccctatatttgtaatagtgatgcgagatgatctttatgttatgaataacgcaatgtggttgagtgtcataagtttctcttttcttgtgagagttaataattcacgaggtccttgaatatattatcttgaacattttattaatctgtctatcctgaggtaaatatatgtctcgtcaactcttagtttaatagttattattcttgtcttgcataagattaaatagtcatcgagtttgaacatctctattaaatatattgttaacgtaaattttcgttaaccaaatttgagcttcacaatgataattcaacacagaaataataaaa

SEQ ID NO: 354770 - DNA, 728 bp, Cannabis indica
taaatttaaaatataatgtttatgaaatatacaatttataataatattaataatatatataaaaatatttaaaattaataactgtaataattttatattaaattaaaaataatttaacaataaactaattattacacatctaattaattaataattgtccaacataccaaataaataattatcatctacacataattaaaaattaaactaataattattgtccacacataattaaaattaactgaaactgattattactgtcttcatcaaacacattatctaaaacttttgaaccgctagtgttcaagtttaaattagtcggtttggtcgtttttttctatataaaaatctagaattcggttttcggtttgaattggtgtaatccgaaaactgaccgacaattcaggacctatcttaaaactgaccgttttgaaccacggtttggtcggtttaaactgcccaagccgaactttttttttttaaaaaaaatatgatccattttattatataaacacattattttaaattttacaactacaaacatacaaattaattgttcaaaaactaattatcttattgttttaactttaatattaataaaattatagtatattattattatatattattagtaggaaaaggtttcaatggttacatcaaatatgtaatcattatggttacatttatttttagtcattagatcattattggatggttgtgattaattt

SEQ ID NO: 354771 - DNA, 539 bp, Cannabis indica
cattcccaatgtctaataatccgtcccacactactaacatactaagttgtgattttactgagccaaacactgagttcgatgttaccgggcactggaaatgcaaaattatgaaaactactaaataacataaaatgcatctcagaattcaataataacaatataaataattatttaaatagctataaataattttcataattaaacatgattaactgctaattttcaaattaaactaagcggtctttacaataacaacagccacaaccacaaattcctccaacatgcaataattcattttttcttaaacttcaagaaaacaaagaaaagcttgaacaaaggttacctccacttgaattactctaagaattgcagaaaatacatgaattgcaaagaaaaatcccagccctagcagccccaagcaaaaccgaaagagggagagagagttcttgagagaaaaaatgcaactttgctttcttttttccaattttgtataaaatgaattataaaaaatgattttttttctttatttgttcagccaa

SEQ ID NO: 354772 - DNA, 704 bp, Cannabis indica
tcaaaaggcagcaactggatggaggacaagccccaaaaaatagggtatactccccaatacacccagtacacggagctgacgaactcataagaacgtgtgtatttcgccacgaggcaaaatacacactactggagaccgcctcccctgtaccgagatagttcccgaagggattgcaacaaaagatgcgagtaccacaacgacatttgacagagtaccaatgagtgcaaaaaactaaaagatgagatcgaaaatttgattcggttgggccacctctatgagtggatcaatggaagccttcacggcaataggcctcacggaccgagatctgtcgccaagcagcttctaggtcacgggattcaacgaaaccacacttatcctaatgggaaaagtgaggttgccagtcaccctgtgtccggacacaccccaaagtacttttaagtactgcacatttatggtagtagactgcccaactgcttgtaacgcaatccttggccgaccggccctagtagactttggcgtagttacgtccatccggtacttgtgtctgaaattccccaccgaggaggccagagtaaggaccgtgacgggcaatcaaggtaaggccaggcaatattataatgtcggggcccacttacgagtattaatggtccgtgaagggattgagccagaattggcagaagaagatgacttggatcccgtgtggg

SEQ ID NO: 354773 - DNA, 511 bp, Cannabis indica
ggtctggtcggtttgatggtcagtttcagtttttcagtttttatgaacacccctaggtgcaagggtcagtggactgccagagaagaggagttgaaggggttgaagatggtgaagggggcggagaggaataaaatgggcaaatattgtaagttcaaatatttgtgcggtaaaattccagccctcttttttagggatgggatttctaccggtattaatacctatccaccgttattaatgcattttaattaaaaaaaatatttatttattagttattatcgacggatagcctattctgctgataatacccttatttgtagaggtgggtatattcagccagtaataataccgccgatattaattaagtttgttgtagtgtttgaagttttgtgtttcaattgtttgaaggtgattcttgaattcaagattttggtgatcaatcaggagagatggagaatgccaaatttgatttgaaaaaatttgatagtgtttacccaaattttaacgacgatga

SEQ ID NO: 354774 - DNA, 500 bp, Cannabis indica
attaaaaatatactaaacttaatctaattaaattaatactaaaaataacctaacaaattccctgaaactaaacttttactcgtcctcgagtaaaatactaaatcgaaaaataaaagttaaacaagtcaatctccaaaacatgagtaatttttaagtagactcaataacatgattatggaaaatttcacttatgcatacaatccagaatttcaattcaattacacccttgacaaacttcaacttttttttattcagctcatgaaaccatagaatgcaattaactaataattgaaccactttatgcatgccaattaaagtcatcaatccactaatctaaaatttcatatgcttgctatacttactattctccacgaatatagattaatgcacaactaagaatcacaatgtctttctagacttgtattgttagacataggtaagggtagatgaaatggtcatttaggcttgtctataccgtaagcttctccaatcatgtcacc

SEQ ID NO: 354775 - DNA, 714 bp, Cannabis indica
ctcattcggccgaggacataacatggagtacattgtcaactgaaaaatataacaaatatattaatataatatgtggaaattaacatgaattcaacataaagtgtaacaaacttacatttttagcaaataatctggtcacttcatccttcccgagtgtagtgttcggcttactctcccagctgaccattctttgaaagcgatgcgacctcctcactgcatactcgttgcccagctgtaagatggcctcgtatgcccaatactgcaacgctgcagtatagccgtaggctgagtattttgcctccttctgagtgactcccttcttaatctttttcaacatcttattcttcacatccaagtagtccttgttacaagtttccatcagcttggtgtaagaaatattttcccaggggtactcgtagaagaatggaaggttatcaaccattcttatcacaaaaggaggaacgacagtcttctcctccttaccagtgaggacgcccataacaaacaagggcatccccaacttgtagacatcatcagcttctgtgcagctctcaaaaactctgcgcaattggctgaagctgatcgaaggactgccgttgaaatattccataatcaaccggtcagaacttcctttttctttgatgtcttcctcagtagggccgggcaacaagtttaacccggtgaccaagctgaactccaccctggcaaatctac

SEQ ID NO: 354776 - DNA, 518 bp, Cannabis indica
aaaaaactcatattgagtcattatggtctgatcttcaggactatgatgggatggagcgttggtttaaaccacaggttaatagtatcaagatcaatgtggatgcagctatttttgaaggacagaatcgatttggaagtgctttggtggtgcgtgaccacaatggtatgctcatcgaaggccgtactaagttacataatggtaatattgctccgtccattgctaaagcactgagctttcgggaagctttaagttggattaaagaccaaacatatagttcagtttgggttgagacggattgcttagtggtcgtacaagctttgcggaactcggctattctgtcttctcattttggatgtgtgatccaggagtgcaaagccatgttggctagtttaaataatgtctatttttgttttgttaagcagtcaactaatagagttgctcatgagttttctagagcatctttattttatcctgattgtattttcagtatggaacatattccaactgagttgttgcct

SEQ ID NO: 354777 - DNA, 520 bp, Cannabis indica
ttatatgcgattgattgaaaaaaaccaaaacgttgaccatttagcatgtgatgcattctcgcatcagtaaaacaaaaaagaaacaatatacatgcatcacatatatgatcgcagcaacaataaattactttacactttatatatattacattaaattgaaaaacttcaatcgcatgctatatatatacaaacaattcaaacaagaataaatttccagcggtggcacatatacatatgcggtataataattaaccaaatattccagtgcaaaaacggtataataattaaccaaatattccagtgcaaaaacaatcatttaatggaagaccaacactaccatatattctcaagaattaatttagggaggctcttgataccacatgttagaatactgtaaactttgaatatagctctaactaattcatgagaatcaaacaatagaatatagattagcggaagcgtaccggagtccatagaatctgtaacgccccaatattttaccttattttacaaaatacta

SEQ ID NO: 354778 - DNA, 453 bp, Cannabis indica
tttttttaaaataaaacaaataaaactatagtgatcgccggagttgtcaatcgtgtcagaaaagtcaccggagtttgatgttggcactggaaaaatcgtcgaagtagctgtcgatgccgaaaaagtcgccggagttgttgctgacgccaaaaaagtcgtcaaaattagcattttcgccggaaaaatcacaagaaaagtcactaagaaacttgtttcttgatggagaaaccagtttcttggtgatttttctggtaattttaccggcgacaatgccaattccgacgactattttagagtttgatgtctatgccagaaaagacacaggagtagttgtcggtgtcggaaaaatcgccgaagttactgcggcgtcaaaaaagtcatcagaattgatattgtcgccaccaaaatcactggaaaattaccaagaaagtagtttctgttggaaattatttt

SEQ ID NO: 354779 - DNA, 549 bp, Cannabis indica
tttccccttacctgcaccataaagcacccgtgagtcacagagactcagcaagaaaagtgaacaaaataataaccagtaatattcagcaattcaatctcaaattaacttgcatacacatttacacaatattacagacacaactctggtactttataaagtacccctttaccactcgttaatcacgagctgaatatgtcactatcgttgcccgataaagcaaacgataagtaagaaacctatccgcggtttcaggagtaattactcgtaatggtaataaccattgccaatccctaggtcataacccaggctccacatacttttaatcagaatcttgataataatcaagatgtaatcattcaaccgttaacacttagccacatatggtgcttgccactattcttactttagttcagaactcaagcgtacgggccgacctgagtggaaaacaagctaggagatccccggtcctacatcacgataattgaaaactcaatgaataccttaactcaaaattctggattaaaaccctaattcaaaaccgaacataac

SEQ ID NO: 354780 - DNA, 735 bp, Cannabis indica
taggttgacaaatggcctagtgcttttggattctgcttatcagattttgattctgtcttgactgttcgtctagattttcataataactgagagttataaagtcagaatagtcaaattcacaacttcatattttcactttttcgacaaagtgattcactcaaaaattggatagtttcgagtatctcgtttctgcagaatagcaatatctctgagaactggtgactagcttcaccagaatacaaaaatagtctaagtgatgtcaaaatatcacttaggcatacatctctggtacgttttcccactcacccagcactcaagttgacatcacatgtcaacctaggcgttggatgttaacttgggcgctgggatatgaacctgggtgctaggcccagaacaacctttagtaaaattgtcataactcactcaatattgatctgagtgttgcggtttaacttgagtttcgaagctatttcaatgctctatcaagtcatgtctcacatttcaatcgcagttctaaagctatcaactccaaatttcacctcaagggagttacgaatttaagcaacaacttacccggagcgatcctgccgtcgcgactcgaactctgaaaattgacgatcaaccttagaagttaatttcaccgttagatcatcatctacggcaaaaatatcctaatatatttttccatattttttggattattttattcacaattaataggacctccttcaccta

SEQ ID NO: 354781 - DNA, 818 bp, Cannabis indica
ggcaatatgggtctgaagtcacaagtctcttatacaaacgtacgtaagtaggtaatgcttcatgaaatcccctccatgcataatgtaaaatctttgattgtaaatgtagtttctagaatttcttccaccaatccataagggttgtacctaatgatgacggaatatccgttgtgagagatgtagctaaatgatatccacttttaactgaataatcaccatcggtagtgtaatgccataaccaactgtctgccttagcaaatttacttattggaatagaccaaatacattcttaatctgccacattgaaataagattgcaccataggccaactccaaccttctctattatctagaataaaatctttaacaagcatagttgaagttaagttagtaaccgttgtttgtagaaacgaatagggcctaggcagccatggatccttaaaagctagtgttatacccgaaatttgactaaacacattagcggaagacacgtgtcaagctggaaagaataaagaactcaaacacgtaatcataattacacttgaaatggaataactcgttaaaagcataattaagagagtatgtttacaactcggttgactgaatagtcttatgcaagataaaaatgtacaaaatgttgccttgtgccttgatgagaaaccatgtaacttcaggtgtacaagacgaggcactaacctcgttacgtggaggagatataatgacaatggagatacttagcgtataatgcatgatatacaaattaagtataacagatgggtgaaccaaagcgagagacaacgaggcatccacctcgccata

SEQ ID NO: 354782 - DNA, 584 bp, Cannabis indica
tatcaaagtctagtgagcatgattagtacatgaactatcacagaattagtaaatcgaatgaaattggaaaaatgtctttaaatctagcagtagttcagggagaatttttatcaattaaaaaagttcatagagcataatttaatacatgttaaagttcaagaggcaaaaatcctaattagccaacaaaaatgtatgtgttttttggttagttaaaggtcaagaattcaaatcctaacaaagtcatttttatttttaatatttagtttactttttgccctctcataaaaaaataagagcacggctaattacaacctctcctactacaacctcttagtcaaccttcacgcccgaaatcacatgtgttatcgggcataaatgttttctaagagattgtaataggaggttgacggtggcactcctcttaaaaatctacatatatacagtcatgggcggactcacatagagccgaggggccagtcgctctctgacaaataaaaaacgaacatgtaagttactcgttgattgctatgtgaattttcagtaaaaaaaaaattaaattttcaaaaaatataaaaaataaaaaa

SEQ ID NO: 354783 - DNA, 764 bp, Cannabis indica
gggtgatgagtatttacacatcccggctggactactctgatgctctttgtggagaagctgcggcttgctgcttggcggtgtctgttgcattggatcttcagcaaaagtatattatagtggagagtgactcgaagctagtgatcgatgcccttaatgggaaggcttcccattgggctctagagaactatgtctccttttgcactaagtcttctccttcttttatttgttgtaatttttcgaacattagtagatcctgtaattttatggcccataatgtggctttttgggcttttaccaacaacatgtacggatctattccgattaactctgtcccggagaacattttatgtaatgaccgagaggtctaatatcttctttatatatataaatacgccttttctcaaaaaaaaaaaaaatttagagacaaaaatactaatgagttaaaaatgaatgaatcttatatccaataagattttttttttttgaaatggttatatccaataagatttgaacatagaaaatatagtaaaaattaagaaaagaatttaaggtggaattttcccaccaaacacggaaaaagaaattaataataacattagaaatgtcttaaacttaacataaagattagatttttatttattctgcaccttcttctctcttctcacccaccatttttgttaccctttttggtgtttcagatctgagaaaaacaaaaccccccaaaaaaaattcatgtctttctagagagagatagagaaagagag

SEQ ID NO: 354784 - DNA, 626 bp, Cannabis indica
accgcccaaaccgttagtcggttcacaatttttttttaaattggtcgggttgcacttaaattttagcaacccgaactttagattaggttagaaaatatataggataaaccgctcaaaccgccgatctacaaccctaatatatactatgaattatctattgtttcaatctaaacaatcaacaatcatagggactaagttattgttttatccttcaatgtattttatccttaaaatacttagctacttgtaaatgataattcgggaaactaatgtaattattgaaacaagcactcttccatttaaactcgtttagccaagctctaaggaaatcattgtttcacatctaagtatttatgaaagctatagattcctgtaacgtccccgcttcaagcctccattaggcccttacacccacggactaatggctcttatacacgagtacgccacactctggctacttcctggatcgatgactgaccctacagaccaacacgagtgttttcagcgtgctttgtcctcactcacacgcatcctgggaaaacttcccaggaggtcacccatccttgaaattgctccaggctaagcacgcttaactgtggagttctttcgagatgggctaccgaaaa

SEQ ID NO: 354785 - DNA, 1459 bp, Cannabis indica
tcacaaccgtcaatcaaaaaggataaggaccgaatccacctagtggatactataaggtctcccgaaggtaacagggtaccaaaccccaaagcatacacatcacatggtttatggaaactttataatactctactcgacacataagagtgagtttctcccgaatcaaacaacacaatgtaagaacatccattaatagataactgaactgtcaccactgacggactagcattcgcgtcagcctgagtcatggtaaaaagtcaacccgagttctgattagtattcttcttcggctgttctttcttggcctgaggacaatctctgataaagtggcccaccatgccccactggaaagaagtcttggcctgaaattcaccctgatggtgtttcgtgcattttggacactcagagtatgatcagaatgaagatctgcagccctgacggccacctctgtttccccgaaactttctgttaccccttgatgtcctggaagcatcagccttctgtttatgatcagggttaccaccattgatccccttactgaaattaccactagcaggaggattcgataccgtggtggcatcctttacagtcttcttttttattacatgttgctcaacctcctcagcaattaaggctagctcaaccactttcttacacaaattgtcatgggtagtggtaatcttcaagtcccgactgattgtggcattcagtcctctcacatacttttgtttcttggtgaaatctgtatgcaccagatcaccaacaaatttggacagccgatcaaattccagttatttggctacagacattatttcctgagtcagtttcacaaagtcctctatatgagaagttctcacggtgatgttatagaacttttcttcaaacagactcttaactcatcccaagtcatcaaactaacatctcgagtctgccccactatatcccaccagacgcgggcatgatcttgtaacataaaggcatcacagtttactctctctgttcccgtcacccccatgttatcaaggatgctagtgatcgtactcatccctgctcagctttaattatatcagtgcctcccagaaaagttagaggttgcaacttcacgaaccgctcaaacactgaatctctgtgtggcaacataaaccccttacccaccactggcacaggagttggtggtaacacttgctctacagaggcaacaagtaccggttgccttaaccaacgtaattcttcctctagataaagtatgatgcctcgcatttcttgaaacatctgttgctagtcagaaggcagattagcattgccaacctctgcattatccatgaattctgcggaggcgtaggcggtgccgatagattggtttggtctacaccaggctctacttgctcaccctgtggtctagatgattacggagggtccatttttataaataaccctgaaatcaacaaccccagcgagt

SEQ ID NO: 354786 - DNA, 745 bp, Cannabis indica
gatcggattaataatgaatcaaggggagtaaagaagagagagagaaatttaccaaggacattctactgtaaaaatactactcataaataacaaagactcgtggagtaaggctcattaatgccccaaccacgtaaaaatcacttgcgttaaactttctacagcttttctcattctactacttaattagttgttgaaaacctcagtcaacattttcgtgctttcattgagagctgaaggaaacatcgtcagatagacaatagtcaaaggaaaagtcagattaacaatggtagaaactcgtaacaatacacgtcagccctatcctcctcaggatgctcaaaacctagaaggcgaagaagtagcctcaagagtgaatgtaggctctgaggagcgagatgaggcaaacgacaaagaatacgaagaaaacttcgaagggtacaacacttacgacgaaggtagctatacgaaactactggtcttgaggcaaaaggcagatgatcatgaagccaagctggtagctcaaaaaaaaaacagaatagaagaatgcaagaggtgatggttgccatgcaaaaacccatggaaactgcagggatacacatacatcccaaggccatcccaacagcacctgaggaaacaccgaaagaatcctcaccgagtacttagaaacccaagaccatggcaccaagccttatacagtaaccttccgaggaaaaccctcgaaaaaatccaacttcaatccccgagaaaa

SEQ ID NO: 354787 - DNA, 518 bp, Cannabis indica
tttgttgaatatgttggttggaaactcaagcttttgagcttgattcatggagagtttaggcatgtttttacattatatatgtatctgaaattgagggtttttatactgagaattttatgcatgagttgtgtattttgacctctattatgtgttagcaactctacatgttaatttacaagtttgcttgagatttgtggatgaaaggattggattttcatgctgaaaatcgtgttaaagctgctagttttctgggttttcaacccaggtgccgcggcatcctacccctgttggtggaacctgggttttgttccaggtgccgcggcatgatttaggcatgctgcggcccgccctcgtgattttgggcagttttgtgtcgaactttgaaaattcataacttttgattctgaactccgatttgggagttccttatatcgttggaaagctcgttccaagctctgtatgataatctgaattttaaatgccgtgatttaattctatgagtatgaaatcaggggtta

SEQ ID NO: 354788 - DNA, 541 bp, Cannabis indica
acagagacctaaacccgaaccgagattaggactcgaacctgaagctagaccgggacccaaacccacacaataacttggacgtggacccagaattaggataaggacctgggagctagtacccgagccagacccgaacttgaacctaggacccagctcgtgacccgacaccagaaattaaacaagattgggacccgatatggggatccaaatctggaccagggcttggacaaaactcgtagtcggtgtctggatttgggacccagccaaggagccgaaccctgacaaggacccgaacccacagccggacctaaacacagtcccaaacccaaaagtggaccccaaccctttacctgagacccaaaattggaaccaaaaccggaagatgataggtcctggaactaggacttggacttcgaatcgtaactaaaatttgacctaggtcaagaaccgtaacttcaacaggacacggactccaaatctgacctagacccgtattgggagtcggacccggatccctacccgaaacctgaactcgggaccc

SEQ ID NO: 354789 - DNA, 603 bp, Cannabis indica
gaatttttttagcttgaaaatcacaggttgtacccactgtgattggtcatgaactggatgaaatcctgttcaatgatgttactcctccctctactcttctcaatggtgctcctaatctggcatttgctcaatggaaaaagagggatcaactgctactttcttggcttcgctcagccatgacgagggtgttcttgcttcagttgtaaatcacaacacatcaactcagaaatacgtgacaacatattttggactatatattaacccgtttttggtaattaagtattgattcagaaatacgtggcaacatattttggactatgtattaattacgctaaaaaatttatcgcctcacatttttgaactgatacttaacggacttaattgacactaattcacaaccaaaaaaaaggtacaactgtaacaaaatcgtaaaacaaagtacttacgctgacactttttttattatggtcatatgtgtaacaattgtaaatattaaagaaattttactgcaaatatccgttataattagtattgtaatggaatcaaattacccattacactgttttgtttgcacttaaaaataatgtaatgggattacaatgt

SEQ ID NO: 354790 - DNA, 761 bp, Cannabis indica
gctcctcacctctggacttcagcgtccccctcacagtcctcttccattgggaccgccaagtcctgttcggcgtcgggcagggtggcaagccgagccacctgaggatcaaaagcgtcagccagacgcgtagttttcttcgtacgagccatcatttatggctgggtatggaatcagaagaaggattggcatgaagacgatggtggacttcgtgcagaagttgaagcagttcctggtcgatttaatgctcgggctcccaagactcaccagggttcatctacaaaagacaacaggcaagatgagtgttggacgtagtatcaagcgaaaaaacaagcaaatatgccgaccaggagtacccaacatattaaagaacagccatgttctaagaaaggtctaaactcaagatgtcagaaagttttttttgagttagggcaaaggagttcatgaagcttaaagaaagcagaatggaaaacagacacaatgcagttctaaaataagccttacggctgaaagctaacgcaaggacatggaaaagaagagacgcagaaatttcaaaccctagggtttcctacagtgttctttctacagcaaagatacattcaaaagcacaagcatgcaaaggaaaaacataaagggattcagaaacttactcaaagattcaagtgtccggattcaagcaagcctgaaaccgtctgtaagctcttcagcaaccttgaagcctgaaaactctctctttttgctctgaagtttgctttgctgggttt

SEQ ID NO: 354791 - DNA, 634 bp, Cannabis indica
gggttctgtagttgctgttggtgcttgatattgttttctagagtttatttatggtgtattatgttgaattaagctggttttgatggttgttgtaaggtttgagcaagccttgagttttagaactcaagctgcctctttaatggtgaattttgattttgagcgggttatgttgttctgttgcttcggttatgtttattggcgtattttaagcaggtatggaaggtttggtgaggtttagatttgatttggttggggtttcgaattgtttgggttacctggtgtaaaactggttaaccgattttacaggccctgtaaaatttattaaccggatcaacagctaggttcccaaaattaccgttacaccctttcaatgtattttatccgtaaaacacttggccacctataaatgatattatagtgaactaatatagtcactaaaatgagatctcaatcatttatctctattcagccaagctcgaaggaaatcattgtttcatttctaaatacctatagaagctatagattccatatctatgattaccgctcccactcaattgtactatcatgttcccaaaatgtacgtatcaccctgaacaaaaagtaggcttaactaacaaatcgaagaacacaaata

SEQ ID NO: 354792 - DNA, 784 bp, Cannabis indica
ttgtatctggagatgtctcgacagaaacttgattatagtgatcccaatagcgagttgggaccattcttcttactgaggtcgacaatgtatgtcttacattgccaaggttatgagcctcgctcctattagttggatgaagctataggaagtcttctcatagtgagatggtcatctcgcatacttgttcttcgagccgatccaacttttacacttagtttttttttgaacaagaggatttttattcaaaaaactgaacaatacaaccatagctgggaaaaaccagtagctaccaacaacaaagcactcgccctgcaagaaatagtagcagtcgcaaactaccaattcattacaacattaagtaaatattttgtctttctacactctttgaaggggcctaaacataacactttcagcatcaccaagtttctcacagctttgcttagattacagggggtagcacaagttaggttgtatatacagaacctaatttggatttttttatgaattagttatgattttttgaagttgaatgaaaatatctgaaatcgagtggcacacacgcgcgcgcacgaggggatatctcgacatttccacgcggtttcagacagcctgaccgaggaaactcgaacacgggctgtctgaagacgcgtcctaccgagctccctcggtcaagtaggctgcatgcagcctcaaatctcggccatccccttcattccgcgcgcgcaggggtatgcaatgcatacccctgtgcaccaattttattttcttcataacttttgattca

SEQ ID NO: 354793 - DNA, 505 bp, Cannabis indica
tttttttttttttaatttacttctttggatgagttgagaaatacgtttttttttttttcgttatccattaattataaatactctcatattatattttattaaaatttactcatttttataagtgggttgccaaatatactcttaaatccagtacttaatttacattaacctaagaggtataatgggaacattatttataaaagtgtgtatatcttaaaaaatatgaaaataaaagtaaaaaattaaaacaagtaaaataaattaggtagataatacagcttactctactttcttaaatggttaaaggtaaatctaaaatggtgagttttttattattttctgttatgcaattgctactaaaataaatagaggagtactgttataatttcttagttaaattttttttttttgctatgatagtatttgttatagttataacattatctttgtatatttttaaaaaatttcgaacaatgttgaaaataagtttgaaattttttgaaca

SEQ ID NO: 354794 - DNA, 884 bp, Cannabis indica
acttccatatttcgcccgatttggtctttacacatttgtttaccaatctttggtatgtagctccagcatttttcagaccaaacgacattactttgtagcaatatagaaccatatctgttcgaaaacttgtatgttcttagtctggtggatgcattttgatttgattgtagcctgagtaagcgtccatgaagctgagtatttcatgccctgctgttgtatctacaagatggtcgatcctccaaagtggaaaataatctttagggtatgctttgttgaggtctgtgaaatcaatacacactcgccattttttgttcgacttgggcactaatacgggattctcgaccaacgtcgggtagaaagcttcaattatgaagttgttgttacgtagcttttcaacttcttccttcaaggctactactcgttctttgtccaacaaccttcgttattgttgaactggccaaatgtttggatcgatattcagaacatgtgaaatgatagaagggccaattccaaccatatccgcatgtgaccaggcaaaaacgtctaagtttgctcttagaaattttatcaattctgattttactttgagcaacaaaccctttccgatctttacctttctggtcgggatacctcgatccatctcgatctcttttaatttttctacaggtccaacattgctacgagtgaaatattgacgtgacagcctttaagccatacaaggtcggtcgacctagcattacgttaaaagctgaaggaacatctaatatcaggaactgtgccataatagtcatgctcgttggagcttgtccaacagtgaggggtaggcgaatttgtacttggcatgattctctcggggagcttgttcggattttctagtgaacttt

SEQ ID NO: 354795 - DNA, 716 bp, Cannabis indica
atgaactgtattaacttgtattataatatttacaaaagatctgggatcaactccgaccccaatcccacatcctcaggcctcgaacctggacccacactacagaatatcttattttagtcacaactaaacttgtgactaattataaattattattcttatgttgtgaataataatctgtggctaaaggtattagtcacaaaaattacaatttgctatgactaaatgtgtttttagtcacaatacttattgtgactaaaacttatatctaaatgctatgttttagtcataagtaactttaaaggtcacatttagtcacaaaaaatagctgttttttgtaatttcattccttgaccatggacccgaacccggaccgcaccccaacctcagaccatctgatctacgttgatctgatctgatctgatccgatccaatcaaattattaattagatttttattttttttgtaattaaatttgattaattgccaaataattactagaggtaaaagtattgttctcatgtcacttcattaaacaaaaatctcatatatattttcaattaattgtgttaaatggtaatcgggaaattttattttcaaccaaagtgtattccaatattaaaaaaataatgaacttaaattaattttaaaaaattacttttaatatttttttgttttattttcacattattttcatttaataattttaatttttttta

SEQ ID NO: 354796 - DNA, 407 bp, Cannabis indica
gaaaaaaacgaaaaaaattgtaagtggtatgcatactgtccacactcacgagatagggggacggaccgagaggacacggcgtaggaggctgcatgcagcctcttcgcgcgcgcccaaggtcgaatccagacaggcgcccatgtcctgactgagaaaactcggacacaaggctgtctgaagcccacgcgtccgaggaatgaggctcatctgcgcatgtgcatgtgggtgatgacaccctgatttttcccgattttcaaaaattcataactaattcaaataaaatcgaaattaagttctgtaaaaaagtaaatttcttaatttaatccaaactatccaataaaaataattcaagaaacaaaaattctaatcatttttaataaacttgcaagcatcaatcaatcatcata

SEQ ID NO: 354797 - DNA, 533 bp, Cannabis indica
attatcttttctcatatctgaaaacaaagaacacaataatacccaaatagggatgtctatacacagatcttgatgattgcaaaatatattatagagttccttagatctaaagagagagaaagagagagaggagatcgggcaaatagagagagagagagagagagagagagagtagggatcgagtatttacttggctcggtggtcctcgacaatggctcctggctcggtggtcctcaacaatggcaaaaacacctggatcagtggtctgtggtcctcaacgacggcgacggcacctgggtggtcctgagattacttgagtattatcgagagagaaagagaagatggctgagagagagaggggatcgagattacctgggtcaatggtcctcgacaacaatgacacctggctcggtggtcctcagcgctggcaaatgatggtggtcttgggctggctacctgcctaatcgagagagagagagaaagagaagagggtatttgagaaaatgaaaaagaaaacaaaggaaaaaaaaaaa

SEQ ID NO: 354798 - DNA, 607 bp, Cannabis indica
tttaaattttattctattcaatttctatttttatttacattctcattcttatttttatatttttatttttttcaactaaaagtaatctaatgtttatttttaagaaaaaaaaagcttactattatatgcaatccacgtggcctttttgccgacacttctaacaaagtggcgtatgagaagatgccacgtagtgaacaggtttgtttagcttatgcacatgttatctcaatagtctgatttccacgtcactttgatgtaaataaagtcccatcactaactcttgtagcagcgttattgggggcattcttattagataagcactttttatagatcacattttagaattggttatgatattaatagtgatatgataagagatattagacactactaacatttttttagtaatttttctaaccctatatatttaaattcctatattggccatttttttcttctttattgatgttattatatatacgagtccacttttaatggatattacttattcatgggttatgaaaatttaaattttatatttaatttttctatctaattaaaaaaatctcttatttttacattatatgaattaggattgttctatcag

SEQ ID NO: 354799 - DNA, 404 bp, Cannabis indica
caactcagttacacgtgtacgtcaatatttatgctttactaattgtttagaatcgcctcggataggccttagtggtggacttttgctcctttggaaggatgatgttgacatatctctattgaattttggatctcactatttcgaatgttatatgaagattgaagacagtccatcttttcacttcacttgtttctatggagctcctgaagcttgcaaccgtccagcctcatggacacttttacagcggtttgtggatgttgcccctctcctcccttggttgattattggaaattttaacgaaatactatccaattcacagaaatctggtggagctctccgaaatgaatcacaaatggaagcttatcgaagatgtcttgataggtgtaattgttggaaattatttt

SEQ ID NO: 354800 - DNA, 330 bp, Cannabis indica
gggtaacaaaaaggaaaagaaaagaaaaattaagttgtaaagatgaagctctccaaacttagtctacaagaactattcaaagagttctaatagactagtgacacattgtgagcatgagatatagttggagaaataccatatgaatatatgataaatgacaagtacatcaagttgccctccatcacccgatcatcccttagctggccctccatcagccagtcatccatcagctgatcgtcccttagctagccctctgtcagatggtcgtccctaagctggttgtctctcagccggtcgttcctcagttggtcgtgttggaaattattttac

SEQ ID NO: 354801 - DNA, 521 bp, Cannabis indica
tgggaggaggtacttgattgtgtcactccaactgttcgtgaggaacataatgtaatgttgcttcggccaattagtgatgatgaggtcaaagatgcagttttccagatgcaccccgataagtctccaggccctgatggtatgaatcctaaatattttcaaaaatattggtctattgttggtaatgatgtgatctatacagttcgagtcttctttcgtaatgagtacatgccgaatgggatgaacgacaccaatattgttctcattcctaagaagaagaaacctgataggatgagtgaactgcgtcctatatctctttgtaatgttattgctaaggtcattactaaagttttggctaatagaatgaatggattattatctgaggttatatctttgaatcaaagtgctttcatccctggaagattaattacagataatatcatggttagttttgaagtcttgcactatttgaaaaggaagcaagttggcaaggatggctacatggcgctgaaactggatttaag

SEQ ID NO: 354802 - DNA, 606 bp, Cannabis indica
tttaattaatcacgatttttaataaactcgttgattagcaacgagctggacagttagttaaaaatcacgttaacatgcctaaaatagttagggtgttacaatataaattaagggattagatttcatgttcctttttcactttacttaatgccctttatatagtttaaggcttataaaagataaatattcaagtaagtaaatatcctttaaaaataagaaagtaactcttttatcatatatttatgttacacaaataactaagtaatatctctaagagatagtttaaggttgaattcctatcttcatgggttgttggagttgtatcgtaactgaaactaagttgtgaatcgctcagagagatagtcgtggacctcattattcaatcagactcctcattgatggtctttgtttgtgttgattggccttgcctttgctgagacctggccgacacataggcttcattggccagccagggtatggtctagctagacctccttgactggcgatttccttctgttgggttttatgccctaaataaaactcatttcatataattagatttacttattaataaagatcagaaataacattttatgttgcatggtt

SEQ ID NO: 354803 - DNA, 573 bp, Cannabis indica
taaaataatttctaacatagactatgatttgcttgcacttctttacgaggaccagcctagactccgtgcaacttcaccattatcaagtgagaattcgacatccagctttgatgattggaaagtgaaaaaataaggaatcagaatcttgagaaccatccgtacatcaccatcattacccccaacaatattggcggtgagggggtaggaagatttgtttgcaaaataaacatagggtggagacaatagctaacctcttcttggatgtataaggtccttgcagacgttccagataccctgccaaaaggtcatccaaagccttcaaagaatatttctatgcacacaaagattgtggttacaatcaaaaagccccccacatcaaaatgcccatctaggactaggaaggtggcaaggaccaaaaaaccttacagaaagatttcgcccgaagacccgcactttgccaagttaatggccttggtgtttgaattattttaccaggatcttagtgttaggttttgtgccctaaataaacccatataagatttactaataaagatcagaaatacattttatgtt

SEQ ID NO: 354804 - DNA, 499 bp, Cannabis indica
aaattgtttcaaatttttttttttcaggcacattttgttgatgttttttaaacaatcgttgatgttaatataaagtaatttaagagtctagacaaaataaaaaaaaaaacaaacaaacaaacaaaatagcagcctaataatgagctatgtcaatatgtatatgcattcttaaagttaatgtttgcttgtttaatgtcaataaactaaatttgaggtgatttaaactttttaaataaatcatcctactatagctatatggtcacataatgttatattcattttttgaactattaaatgaaaaggtcgaattgtatgacacatggtctaaataacaatttctcccagcaaatacatgtaggtataatgccttactagattagacatgttatcgttatttcaaactactgtgcacttatttgctaatcaaagagtttattgaaaaacatgaataataaaattttctaaataaacttaaaacttaaatatataatacatttta

SEQ ID NO: 354805 - DNA, 757 bp, Cannabis indica
taaccctaatccccgtgtcttacatggtactgagtctagaacgttcacatgaaaatactatcgaccatagtgtcagtctatactcaatatgctagccatactctagccatattgatgtgatagcatcaatcagtatttcagccaacatacatttatgagtaatcaagacagctctatgtatactattaccgctatcaatgtaatctaacaggcataaacaacatgtacgctaaacatgtaataacatatgcataacattatactaatcttaccttgattccgaattcaggtgtgccggccaacctgagtggaacaactgctcggcaaattacaggctcctaaatcacatcaatcataacaaaggtaagtgacacgctaaatcactttttcgggacacgaatttttctcaaatgcttggttttgagttattattttttgtacttaaaagaattcttcctttttttatgttcacatgatcaccaagaggcctattcccacctcagaaattaaggaaaaacacaagatccttctcaatcttccctatggtctgcgagttgtagaccctttattgcacgatgacaatttaaaagcttgcgcctttcttggaagagattaatgtaccaatgacttcaaaattcccaagtttccaaattggcaacaagtccctatacccaaggaagaagaggacgaggactatgtggctcacattcattaccttaaggatgtaaccactcgggaacctgaagacgaggcctct

SEQ ID NO: 354806 - DNA, 586 bp, Cannabis indica
actggtcgtgaaaacgatatgtcgttgtttataataaacgacgtgtcgttcgggtttcaaacgtcaaaagagctcagccctttaaaccacatcattttctgccgtttgggttgtacgacccgtcttcttcgcccagaaactaggcgcacaggtcaggtcccggatctgtatgacctggatcgtgacccgagtaaaaaatgcgcctccggccaccattttggtcggtgttttaggggttttgttgctcatcctattttctgtcgacctcaataataattttctccattcttgcccaaaaaaatacaataataaattttaaattaaagaaccaaaatgagtttgtacaaccatttttttttagcatctctatcacatgatatgcatacaattaacgatagaatacattgtctaataacaaattcaagccatactttcaacaataatttcatcagcaaaaagaaattcagggagaacaaagaacgcgaaatgggtttcctcggatctcaaaactaaaaatacactgtaaaaataccgaaaaaaaatatggataaacccaccaaatcatttttttttttacattatcaaa

SEQ ID NO: 354807 - DNA, 1107 bp, Cannabis indica
attatcattaatattattgtattctgcaacccaaatatttttcctaataagatatacttgtggactatgaggagttaacttcaaacccacgttaaaaactttctagtgttcatttattactataattaattctgtggtatatttattacaaaaaaaaaggcttatattttttgttaacgaaaattttcgttaacatttactaaaatattatttataggaagctaagtattttaaggatgaaatacattgaggggtagaatggtaaatttgtccctacttgatgtaaatcatgtatatagaatctttgattatttggattgaaataatggataattcatagcttatctattcttagtgaatagagcgttctatgtaatcaggagggtaattctgaatctatagtggagtcatgagaaattaataagataggaaatttatttggtgaattctagaactacttattacgagcttgattatatagtcaccacactagttgagagcatattctgaataagactatgtcttgtttgtgaattttcactaagcaaggacttatttgagaagaaagagaggatttagggtttatttattaatcaagagactttgtaaggtctaattaataagtaagttaaatggaaattttattcgataagtaattataattattaaatagatagatttgacatttatagagttagaattaaaatatggcattttgaaatgaaaaaaagataagttttaaataaaatggcaaaattgaaatcctatagggccccactagggttcggccataagggttaattaaagctattattttatctttttcaattccaaacctaaccctagaaactatcctataaattgaaatagatggctcttattttgaaatcctcttcttctctcctttttttgaacctttaaagtgaattgaggagttgcccacacaattcaagacaatactcaagatagtgtagaagattgtgtagaaatatgtcaactaagaagatctaggtccagatcttaatcatactctcgaacagaaaaggatcaagggtttgagatctgaaacagaagaatacattataattctactgccaccaatgtaag

SEQ ID NO: 354808 - DNA, 541 bp, Cannabis indica
catgctcacattcttacacacccttacatgtataatgtattaacttaaggaaataatagaaagtaatcccaaatcatagtactatgtaagtaaatatttttattttagaatctataaagaaatgaccattttatacaatttattatttatattatcttttgcaacatatattttttttagaattagaagcaaattacttaaagaatcatagtatatctatattagttttgttaaaatctttttattttaaagttatatcgattttttttaattttttatgagttgttggtatatagattttgttatatagtatatttttattttgttgtacggtatattatttttttaatttaaacgtcttaaccatgcattgtgtaatcagaacaaattttattaaaaatttaggttacaaagcattgaacaaacttttctttataataaaatagtgatgacacacacacacatttacaaggttcatccaagacctcatgtcttactttgcatcgttaatgaccttgtgaacattccattcattgacctt

SEQ ID NO: 354809 - DNA, 865 bp, Cannabis indica
gtagttagctttgaccaaaataatcgagcttataaaatgtaaggaaaaaaaagacgccctcctcacttataaaaaaaaagtgtcacccccctcaacttaaatcctaggtccgccactgcttagagagtgatgaagggaatgataaacttaggaaagcaattgtaacgagtttatttgacattgcaatggaatgtgataactttttttttacaataattttttttatataaaatactaataattcaatatttttgtttctgttcaaaataatttttatttattatttttcatataatttataaaaaaaataacaataataaataattataaagagtaaatttatatacaaattgataatatattttataatatataaaaaaaataaggaaaatacttcatattttaaatatttatatgtatagtagtattcatatataaaaaaaaacaaatttaaaaatgcaaaagtttgtgtttgccaatagcattggaaagtgaaaaccacattttcattgggttttccttgacagccaaactaaagtccaccactttcacttagccaacattaaaatattaaaaacctaaccaaacataggaaactttcagattcccattctcacttctcccattaccgcataccaaaagccccttatgttctttatatagcaaactaattagagtcccataaatcctaattaggtttattattaggtactacacatgtaccgaataagatatttattgaactcatttaattagatcacttatttagtccaatttagaatattagctcaaataaattgtcttaatttataagcccacatattggattattaaaaataactcaacaatctctcacttggactac

SEQ ID NO: 354810 - DNA, 772 bp, Cannabis indica
catcagtcggtggatgactacaatctttccaaagtcatctgcccgaatgtgagggctccggccgccgagaaggtattccgggatgacatcatcgccacggcgaaagataagtaccaaaagtacctcttcaggagggaacaggagctggcttatgccaaggcccaggcgactgccgggagggcacttcgtattggggttccgcgggagcaaaggacccccagaccaaagcctgtggtcccagtaccgaatacgggggctcccgatgccagcacttcgggttccggtaagtcccctttaacgatacattatgttccttccgtccgtgagtatactagccttaggcctatagggttcgatgaacgtctccataggcttaggatgccttccactcggtgggggaatcacgccaaggagtattattttcccacttaggtgattatttaggtcggtcctggatgggttcaggacctccgatgcccattcccttggaccattcagcccatttatcttctagttggttccgtccctcggacagctttctcggggaggatgaagccagtgctatgatctgggactttgctagggccgaattagagagtcagggtaggactagcttgattgctttttgctaagtgtgtgttgctctcacggatgatctaacacttattttcttgttgcagcagccacacccatggacaaaaatcttggccactattgctggagcctacagtcctgatgcttccccacctcctgcttcttctcagttggtcac

SEQ ID NO: 354811 - DNA, 637 bp, Cannabis indica
aggttagtccagctgtgcaggaagaactggacgaactaaagaatatgttccaaggcatggcttgacagagaaacaatgatctcgagttggaccaagcacgtggaacctctttctctcccgagatcaatctcctagcgttaccccacaagtttaaaattctaacctggaagatgtacactcgaagagaagatcctctttccaacatcaagtatttcgagatgcaaagggatctacagggggtacgaggagacgtatgttgcagaataattcctgccaccctctcggaagccgcccagcaatggtatcttaagctggcccctggaaagtttagctcatggaaagctttttcctcgaagttccatgtacaattctcctcctctcgccaacttccattgcatctaggagacctggtcaaagtcaagcgaagaccaggcgagcctctccaagcctacatcagcatattcgtgacggaggcgaccaaggtctcatgggtaactgaagatggaaagttgtctgtgatacttggaagcattaaagtcctacggtgaactttggaatgacataaggaaggatggcccggtagactcgatgagcgattttctcgaccgtgctgaaggcttcatcaaacttgaagagg

SEQ ID NO: 354812 - DNA, 598 bp, Cannabis indica
acagaacatgtcatcatcatccaatttaatcatttgggagaatgaagtcattttctgaggactgagcctcctcttctggttgtggttgtggctgtgaatctgctgccaactttccaggatcttgcaggaccgtcattatggtcttcaactgatctataatcgttgtttctcctcttaacaaagcggtctacccttccctcaaagccatctgccgcctctccacaatctccaatcttgccaaaatggcagggtatactggatcgcgagcctctgagatgctgggaatagaagctcacgggggaaaaggaggatcctgtgatgctgcagattggtcaacaccacactcatctagaaccgaagctgcagatggatcaacaccagacccatcaggaactgcagacggtacacatggtggacacggtggaggtggtgtagagtctttaaatattcgagctgtgtctgctcattcttcctatgtggttaagtaaagggtgttggaagacactgctacaacccatgtggcattgtatgcgagcattgacattctaaaaagcatgttttcagtactcatcacaaatatcatgaattccaagcctag

SEQ ID NO: 354813 - DNA, 731 bp, Cannabis indica
gtcttaagaagagtcttcccagccactcaagaacccagagtgagggtacttgggccaaattgggaagggccatatgaaattgaggatgagatcggctccggaacctataagctaaaaaggatggacgaaaccattgtgccaagggcttggaacgccgatcatctctgaaagtattaccaatagtccaaatatgtaaacttaggctttgtttaaagaatttgtaccgtcgaagtgtatgcaacctctaaattttaaataaaatgagtgccttaaaaacaaagttttcatgccactctggggggtactaaggcataccacacggacagatgtaaaacaggccgaaagtaaaaacaaagtcaaaaagaatatgtatcaaagtgaacatatgtatttaaaatatcctgacccaaagggcaggtccaaaaagaatacgtatcaaagtaaacatatgtatttaaaacatcctgacccaaagggatggtccaaaaaaatatatatgtaacatacaaagggcctggggacgagccataataactgtctccccttaaaaaataaacagctaaattaaaaattatcttaaagaaaagaaaaatagctgtaaataaagaaaaaagagagatatgattgtaatgacatgggttggactccgcggcctaatcaatgtgaggaggaagactaggaccccgacgtgcttcaagcatagcatcaagtctcttcttcttctcccaaaa

SEQ ID NO: 354814 - DNA, 782 bp, Cannabis indica
acaagaatcgccgaaccaggaccctataacaagactaggatcgtgaccaggacccggacccaaacctaaaaccgaacacagacctagcctcagaatcaaactaagactggtactcgggctcgaacacggtcgtgtacccaggccaaaattgagacccggacctagtcctaaatttgggacccgatcccaaaaacagagttggacctagttagggatatggataagaacctgaactcagatcgagacccagactgggatcgaaagggtggacctagatctggatcgagatcataacccaaacccaaacctagacccgaacttggacctggacccgaacctagacccagatcggtgtcctgacctagacacaaactcggacatagactcagacccgaactgaaacacccacacctagaatcagacctaaaaatagacccagacccgtagtaaaactcgaaccagactaggatctgaacaaaggacttagacctagaactgaatccagactttgatcgggattggaacttgggactcagaaccaacctagacaaagacccaggacgcgaaaccacacccggagcccgatctggacctagactgaaatccggacccgatcccaaactcagacaaggactcaaactctgacccgaactaaaacccatactccaactcaaaatcgcaaacggaactagaaccgaactgggactaggaccaggacaaggacctaaagccaaaccagaacccagatcgaaacccagacagagacctaaacccgaaccgag

SEQ ID NO: 354815 - DNA, 536 bp, Cannabis indica
gcttcaaaaatcagattacctaaaaatcacataaactcccatttcaagctcaaaagctagaattcacaatttagctccaaccacaattctcagcaatcaaatagcataaataactggaattcaaacatgaagaacaccctagattccatccaaagctcacccaaacacaaacccacacaataaaccacaagattcaagtataaacatgcttaaattcacacaagaacactcacatgcaacatcacaacatcatcaacttattccatgcttttaatccataaaattcagcaacaaagctaataaatcaaagctgtaaaactacctcaatattaatccaaaagcaagcttaagtttccacaaccacaaagcttcaaatccaagctcaaccacacaatttccaccaaaatgatttggaaaactcaaagggggttagagagggagagagttcgggtatgagagggaataaaccagaattttccttttcatttactcaaaaattcctttttatccaatatatcataaaggtcaaaaatgac

SEQ ID NO: 354816 - DNA, 988 bp, Cannabis indica
atttgtttctagaacaaaactcttaaccttgctatgattgtctttaatagaacttggtgtgggactaggatcgacacaaacattcttctttaacaaattcacaaacaagggagtaaattcatctgacttcttcgcaagtgtagacaaaaagtatcttgcacacttatcatttccaataacttctaggggatacatgtagcctttcatgtacttgtaatttactttcaatttcaagtcatacttctctttatcaatatctagttcttcatacaaaagaccaaccaaacatgagtagcttacgttcaaatcaatgtcaaatgtcaaatttttggcccctttataaacccaatctttaccctcaggctcccaaataccattatacataacaaacgcattaacaattgaacctgtcatattcattaaaaaataaaataacaatttagaacaaaaatctcacagaaaagttatccaaaatctaaaaaatgcaataatactgtacaccataaggctccattcgaaccaccatcgagatcatatcgaaccccgttaaaataaagtcaaaaaaccatgttggacagaaagtggccaacaatcggacaccatcgggtccaatcggacccatctaaaaaaaatgccctgaatccaattttggacccccatcggaccagccatcaaactaaaatcggaccaatcgaaccatactacaaaaaagtcccaaactgacctaattcagactagaatcgggccaagtatcgggtccatcagaccgaactaaaaaaaatgccccaatccattttttgaccccccccatcggacctaggggtggcaaaacgggtttcaacacggcacacgaacacgaacacgacacgaattttacgggttagggtcgggaaaattaaatgtgggtcgaaaacgggtcgacacgacttgacacgaaataaaaacgggtcaaaaacgacacgacccgcttaacacgaatgtgacacgt

SEQ ID NO: 354817 - DNA, 1039 bp, Cannabis indica
aatcaaacaaaattaacatgggtctttatatgtcaccctgcacgtgtggatttggctgacacgtgtggcccatattttaagatctaaaattaatttctcaattttaccataaatatgatttattatttatttttataataaataataatcgatcaattctcattaatttcttatttcacaagaattgaaatagatattattttttgtaaaataatatatatttctctctttaatattatttcaaaataatattaaatttaactaattaatataattttatctaataaaaataaatagttaaatactatttaattatataattcataattttcataattattcaaaaaaataaattctataaattactattttgctcttaagaatttatttctcatagaaattacttctcactcaaatttaatcatcaaataatatattcccctttgtagtggtttctagaggtgactcgggaccatagacctatattttgaaccaccaagaaacacttaattattatcgatctcatcaataaaataatctggtttattaattctattattactccactataaatataaaaattgcaccctttgatattatgtaattatatttacagaattcttactcgagtccattgatataatcaatataaatagttcacccttctaattatctcttgactctttatgtaccattaatttaatgtgaacagttaatctataacttattatagatttaactgttaggactcccaaaattaacattataaagaactaatatttgatccgtgaggaaagcttagattccactattgtataacatgtttcagccactcatgttgttaagctcccaaaatagaaattataagaatcatctgagaaattttaacgagtgaatcaaagaactcaatgaacacaaataggagttcatgtatacctagtattcaggatgatgtactaatgatcatcattgtggtatgaataactctctctgttggaatttattttaccaggatcttagatctactcacaagtatgtt

SEQ ID NO: 354818 - DNA, 631 bp, Cannabis indica
taataatacatgtataaatattatatttatttaaaaataattttattataatatagtattaaggattatgtaatattcgaaagttaaagtttaattgtgattaattaagcatgtttaatgaaatatgaagtaatataggtataaggagaataaattgagtaagattttaatcttactaagttaatatggaaagatatgcttattttaataaatgaaaaaattaagcatgatttattaattatggagattttattggactatatattatttaaatattaattgagaaataaaatttttcaggtccagcaatagtagaaacttgattgattggttagaaatatcacgacagtattagtgggtattgttgtggtattgggagattatatttcatacttgagaattatggagtaagatggttattgttaggttatatttagcttatgtttcgggtttgataagtaagcattttctcggttattggtatcttttggagcggttttacgcttgattttccttgtttcaggttcccggggtatcaaaagtcaaactcagtcaattgattaaaagacgggacaaactggcaaaaaattagaaaaatctgctcaagttgtgtcagtagtcgcgactacca

SEQ ID NO: 354819 - DNA, 1269 bp, Cannabis indica
tctcatttttgcagaacaacaacatctccgaatactagtgaccagcttcaccagagcacaaaaattgactaagtgatgtcaaaatatcacttaggcatcataaaggacatcccttggaggtttttaaacttacccagtgtcaaggttgacatcatatgtcaacttgggtgctgggatgtgaacctaggcactggatgtcaacctaggggtcgggtcatgaactgtcttcagtaaaacgaccataactcactcaatattgattcgatttacgcaattcaacttgattttaaagctaattcaatgctctatcaagtcatctctcacactccaatcgcagttttgaagttatcagcatcaaatttcacccaaggaagtttcaaaaataagcttcaggttacccatagctggacccgccgcgctccaaaaaatggtcatcaccccagaagctaatgttttccattaaatcatcatctacggtcagaaacatgtaatttctattttctcctatttttgtgtgcctctttaatctataaaaagagagctcccttagctcatttttcatattcaatttttttttgatgaatcagccatttcattgcaaaacaaacaactttacaacctataagcacctccaaaaggcctttaatcttatctatacaatgctatttacaacccttcaaaccattctctatctttttgcttaattttctttggcattacaagtgttattctattcttaacactccatttaacttgttgtataatctcagaaactatcacctgttttgcattccagaattggataaaaccagccctgcccctctattattttatatttagtggtagagaaggtgttatgctgcacacattctttaattctttctttgagatccaccattttcctccaataccaacttccactcataggagccttgtattcccaccaagcttgttgttttatgtacacactatgtacgtacccattgcacccacaaattatccttcttttttttcaattgcccatattcaaaaaattactcacaaggttagagcatttctctctagaaaccagagcttaagcacttaggtggcgtttggttgggaggaatgaaaatataggaataggaatgataattggaattagaataggaatggaataaaattgaaaatgcacaaaaaattattaaattttttcaaatcttacattggaatggtctttccttccattttaaaatggaatagtcattccaccaaaatgatagaaaggtc

SEQ ID NO: 354820 - DNA, 304 bp, Cannabis indica
ggagccaagaaaattattatgtttaaaaaattagatgaataatatgaaaaaattaggaaagaaatatgagaaaatagataaatatttataaatttaataaaaagttaaaaaaaatgagagaattaaaaaaaaaatagtactatttagaatgattttagagcgactaccttatatccctactttatatatatatatatatatatatatatatggagaaggttctaatggttactattttattgtaaccaccatggttactattttttttagtcctattggatcagtattaaatggttgtgattaa

SEQ ID NO: 354821 - DNA, 557 bp, Cannabis indica
atccaaatttctaaccctagcaggagctgtgctaaaacaacttcagtacgccttaagtgtttcgtggggcttctgctttatattggttagcgaggccgcttaaggtttcatgtccctagcagcctgaaactgcttcttgaaatccctagatagctgctcccaggaaattattgaatgatgagtaaattttttaaacaagctactcacttctctaacaagtgaggtagggaacaaaatacagcgtaaattgttcgccacattactcgctcgcattattgtgttaaagttattcaaatgcgagatcaaatttatggtttcctcataagacgaaacgtgcaggtttttgaatcctggagggaaaggggcattcataatatctgggtgatacggcttaagctccttctcagagtcgtatttagataatttccctaattcccccacttgagatctcctgaccttgtcctctagctcgtttttctgcaatttaattggatcctcttgctttggaccaagctgttggtgaaggtcaggtttcttccgattcaagtgctctcgta

SEQ ID NO: 354822 - DNA, 628 bp, Cannabis indica
acactgtcgcctgtaaatccacacagatttaccatggaaggtttcaatttggctttttcaagtcccattttcttcagtgttccttataaaggatgttcattgaatttctgttatccataagcaccttttttatccttttattggcgagctggatgataattaccagtgggtcgatctgagggtatctcacgtgttttttatcttcctccgagaatacgatcagaggttcctcagtcttagctttcttacaaggttccggagcaaaagtagactgcttgttcttcacttcatttacatatctcttttgggcattgttactttcccctacaacatgtggccctcccaggataactagaatatcctctccttcaagaggatgaggttgtaatccttggttgcccgggttattaggcggatttgactggttttgtctgtcgccttatcttttcacatattgtcgaaagtgacctcacgcgatgagactctctctttctcaactttcaactgatgacattcctctgttgtatgcccgatgtccttgtgatacttaaaaaattttgttgcatcccttttatgtcatgcatgcctcatgggctcaagtttacggaatgcgaccctgtgctcatgt

SEQ ID NO: 354823 - DNA, 529 bp, Cannabis indica
ctccttctcctcctcctcctccttcttcttcttcttcttcttcttcttttagggttaggacgaactgggcaaactcctggcctggggcaggcacgtcctcatcgggaccctgggcgatggacgatgattaggaggaatattcaggggatttggaggcgaagccgagcttgttgagcaagttcatggtgatggtgatggtgatggaggaactggggagagaaaagggtcggtgagtttgggggaaggatgaaataggtttggggcggaagttagagagagaaggaatgaagggtttggggcggaagttggagataagcataaatggggtggtagaggcggtggtggtgcgatcatcatcatcatcttctccatcatcttcttcgtattcaaaggatcataagcctggaaaatcggagctgaaagaagaaggcgctaaaggtttcaactgggctttttgtatgtaatttgtttttgggattaaagttttgatcttttttattcatattgttagagctgtactgatttgtga

SEQ ID NO: 354824 - DNA, 1174 bp, Cannabis indica
tcatgtgcgagatagattttcctgagtttcattaagcttggagtaaacggtgtaaattagcacgtatttgtcgtgcttcgtttgctttttcttatccttggctgaatccttagagttacctttcctttttgaacaagaggcccttggattgtcagccttggtcgagatggtgcttgtcgagacagtgctgggtttacttcttgagccagtctttagcagcttcatctcttttcttgcttcctcttttcgaacaaccacttgagctctttcattgaactcactgatgtttttcactaggcaaccctgtagttcatcccatagctcgcctccaacagtggtaagatcaatcgtgatccctgcccgaaaagtagtaagttgggtactatcgtccaagtttctaaccctcgcagcagctgtgctaaaacggcttaactaggccttaaatgtctcgcctggctactactttatgttggtgagggaggacgcctcaggtcacctgtcccttgcttcctggaactgtttctataagtccttagacaactagtccgaagaggtaattgagtgatgggtaaatttgttgaaccagctgttcgctgctccaactagcgaagtggggaataaaataaaacgtaaattattcgccacattactggctcgcatgatagtattaaaattattcaagtgcatgaccgaatttgtattccgatcatatgacgagacgtgagggttcttgaatccctaaggaaattcagtatttataatgtttggatggaaaggttcgagttcctcgtccgagtaatatctagactgttttccttattcccctacttgatgcctcctgaatttgtcctccaattcattaattcccaattggataggatcctcttgcttttcactgagttgttggtgaaggtcaggttttttctagttgaagtggttacgaagatccggctgccactggtgatagttactcacggatctcgtcctactcatggacctcgtcctccagtaactttcagttctacttgttcctgtactctctcgatcagtgtcgtgataggttcaatcccctccttgcaatgtaaaaccggctaaccggttttacccagaaaaccaacaaagatcaaatccccaaccaaaacgtttccaaactcaaccaaactttccagacctg

SEQ ID NO: 354825 - DNA, 825 bp, Cannabis indica
cattagcagattcatgacggaggggaccaaagtttgacgggtaactgaggatggaaagttatttgcgatactggggggcatcgaagtccttagtgaactttggaaagatataaggaagaacggtctggtagactcaatgagtgatttccatgaccgagccgaaggcttcgtcaagctcgaagaagccattcaacgagcggaaggtgaacaaaagccgcgcaagtcaaaggccccttccactgggacatccgcccaacttcccaacaactaaaataatccaagcttaactggcaagcgttcaagaaccaaccgcaagcaaggaaacgggaagaaaggaaagttcactgacaaatccggacagactccccaggagaatcatgccaaatacactacattcactattctgactgaagatatagaaagtgtatatatggcaactcagtcgttgatcccgaacaagaagcccaagcccatgaagaaagataccaacaaaagggacatgacaaagttttgtcggttccacggagactacgaccacgacactaatgaatgctacaacttgaagcgggaaattgaattcctaataaggaaaaacagtccacactttcagaagtatgtcaagaccaaccaaggtcaaaacaaccaagattttctacctccactagtagatggacacttacaagtcattattggaggcccgcacattgctagagattcgggcaaagctcaagagaggtatgcctggacagcacaacacgaataagaagaagtcatcctggccgtggaagaaaggaggcccaaggttccacgaccaggagagccaac

SEQ ID NO: 354826 - DNA, 602 bp, Cannabis indica
ccacatcaccacctccatctcttctcccttccacgctcaacagctcaagttttaagaactgttagaaaatagtataaaagacagttataaactgttggaaaaaattaattttgtaatagtgactatatatagcaccactaaaattttgcctcttttttatttcatttatttatcacattaatttttagtctaaaacaaaatggcacattaatccctttaaaaagaactattatacctccctaaaaaatcaaacaacaaatgcctttaacttgagaagagaaattcatatttttcacctcatatggctaataaattacaccaattccatagacaaatccttaaaaagacacgaagtaagctcaataattgatctcataattcttcataatattaatttgtttataaaataacatatttgaaaagttattgtcaaagtttattgatttattttcctacacattaatttacttttgtacaattcatctcaaattatattataatattgaatctagggtaaatggcggcaaaacccccaatattttggttttggtttcgctaaacccctacaacccaaatttctgcgggtaaacctccaaaaccac

SEQ ID NO: 354827 - DNA, 1474 bp, Cannabis indica
ttgttctgttttgtgttttactggtgttttataaaaacacagtattttcaaaaaaaaattcgtgtgacaatatttttgtaaaagttaactcaaattctagtatttttgtaagttttccttaatattcaattacgatacaatccaattagaatttaacttttaacttccaattgtaattaattaaatatttaattttttgtacttagattgaattggattgaatgtcctctaccctttttgtacttaattttttttaactttaactgtatggtaaacgtgccataagggaattttaattgtgagttctcaattaattttttgtacttagattgaattggattgaattcaacatattacaatctaatttatttaaatatttaattctaaatattgtaattcggttcaattagattggattgaatatcctctacctttatgacacgtttgctatacagtatttagaattgaaataaattaatggagaaatataacaaaataaaagaaaaataaccagaatcaatatttgtaatatgttgttcactaaaattttttagatttggaataataatgatttatcttatttattttattagaaaacataattaaaatgtttaaattgattaaattgtctttttgagttaaagtatttatcttatttattttatttgtaagatatattttaaaagataaaattatcattatatattttatattattttttttataatattaataatataagtaaataaatgtaagaaaatatcttactttaattctcaacatgccattaattataatggataccaattaataaaaaacaaacttcactacgttccaaaatatataatttcaaaattttcaatcagtagtaagcaccggctcaccgcagcagcatgtttgtcgggtgcggtgttttattttttgttattatttaatttatttgtataagttaatttatttatttatgtcagttttaattatatttttgttttggtaataagataaatgttattggaaaattctacaatgtaccctcttaaaataaatatattgatgcactcctatctgttgtagcatctgaaataatttttagttcaaattttttctcatagtcatgtacgttatagttatttaagtatatcctgtaaaattttaaaaaatttaagtaaaagtttaaactacgccgaaaactatgttcaaacagtatgttgcacgcgtgactattttattttattacgcgtgtaaaataaactaatttgaacattatttcttatattgtaaattatttccgaatttttttaaaaatttttagttaggtagtaccttaaaaaacgtactataacgtacactgaaatatgaaaaaaaaattaagactaaaaaatactttctaagtatgctgaaaacaagttaaaaggtagcatcagtacatccctttcaacgggggttgcgattgtagaatctccaactgtatttt

SEQ ID NO: 354828 - DNA, 785 bp, Cannabis indica
tttgagcaatgataaaatcagattttatatgttttatgaaaagagttttatctacactacctctttgataatcatgagaaattaaaaattgagttaacctttcataccaagcacgaggagcttgtttcaaaccatacaaagctttttcaagtttatagacatggtttggaaattgaggatcttcaaatccttttggttgctcaacataaacttgctcactcaaaatgccattcaaaaaggccgacttcacatccatttggtacaatatgatatcaagattacaagcaatacacaagagtaaacgaatagattctaatcttgctactagagcaaaagtttcatcaaagtcaattccttctacctgtgtatacccttgtgccaccaatcgagccttgttcctcacaattgtaacaaattcatcacttttatttttaaagatccactttgttccaatcacagtgataccttttggtcttcgaaccaaaacccaaaccttgtttcagacaaactgattaagttcttcttgcattgcattcagccattcttcaaaagtcatggcttccttcacatttttttgttcaaattgtgagacaaaacaaaggaaactaatcaaattaacatacattcttcttgttaccatgctttcttcaagatttctaagaatgagatctttaggatgattcaattttactttggtgctcagttccttttggatagaatcaataatgtgttggaaatattttgccaggatctagatttactaccatgtatgtttcattaacatc

SEQ ID NO: 354829 - DNA, 417 bp, Cannabis indica
cagtcaccgtcagcaatggagatgaaaatagataagttctagtatttacattagagaattctatgtgactattatattcaattttcatattttattttattttatttgtaagaggaattttatttttattaaatgtttattatgtattaatttttttttctctttatattgtaggtgttctactagtggatcggaagtgacaactctcagtattgatgttttcttttttgatattatggttttattgtctagttctcctagggtatctctgcatgcccttaggatagacaatgaactattatagatggaagaaaatcctcatctggttttgtaactttgttacctttattatttaacctatcggtttcctttaaaaaaaaaagaaactcttgtctattcttccaatgtgggacttaa

SEQ ID NO: 354830 - DNA, 730 bp, Cannabis indica
agatcctggtaaaataatatccaacagttagtgagttgaaattatttatagagtaattgtattaattttttagagagaaataaaattgtattaactacgaaagtaaaatattatagtatttttacaagttaagtaattacttataattaaagtccaatataaaagtacattttagtttttgttagtgaatttaattgattatatgagtgatattacataaaattattatggaattttcaaaggaataagttttgaattaatagcactatttgaagatataaaaatattgtaattggcgttaaaatttagattatggctagagtcagtaactttgtgatatgtaatgtatcatgtgtatcactcttggagagtttgttatattattttatataatataatatttagattaaataattaagttatacataattaagtgtgacaaagtattaattttgtcaaattgtaacatacattatggagacaaaatgatcacaaaataggagttgcaaatcctttaaatttgatgatcccttgaatatgtaactctcaactctcatatgaggcttgataaatcattaagagcatttctagagtttccctaagtgtccatatgagggaggaaatgacttttaggacaaaggtccttgagccttggtcaagctttgtgtgtataattattcttctttagctttcttgtaattttgatgaaatacttctatttttattttga

SEQ ID NO: 354831 - DNA, 482 bp, Cannabis indica
acataccaaacacatacaaacttgagcatacattagactcccaacaactgaagcgtagagaatcttttgtatttcttgaattttaaggcttcctttagggcattgcttaagacaaaatttgctcctttaacgataggggtatcacctagtctacgatcttgcttgccagactgtttgagtactttatcgatatagctcttttgtgataatccaagaataccccgagaatggtctcagtgtatttgaattcctagaataaaagagacatcaccaaaatctttcatctcaaaatgcttatatagaaatctcttagtttcatgcaataagcatatatcattaatgacaagcaatatgtcaccgacatatagaaccaaaaatatgcacttactcccactaaacttatgatacacacaatcatcaacaacattaatctcaaaaccaaatgagagaatcacttgatgaaatttgtggtaccattgacg

SEQ ID NO: 354832 - DNA, 767 bp, Cannabis indica
actggatcaatattgaacttggaaaggatatcataaatttaccgttatagcattctaagtcaatattaattagttgatcttcgataaatagatcttaatcctaagatggttaagttctgacttaactgtgttatttgtgtcctttgacttgttcattatagctgaacaattggatcgtctcactacttacatcttggaaatatggtagtacaattgattgaaagagctcatagatacaaaatctatagcttctatattgacatagaagtgaaatgatgatttccttcgagcttggcttaatagagataaatggaagaactcttatttcagtaattatattagtttactgaaatatcatttataagaagctaaatattttaaggataaaatatattgaggggtagaacagtaaatttatccctactcgatgtaaatcatctataaaggatcattgattatttagattataacaatggctaattaatattatatctatatttggaacatacagagtgttctatataattaagagtgcaattctaaatctatagtgaagtcaggaaaattaataagatagggaatttacttggtaaattttagatctacttattggaagcttgattatattggcccatggtccccacactagttgagataataatggcttgtagactcagttaattggttttaattaaccaattagaattctaaattagactatgtgtcttatttatgaattttcactaagcaatgacttaattgagaag

SEQ ID NO: 354833 - DNA, 784 bp, Cannabis indica
ccacacaaagctcggattacaccccaaaccccctaatagaaaactaccacttttataataacgagctttgaaaatacgacccaccaaggaatcaggctgacttaacaggcgccaaccttgcttgctaagaaggcttaaattaaagtctcttagatttctaaaccccattccacccttagactcgtgaactgttaatctctcccaactcttccaatgtatccctttattattctttgcagaagcttgccaccagaatttgcacatcatttgctccatttccggacaagcttccacaggtagaaggaagacattcatggcatagcttggtaatgattgagccacagatttaattagcaactctttccctactttagacaagaaccttccttcccagctctgaattcttttcctcattttatccttcaagaatccaagcatagacgtcttattgcggcccaaagtgttgggaagacccaaataaaagctattctccccagcttcagcaattcccattaaagaacaaattgtatttttgacattctgggcagtgtttggactgaagaaaatggtgggcttctgatgattcacttgctgtaataaaattataaataatatatttttattaatatttttttattaggattatatgtataataattacaaggctaattagtaatttttccccccgaactttgacatgtactaaatcgtgccccctgaacttttttgaccgttaaaaattcccctcgaactattgagattgttaaatttaaggacttttgtc

SEQ ID NO: 354834 - DNA, 628 bp, Cannabis indica
gactttccgttcaggtcggccagcacacttgaatcgggaaagaaggtaagaactgtgtataatgtgtactatgaatatctgagtgtatatatgtgttaagtgtatatgcatgcttatgtgttagtcgcactacaaccacttgtacagttatggtacagagtgcattggtatagtgaatattatttaagagtacattacagtgataccggcataagtacgggaaagcacagggtgtctgtggtatatcactcagtggtactcaaggtacgaaataaatcctaccaacactcgtacaacaaggtacctagtgaatgttgtatagtggttttaccctagtatggaacgttcttactcatctgttgagccttgtaaataggtgtatgggtgcctagattcaagtccatattatatggtatgttatatgcttttcttacttagcctgttgactcacagctctacttccatgtgtaggtaaaggaaaggtgaaagctgaacaggagtgagccttgagtgtgcggtctcgggacatctaggaatattattttgtagtcgttgtgcgactggttatgtattttggtatattttgtgtaaaagtttaaaaacgagatcccgatacttttaaatagtt

SEQ ID NO: 354835 - DNA, 624 bp, Cannabis indica
tagggtttatataaaaaaaccctgatttttcccaacccccaaccgacggcatagatatatatacactctatacctacggtttttaccaaaaaaccgcctctaaatgtaaatgcagatattttcaccccctttagcttccctttttataaattagattgaaaaaagggaagctaaaggcttagattgtagtagtgctgaatgatctctagttctttcttgaggctttcgacttcattatggacacccttcaaggatctaacttcttctttaagtagacaaatcaaactctgaataactggagttaagaacgactcagccatttttcttcttggctttacaatataattcctctaattataacaaattatttcagcacaaaattattaaaaagaaatatatgtgtgtgtatatatagggaagaagaaaaaggtacctgtaaaataagcggagagctttttcagtgaatattgaagaaataacttgaaatgagaaagaaagctgttgcttgtcaaacttggcagatgtaagaacataaatattaaatatccaaaggttaggtatggaaaagaaaacaaaggtaagcttggttttttctcttgtccttttcttatctaaatatttgat

SEQ ID NO: 354836 - DNA, 847 bp, Cannabis indica
tttgtccactggaacttcttattgcctcgcaatatgttgaagaacggcacacacttatcagttgactttgaaatgaatctgttaagtgcagccattcttcctgtcagggcttgtacttccttaggctttgttggtgatggaatgtctattaatgccttgatttttcgggatttgcttcaatacccctcgcgttaactatgaatcccaaaaaagttcttgaggaaactccaaaggaacatttttttgggtttagcttcatgttatacttctttaatatcttgaagcattcaacgaggtctgtgatatgatctctactttttattgattttaccaacatatcatcgacgtaaacctccatgttccgcccgatttggtttgcgaatatttcgtttaccaatcgctgatatgttgccccaacattcttcagtccaaacaacatgactttatagcaatagagtcccatgttggttacgaagcttgtatgttcttgatcttggacatacatttttatcttgttatatctagaatacgcatccataaatgtcataagctcgtgcccagcagttgcatccactaactggtcgatcctaggtagtggaaaacaatcttttgggcacgccttattcagatcagagaaatcaatacaagttctcaaagttctgttaggctacaggacgagaacaagattagctctccacgagggataaaacacctcgtgtataaagtcgctgaccaacaacttatccacttcctattttagtgccccttgtctctcggaatccaagggtctcctattctgcctcttcgctgggtagtttggatcaacatttaaatgatggcatataat

SEQ ID NO: 354837 - DNA, 892 bp, Cannabis indica
agtgaaaattcataaataagacatagtctaattttaaaattataattgattaattaaaaccaattaactgagtctgcaagtagtattatctcaactattgtggggaccataggcttatatcatcaagcctacattcgactatgatctgatcagattttggaaaaagtcaaagcataaaagttctagatctctttttcagattttcggaacatcttgaatcgtccaaactgagcaaaattgagagatttatggctacaatactatcagttgtcgcaacaagaaaaatctaaaaaaaaaggataaaaagatagcggaaaaaatacagcttttcaagtagagttgccatttttatgttttttaagtttaaattttaaatctttttagtatcttttaggtaactttgttagcctatataaacacattattattagtgtttttagtaggttttcagagttcaaaaaactcagaaactcttaattagtaagcaattcaggagtacgaaaattggagagcataatcaatcacgaaggctttttcaacggggttttcaacattcttttcttctctattttctttttctattctgaattaatatatgtgaatttgctacgatgaacatgagtagctaacaatttattaggggttagatgaatattgtttaacattgattcatagttttaatgtgatttaattttctcctaatttctatgtattctattttattcgtacttaattacttttaatttcctgatcaccaattaaatgtttataattttaaaaatctgagaagtgagtatcaattatgctatagtgaaatagaaataaattttgatataggacgagagtacctatatggtttggataacttatagggtttctatgtttaatgcct

SEQ ID NO: 354838 - DNA, 697 bp, Cannabis indica
atctcctcgcataacgggcagcgtgtattgacaggaacacgcttagaggcaagctgagaaagagttgggagacaattagaaccggccctccacatcaggttttttatttttggaggcagtttcaaggaccataatgctttccaaaaatccgaggttgcaatctcagaatccccacctctcaatttttgttggagatcatatgcactcttaaccgaatacatcccattagcctccactgtccaaaacagcctatccgattctggatggatgcctaaaggaatttgcaagatcaaatcttggtccctcacctcaaataaatctttcagtaactcaatatcccatgaactcatgtccatggtcaataaatcgttcacttttgcttgttggagggctggatgagaagaacttacaaaaggattttgttgatcaggcagccatggttcgtttaacacatcaatagaagctccatttcccacactccaacgaactcccgcacgaacaagagcttgagcttcccaaacacttcgccacacaaaacttgggttgttccctaaagaggccgagagaaatgttccattggaaaagtatcttgccttaaaaattcgagacactaaggactcgggtcttgttaagaagcgccaaccttgttttcccaacagagccaaattaaaatcatgtagagtcaagtagaagtagc

SEQ ID NO: 354839 - DNA, 599 bp, Cannabis indica
aagcatccaaactaataccaaagagttaaaagaattaagcacacagtttcaaaatttcaggacgtatcacaattaacagtagcacacaactatctttagtttatttaatcaactaacaaccaaataaaaagactaaactaaagcaaaataactaaaaagagtagaataactaaaacaattatttttttttaataagtcccctcccccaaacttagaatacacattatccccattgtgtcatacaaaactattttagggagacttacctgcacccccatcagaaggggttgaaccttaatactgcttcaaattagatcaagtccaccccttgcatccaatggagccctcgtaccgaatgaagaaaattgacctctaatgttacgaattttagagttttgcacaagagtaaattcaccttcagaactaccacacatcaatctttaccaacgatgccgaattgttcgaagtcgctctttaggctttactctcttcttatcagctataacagaaaagcccttcaccatctcaatcttgcaacaggtaggaatgttggttggggcaaaaacattaaaatttacctcttcatcttgcactcgcaa

SEQ ID NO: 354840 - DNA, 611 bp, Cannabis indica
gaggcgactaaggttgcatgggtgaccgaagtctgaaagtcgtcagcgatactgaggggcattgaggttcttggagaactttggaaggacatcaggaagaacggaccagtagattctatgagtgacttccttgatcgagcaaaaggtttcattaagcttgaagaagccattcagcgagcagaagttgaacaaaaaccttgccagtcaaaagctccctctgctgggatatccgtccagctttcctagtacccaagcaattcaagctcgggtggtaaacggtccaacaacaacaacaacaacaataggcaaggaaatgggaaaaagagaaagtttctaataaaaccaaacagactgctagggagaattctaccaagttttctgcattttctgtcctaacaaaagatatagaaagtgtgtacatggctattcagtcattagccccgtacaagaagcccacacccatgaaaaaagatgtaagcaagagagacatggccaagtttttccattttcatggggattacggccatgacaccaatgaatgcaaaaatctgaagcgggaagttgaatttctaataagaaaaaataattcgcacgtgcaaaagtatgtcaag

SEQ ID NO: 354841 - DNA, 709 bp, Cannabis indica
tatgctcacccactacgtggctccgtcagtctttgaggtgaatgagcagctggctggagctgacaaggagctttccctagagctggtgatgggaggagtcctgaaggagtttacaagggtgagtctttcttgacagtttccctttatccttctttacttagctcagattataatgttttttttctgtgcataccggtctgaagatggcttaatcttattcttgggttaagttggctgcctccaagaatgctgccatgtcaaacaccatgagagcagaagtggacttggccaagaaggatgttgatgaagccagggttcaacttggagccgtccgaatggaactaggtgaagtcaacaagaaacttcttaatgccaagaagaaattagtcgagctaactaaggacctccaggcttctaaccaacttgaagctaccattgcctccttgtcaacagaagtgaaaagtctccaagaagaaagggaggttcttcggactgtcttccgtaggttggaagcagagaagaagtataaggaggaggagcttaaagctgaggtcgagaagtacaagtcgaaggctgaacagcagacagcagagcctgagcagagaacggaggtgacgaggcttggagagaaggtaaatgccttagagacagcgggtcttgggattttttatgacttctggaaagctaatcccaaggcaaattttgatta

SEQ ID NO: 354842 - DNA, 668 bp, Cannabis indica
gttctgtgtccctagtctggttccatgtttgggtcagacttatggttcaggttcgggtcccgagtccaggtttgggttgggatccttgtccggctctcaattcgggtctaggtgtgatttggagtccgggtcctaggccgattacggttcttgatataggtccaatttcagttatgattcaaagttcaagtcctagttccagtcctggtcgactaccggttctggttcaaattctgcgtcacagggtacgggttcggggccacttttgggtttgggactatgttcaggtctgggtgctggttcgggtctttgtcagggttcgggtctagggctgggtccaaaatccagacaccgactacgggttttgtcaaagtcgtgggtccagatttggatcccattctcgggtcgtagtttggttccatttctggtgccagctcacgagctgggtcctaggttcaagttcaggtctcggtcgggtactaggtctcggtcctagttctctttcccaggttcctatcctgattattgtccaggtcccagttattgtgtgggtttgggtcccggtctaaggtcgggttcgagtcctagtctcagttcgggtttaggtctctgtctggattttgatctgggttcgtgtttgggtttagctcttggtcctggtcctagtc

SEQ ID NO: 354843 - DNA, 614 bp, Cannabis indica
ccttccctaatgagaagagcatcgagtgcagccctctggtctgctctgctagtgctcgaaatctggcccagtccagagaacttatgccaaacctcatcgaacagctgacgggatcggcgacccagtctgacaagattcacatcctcaagatccagacgaagctactgcttttgatgctcttcttgagcaacaacactagtagtaggagtagttgttgtagaagaagaagaagaagaaggaagggtctattgagtttggtcatgattttaggtttcttcttgtcgtttttgttcttgattctcttcttgttattgggtggtttattattaccagaagtgtccggagaagaataagaagtggtagctctggggactaaaatagaatggtgggctctatggctatggctgtgggttctgtcgataaggaagagaaagaaaaaaaaaaagagaaaaaaaaaaagaaaaaaaaaaaagtaatgtgatgatttcttcttgagaatcaaatgtgaacaatgaggtaggcacatagaaaaaaatatgcaatctcttactatcttctttgggatgaaaaatggataagtgtgggtgcttgtttggtataattgtgcttatggt

SEQ ID NO: 354844 - DNA, 515 bp, Cannabis indica
taaatgggaaatttagttcataatcaaatccataaccattcctataacaatattcagcataaagaaattaaaaaggaatagagaaagaaactgttggtggaatgactctggatcttcatttttctcttctttctgctctccttgccggtttctactgtgttttaggtctcccattcgcttcccctaatttccaatcgcagtattctatttataactaatttttagggtttgtcgaacgaaattgcccctggtggtacgggcgctcgccgcggccacaagattcctcgctgcggccagatgagcttcattaaacaacgcctctgctctgactttatggccgcgatgaaggtgtatctcgccgcggcgactgggacatcaaaaatccccttctctgttctcgagttatggccgcagcgacaatgatctagccgcggctagaagtgcgtcaagctgaaatgtggcatttttcgtggctccgcttgtcttttattgcacttttgcatcccgaggcctcc

SEQ ID NO: 354845 - DNA, 737 bp, Cannabis indica
caaaaccccccgtactctcaaaacctctggacggagaagagcttggaatatacttagctgtcacggaacatgtcgtaagtgccgtactagtcagagaagagaacaacatacaggacccaatctattacatcagtaaaagactcattgtggccgaaggccgatacccattgatagagaaactcgcctactgccatattctagcaacaaaaaagttaaggccttattttgaagctcatcctgttcggctgtacattgacgaaccattacgccaaatactgcaaaagccagatgcctctggacggctactcaagtgggaggtggagttgggccaatacaaaattactttccaaccctgacagcaatcaaaggccaagccttagcagactttgtgatagaatgcacaggcaagaaagaaagcattcaagaaagtaaccccgagctagtacaaacaccttagccaagtaataatgaagataagccgacctcgaaactacatgtagatgggtcagctacagatcaactatctggtgtaggaatttcccttctcacacctggggggcaacacctgcacgctgcagtcaagtttggatttaaagcatctaataacaaagttgagtatgaagctctaatcgctggactaaaactagcccgggagatgaaagccgaacacatcaaaatctgcaatgattcacatttggtggtaaatcacgtatttagagaatacgaggctcggggag

SEQ ID NO: 354846 - DNA, 700 bp, Cannabis indica
catcttcactgggcaccataacattgttattttgtattttgcagttattatacctctccttaaccgaaaatttaataccgtttactatgcacccaggataaaaataaattgttggattcgatgggttagcaatagcatacaactcatctgacactacaccatagttgctcaaccgtagttcattaatctacaatttaggaaagatgttaattatttagaaaagtttaagagttagtgtgaacaagattatgaatattgagaggcaacaatgcttactcgagttttaaaccatttagggaactcaatctcttgcacatttttaatattgcctacacccctagcttgaagcaactccttgtgctcactacataataacacacttggtaagttaaatttttttaggtgaagtcaaatattgttagagattgtttatggaatttatacttacttgatatatggctcaacctttgtgcagttgttcaatatataccactctgtcttatgcttacatatcattggtaagtgtcaactgtcctcataaccagtggtcggccaacatgcttgaatacagaaaattatcgagttggcatgttttggatgatgtcattgttccgttcaggatggttgaatcgagtttccacttcttgaaaatacatagaacaaaatgttaatgcctcattaaccacaaaagattcaacaa

SEQ ID NO: 354847 - DNA, 620 bp, Cannabis indica
ccaagctcaaccacaaaacacacaataaatagaagctcaattcctcaagattaacacataaactaacaagattaagcatcaattcactcatcatgcaacaagaatatttaaaactcaaacatgctttttaccctaaaatttcagcaagaattcaacatttagtttcaattaattcaacaagaaactacctcacttccaaaatcaaagccaatttaagcaaattccaagcatcaagccttaaaatcccaagcttttcctcaaaattccaagttgcgattcaagagagtaagagagggagagggttcgggtgagagaatgaaaaagaaaatacaattcattttccctcaaaatccattaaattcaatataactcaattatggtcaaactttgcccttagggctaaaaaaacgtacataagcattttcaagggcataattgccatttcacaatcaattatatccaaataaatttcagattatcacatgtcaaataaaatgccaaataatcaattcaatttgcattttgggcccaaacccaattcgacccgaaattcccggttgtgactataccgcgccaacctgtcagaacacacctgaaagacaacacaggcatactatata

SEQ ID NO: 354848 - DNA, 632 bp, Cannabis indica
ctatatcgtggtacatatagagcgttttatataattgagactgctattcaattctaaatctatagtggtgtaaggtggaattaataagttagagaatttacttggtaaattctggatctacttattgaaagctcggttactcggatggttggaaggccgaccttggcttagagaagtcaatgtgctgcacgggtgttccgctacttgaaaaggtgagcccgtgacactgggcattagtcggtttttttttatatataaaaatttaaaatttggtttttggtctggattggtgcaatccaaaaactgaccgaccaatccagaacctatcttaaaatcgaccgttttgaacctcgatttggtgagtttaaactgcccaaaccgagcttcttctttttttctttaaaatatgattcaattttttctataagcacattattctacattttacaactacaaccatacaaattaattgttcaaaaactaattgtcttattcttttaactttaatattaataaaataataatatattattattatatattatgagtaactacaatacaacaagaaaaaaacttactagattaatatatatgtataacggtcggttttggtcttttctgtcgatttatta

SEQ ID NO: 354849 - DNA, 696 bp, Cannabis indica
acttaaatggaagtttaacaattaaaagactcgggtgcacgacaaactactctgcatcaaaaacaacttcaaagcgagtcatttgtgaaggcaagcataatctttattcgttaactttagagtggaatgtagtgagaaatgatgaaatgtcaattgaaggtttgcagccaccttccagcctaaaagtgttgcatgtgtggggtttcatgggtgtgagatttggaggttggctttcttcattggataaccttgttaaattgaagttaatcaaatgcaagaagtgccaatatctcccaaaattagatcaattacgttctctcgaggaactttacatttgtgaggttgaagcagagtacatgtgctcctctgcggaagatgatgattttgacgccaacttgttctttccatccctagtgactcttcatattagatattgttttaatctcaagtggtggtggtggaaaaaggaagtggatgggaataatgagtttgttagatcatttcctcgtctttccaatttagaaatagaaatgagtcatcacctcacttcaatgcccttgtttccatctattgaagaagtcacactgattggaactagctcaatggcattagaagaaacgtttaaaatgatgaggggatcaagcaaggcacacaacacactcacccaaacatttcattgctaaggtctatcgttat

SEQ ID NO: 354850 - DNA, 788 bp, Cannabis indica
acatcaagggtataagtccttcgatttgcatgcataagattctgttggaagattgttgcaaccattctgtgggagcagcaacaacgaccctaaaaacttgttgtgctaaaattagatatatgcaagtgcacgcagtcacgaacaagtaatacaatgataagtaacgagtatcatctccacaaggactgtaaaaataaaatttctattgcaaaagttaattaccaagcaaaatgcctaagaaccaaaatgaaatgattaatgaatcaactaaatgaataagaaaataagtaaattaactcaaaagtggatgcaagatgaaaataaaaatgagttgtaagcttttgaaatgtgaaaggtttgaactattgaatccccctatgtttagcaaaaactgtgcgttttgctgcagcaaaatgttagcaaatctttagcaaaaatctcaggttaacaagaactccaataaagtgcacaaaactcttccaaattttatgcaatcaatccttggacctgttcaaacatattcctatgccaagcaagctcaagaataccattacaagcataactctcaattgttacacaaggatataacatattcctatgttatttctaatctaatctaataagattaagatcttgtgtcattcaagctaagtccattacatttaacctttccagaattaaatataactcaatatcaagctattggtggccaaacaatatcaagaaactaacataaacacacttgaatgaacatgagaatttttactaaatatttgcataagaaaatt

SEQ ID NO: 354851 - DNA, 770 bp, Cannabis indica
ccatcaaacctaattaatttcatgtatattaataatatgttccatgttaataattaaataataaaatgattttatattgtgtggactaatattagtcagttgggggtctgtttggtattgtatagtgtatattacattgtgatttatatttaaatttttatataatattatataatgtatataaatatagaattgttttaatataaactaattaaaacttaacacattattacataaaaataataataaaaaatttaatataataatataatactatacaaactaatacaaagtactaaaggagtcctaaatgtgttaataatcatgagtagttgtgtttgttcatttcactatttttttgtttttttgtttttttttttttgtttttttttttctttaacttgtttttttattttttatcatttgggaatacttacaagaccataaaatctaatacgacctctctcaaaaaaaaaaaaaaaaaaaatactaaatatggcccattcacaaaacaccaaataaaaatattagtaaaaaactttgagaacatatatcttatagtgagaataatatagaagattgtatatatgagaataatgtatatatataaaagagaaaaatcaaatgatatacacttaccaccatttgagctttattaatagcttaatttcttggtcaccacataagtactcttacaatcattcaaacagttgatgaagcaacaaagatggaaaaaatggatagagagagataatttgagtagagaagat

SEQ ID NO: 354852 - DNA, 526 bp, Cannabis indica
aaccacttaccttaatggttttaaccattgcaaaaaacttcaaaaaattaaacatttcaaattttgtaacttttaaaatataaggtttaaattattacaagttattttcattccgtttattaataaagtttaattttcgctcttattttactagtaatcccaattaggggattagggtttcataagtttattgggtatcgtgcctaattatttaggcattacaagcccggtcgcccaagagaattatacttgtcgttcaaacagtttacacttatattcgggacatcaggtaagacagtagttagcacgtagagttatgcgcagtggcacttatattcgaaatgggatatgtgagtaattaataatcgggattaggcttattaccctaatgtgagtggtttgatagcctagggttattaccctagtgatatatgctgtgtaaattctatgccatgttatatttatgaatatgttgagatttagggttatgtgttcaaggtcataaccaggttggactcggtaacta

SEQ ID NO: 354853 - DNA, 793 bp, Cannabis indica
gggagttctatgaatttattatttaaagaagccttcacggcgataggcctcacggactgagatcttttgccaagaggttcccaactcacattcaatggaacaacacttatcccaatgggaaaagtgaggttgccagtcaccttgtgtccggacacaccccaaagcacttttaaatactgcacattcgttgtggtaaactgcccaactgcttgctacgcaatcctcggccgaccagccctagtggactttggcagagttacatcaatccagcacttgtgtctgaaattccttactcaggaagctggagtagggaccgtgacgggtaaccaaggagaggccaggcaatgttataacgttgccgcccacttaccaatattgatggtctgtgaagttatcgagccgggaacggttgaagaagatgagttggatccctgtgtgggatccggaaaaattgtagaacccatggaggatgtcgaggaagtgccagtatgtgaccttgaccctgccaaggtcctccggctgggaaaaagcctagagccggaggaaaaagaaaaaataattaaagcactaagagcagccacagatgtttttgcgtggtgctaaggagacatgaccggcataagtccccatgtcataacccatgtcctcaacgttaacccggatatgccaccagttcagcagaagcggtgtcccctcgacccagtgaaggcagaagccttggagaaagaggtggacaaactactaactagtggcatgatccgggaatgtgtattatctagaatggttggccaat

SEQ ID NO: 354854 - DNA, 597 bp, Cannabis indica
tctttctctccttcttgagctcgattctccttcttgttgattgggttcttcacaatcttccacactatgattgagataccacttgatgtgtgtgggcactcactctatcactctgttaggctaaaattagtctaagtttcgggtcatattttcggttagttttcactctttgtttctagttttagggctattttacgcttgattcttttgtttcaggtcctcgggtgtttaaagaaagtatgtacaagaattgaggacaagtggtgaaagaatcgagaagaaaaaccaaaaattgtgtcgctgcctgttccagtcgcgatggggaacatgccagtcgcgacgggaactggcagagaaaatctcgaagtttcaaagtttaaccccgtcgcgacgggggcattgccagtcgcgacggggaccccagtgacgggatttttgggcagtttcgtaatttcacgaattttaaagatgagacttggtttaaatagagagagttcgtgaaaattagggttcattcagatttggagccctagaaacaaaggaggaggctagaagagcggcttgtggcgacccggatcaattgcttcaactagttct

SEQ ID NO: 354855 - DNA, 517 bp, Cannabis indica
gaaaactgcaagacaattaccctgaggagcggtaagaaatatgatgggcctgaattgacacaactagtagatgaggagattaaagttcaaccagtgccaaccccaacatcaacagtagagaaggctactgatagcccagcaccaccacaacagtctccaccaatcagtattgatcatcatgtgaaaataccctatcctcagagactccgaaagaccaatctagacaagcagttcaccaagtttctagaggttttcaaaagactacacattaacattccctttgctgaagctttagaacagatgccgagttatgtgaagttcatgaaggagattctgtcaaagaagagaaagatggaggactatgagacagtggctttaactgaagagtgcagcgccattttgcagaagaaactccctcccaaactcagagatccagggagtttcactattccttgtaccattgggggaattgaaggaataaatgcactatgtgtcttgggagccagcattaacttga

SEQ ID NO: 354856 - DNA, 584 bp, Cannabis indica
gcaatattaatgttctctttccatttgacaaaattagctccagagagcttgctgtcagttaacagtgacactatggggttgttcatagtcatattgggtactacaaatatcaataaattgaaatcaagtaaggttcaatgcaaaatcatacacattcataaattattaagcatttagcaagcaagaatgacaagtgaaaatacaaaaacaaataatcctaaataatttgcaaggttttcaacaaactaatgcagtttctcgtttaggcgagagacaaagatatcattcattgaatagagcagtcagctcatctaaaatggaaaccattctagcaatcttttattcgatcaagatgagaatccagtattgtcctgtttaggtgagagtcaaggtcattctatcttaaaagcttccaccattgtttcgtaccttgtaagtcttacttttagcagccactattagggtggacgttactaagaataaaacacttacaataatactcatctttcgagattctacagtgttaaattactaatgaacgttcatccattagggatgattactcactaaaacaagaactatgt

SEQ ID NO: 354857 - DNA, 843 bp, Cannabis indica
ttttctttactgtttttattttcagtgcaagtttgtcacactttaggctcaaatatagttaacgaaaatccgcgttaacacttagtaataaataatttaagaaaaaaaaaataaactttctatccataattaataattaaaaaaatctaatcatacgtaataactaaccaatcaaagtcaaactatttatgtataatttttaaatttatgataatcaattaaaaataaaaaaaaatataaatatttattctctccttaattctctcgtttatctaatttttcttttctacttaattgtcttatttttttattattatttttctttatttaattagagatcactaattgaataaaattaaaaaaaaaataactatacatttctatataataactaatatataagggtgactattaaatggatacatttttattgtaaccatcataattaaatttttcttttacctataatagctggttaccgataggtaaaactttctaattagaatcaattaataatgattttcttaaaataattaattgaatatttaacaagacttcttttagcaattaataattacaaataattttttatataaatcgctactataattattttaacagttaagtcatttaattataatatttacaatgaaaatatattttttttaacaaaaattagacttctttttacacaaattagaattatcttcttgtataataactttttatataattaattataaataaatgatattaaattatttttgtataactagaagaactaagtatgagtttttctattcgagtttgaggttgcttcattttttgggagagcttgacttt

SEQ ID NO: 354858 - DNA, 866 bp, Cannabis indica
caaaaatcaataaaagaaaaaaaaacttatgccccataaaagcttgatcaatgaggacagctgtttggatagctcttgttgaacctcctccatggcagtaagtcgattgttcactaattgaacctcattcttgacctcctggacgtctgcagaagtagaactcgagcttgcaccaccagcagcaacagcaccagctttaggcctttttagaaaagctccatcaaaatactccgagggctggaatatggttctagccaggggaggctcaagtgtttcatgagattgggccacatctttctgagaggacaaaatcttaaagattaaatttggaaacacaagcttaaaagttcactttttacctctccaaataaaacaatatggtctaagattgaagaagccagatcaatagatgcccccgaggtgattcgaaaaagaaaagatgccaagtcttgagacaccacagttttgttggaattcgggagccaatttcttagagcaaaccgcatgagggatgcatgagcttatgttagatgtgtaattcgaagactctccccagatttccattcaactcgtgcaccattaagttcagtaagcatcaaatgacgatccatagacatgatatcattaggcacaccttggggtaattgcaaatccactgcaatatccttggcagtaaaagaaaaccaatgtcccctaacatagactttaccaaagaactcaaaattctcatcaagcatatcattaatcaaattggcataaaattctttgacaatattatcaatatacccttcaaaaccagtgagagtgttttcccatgagtggtattgaacaaacttaacaattccatatactctatgagcatgcaa

SEQ ID NO: 354859 - DNA, 477 bp, Cannabis indica
aaaaaggcacagaaaacaacaacttttttaacaccaacagcagagaagaaattagtcaacaactttgtggactcattgacagaaaatgtaaaatctcttaaaactttaagttgcattacggtttcttaatagtttattttcagtttctggaacataatgacgattttataaattgacttaattcgcaggtaaagccaataaacgagaccatgttcgaagtggtagaactaacaagatcatgggtcatcaatctcaaggagaaaacatgcagttgcaaccgattccaacttgacgaattaccgtgtgctcatgcgcttgctgttataaaagagatgaatttgaatgtttacaactactgttcaggctattacacaacaaaaacatggcttgaaacatacatcggctcaacatatccggtacacaatcacacaacatgggatgtaccacaaaacataaaaaatatcattgttctgccac

SEQ ID NO: 354860 - DNA, 576 bp, Cannabis indica
gaaagagaaactggaagaaagttgaagtgtgttcgagcagataatggtggtgagtacaggggtccatttgaatactattgtagactccatggaatcaagcttgagaagtcagttccaaaaactcctcaacataatggtgtggcagaaagaatgaacagaacaattgaagaaaggattaggtgtatgctttcccatgccaagctacctaagtccttttggggggaggctatgagaactgcagttgatttgattaacctttctccttcagttcctctgaacggtgatgtgcctgagagagtatggagagggaaagatgtctcatatggtcatttgagagtctttgggtgcagagcatttgttcatattcctaaagatgagagatccaagcttgatgataaggcaaaaccatgtattttcttggggtacggtcatgaagagtttgggtacagattatggatccagtgaacaagaagattatcagaagcagggatgtggtgtttcttgaagatcaaatgtttgaagacagtgacaaagttcagaagcaaaagttccctgctaatgttcctgtgagtacta

SEQ ID NO: 354861 - DNA, 503 bp, Cannabis indica
aaaatgtacactaattatattatatatatatattatatatatatacaaaagtaaaaaaagttgaaagtaaaaaaaattaaaaaaaaagagagagactacaaaaagaattaaagaaaaaaaaaagaaaattagagagagacaagagaaaagaaaaaaaaaaaagtcagcaactgaaattataaatgtaatgtttgaaaaaaaaagttagtttttagagtaaatttttcaaataaaaaaaaccctaaaatgtaaatgtaaaataaactaaaaaaaaataaaattaattaagttagaaacaaaaatatgaaatatgagtatagataataagtttacaaaaatatggcatatcaaataccataaaaagtcttaaatgtgaaaaaatatcatagaagagtgacaaacttataaatgccatatttttgtaacttttttacaaaatcccatatttgatgtaattttcactataaataaaaaggtggttttatttcatccttccaaagtca

SEQ ID NO: 354862 - DNA, 939 bp, Cannabis indica
taaaagaggtaagatttcgaaaatgaatgcatagcaatcttaccataaaaaggaaaaattattttgtcacttaacttgccaaaaaaggactttacactgcctaagctgccagggacgttggagaattcgaatacagcgagaacaagcgagacgtcaaagtcgaactattgttggagacgagaaggagtgacaacgattttttagggttaggttttcatgaatgagaaagagtttatgatggtggtgtcttatctgtcctaagctgtttttttttttattattattatttaatttggacagatatataataaaaatatataataagaaactatttaaacaaaataataaaaatgagactagaaatatgataattaaatatattttttttaaaaaaaataaaaaatttctctaaatactatttttttaattttatttcattgaatactataagggtttctatgtaaataaaatcataccatctttgggcccactcaagttttcataaattacaattttatacaaaaaattgtaataattttagttttactcctataaaattaatttttcgtattaattttaattttatccatgagatttattaaaattcattttatattaactaaactatataactcttataaatgtatatatgcataattctttatagttagactcaatgaaatttaatgtgtgattttctaaaatatacatttgtattacacactttacgaaatcataatgattttaatgtattatattgggtacctttatatttattaaaaaatagtgtgaaattttcatttatatttttatttatatgagcaatattttttaaaaattaataaataaaatcatttttctttcaatttatttcttttttcgcaaagtattctaccttattatatcttaataatcaatttgacagtatttttacttctt

SEQ ID NO: 354863 - DNA, 506 bp, Cannabis indica
ttacaatccttaatgataccacctaaagtggatgataagacatttaaatttctaacagcttgtatgaatacatgacaatcagatttgataatactaacatctagaaaattgtgcttcaactatgataacacttccttgagagccatggcttcagcaaactctagaagaacttgcccaatctgcagtgccgtaattccagccacgacccgactcttgtgatcttgaacaacgccaccaaaaacatgccttccctcctcgttaaacaatgcaatatatattcaccttgagtttttcataatctagtttagaccatagctcagctccatccgaaagataccaaatatcaaacgcaggaaataaacttctttcttgagatattatccactcatcaagagtgatacgagctaatttgacaacaaactccactcaaatttatctacccttccacaagagttgattttgtgcgaaccaaattgcccaaaccaacatcatcgcctgaacacttt

SEQ ID NO: 354864 - DNA, 833 bp, Cannabis indica
aatcactccaaacttcacagagcccatatataccataaatattaccatccttacgtaacaaaaaaaaacgaccccttatatgaaaaatgccattaacgttcggagtaagctttaaaagttccaaactcgatttctaacttaaaaacacttcaaactcaacaagaaaatatcaaaactagtcccatgactactcgagaacaattctataaggtcagaaccttcatactattctaattcacaaaacccctatacgaaactaattgtttttaaacttaaaactaaattaaaccataccttaagctttccctttttaaggatttactatcctgctactaccggagcttagatcgctaagttttggattgaaaatcgaaaaaaaaatgaataaaggaagagaaggttttatcgaagggagagaatgaggatttcgttccttcggtcgttcattcgttcagtactgttataacttaaaacttaatatatatatatatatatatttttaaacaaaatgaaacagaagtttcgtatttatatatataataatcataatataatattaataataataatattaataaaaactttattattaatagttatcttattatttcttagctactaagaaatctctatttctagaatatttggccaacttcgagtaccctaaaataccccgatatttctaaaatcaacttatcataataatcccatcaatatttctaactaaaactgttgtgacattttttacctccaatcgagtctccagggtcgccgaatatgaaaatattcttatttcacaaataactcatattatatccacgtattttaaataa

SEQ ID NO: 354865 - DNA, 874 bp, Cannabis indica
aaaataatattttaattagatattaaggtttgaaaattgcaaaaatcggaatttgggaaaaaatccgtcgaaaattgcaattttaaccacttggctgcccacgaggaggctgcatgcagcctcctacgcgcgtgcaagtggaaggaagcagagggagaacgtgcggcattcttcggcgcctgcagcattcccgtgggctagtagaagggtccatcgtgtctgaatagagtgagcaccgtgtcttcagacacagaatctcctaatccgtgcgtgcatcacttcggtttgtccgagttcgtggtgcgattgagcaccatactcgacaccgattctacccaatttcaaactctcataactttttcaatttttatcaaaatcgagtttcgtaaaaacaaaaattgcttaattcttcacaaggaatccaaataaaatattttcagaaacaaaataaaaatattttcatggaaaaatttcgtaaaacacatacattcatcatatatgcacataaaccacatgaagccatccaaatcaacacaaatcatcgttttaattcatatttcatgaaagtaaatcattaccatggctcagacgccagttgttagaattattttaccaggatctagatttactactaagtatgttgtttaacatcttaatatgaatttctaaaacaatgaaataaacacataaaagttatcagaaaccttacagtggttgcagcggaatataatgactccttccgttcagatctctagcacttgattcctttctgtagcagagcattatcaagatctgaacctggatctctttctctccttctttagcccgatttctccttcttgttgatttggattcttcacagtcttacacacta

SEQ ID NO: 354866 - DNA, 505 bp, Cannabis indica
tttctaaaaaattttagtaaacaacctattacaaatattgattccgattattttttatttattccgttacatttgatttattccgattctaattactgtatagtaaacgtgccattaaatttagtggcctgccttacttttaaactttgagtgtcattaattttaaccttttgccttttaataaaaaatttcttcggttcataaaaaaaaagtaaggattagttgttctagttttctcataatattatagcatatataaatatttaatttattaaaatgaaattctaaaatgtgatgttgaggatatattatagagtacgtagactttaataattaatagtgtgccataaagtcaagttatcactttggttatgttaattgttttattttaatttttaataattaatttttctcgttttaaaagaaaagtttctgtaaagtactttttttgcaagttagttgacaaaatatttttttcttttatggtaagattcttgtgcattca

SEQ ID NO: 354867 - DNA, 483 bp, Cannabis indica
ttttgtaagtttcccttttttaattcattcgccccctcctcccctaaattaaattacaaatagtgtttaaacttatagtccattaaatattccttggtcttttatcaagtgatctcttaaaattggtaagatagttttatttcaaaatcaactgataatgggaaaagtaattcatgaattttatatattttattatctttttacacacggagggacgtaggccatagtgtaggcttaagccctcactcatttatataaagaagcttatacatatatattaatgggtattacccataaatggttactaacaaatttaactataaatattaattttaataatatcaaatcatcgaatttttatctaataacgaataatgaaatcacaaatttgaatttccatgcttaatttaactacttaataaaaaaataaataaaaaaataatctctttttacactatatcaaaaatatgttcatacaaaaat

SEQ ID NO: 354868 - DNA, 577 bp, Cannabis indica
tttcatataatttatttaattttttatcataatatttaaaatataatttgttatactcgaaattcggctctacttcaaaaagtgacacatgtcaatctcgtggaatgtgaaccaacatgtataataacaattacatcattaaacgcaaaatagaataacttattaaatatggaattaatagagtatattcataactcgctgattgtaaggtcttagacgagacaaggatacactaactatcaattcgtgtattgacgagaaactatcttgcctcgaaaaagcataattctgagggagctatggacaatgcatagcgagacatctaccttgctacatataagaaagtatcgactaggcgaattggctgttagaacacagtgtataattcacattataataattaagtataacagcttggaaacatggagaacatgattgtccagtctgtaaggccttatggtcaaagagcagttcttaagtttgctcagttcactggtgctcatgccattgttggaaggcatatgaataaaccaagtcattcatttatgtacaaaagcgagatgcctctagcgagatg

SEQ ID NO: 354869 - DNA, 502 bp, Cannabis indica
ttaaatttagggtttaaaaattggagaaatcggctttttgggaaaaatcccacaaaaatcgcaaattgtgggttagttgctagtaggctgctagcagcccttacgcgcgcggatgaagggaatttgcagggtgcgtgtgcgggaaaactcggcgctggcagggttcgtctgggcggacacggcttcagacaagggtgatgtccgagcccacacacgcgtaaccctggttgtccgaagcacctggtgcatgcgtccacctagattcgacagtcatagcttccaattttccaaaattcataacttcttcattttttatcgaaattaagttccgtaaaaacaaaaattgcttaatttttcacaaggaatccaaataaaatattttcaaaaataaaaaaatatttttcatggaaaaaggttctgtacaacacatacattcatcaaataacacataaaccacatgaagccatccaaatcaacagatatcatcgttttaattcatatt

SEQ ID NO: 354870 - DNA, 508 bp, Cannabis indica
ggcaagaaaatcttgaaagaaagattgacaataaagaaaaacactcaaaacagcaagaagatcaagattctgaattaaattcagattcagaaacacaaaactgagaatttctaaaaccctatctattttttttcaattttattaatatgagtaacataaaagttgatattgataaatttgatggtacaggggattacagaatctggagaaggaaaattaggtctctcctagctcaacagaaattactaagaatgctagatgaacctattgaatggccagaaggaacttcaaagattcaacaggaagaatacctagaaactgctactggaattctaatcttcaacctatcagatgcaattatcagattggtagataaagaagagactccatcaaagatctagaaaaagctagaagagcaattttagcagaaatctttgacaaacatgatttatctcaaggaaaggatttttgggttcaagatgaaccaatccaaatccttagatcaaaa

SEQ ID NO: 354871 - DNA, 600 bp, Cannabis indica
atctaggaatacatttaatcacaaaatcttgtttactttccactgtgttgacaacacaataaataagaatatcagtgtgataagggtttgtgtgaatttattaatgaaataagtaaataaatgatcatatgaaccaaataacacattaaacaagtaatgaaattcaatttgtttctttattgataatttaatagaaaagattacattaaaatagagttttatttaggaaacaaagcccaagagaacgttcattagcaatttaactccgtagaatctcaaaagacaagtattatttgtaagtgttttattctaagtaacgatcaccctaatggtggctgctaagagtaagacttacaaaagtatgaaacaatggtggaagtgttggaatttattttaccaagatcttagatctactcacaaatatgttgaattaacaatctaaatatgaacttataaaacgatggaaaattaaacacataaaagtaagagaaatcttacattgggtgtagcgaaatatatgtctcctcccactcagatctctaacccttgattcctttctgtcgcagagtataatcaagatctgagcccgatagtccttct

SEQ ID NO: 354872 - DNA, 835 bp, Cannabis indica
atctcagccagtgaagcccaagcaaaaacgaattcctaaacaaatggtttgaaaatccgttcgacccaacaaatgttggacctcatcgtcttcatcttccaagggatctcctccacctactgttgtttcacctcctggtgcaacagtgaaggaagttgctgctacaaccccaattggtccttccactcgcacgcgtgcccagcaagcttctatcgagaaggaacttcgcacaacacgaagccatgacaagccagttcatccagccaagaaacttaaggtaaatcccccttcagtttcttcaagctctgaagaaaaagaacccatggaggatcgctctgttgattccttggataaatccgtgtctctccattctgaaaaggagattcctaaagacatcggagtttccttggacagtgaggaaactgaactcgaacgagagcctcctttgaccaaatctgttccaacgacttctcgagcatcttcagcagccaaggcttttgctgctgccaaaggcaagtagcccataaatgaatcatctcctggtaatatccctacatctctctcctattgttctcgtttctactatcgtgataatgagcgtgattggaatttgtatgctacccgaaagtttgagagtgaaaggaattacgatttgcatgctcatagggtatatggtattgttaagttcattcaataccatcaatgggagaacactctcactggtttcgaagggtacattgaaaacattgtcaaagaattctatactaatttatctgatgattttcaagactttttcaaaaagtgtttgttcgaggacaatggttttccttctctg

SEQ ID NO: 354873 - DNA, 706 bp, Cannabis indica
tttatttaattagagatcactaatcaattaaaaatagaaaaaaaacaactatatatttatatataataactaataaacagggccgtctcaaatattttggaagccctgttctaattttaaaaagtaggctcctaacaataaaaaatataaattgtatatattatcacattacgatagtatattttacataattaacacctaaaaactcaaacaattttattaatattgctattaattccaatacaacttcaagccaatatcaacattctatttgaaaagggacatccttcgaacgctttttgaagcaaattcatcaaccaacttttcgtattctatcttctccaaaacttcattttcaattgctatcgatgctaatccattaagcatttcttgtaacatggtagaccgcaagtaggacttcaacaactttaactttgaaaaacttctttctgcagaagcaactgtcacaggaatagtcaacaaaattatatatgcaataattgtattaaaaaaacaatctacacctttcaaaaactttaatatgtcgatagctctcattttctcactaggaaagatttgccttaatagcttcaacttcacacataattcattcccatcaatatcagattgttcattatgtttcaatgcattttcaaaatgacaacaacaagacttaaaatttgcattgtctaacgattgtaatttg

SEQ ID NO: 354874 - DNA, 716 bp, Cannabis indica
aatttgtattttagtattaaatgtagtataaagcaaaaaaaagtaaaaataaaaatattaagttcaacaattaagacactaaatacaagtcttatcggaggaggttcaaaaattaaaatttaaatactaaagtaaacatatttttataggaattagaagtcttgactttcactatgtgcatgaaatagctttatcattatactaaaatttgtattatgttcataaatgtcacttttatttagaaatatatattgtaattagctaaaatatatatacattttttttcgatttttttttcagagagtgactgtcccatctcgcttctatatatgtagatcctattggaatatattttaccaggatctagatttactaccatgtatgttatttaacctcctacatatgaatttctaaaacagtgtaaataaacccatataaagtttaggaaaccttacagtgggtgcagcggaatattcatggctccttccactcagatctctaacccttgtatcctgtctgtagcagggtatcaccaagatctgaacccgaatgtccttctcttgattctggattcttcacagccttacacactatgattgagaaaccacttgatttatgtgggcactcactctatcactcaaggtatgaaaatatgaagagagaaagaaaagtgctggttcgaaaataatagaagaagaaagctcatgaaatttttt

SEQ ID NO: 354875 - DNA, 1278 bp, Cannabis indica
ggagggatccctggattcctcacaaaggttttatcccgaaaccaaagggcggggtcttacccaatgatttatgtgtggatgacctattgcttgagaatggagattgggatatcccaaagctgaatggtttatttgatcaagaaacagtgtccgcaatcgctaaagggggaaaaccctctggccaaggggaggatagatgggtttggacactggataaaagtggccagtttacaagcatatctgcttatctgtctcaagctctcgaaagagctcatcattgtgaggtagctccggcactttggaacaagttgtggaacagtagaatattagaaaggcataagatcctgtggtggtgcatcctatccaatgcactccctgttagatctgtgattggtaggcgattccacattgaggacacatgttgccctttatgtggcttaggggaggaatccatggaacaccttttcttgtcctgcgatgtggcgatgcacttatggcgatcttcaccttggggcatctatccaatttgcaatactgggattcgaatgtgggattgggtcaaatttatatgaaacttaaattctagggggatccgagtggaagaagttttcctgtatgcttcgattgttgtcgaaaccatctggaaagtgcgaaatgattttatacataacaactctcatccggatgttttgaaatgtattgaccagatttataattcttatgcagagcttcatgctgctttcttaccttgccctacaccatctttgagggggacttggaagccgccacctcaagattggataaaattgaattgtgatgtaagggtgggatcagaaagtatgtgcttagcggtggtagctagaaaccatctaggtacggtggttcggatacacacagatcatttggaattctcagatgcattgtgtggagaagcagcggcttgttgtgcagcggtttcgatggctttggaggaaggctataagtttgttttgattgagagtgactcgagagtagttatcaatgctcttaatgggacgaagtcttattgggcgattgacaattatatctcattttgtgctaagtcatctcctttttttatctgttgtaattttgtgtatgttagtagaacttgtaattttgcaacccataatgtggttaattgggcttttattcacaagttgtacgggattattccggtttcttcgattccggagaacttattatgtaatgaccgcgatgtctaactttgattattaatggtacgattacgcttatttt

SEQ ID NO: 354876 - DNA, 630 bp, Cannabis indica
ggggttcggctatagctggaaaaaaaccagaaattttcctttaattctcaaaataacctcttttctaaacaaaccaaataataaagccaaaggaccaaaatgcccttagggccaaaataaggcatactcatcaaacaagggtaaaaatgtcatttacaacataaatcttttcaaataaaaattcagattattcacataattaaaatgccaataattcaatccaaaactgtatttcgggcccaaacccggttgtgactataccgcaccattttgtcagaaaacacacctgaaaaggacaacacatgcatactatataataatatagttccataacacgtttttaaattaatttcatggttttaccattcccgggtcataattactaaaatgcctctagctcaccaacgaggtcctaacacgtcataaatcatataattctcatatattaaattatataataatgtaatttcaaaataatacacaattaactagttaggacttttctaatccattctcttaatcctagggtattacacaactccccctagaaaaagggtccagagttgagaacgaagaaattaaaaacaagctattactctccctttttgtttatctaagggccaaagacaa

SEQ ID NO: 354877 - DNA, 361 bp, Cannabis indica
aaactcccacttgcactaatataaaacaaaatgtgcatttcaaataatctcaacaccttgatatacaaatcaagtgtagtagtagtatactcctcgtaataggatctgacaggttgaattaaacacaaccttttctccaccattactcttccttaatcacaaaatccttgataatgtgaaattcctctctatatgtctactctcttgggatactggattctatacttttggcaactactttttggttaatcaggaaataacactagtagttaagacaagttggaacggtgccacaaatgtatagactactttccttagactgaataagtacctttcctgcatctttaacattcagtctctc

SEQ ID NO: 354878 - DNA, 1029 bp, Cannabis indica
atggatgctgaaacagatgccttagaaagaaaggacacatggattgttacaagtttaccacccaaccaacacgtcattgacaataaatgggtttacaaaattaaatacaatcccgatggctcagtcaatagacttaaagctcgcctagttgccaaagggtatacccaacaacaaggtattgatttctttgacacttatgctcctgtagctaagttcaatacactaaaacttctttttgctcttgctgccataaaacaatggcacctacatcacatcgacattgataacgccttccttcgtggcgatttaaatgaggatgtttatatgaaactacctcaaggttacactcccaaaggggtgataccacctaatgccgtttgcaaatttaaaaaaagcttatacggcttaaaacaagcatctcgacaatggtatgctaaacttagtaccactctcattacacaaggctttacacaatctaaaagtgaccattccttgttcattaaaaatacatctactactttcctagctttacttatatatgtagatgacataattgtagctacaaacaatatttcagccctcaatcattttattgctacattagactcaactttcaaattgaaagatcttggcagcctacgattcttcttaggactcgaagttgcaagatcgaacaaaggcatttcggtttcacaaagaccattcacattgcaacttcttcaagaaacgggtcaccttggctccaaaccggtttccacaccaatggaacccaatctcaaactaagcaatgaatcaggtgctcctttgtcagacccaaaacaataccgcagcctcataggcaagctcatctacctcacaataacttggcctgacatcagttttgctgtcaacaaactgagtcaatacattcaacaaccccgccaacctcatttccaagctgcaatacgaattgtatctcaaacaatctccaggtcaaggcctcttctaccatgctgcagcacctcaccctcttcaacttcacgcctttgc

SEQ ID NO: 354879 - DNA, 1414 bp, Cannabis indica
gcaaacgtgggtcatggtgtaacgactcctatggatgaaatcgcacctggtgtgcaagagactgggaataacagttcagcacccaaccagggcatccataacacagctgtttcgcctgctaccaacactcaaacgaccattggagatgatactgagatccaaaatctccgtgctggtcttggactcatgcagggtcataccaacaccctatatcatgatcaggaagaacttcgcgctgcgctaaatctcgcgttcgaggaacaaagacgcatgtttgccgagtggagagacaaagagatggaagcattaagggctcatcatacaaagattgaaaatcgtagtcggcaagctattgtggtgatacgaaaagcctaccaaactgtcaggcagcaacccccgagtgtcatccccctgggtgagacagacgaagatccagcgatgaatacttcccagactataaatggtcagccgcaaaatccccagtcacaagttttgcttgtgggcctagtggtaggcgggaagaccttgtctagtaattcatcaagagaagtcatagctgatagttccaaccaagctaacgatgccattccacctgtcaaccaagcaaatcaatcactcagacagccaggcgcttctgtattcgataggttcgggatgactcatgacctaaggagcgatctgaacagaagaagaggagtagatgatcagattgtcacgacgatcgtacagcccgaaacccgtgctcaaattccctctcaaaaagatactaacgtgattcaaatcgaccagaatgctgagcaggttagtctagctgtgcaggcacagctagatgaactaaaaaaatatgtttcaaggcttggccggacagagaaacaatgatctcaaattggaccgagcacgcggaacccccttctatcccgagatcaatctcctagcgttgccccacaagtttaaaatgccaacttggataatatacataggaagagaagatcctctttcccacctcaagtatttcgagatgcaattggatttgtaagggatacgaggagatatgtgttgcagaatctttcttgctaccctctcggaagctgcccagtaattgtatttcaagctggcccctggaaagttcaactcatggaaagccttctcttcggaattttatgcacaattctcctcctctcgccaacttccgttgcatctgggagacctggtcaaagtcaagcaaagaccaagcgagcctctccaagcatacatcagcagattcatgacggaggcgaccaaagtttcacgggtaactgaagatggaaagttgtccgcgatacatggggcattgaagtcctcggtgaacataaggacataaggaagaatggccccgtagactcaatgagtgatttctgaccgtgctgaaggcttc

SEQ ID NO: 354880 - DNA, 684 bp, Cannabis indica
agatcgtgtgatcaatgctgaatgcaaggatcgtgggattgaggctgagtacactgatagtgggatcgtgtgtatgtcatatccacgtaaattgatccctgagttgtagggattgagcggatgacttatgatgcgaaagctaaattcactaagtgttgattgccctgcacgtctcgttcaatatctcattctggatgttccagcgaggcatcctgctcggtctatcgttccgagcagatgctccaagtggactccacgtgtcaccattcccgtgatgccacgttagagtgcaaaatttaggataacatgcctaaactaataagggatttaccagaatgactctttagggggtctattatagaaatttcctatagtttttatgatcactttaggtattaaacttgaaaaatactcttttagtatatttatttgacaaaatattttgggtaagtcttcagtacacctctctaaagggatgtttcagtagactcactatctatttcagcacttaagaacattttttagtctaatttttttttccatgattgtgtatgtaatatttatttaggactgccagtaaattttaaaaaaaatacaaatagtttacaataccaaaaataaaattcacacatattttgttatttttccttattatgtgtggttagtaactgtttaaactattat

SEQ ID NO: 354881 - DNA, 1006 bp, Cannabis indica
atgtttgcagtttgactcaggttaacaatgtctatccctctatcttcaatgaatgccctatctttcaatttcaaaaaccgctcttgagcatccatattggtaaacctcactctatcaagattagagcgacccctaggtgggttggatgatgaagctcccccttcttcactcactcttgaccttttaggacccatgtcacccaaattttcctaactttcaagatttttttaaaaatttcggcagcacttccccttaaaaatccacttcccgggaattaattccctcacaatcaaacccaatcttactcacacaaataatattaaacaatgtatagagcaaaaatcccaaatatccaacaaactatccaaaattctccaacaattcacaacttcttcaataaaaattggatagggagtcctagaattaatacctcaatgagaatcctcctttaatcatcctccattgtagaaagcttgaagttcttgagaaagaagaagatgaataagggttttttgaaattttgggtgaggttttagggatttggggttgagtttgagtgggaatgagtgattgatgagaggattaatggttttagaaggatttgggatgaagatttaaggtgagatttgaagaaaaagggttttcgatgggatttgaagaagaaaaaatggtgtttggagaggtattttcgaaggtggtggttaggaatttgaatgggagtaatttgaaattgtgtaatgtgttcccctttttaaactcgtcatcccattctcgccgcggccacataaagcctcgccgcggccaaattccatgaaaaaacggacctttctgtaactcttaaatggccgcggcagcaaatcccctcgccgcggccagataagtgtgaaaaatcaccctctctgtaatgcttaaatggccgcggcggctctatatctagccgcggccactgggcgaatcccaaaaaaaaatttatatacagtacataatgaaaaagaatactaaaaat

SEQ ID NO: 354882 - DNA, 646 bp, Cannabis indica
aaattataattaatacaattactaaaaaaagatttttatctatttatacaggtaaaaaaatgtaatcatgatgtttaacaattaaaaatgtaaccattaaatagttacccatatacatataaatattttttgatagtgagagatggagattcaaagttggggactttatttttatgagaagaggtgtaattaataaactactaagctatcactacaataaactaaatatttttcaaaataaataatgataacattgtaattaaaatatatattaaagttactcattgatatttaataataaatgacaatattataaataaaaaagtacatttatggttatgctaaatttgacacaataacttattaattttagtatgtatcgaatttaacatattttttagagagcgacgaagtgctattagatattttttttagtgttcaatactaccacaaggttgtgaattattacccatattaatttaaaataagtttgtttctttaaattttgatatgtacatgttgctctaaaattcgcccaaaatacgtggaccagtcgagaggggacgcgtggatcagataacttggaaagatttgctaggtcttctttatgccaccaggaagcgctattagcatgggtcccggagga

SEQ ID NO: 354883 - DNA, 448 bp, Cannabis indica
attcgatcaaaataagaatctaatactggtcgcggtaggcaagtgtcaaggttattcttattttatgagcttccaccattgtttcatacttcgtaaatttatctctaagtagtacaccgtagggaacaatctaatacagacaaaaattttacaaaatacttatcataagagatcgttacggtgtttaaatgcttcaaacgaataaccatccataagggggatgaaatctaccatctcgaggttatattaaaaataattaaccatgctggacaaccaatggagatcgaatgtccttataactaaagctcattattttaaagagttgtattttcttttgatacttattttaatctatttattttaatatatatttatttaattaaaattactaatttagatgaattctaaatgtaaatttaaattaaattataaaattataccctaggaa

SEQ ID NO: 354884 - DNA, 445 bp, Cannabis indica
taattaataaatatattaaatggaaattttatttgataattaatttcaattattaaataaatagttttggcatttaagtggttgaattggaaaaatgatgtttttgagaaaataaggaaaaattagaaaaatggcaaaattgctaagtgggggcccacatatccatggccagccacttacccctattttaccatttaattttttcaatagtttaatgccaaataattctaacctaaacctaggtggttgcctataaatagatagtgatgcctcatatcaaaagatgaaaacacttgcctttagtgaaaagattaagtcatctattctataccatattcgaacaactctcatctcttcctctgttcatattttcaaaccctatagtgatagagtaagtgcccacacacatcaagctgtactcgatcatactgtgtaaggctgtgaa

SEQ ID NO: 354885 - DNA, 1063 bp, Cannabis indica
tctcatgtatgctctggtatgcattagaccagacacctgctgttgagtgggagttatgagtaggtataactttaatccaagaaaggaacattggaagataatcaaataaatcttaagattaaggaggacctatatgttagtctataagggtgatgtttttgaaaccctttaggttgcactgactcagatttgtagatttgcattaatgctagaaagtataaatctagaatggtgattactttgagggtggagcagtgacttttggagaagtgtaaaaactaatccggagtctcgaactctaccaacgagattgaattttaaagtgcctagaaggctactagataaattttcagcctatggaaagttctatacaacttttggcattattccagttacggatgaactactagtgttacttcatgataacacacatatagttgtaaaaccataaggaatccaataccctaagaggagtaaacatatagaaaaatattcacaatatcaaggattttgtgattaagaagatgtaatggtggaaaatattgaaactgaatacaacttgtcaaatcttattacaatgatagtactacatactacacttgatctagacatcaagatgatgagattaattgtaatacacttagttttatattagtacaagtagaaatttgttgatattttatgccctaaataaaacccattgaaatataataagatttactaattagtaaaagatcataaatcagtttatgttgcatggttcacatgattattatcatgattaaatgcttaatatatgaattcaattaaatctcgaacatatagttattcatgattatattattgtctacacactgtaaaataatcatgattatatgcttcaaactacttagtctcacaatttatcagtgcattagatttacactaacgtgataatcaacaatgtggtttacttacacttgtataagtggaatgtcctttccaggtcattagcaacgtaaactattatcggatgtatcaactatacatcggactggactgatattgccattggaaaagatat

SEQ ID NO: 354886 - DNA, 653 bp, Cannabis indica
ctctataagccaagctcgaaaaaaattatcattttacttttatttccagatagaagctatagattatatatctatgattacgctcccactcaattgtattatcatgttctcaagttgtacgtgttacccaaaccatggtaggatttaactaacaactctaagaacataaataacactcttgagatcgaacctaaccaatattaagattaagatcttttgatctaagatcaactagtgatattgacttagaacgatacaacggtaagattataatatctttaccaagatcaatatcggtctcagtccaatgtatactccatacatctgatactaacatactttgtcaatgtcctagaaagaaaataacatttattttaggtgtaagtaagctttatcgctgactatcacatcagtgtaaatctagtgcacagatgaatcatgggacattatcttttgaagtatataatcacaattaccttccacagtgttgacatcactgtaattgtgaataactatatgttctagatttaacagaaattgtatactaaaccataaacatgaaaactacatgtaaacataaatgatttctaatcttcaattgataacaaataagattatattgaaatgagttttatttagggcatgaaatccta

SEQ ID NO: 354887 - DNA, 518 bp, Cannabis indica
aggttgtacatgtcatggcggcgaaacctggactgttcggtctcgggatatttggggtgattattttgtagtcgttgtgcgacctggttatgtattttgtgtattttgtataaaagtttaaaatcaggatcccggtagaaacttgtttactagtacctgtaaaactggttaacggttttggcaggttccctgtttcctgagatagtgtagttcctagtggttataaccgagcctagagttgtagactcgggtttcctggattagggtttcggacatttgatttaccaagttttaatatgtgattagagcatccatccagcacgagactttccgttcaggtcggccaactcacttgaatttggaaaggaggtaagaactggttataatgtgtgatatgaatatgcgaatgtatgtatgtgttaatatatatgcatgcttgttgtgattcatacactaccaacacttgtacggtagtggtacagagtgcattggtaaagtgtatgatgtctgaagagtac

SEQ ID NO: 354888 - DNA, 532 bp, Cannabis indica
aggagtttcttaccgtctccaaccgcaagtccttcgggtcctggataggctattgctgagtcaagattgccaatgtcattcgtgacatgatttgtagcccccgtgtcgacaaaccagcctgagtcatccccaaagtcaggaacaaaggaagctgcaaaggcttgaggatcgtactcgaattcatgttcagtgatgaatgctcgaggaggttgagtctgagaagtggaagatgatccaggtttaggggtgacccagttcttatcgaaccggtagtgacatactggtgctgtatggccataacgaagacacagctgacacagaggtcgatttgggggattatggcttctgtagtttggtttggcaccagttttggagaactgtggtgggcgataggtattagttcttgaaccagtaaatgctatattggcttgaagtttcatggactgatctgtaagggagctgtgatgatccaggcgactctcatgagagagtaataaggcctgtacttcttcgaatgtgagtgagtcactac

SEQ ID NO: 354889 - DNA, 841 bp, Cannabis indica
gaatctgagagattgaattggagaaagttccctcagataagaaccctgctgatgcaggaactaaggtgctgccagtgagcaagttcaagtatttcatggacttgctcaaacttggacctgtgtagttttttaggttcactctcccaagcattttgttccactagttttctatgaattaaggtggagattgtggttgtaattcatataaaactagttttggttttaaactttctattcttggaagttagttaagaaagttagttaaagtagttatgttagttggctttgcccaaggggttagtggctcagttttgtgagctattttctaacctatttaaacaccaattattatgtaatttgtaagaaagagagagttcagtagagtgagagaaaaatcagagaagagagttgagagagagagccaaagttggagactcttggaggtgtagaaccatggcattcatgtaaactgctccatcatggaggtttgagaggcaatatgtctctgtgtgtatctctgattgatgaactctttattggtgtttgtaaactacattgcatagtggagaaactccttgtggcagagctggaataggactcacattgagatccgaaccaggataatttctttggctcactcttttatttttctctgttattctgccttgtttttactgaattcttgttcatttcttttctggtttatcatctagtttttatacattgcaatgtgtatgtttgtgtgttgagtttgtgttgtagggatttgttaactcaaacttttagatctccttgttttgatgattaacaaatatttgattattatttgttactaatgatt

SEQ ID NO: 354890 - DNA, 691 bp, Cannabis indica
tagtctgagtcccagatctagacaccgactactggtctgttccaggccccgttacccgaatcccaagtcaagatttggatcactgtcactggtctcggtctggttctaattcaggtcaaaggtcccattttggagtttgggttcgggatcaagactagggtgaggttctaggtcccgaccccagttttgtgtccttagtctggttccaagtttgggcctgagttcaggttcgggttcgggtcccgagtcaaggattgggtcgggatccgggtccggctcccaattcgggtttaggtctgatttggagtccgggtcctggaccagttatggttctggattaaggtccaatttcaattatgattccaagtccaaatcgtagttccaatccatgtcaactttcgattttggttccagtttttggtcacagggtacgggttcgggtcgacttttgggtttgggacagggttttggtccgggtgtggggtcgggtccttgtcagcgttcgggtccagggctgggtcccaaatccaaacaccgactacgggttttgtccaagccctgggtccagatccggatcctaatcttgggtcccagtctcgttccatttcttgtgtcgggtcacgggctgggtcctaggttcaagttaaggtccgggtcgggtactaggtcctggtcctagttctatttccca

SEQ ID NO: 354891 - DNA, 939 bp, Cannabis indica
atgtcacaacatgccttcttcctccccttcactctccattagcaatttgaatccttacaagttgcataaaatacatcagtgccagactacctcaccatgaactcagaattcattttcaatgtaaaccttcctactacatttttcaatttagtctaatttgtgtacagcttgccaacgtgtatttttcatgaaggtgtatcactaagagaagctgtataaatattattttcatctatgtcttcccttgtccacacaataggtttgaattttgtacaaacttcaaaattcgatggtacaatattacgagaaggacctgaccgactgctactagtgtctgccatttggtgattttcattacgaagggttcttctttcttgctctgtcctatggttccttggaggcagtggaggtagttctaacctcaaagcaggtacctctacaacttcatcaacttgcaactccacatcattattctcgttcaaatttaccacaagatcattgttgtaaaagggagcatcaaactcattaaaatggtgaaatgcattgtcaaccttgtcctcatctatattagtaggggcatgctcattcaaacatacgctggatctgtttatgggaaaaattcccaacaacacttattgggggaacagttggcagagtaggccccaaaatcgcatgtctcttaaccttagtcacaaacagtgacaacaagttctccgcacttatttttgctttcattcttaagagcaatcttacttgactatctttcactaaaacctctgacgatatatattgcctttcacgtacatgtaacacacctctactttcagttcatatacaaagagggtttatatccatctcttcatacaaaatttcatgcatcttctgtaaagtagtgtcaacctcaaacattaacatcttactttttgggttattgaatat

SEQ ID NO: 354892 - DNA, 517 bp, Cannabis indica
aggtattgaaaggttacgtgcgtaatcacaatcggcctgaagcttgtatggttgagtgttatatatcagaagaggcagtggaattttgcacggagtacatagcaggagttgatgcaatcggacttagcaagccacgaaatcattcaaacggggttgatagaggattacgagggaaaggatcaatggtgacttgagcttgagaataaccctgaagtcaaaccctatataacataagtcatatatttattcaactttatactttgtattcttcctcttcaaatgaaatttaatagaacttttactatatcgtttcagtgatcacttggaattattgcaatcaatgattccaattaaggtcaagaagaaatagagatgagtactagaggataatcgtaaaacatttatttgatggttaaagaataccattctagctattaataatagtgtgccgaaagagttagaatacatatcgtttggacaagatactcaagtaataaagcatcatgcttacattgtg

SEQ ID NO: 354893 - DNA, 536 bp, Cannabis indica
aaaatcccatatttataaaacaataataaggtttgccaaaaaagtcaccgaaaaagttattgtcgtcgaaaaagtcgccagaagttatcgtcgccggaaaaatcgccagaaaagtcaccatcaataaatatctcaaatataactacaaatagaaccggttctatgaataaaaactaataactcaaacctataattgaaatataactaattatgtgacataataaataaaaataaataacataaaataactcaaactagttacaattaaaataaaatcagttctataacagtgttataatggataaaaaaaaataacacgaaataactcaaaaacggttataactagaatagaatcggttatataacataatgaatacaaacaagtaacacgcaataattcaaaccaattacaattaaaaataaagatgaaatcagttcctaaaacactgaaacataaattaaaaacaaaactagctccacaataaaatacctcataaaacctatcataatttttttaaaaaaaaatggagatcaat

SEQ ID NO: 354894 - DNA, 790 bp, Cannabis indica
aattatcaagccttagagttttctagcaaagtgctttcttgatagaaaattactcatctcttactctcaaatgaggccaaagacctccttttataatgtataggtgaccacactaaaaattcaaatatgcaacacttcatttctctcatataaatgagtattaatatagtttgtaacaactatatttcataacatttgaattttatcatcaattgtgtaacatctcttttattacacaaaatatgatcaactaaaagaagttagaaaaataattaatcttgtaactcctctccatattacaaagtgtaggttacaattttaggttaaataaattatatgttacacaatttatttaccaaacttaatacatattattcacataataatatatattaccacatgttaatctacacttattatattattaaattatataacaatcctccactagattaaaatttatgacacacttgtaacacacttgtaacatttatttaatcaatcaaaatattatatcaaaatataacaatttataaatgagtttttggcggttaaaccttcttaattatcgtttcacttgcacttaacttttcaagctcaaattttagcggtaaaaccttccaaactactaaactattagcaaacttaaggtatcatccagttaactgctatcgtgggctgcttatgtgtacactcttgtacacatagtacatttatattggtacatctaatattattatttcaaaatttattttaaaagggaaatttgacatttaatgctaaaaggtta

SEQ ID NO: 354895 - DNA, 537 bp, Cannabis indica
tactcatgaaatcccattttactaccttttctcttgtttctttttcctcatttataaccaaatcagatatggtaataaagggcagagcatgagttgattagtaatataatagttgagaagattttgatacaaaaacctttacctgctttgatattcttgcttcttgtataatcgaaaacatagctatcagaagagtttacactaaagcatatttttataaagcatatttgtaagttggtcttggtcatctaaaggattcgatcagtgcagttttttcaagaagtgctgcagccttgaagcattcagcggcttctagtggcgatgcccaagattgtaccaggcagaaggatttgctctgtcaattcgaagggcatccatgagaaagcttttaacaacgggcaatggatggccaccgagcagtctgacgatacaggcagtaacatccaatgctttcctgaatgaattcagtgcgtttcgatggagaccattagcttcatatatatagtaagcctggaaaaaatcataataaagagattt

SEQ ID NO: 354896 - DNA, 569 bp, Cannabis indica
tatttttattgagcatatttttccatttgtttccactagaggtatccccctgcctatgagaatttttttgctcattcaccatacactgcaccagaaatggcagattattcgactgttcttgcaccaggtgttgcaccagatattgcagaaccttcgaattcttctgcaccaggtattgtattaggtgaaatctctcctctcaactcttctaatcaattttctgaccagtgtttgtctcaatctgctcctgttcctgcatcaggtgagttgtctcaaactgattttgttgagccgactgttcctactgatctgaatgttacaccagatttgccatctaatattttttctcatactagatcaggaagagcagtcaacaaaccatcatatttgaattagtatcattgctatcttgcttctaccaatttatctaagtttgctaaagtctcttttgttaccactcatcctttgtctcaggtcattggctacaacaagatgtctttagcactttgagttgctgttctggccatttcgagtcattttgaacctgagttctttcaccaagctcatgg

SEQ ID NO: 354897 - DNA, 634 bp, Cannabis indica
tgtcagaacacacctgaaaagacaacacatgcatactatataataatatagttctattaagcacgtaattaaattactttcatcaatttacccttctcaggtcataattactaaaatgcccctggctcaccaacagggtcttaacatattataaatcaattaaattcacatatattgaaccatataataatataattcatcacttattcataattatctaattaggattttgctaatccatttcataactctagggtattacatcttggtacttttggttggtcttaattggactttttcttgtggaatcccaattaaataagttttttcagattcgttgtctctggtcacagctattagcaaaagaagggtattctttaatgagttgtgtgtgctacttgaggatgccataactttattgtctaaacttctaggggcagttttgtcccatgtggctcgggatgcgaattttgcagcacatggtttggcaaagcatgcccttcggttagacgatgagctatcctggttcgaggaggtgtccccgctaattgtggattgttgctttgttaatcatgtgtgattttaatcaccgcgtaaaaaaaaataagaatggtaatgtaaattgattgttgtt

SEQ ID NO: 354898 - DNA, 829 bp, Cannabis indica
gcatgatccccccaccgagtggaaggtatcctaaacctatggagacgttcatcgaaccctataggcctaaggctagcatactcacggacggaagggacataatgtatcattaaaggggacttaccagaacccgaagtgctggcgtcgggagcccccgtattcggcactgggacgacaggctttggtctgggggtccttcgctccaccgggctcccaatacgaaggggccttccggcggccacctgggccttatcataagcccgctcctgttcctttcggaagaggtatttctagtacttatcttctgtcgtggcgatgatatcgtcccagaataccttctctgcggccggagccctcacattcgggtatgcgaccttggaaaggttggactcatccacccactcatgccccaaaatcagcttggccttccgacagtgctccgtcgtgaccagctccccgacatcaaggtcctccttgtcatacgtggcgaagatctgggctcgtcggaggaaaagttgagtcggcttggtccgcatataaggaaggatcttaacccactccgtgagaagctccggatgctccatagcctagaacccggaggagaagaagaagcggtgacggtattccttcacatgcttctgatgatcaaaagggaccgggccctcattcaaaggatgggcctggagaccgtaaaaatcgtccttaaacttatccccctttttgggaatggaaacgagttcgtaaaaatacagaatctctaccagactaggagagccccagctccgggcagagtaaaaaaataaataagcctgaaagcaggcggtaagct

SEQ ID NO: 354899 - DNA, 726 bp, Cannabis indica
ttcatacttagctccatatgctgactttttcctttatgcaggtcagtttgaagttggctttacacctactcccctggctaaacctactacttcccaagagtgcgactctgtccgacaccttgagagcggaggcggactcggccaagaaggaagatgaagaggccagggcggagactgctgcagttcgtcatgagttaggtgaggccaacaagaagctgtttgccgtcgagaagaagatcaccatgctaacaaaggacctcgaggctgctgatcgctttgaggaaaccatcgagaccttatctgctgaagttgatcgtcttcaggatgagaggagttctctgcggcaggtccttcttcggctaaaggaagataaggacgctcaggtggccgaggcggaccgtttgaaggagaaggtcaatgctttggagactgccggcctcgagctcttctttgatttttggaaggctaatccccaggccaacttcgactacttgggcgacgccaaggacatgtacctcgagtactgcgcggcccaagttgcctatggtgggaaagaggtggctgcttcaacttccggccaagcttctgaccaggctgctgatgcttctcctgctcaaacaatagatcctcctgctccaattggctcagaagaaccgaactaagatcctgggactccagctgtttgaacactgatcttttcatctctcatgtttatatatatatatt

SEQ ID NO: 354900 - DNA, 373 bp, Cannabis indica
agaataggttaacggcgttactttgaaaacgttaaaataaataaatagcacctttaaaccaagcattctgttacgtacccacactaatagatataaaagcattttaataaactgttatttttgaatagaattttttttttttaaaaaaaaaataaaagtcatccactaatttctcataaattaagaattcggttatataggcacattttatatagagtagatattttttctcttatatatataattttccattattatgtaattttattatttaatattgattagaatttattattttatttatttctcataattttaataataaaatcattgtatattactgtatagggtgattctacaatgcacccttaaa

SEQ ID NO: 354901 - DNA, 615 bp, Cannabis indica
ggtaaattttgagcttttgttgaatagcaagtcgcttttcatctaatgcttcacgctcggctagtcgggcttgcacattttcatctgggtttgttagttgagtaacaattattaatgaaggtatttgtacctccaaaggtaacactgcctcagacccaaacaccaagttataaggtgtgcaaccagtttcagtcctcacagtggttctataagcccataaagcttctaggaggtgttcatgccaatcccttttattctttgttgttgtctccttcatgattttgcataacactttgttaaatgcttctgcttgaccatttgaagacgggttgtaactagcagagaaactatgcttgaatttgtatttgttcatcaacttgaccattgccttacatttgaaataaaagggcattgtcagagataatttttgaaggaaccctgtatcggtaaattacatgggtccttataaaatcagcgacatcttctgcccgtacttcttttagtggtacagcttcagcccatttagagaagtaatctgtgatggccaaaatatatttatgggctttggaagagggtggcgtaaaaggccaatgacgtccattccccatgtttcga

SEQ ID NO: 354902 - DNA, 738 bp, Cannabis indica
tataaatgatcttactttcaagtagatataggcatattgactctttgcagagaatgatcttctcaaaaccactatgaacaagatgaaaatgccatagatatataattaatggttatggtcttttgatgacttagatttagttacaataaagagttctcagaatagtccaagtggatcctgctcacagaatactaaactcatattccatacataaacaaattttgaatttattgacagaaaatggatattaataacttgtgaaagttgaactgtattgtattctggaaactgaaataaaagtttctatttggaatctaaaatttaaagtcaaggacttaaatttataccaaatatatcttgagttattattctctcttggaccaccactactaatctaactctgagtttaattcgcctaaagtaagcatatataagtaggaattctaaggttgaggatttatatcacttcaggctagaatgtcgggaatattgtcatttgcgccattcaatttcttaagagaaaatagaatgacatcataagaaaatgatttataaaccattcatccagtgatatactatgtaagcaaatttgaaatgaataagctaagaggaaaaattaggataatttcgattaaaataagaatccaacaatgtcccggtaggcgagagtcaaagttattcttattttcacaaaatttacaactacaattaattaataacagaaaacaacatggttca

SEQ ID NO: 354903 - DNA, 1348 bp, Cannabis indica
agcttaccgcctgctttcaggcttatttattttttactctgcccggagctggggctctcccaatccggcagagattttatatttttacaaactcgtttccatccctaaaaaggagataaactcaaggacgacttttacggtctccgggcccatcctttgaatgagggcccggtcccttttaattatcagaagcatgtgaaggaataccgtcaccgcttcttcttctcctccgggttccaggccgtggatcatccggagcttctcacggagtgggttaggatccccccttatatgcggaccgaacccactcaacttttccttcaacgggccaagaccttcgccacgtatgacaagaaggcccttgatgtcggggagttggtcacgacggagcactgtcggaaggccaaactgatcctggggcatcagtcggtggatgactccaacctttccaaagtcgtctgcccgaatgtgagggctccggccgcagagaaggtattccgggatgatatcattgccacggcggaggataagtaccagaagtacctcttcaagagggaacaagagcgggcttatactaaggcccaggcggccgccggaaggccccttcgtattgggggtccggtggagcgaaggacccccagaccaaagcccgtggtcccagtaccgaatacgggggctcctgatgccagcacttcgggttctggtaagtcccctttaatgatacactatgtcccttccgtccgtgagtatgctagccttaggcctatagggttcgatgaacgtctccataggttttggatgccttccactcggtgggggaatcatgccaaggagtattatttctcccacttaggcgattatttaggtcggtcccggatgggttctggaccttcggtgcccattcccttggacccttcagcctatttatcttctagctggttccgtccctcggatagctatctcgaggatgatgcagccaatgttatgattcgggactttgctagggccgaattagagagtcagggtaggactagcttgattgcttttttgctaagtgtatgctgttttgaatgttctaacgattggcctattttcttgttgcagcagccggacccatggacgaaatcttggccactcttgccggagcccatagtcctgatgcttcccctcctcctacttcttcttagttggttactcctgggggggcttcctccagtgctccttcgggctctattgtcttggtggatgaggaggaggtgcttcttgaggaagctgaagaaggtgaagaagagcaagaggttgctctcgtgcgcaagcgcaagggcaagatggtggaggaggaggagcc

SEQ ID NO: 354904 - DNA, 1596 bp, Cannabis indica
gtacagaagttgaagcaagtcctcgtcatttcggtgttcacttccccaaaactcaccagggttcatctacaaaagacaacacacgagatgagtgtttggtcgggatatcgaacagtaaacaggcaaatatgccgaccaagagtactcaatagattaaaaggatgaaaaatgtacaaaattcaagccaaaacccagaagttggaaatttttgggtttagggctaaaaaattcacgaagcttagaatgagcaaggtgaaagacgaacaatgcgtgattaaagggaaaggtcataaaccgtgaagcagtacggactattatagagtaaatcacaaagttttgagcctagattttctatctatcttctacaacaagtcaacaacgcatctattttcgacaaaaacaaaaattaaacatgcaaagttaaaagagaaggagattgaaaacttacttattatttgatgcctaaatttagtccaaatgaggctgctcaaatgcctttggtgggaatctcatgacacacttgaagtaaaatccttttttgctctcagtttgtttagtagagaaatcagtaaaagtaaaattatgaagataatccagccttatttataggcaatctagtgaaaagaggtaaccatttcaaaatacctcagacgctttgattccctcccaaaagcaaatattgggagatcaaaattaatcaagtgtaattgtcaaagcgtgatgagaaaaactgggtttcgatgcactaattaagtcagctcattaattagccaaaattcgaagagacgcctggtcagcctcacatcaagtcacgaacagacgcgccttacacatgtcacccattcaaaagcgtaggcatctcggatgaagtctacatgcaacttcggaagtcccgtacagacttgggggcaaaggttatcccaattttagtactttgacgtggcatcacaatctggtgacacgtggaagcaactttgcatacctgttcgaaagagatatgccaaacagaacaccgcatatatctgtacatacgaagccttcctgactgggtagtggacggtccgaacagcgtgccaacacttagcaacttcaatacttgcatcatgaatcacaaaagcaatccctataattctgggatcatatcacagagatatggcaagctgtccaaatcccttaattagtgtactctatatttaatatgtaatcttaccaattatagacattgttaacagaaggaaaactttttcctcaaagcttatagccctatgaatagtgatccattctcactaggcaaggggtcgaaaaacgtatctaagagtatatactcaaagatatcattttaagagctctaagagaggaatcactacattgtttgttcttacgtcagtacatatcaaggggagtaggctattaccgaaatgcttggggccgaacctttataaaaactctgtgtctttatttatttcactatattacatctatattatactacttttcgttggccaaaactgaggtcaacaaaggaaaattggccttcacaattggggttgttcgtgtgggggagggttgggttcgagtatgtcgtacccactacta

SEQ ID NO: 354905 - DNA, 535 bp, Cannabis indica
tccataatccttctcattcctagccaatgtaggactttggttacacacccagcagatagtttacaacaaaatctttgtgtcgttgattcctagcagtaatgcatctttctttatgcctcctatttggtactaaacgagtaggtttgactatattgtgttgtcaaaaattgtggtaattgttgatttcaagctaaactggcagatcatattagctcattaataacaactttttttcgatgaaaatgctaaaaattttatgcattgtacatagggatgtgtataaatcatccattccaatgataaccgactgccaaaattggatatccaattgtgaacggatcaaattggatgttatttttgaatatccatttggatcggatcggatcggatgttgaatgggtatccaaaaaatccaatacatgcaacatccaatcgaactaattagtattttcatttagtttggatgagtaattatattttatattgttatacgtaaaaaatatatataaaaattaacattaagattttactcttt

SEQ ID NO: 354906 - DNA, 996 bp, Cannabis indica
ctcccagagatgctttgttgtagccctgctctctgggagcatgtgagacttacatgccttctccgggaggcatgtctaagtgtaatcctgggcttaatgagacttaactgatttattcacacgctaaaccctttccatctacgtgtcatcctccggttagtccacgtattttgggcaaaatcaggggcaaaatttaccccccaagccttgtttagttatggagtgaacaaggcttgcttagatgcctccggttgccttatcagcttcctggcacgtgctttgggcacgtggtggtgtattaatgaccatcattactgcggttattcgctttttccaggcatcgattcgtttcttgtccatttattgatacggcgcattaaatgggtgtcagacgggtactcaaacgttttcaccgccttgatgacgatttaatccagccgttggatctatagaattcaaatcgattgccttcccaaccgtacgattggtggctgatcacagctgtctcacacatgttctggcctataaaagctggtcttcttacttcatttggctactttcagcatttcaccaaattttctcaaagttttccagagagagaagaaacctcaaccaccatagatttcctgctcttattccttcgtcattgccagcctaccttttaccggcgatcaacaccaatacccagtttccacactttatgtaagttcttcatgtcaagtatgcttgcttactgtttgtttatatagcacattttatgatttctgggttggatgtttgaacttctgggaatgtttttgtttgagtttctgtatgatgtgttagattcctcctcttttgcgtttagattacttcttttcgctatgcttttgtcgaggaaccatcttcgtcccacgtaatgacactttagggtttagagcagacctcgtcttttcatttttaccctttttccttttctctcttacttttttgcaatgtcactatctgtgggattct

SEQ ID NO: 354907 - DNA, 928 bp, Cannabis indica
tctaaccctgtatcctttctgtagaagagtatcacaaagatctgagcctgattctccttcagttgattggattcttcacagtcttacacactatgattgagtaccaactttctatgcgtgggcatgtaatctatcactatagggttcgaatatagaagagaaagcgagagaaggattcgaaaatagagagagaagagagaaggctcaaattttgactaaaaggcttaagtgcatcaactgctatctactttcaatttgagtccatcactatctatttataggaatccttctaggtttaggtttggattatttggcattaaaaaacttataaataaatggtaaaattaagcaatagtggtcggccataggatgtgggcccaccacttgcaattttgcccttttcacctatttatcacattctttcacaaataccacattttccaattcaaccgcttaaatgcaaaaactatttacttaataattaaaattaattatcaaataaaattatcatttaatatatttattaattagacttaataaagtctcttaattaacaaataaaccctagaatctcttttcttcacaattaagccctagcttagtgaaaattcataaataagacagagtctaattttagaattatgtcttatttataaattataattgataaattaaaatcaattaattgagtcttacaagcagtattatctcaactagtatgggcaccatgggcctatataaccgagcttccaataagtatatctagatttaccagtaaatcctaactatatctcctttgcacactatagatttagaatttcactctcaattatatagaatgctctatatgttccacgatataaataacgctatatccattgttataatcctaatgtgtatcaatgatcctctaagtagatgatctaca

SEQ ID NO: 354908 - DNA, 628 bp, Cannabis indica
taaaataatttccaacagttaaaggctgatggaatgtccaatacgaaaaattgggccattatagttatgcttgttggagcttgtccaatagtgaggggtaggcgaatttgccctagaggtgcgactccttggccgaagaaaccatacatgggctaaagacaggggttaaatctttgagttggagccccatcttttcatatgtagtcttgaataagatgattgaagaggctcgattatctatcatggctctagctaccatcttgttggctatctagacttccacgaccaacgggtcgtggtgcggaaatctgatctttacagtatcttcatcattaaatgttatggtggattcccccgctcgtgggatcttcggcttcctcccttctacggtcaggactacttcttcttgctcgtgctgtactgttcgggcatacctctcccgggcttcgcctgaatctctagctatgtgcgaacctccaatcatgacttgcagatgtccatctactggttgtggtagcacgtcttggttgttatcgcccctctgattctgatcgaccttgacatactttagtacgtgccgattatttttccttatcaggaatttgatttcctgcttcagattgttgca

SEQ ID NO: 354909 - DNA, 775 bp, Cannabis indica
tcaactaataaatgcttaacattttttaatgtgttgcgaggcaacaaaaagttagaatggacgaaggagtgcaaggaagcctttaagagcataaagaaacatttatcaacacctccagttttttccaaactaataactagagagactttatacatctacttggccgtcttagaatctgcaatctgtgtggcactggtgcgagaagaaggaaagcaccagcaacctatttactatgttagtaaaaggttattagggatagaatcaagatatacccctcttgaaaaacttgcaattcatgtatctcgtaaactaaggccttacttccaagcacatccaataaaggttttgaccaatcaaccattaagacaagtcttttcaaaaccagacgcttctagaaggttgataaaatggtgtatcaaactgggtcaattcgatataacctatcacccaagaacatccattaagagccacactttggccgatttcctaatagaaggaatagttctagatgaaaatccacttgtcaagcgagacgcaaaaacttggaaattataagtggatggaacatctaatgaaaatgacttgggtgcaggggtgatactgatctcgccagaactttaaatttcatcatgcattaagattccaatttgatacctctaacaacaaggctgaatacgaagctttggttcaagaatggccaaaacattaaaagtcaaaaatcttatatgctatggtgactcacaattgattgtgaatcaagttctaggcgaatatc

SEQ ID NO: 354910 - DNA, 1933 bp, Cannabis indica
tgttcttttttaataaaaagagctttttaatgattacaaagagtattttcgtcatgatcctctttttgaaaaaagacacatgtcctctgattttggcaattatgcggtttcgaggtacttcagttttaaatgaccatcttttctacttctggtttgaattatgtccgtaggatcaaacctttctctgatttgacgaagccaatatcatgagtataaagttagaaaaaaggaaccacctttgcattatttcctccattttagaaagtctgaaaaactcttaaacttcttcatcaagaatcaccatcgactttgtttgaggacttgcatgccatctctttccttgaccttttttctacgagtttcctcccacttcatcctcttgaagcggtacttgcttcgttcaaagatttgcaaacggagtaaccagtcactgccccaaaccctaatgtcaaacaataagttggtttcttctttctcatgcttgtcacattgtgtggatttgttacttagtttatttgtattgttatcatctcatttgtttttggtagtttttagggttagactttatctaggttcatactagggttcaagcaatgtgtaggttgttttaagctctccaactcattaccttcgggttggatgaaattctctctagggattgggattgcttttttcctatagcaatgtcctactctggttcaggaatttattgtccagaagttttagaatttgagtttcctacagaatcagccatcccgtataaacccaacccttcaaaatccccctccaaattagagttaaatgatgttagtgttagggaacacgtagtgagaacccaccacgaagatattgctagtcgctacaagcgtttcttgcaagaaatctccaaaggcaaacgccaattcttgcgagaatcagcctggcctattcttacgattgcttttgaaccaagtcacttggattttgaaattatgcctcccaagccatgtacatcaaagactccccagaaccccaatgtcacctttgaggctgagttgatagaatcgaaggtgcgatatatctcaggctacacgggcgagatgttgaagacttgggagatcaaacttgggcaatcatgccaagttagatcagtatgggagagtgagttcagttgttacccccttgtgcatttttcaagcagtaacccagggaccagtggtgagactagtaccagtggttcgattggtataggtgcctggagccttgagcatatcaatgcaagggccatgcttgttcttcgggactacttcaaggtctacataaatcacattggagtttccccattccagctgactcccatctcctaccggattcttactagtttgaaagtcctataaaaaaattctgaactaggggtgtcccatactagtggagattgagtatatttactcagttaaggtcgttctgtcaaggaagaacaccacagggggcttctactaccttggtactcattccagcaagcctaaaattattgtggacttgccaaataaagtatccttcaagaacaacttcttctggacatcttgtctttcccccatcggcacaatcacttttcgcaaacttcgtaagtgattgtttcttcttggtcatttatatcaatcattgtgtttcaagtttctgatcaatgttttgtttgttcttaaagctctcttgacgaggcctactcctacccccaagatggtcagtcggcacaagcgcttgataactcttccctacggtcttcgatcatgcgactattgggttttatgccctagataaaactctatttcaatgtaatctagattattcaatatcaataaagtaacagaagtattttttattcatttgtgtatgtttggttcacttaatcaattgtttgtctgtttgatttataaattcatccaaacccctttca

SEQ ID NO: 354911 - DNA, 872 bp, Cannabis indica
ctagtatgagaaatgttgcctctattgtctaggttacatcaattcactttataatggtagttaactgtaagtgattgggaaattttaatgttgttgttatcccaatttttgcactctgacgtggcagcacatgatggtgacacgtggaatccaatctgagtacctgctcgcaaatcataggccgaacagggcacctcaaacacttgctcagatgaatccgtgagcaatctgcgcagaatgacaacacttgcgaattcagcttttgcatcgtgtcatcagagaaatccccctaattttgggatcagattacagagatatggcaagctctccaaatcccacaatcggtgtattctgtatttattatgcaatgtttctactcatatcgattgtaatcagaagggaaatacttcccaccaatgctcatagccctataaatagtgactcatgttcactaggcaaagggtcaaagattttgtctaagaattcatatttagagaaattgttgtaagagctctaagaaaaggaactattctttttgttcataagtcaatacaaataatggggattaggctattactgaactactctgggctgaacctctataaaattctggtgtctttatttgttttattatatttcaatcgtattaaactatttattgcttacaaaattagaatcactgtcattggctaaaagtgaggtcaatattttggtgctttcattgagagctgaactcaaggatcgctctttatttcattgagagcagaacccagatctaattaggcctaaataaaattacttatgtcaaattttgttttagcaacctagcccatttacttagtaaaaacttaaattggcttcctatatgcatc

SEQ ID NO: 354912 - DNA, 746 bp, Cannabis indica
tttaagtttttcttttaatatttgaaattgggccgggccgggccgggctcgacccgaaaaatatgtaccgggtcgggccgggccagaagcccgataagagccctattaatttgggccacagttggcccatcgggtctggggcccggcccggcccgcgaaaatggcccagattgacattcctaaatatgattgctgaaataagagctcttccattcttctatgtccagatagaagttatagattccatatatatgattagcactctcactcaattgtactatcatgtttccaagatatacgtgtgacccgaaccaaatggcagctaggctttaactaacaactctaagaacacaaataacactcttgagatcgaacctaaccatgtcaggattaagatcttttgatctaagatcaaccagtgatattgacttagaaagatacaacagtaagattataatatctttaccaagatcaatatcggtctcagtccaatatatattccatacatccgatactagcatactttgccaatgacctagaaagaacataacacttatctaaggtgtaagtaagctttatcgctgactatcacatcagtgtaaatccaatgcactaatgaatcatgggacagtatatcttttaaaagcatataatcacaattactttccactgtgttgacatcactgtaattgtgaataactatatattctcgatttaacagaaattgtatattaaactataaacat

SEQ ID NO: 354913 - DNA, 498 bp, Cannabis indica
aagattgttcttaagaatgaaggcataaatgagtttggagaacttgctgccactgtttacgactaaggttaagaggcatgtgatgttagggcctactctgccaactattcccccatgaagtattgttgagagttttatcctagaattagattaaacagtaggtttaaatgagcatgcccctactaatatagatgaggacaggggtgacaatgcatttgaccagtttaatgagtttgatgctcccttttacaacaatgatcctatagtagatttgaacgaagatggtgatgtggagttgcaagttaattattcacgatgttcagtaaactcgttgattagcaacaagctgcacaattaagttaaaatcattttaacacgcctaaactagtagggtgttacactcatcccacggatacttgaataaaaattcaaggtcgttaacaaattttaacatgtcaggccaaacttggacattaccctcttttgatactaatacac

SEQ ID NO: 354914 - DNA, 813 bp, Cannabis indica
ctgcatctcgcccctttttgaaatctctagtttcataaatacttcgccacacgaaacttggattgctccccaactcagcatttaaaaaggtaccattacggtagtacctagctttaaaaatcttgctgacaagtgagtccggacgactaaacaatctccatccttgtttacaaagcaaactcaagttaaagtcatgcaagttgcgaaatcccataccacctttagacttatgtaccgtcaatctatcccactttttccaatggattcctttgttgttcttcgacgattgccaccaaaacttacacatcaattgctccatctcattgcaagtttccacaggtagcaagaacacattcattgcataactaggaagagattgagccacaatttttattagcaactccttccctgctctagaaagaaatcttccttcccaaccttgaatccttttacgcattttatcctttaagaacccaagtaaggtcgttttattacgacccacaatatttggcaaacccaaatatgtgctatcatcacctgcctcattcactcccaacatagaacacagatgttgcctcacctcattgacaatattagcgctgaaaaatatagaggacttctgtagattgacttgttgtcctgaggccttttgaaagatatttaacatttctatcatgttaatagcactatcctcagaggctttacagaacacataacagtcatcagcaaagaacatgtgagataacacaggagcccctcgagcaaccttgcaccccccgaaatcttccccaaccgttcatagtctcttatcaa

SEQ ID NO: 354915 - DNA, 539 bp, Cannabis indica
tgcaccatgattaagaggatcttcgtgcagctataaaccttgaattcgacgagcaaaaacgtcagtttatagaatggatggacagggagatagaaactttgagggatcagcaggcagccattgatgatcgcataaggcaggccactgtactaataagaagggcctaccaagtcgccaattaacaacaagctactacgtccagtatccctttgggcagtttggaaggatgtgcagttgggcatactgcacaaacccacaatggtcagtcgtccaatccacggccacaagtccaacatgtggcccaaatggtagacggccagatcctgttggactatcccttgggtggagttatacacactaacttcaccccaactaaaatttctggtcaacctgccggccaaacaagtcaaaagccaaggccacctggtacttcagtattcgataggttggacgttgcacatgacctcaagactgacctaaatcgaagaaggtgttaggattttatgcccaaaataaaacccattacaatctaatctgat

SEQ ID NO: 354916 - DNA, 877 bp, Cannabis indica
ggttgttctccaaagatcgtcaatatatgtacaataaccatcagagttaagctcaactcacgattcagtaagcttttgcgtgttttagtagtttaaatttattatgcattattagaaaattttgataggaagcatgttagtagactgataattgagtaagagtgtattatgttcccatgtaagcagtgagtagattacaattttgatcgctgcctgaccaattgctgactcatgaatttgtaggcttgtcctatagaatagatgcttgacgaaacacaagaagttgggaggatgtggtcaagactggtggcgattggagagatttggattcccctcatccccgtgaccaggacagaggctgtggaatgactaacggaggtgtattacagcataccaaacaaactgtgtaagatgcacataagcttatgactataattgttaatattgtcaaaataaaacataaagagtcctaactatagctgtgaatacgtatgtatcgtgtcgatccgaccaacccatattttgaaaagccagctataatatgggtcatgttgtactaatattttaaagggtaagctcgacacagcctgtaaacccacattttcatgttgtgcacagactcatgtcgtgctttactcgggccaactttttttttataaataggtcaacccgttttcttatacaagtcaaactcgagcttcacttatttactatttttttaacaattaatgagttaatcattaaattatatgtattttttatagttttaattatttttatataatatttcaataatacgttacacataattatataaaaaattattagaatgattaaaatttgaatattcattagttaacatatatattattattat

SEQ ID NO: 354917 - DNA, 1114 bp, Cannabis indica
attttttaaccgacgctgaaaataaaatagaaaagtaattatttagcgtcggtttataaatgtcgaaaattgttttttgcgtcgttttgaaaatgacgctaataaaaactatttgcgactacggtatatacgtcggtttagaaaaccgacgtaaattctttaagtgtcacttaaaaacagacgtgaatagtaaattttgtagtagtgaatgttggcttctaccgaagatttattaaggacttctcaaagatctccaaacctttgtccagtttacttgtcaatggcattccatttgagtttggagaagattgcttaaaggcgttcaaagttctaaaggaaaaattgatttcagcaccaatagtcacttcaccaaattgggagttgcctttcgagttaatgtgcgacgcaagtgattatgcaattggagcggtcttgggtcaaagagttgacagggtgtttcacacaatctactatgctagtagaaccctgaatgatgctcaattaaattatgccactacagaaaaagaaatgctgacaattgtgtttgcttgtgataagttccgaccctacctgattgggaataaggttattgtctatacagatcattcgcgatcaaataccttatgaccaagaaggatgcaaagccgagactaattcggtgggtacttctactccaggagtttgacatagagataaaggacaagaagggcactgaaaatctggtaggagatcatctgttaggactagagatggaagagagctagaatacaaaagtagtttagataaatgagcaatttcctgatgagcaactctttagtgtgcgggaaaacttgatggtaccttggtatgctgattatgtcaactttttggctgccaatataactcctcctgggctatctcgtcaacaactaagaattctttcctgaggtgaaacattattattgggaagagccaatcctctacaaccactgcgctgatcagataattagaagatgtgtgcctgaagagagatgtactctattctcaatcactgccatgctttaccatgtgggggacatttcagtggacagaactgcttgtaacaccctaactagcataggcgtattacgtgatt

SEQ ID NO: 354918 - DNA, 571 bp, Cannabis indica
attgactttaccatcatatcatcgacatagacctccatatttcgcccaatctacttttcgaacatcccattcactagtcactgatatgttgccccaacattctttaaacatgaaatcattggttaataacttttcaactctctttaagtgcccttgtctcttagatcaagggtcgccttttttgtcttttgggcaggtaattggggttgatattcaaatgatggaaaatcactttagggtcaatccctatcatgtctgaatggctccaagcaaattgatcctagtttcccttcagaaagtttattgactgctattttagtttttcatctagatttttcccaataaacacacatttagtgggattgtttggatctaaaacaacctcttctagttcttcaattggttttaactgttttttcttatcttggattctagggtctagatcctcttctttcttttcgtcttcttctattatgaccaccattaattgatggttagctcttctattttgaagttctacacgataacattgagccaacaactggtcgcctcgctctacacctactcttgc

SEQ ID NO: 354919 - DNA, 524 bp, Cannabis indica
tttttttttaagaaaatttcattaaaattttttattttaattttttggtcataatatttaaaatataatttaattttattttatagttatagtttttttatgaatatgaattggaagaaaaaatttaagaataaattatataaaaaactaactgcggtgcataagttataaataataaataagtgctcttccataattgcagtaccgtatcaaataggcaataagttcactgttcattcatacatactagaaaagaaatatattttatatttatgtaatatgcatactatatatgtatacacacaaacacattattaatttatataatcatccagggttcgtgcactccagctaataatataatatataatttatatataattaccctataaatgaaattgtagaaagaaaaattaatatatagatgatccatttttattaaaatacatattttattgttattaacatatttatatctattatccaacaccaaagcaaaatcaacgggttggtcatgtgtaaat

SEQ ID NO: 354920 - DNA, 1008 bp, Cannabis indica
aagcagaaagattcgcacgatccatacagtatacagttgagtcgtgagatgtatacggaatacattgatcgtgggataaatgcagaatacactgatcgtgggatcgtgggtataccaaatctgtgtaatttgatccccaagttatagggatttcgttgatgactcacaatgcgaaagctgaattcgctaagtgttggtgccctgcgcggattgctgattgctttgctctaggcatgccagcgaggcatcttgctcagattgtaccctccgaacagattctcaaagtggattccacatgtcaccattatgcgatgccacgtcagagtgcaaaaattgggataatatttgccccaagtctgtacgggacttctgaagttgcgtgtagactttatccgagctacttctgcctttggatggggacacgtgtcgagcgcgactgtccgagactcgatgtaaggctgactgggcgtcccttcagttttcggctaataaatgctctgacaattaatatttcgaaatccgattttctctcaccacggctgacggctgcacttgattatttttgatttccgatatttgcttttaaggagggaaactggggcgtctaaggtttctttgaaatgattacctcttttcgtgacttgcctataaatatcaaccagcattggcacataaactcattttcaccatccttctttgctaagtgagttcatagcgaaaagagaggttcttggcttcaagtttgctaaagtgccttcatcaacattgcttgttggattgatgctgctcgaacacagatatctgactcttgagtaatttttcgatttcctttatgcttatttttgcatgtttacatttcgaatgtaccttcgactttgctgtagaaaatattcatgaaaccctaggtttagaaactctgcgattcttctttgtcatggcgtcatgtgattttacagtccataatgcttgcttctgaactgcgtaacgtctatctttcatcttgcttat

SEQ ID NO: 354921 - DNA, 653 bp, Cannabis indica
gggggtttctggggttggctggtcgaatgaggaagatgatgggctgggctagggttataaaccctttaggcgtcgattttttggaaataaccgacggcatagggacagcgtcgattttttggaaataaccgacggcatagggtgaccctatgccgtcggttatttccaaaaaaccgacgccataagtggtgtcaaaatctcttccaacaaattccaaccctatgtcgtcggttctttaatatttgctgaaacaaaagtgcctctaaaggcttagtttgtagtagtgtctcctctatttatttttagttggcccttttcaaaatcaaaatttttatttacttatctacatataaaaaaaattattaaaaaaataataaaaataaaaattgggatattaagagcaccctcaatgataatttcagtatttttgccaaattttagttaaaataattaaaaagttaaaatagagagtcaattttgttattcttactctaatcatatttttttattagggttagtatttgtttattttataatataatataattaaaaaatttaaatataaattaatttaagggaaaaaaacagaaaaatacaaaaaaagaaaaaaaattacaaaaatactatgggccggcccattaaacatttataca

SEQ ID NO: 354922 - DNA, 790 bp, Cannabis indica
gctaagaaagttcttcacagagcatggtgttattcaaggcatggaaaaaccactagtgttactttgtgacaacactaatgctatcgccaacaataactacccttgaagccacaagagcagtaagcacattaagaggaaataccacatcatcaaagagtatgtggcaagaagagatgtgctggtagaaaaggttgatactgaagataacctagccgacccattcaccaagacattgacagagactgcatttgaaaagcacagagagaatctaggattaattgaaacgtactgattgttttatgttagtgcaagtgggagtttgttgggttttgtgccctaactaaaactatatttcaatgtcatcttaagtttttgtttatcaataaaggaacaaatttattttattacttgtttaatataatgcctggctcacatgtttgcttcatggtaatttttttgatatataaattctttttaatccttatcacattgttattcatgatcattgtgttgtctacacagtgaaaagtaatcaagattatgagactaaactattagtcccatgatttatcagtacataagatttacactgatatgataatcaacaatgtggtttacttacactaaaatagtggtatatcttttccaaggtattggtaaagtaagcttgtattggatgtgttgttatatattggactagactgatattcacatagaaaatatatcataaacttattgtaatatctttctaagtaaatatcacttagttgatcttagattaatgatctca

SEQ ID NO: 354923 - DNA, 577 bp, Cannabis indica
ttttggaaatggttaggtccatgcttagttattcaactctacctatgtccttctggggatatgctattcagatggcaactggcattttaaatgttgttccatctaaatcagtccttaagatacctttagaattatgaaatggtggtacacccagtttacgtcattacaaaatacgatggtgccctctcatgtcttaagaaagaaagatggcaagctagaaaagcgaactgaagtttgcatgtttatttgaaattctaaggatactaggggtggacaattttataatagcaaggttgataaagtgttcatttccacaaacaccactttccttgaagatgactatatcaagaacttcaagccgcaaagtaaagtagtattggaggaaatactttcaaatataactccaaccaatgttccatcgtcttctactcaagtagtggatattcccactccctcggttgaacctttgcaagttgatacaaccgagaaatctaccactaatgttcctattcagaaggtcacggctcctcaacgtaatgaaagggtttccacagaaccagctcgttatggattggat

SEQ ID NO: 354924 - DNA, 852 bp, Cannabis indica
ctccctcagtacacttcctcaaccttctttccatttttgtttatataattatatttattaacctcttttatacagtctagaactatataaatgaaaattataaatgaaggaaagcactatgatgctcagacgtcatccaagcacctgatctcgcacatgcatatctcccaaactgtataaatgaaggaactgtgatgctcacagattggaactatatttatgaggaaaaaatttgataggttatatatgtgtagatgtgctgttcttaggatgttgcgaattggggcttcaaaatatggtgggcatattcttcgtttaaaggtttagggtagcatatgacatgaatgaaatatatgtccttttaccgccttaattgtgtgtgaattcatgttcattatattattattttatgtaggtgacatgatttactttcttatctaaaattgcatgtcgttttctatctgaaactatgtaatggtgtttgcagacctatacagctgctaaccctttcagaagactacctcatttatatgataatcacatgatgcataacaatataaaagggctgcttttggtgagctaagcccacatccttttgccattgcagattatgcatatgtgtatttctatgttgttgtctgtttcattttacttgttagagtggcttaattttttgctgtccttgctagttaataaacaattcagattgatgattaatgagagagtcagccaatcaattttggtaagtgaagaaagtggagcgagtaaaacagagagtacaaagatgcttatgcggtatcttgcttaatgggtggaagagctgcaacttatgggcgttccgtggagcagcaa

SEQ ID NO: 354925 - DNA, 503 bp, Cannabis indica
tttatggtgtctaataccacaatgaaaaaatatctttcattaattattcatatcacaatgataatcattagttgatatgtcttaattttgagtatactgtgtatacatgaactcttgtttctgtttattaggttatttgattcactcattaaagtttctcaaagaagatgattcttacaatttttattttgagaatctaataacatgagtgactgagaacataacatacaataaagaatccaagcttgcctaacagatcaaatattagttcatttatagtgttaattctaaaagtactaacagttggatctaaatctaaaataagttatagattaattgttcacgttgaattaatggtacataaggagtcaagagataatatgaagggtaaatcgataattttgactaattctaattatgaattaataattggaggacgaactaatttctactagggttacggttgttatttggaataaaaaattgataaaaatagagtaaaa

SEQ ID NO: 354926 - DNA, 1171 bp, Cannabis indica
gaatgtcctttgctagaggaaggaggaattgaacaaagacgaggatgatcctcgtgcaaaagttgaagcgggtcctggtcgatccgatgtccatgttcccaagagtcacctgagttcatctacaaaagacaacgcacaagatgagtgtttggtcgaaatatcgaacaataaataagcaaatatgccgaccaagagtactcaacggattaaagaacgattatgttcaaagaaaagtcagaactcaagaagtcaaaacttttcttcagttagggcaaagaagttcatgaagcttagaataagcaagatgaaatatggacgttatacagttcagaaagaagaattatggttgtaaaatcgcacgaagacatgataaacaagagtcgcagaggtttctaaacaaagggattcctaaacatttttctacagcatagtagaggaagcattcaaaatgtaaacatgctaagataagcataaaggaaatcaaaaacttactcgaggaacagatgtctgggtgcgagcaatgtcaatcaaacaagatatttgtaagaaggcactttcggcaactttgaagccaagaatttctcttttcgctctgaagcttacttaattaacaaagaagggtgatgaaaatgagtttatgttgttggtatttataggcaagtcacgaaaagctgaaattgtctcaaaggaacctcagacgcctcagtttccctcctgaaaattgaatatgggaaataaaaaataatcaagtgaagccgtcagctgtggagagagaaaatcagattttgaaatattaagtgtcagagcatttattagccaaaaatcgaagggacgccctgtcagcctcacatcaagtctcggacggtcgcactcgacacgtgtccccatccaaaagcagaatcagctcaaataaagtctacacgcaacttccgaagtcccgtaaagacttgggggcaaatgttatcccaatttttacactctgatgtgtcatcacatgaatggtgacacttggaatatctgcccgggaagcatagtccgagcagaacatatcgctggcacgctcagagcaaagtattcagtaattcgcgctgagcaaccaacacttagtgaattcagctttcgcatcatgagtcatcagcataatcgctataactcagggatcaatttacgt

SEQ ID NO: 354927 - DNA, 1057 bp, Cannabis indica
tcagagtgtattcaattccaaatctatagtggcgcaaggaggaattaataagttgagaatttacttggcgaattctagatctacttattgaaagctcggttatataggcccatggtcccctcactagttgagataatagtgcttgcagactcagttaattgattttaattaatcaattataattctaaaattagactatgtcatatttatgaattttttctaagcaagggcttaattgtgaagaaaagaggttttggggtcaatttattaattaagagactttgcatggtctaattaataaataatataaatggaaattttaattgataattattataattattaaataaatagtttcggcatttataggattgaattagaaaatatggtattattgaaagaagattaattggttggaaaagttgcaaaattgtaactagagtttggtcctttatagtggatgacacttaagtgtttttttgcccaatattttattcttttttagccgtagttgaaatactataaaaggaacatgatgctctcactcatccacttgatgcgttcaaccaaatcaaacctagttttctatgtcagttacttagtagatgagagagctccttccttagtattttcagcctccttcattgttcttcattattcgaaaccttgagtgatagagtgttgtgtgcacacatagcaagtcaagtactcaatcatagtgagtaagacgatggtaatcaaacccgaaggagagaaaagatctaggtttagatcttgataatgttgtgcgacagaaaagaattaagggctatagatcttgaacgaaagtagtcattatattctgatgaaatcaatgtaaggttttctatacccttctgcatttatttttattgttttagagaattcatatttaggatgttagtcaacatacttgttagtaaatctagatcctcgtaaaatattcccaacatagacttcataagaatagcccaaattatgtaatttcatgtaaactcccaattagaaggaaaaagggaaactaagtataattctctta

SEQ ID NO: 354928 - DNA, 587 bp, Cannabis indica
agtaaaaatcaaaatacaaaactacacaaaaaattggaagttaattccatgaaaaatcgaagaaaacgaaaaaatttacaagtggtacggatagtatgcattgcatactgtccgcgcgcacgagcagggatgcttgaccgagtggacacggcgtaggaggttgcaagcagcctctccgcgcgcgccaagcgacggcttcagacaggcgcccgtgtcctgaccgagaaatctcggacagcaggctgtctgagcgcgtgcatccgagggtcgcccctcatccgcgcacgtaggtgagttgacaccatccgaatattttccgattttcaaaaattcataactaattcaaataaaatcgaaattgagttctgttgctccagaattcgtccaaaatacgtggaccagtcgagagaggacacgtggatcagataacttggaaagatttgctaagtctttgtgcgccaccaggaagcgctgttagcatgggtcccggaggagacacccggagtacaaggtactccaggagactagtatagcgtgaaggctctccgggatatgccaggtcattcccgagcaatcaagtcgcattt

SEQ ID NO: 354929 - DNA, 1018 bp, Cannabis indica
ggtatttcaagttgacaccaggaagattcaactcttagaaagctttctcctcgaagtttcatagcacaattctcttcttctcaccaactcccattgcacttagaagaccgtggtcgaagtgaagcaaagactaggagagcctctctgagcttacacaagcagattcataacggaggccacaaaagtagcatgcataactgaagaagggatgttagcctccatactggggggaggggggcatcgagattcttggagagctatggaaagacatcaagaagagtggtccagtagactctatgtgtgatttccttgaccgagcaaatggtttcatgaagcttgaagaagccattcaacgggcagatgtcgagcctagaccgggccaaccataagctccttcagctggaacgtctgtccaaaacccccaataccttagtagttcaaatccgggcggtaaaagatctaataacaacggcagacaaggtaatggaaaaaagtgaaagtttgcaggcaaagccgaacagaccccaagagagaatccttccaagttcactgctttctctgtcctgactgacgaccatctacatggccactcagtcagtagtttcgtacaagaaacctacttccatgaaaaaggacataagtaagcgggacatgtccaaattttgccactttcatggagattatggccatgacactaatgaatgcaacaatttgaagcgggaaattgaattcctaataagaaaaaacaacccacatgtacaaaaatatgtcaaggcaaacccaaatcaaagtgttgcccagacagacaataaccaagacctgttactgcctttaccagtggacggacatttataagtcatcatcggggcccacatatagctggagattcaggcaaagctcaggaaaggtatgctcgaaccttacaacacgagcaaaaataagtggtcctggccgtggaggaaaggaagcgaaaaatgccacaggtaggggagcccactattgttggaaatttatttta

SEQ ID NO: 354930 - DNA, 880 bp, Cannabis indica
aagaagtaattagaagggtaaaaaaagtattttgaccaaaagtaattacgaaccaatacatggagggctaaacactagaattgatttattaatggatactatagttaaattcattaaatataattctataattactaagagtacaattctatatttatagtaaagtaatcatagaattaataaataagggattatttgattgatgagactcaataaataatctagtttattaaagcttagaattataggtccatggtccccaaattgccaccttgaaacactgtcaagggtagggataaagagttgtataaagatgtttggaaaaatatattttgaattggtaaaatagtaattatttatttttgtaataaataaataatttttttatattaattaaataagaaaaagacaaagattattaagacaaaatttgtcgagataagatttatcaggacaaaagttgtcaggacaaaagataccaaccttgtcttaaagacaatggtaggtgcatatgcttgttcctattcctatggagtttgtccttttgggttaattaattattcattaacttaattagataaatatataatttgaaaagtggttatagttatttcaaggttattgagatattctctcaagtattggagagattctctcataaatatcactaaccaaatttggttatagatatttattaatttaaacacgggtagataccattttagaccctgtgttttacaaaggttaccaattggaccatctgttttgttaaatgataaaatagatcctgtattttccgaaatggtaaaaatagtaccttgagcttaatttttgacaactttttttttaatataactaacttgaagaaaatttctaacac

SEQ ID NO: 354931 - DNA, 811 bp, Cannabis indica
actaagcgggctttacagtcccataggtcatgggtcgttcccagcctatcgaacacagaagagcctggtttccttagtgattggtttgcttggtttacaggcagaataattccattattctgattggatccatcaggtatggctcctcctgattaattctcggacaaggtctgcccgcctacctcttggcccatgagtggaactcgtgaccggggattggacgactgaccattggttgtctgggaggcattcatcgtcgactacggtatatacgtcggttttataaaccgacgtaaattctttaagtgacacttaaaaactgacgtgaattatactttttgtagtagtgagtcatcctccgtttctcgcaggggaatgacgttcggcgtttgctggcctacagtcttgtaggctcttcgtatcagcacggtagcttgccgactacgatcttcgatctctgcatggtgagcccttaatgcctccatctctttatctctccattcagcgaacatacgcctctgttcatcaaacgcgagatttactgcagcacgcagttcgtcctgatcatgatgcagagtgttgctatgactatgcacgagtccgagcgcaacaaagagattttgcaattcggttgcgtcttcgatggttgtttgggcattgattcctggtggaatagtcgtgttatgaacgccctggctgtgtgcggaactgttattcccagtctcttgcacaccaggcgcagtttcagtaacaggagctcttcccgtctgtccaagattgacagcgggtggaacccttgaactccttgggt

SEQ ID NO: 354932 - DNA, 612 bp, Cannabis indica
aatgacattttaaatgttgttccatctaaattagtccttaagacacccgtagaactatagaatggtcgtatacctagtttacgctattatagaatatgggggtgccctactcatgtcttaagaaaaaaagaaggaaaactagaagcataaaactggggtttgcatgtttgtcgaaaagtctaaggagactataggtggactattttatagtcgcaaggatgacaaagtgtttgtttctacaaatatcactttccttgaagatgactatataaagaacttcaagccgcaaagtagagtagcgttagaggaaatgctttccgaaataactccatctaatgtttcaacattttcaactcaagtagaggataatctcactcccttggttgaaccaacgcaagttgttacaactgagaaatctaccgcaaatgttcctgttcagaagggcacaactcctcatcatagtcggagggtttccacaaatccagctcgttatgtcttggatagtaaaatcaatatggtcgtttgtgatggtattgatgacgatacattaacctataaacaggcaatggccagtctggaacggagacaatggtcagctgacatggattcaga

SEQ ID NO: 354933 - DNA, 1299 bp, Cannabis indica
agttgaatgagttcattctcctgatgagctcattcagcccgcccagcatcagatttcctcttcctccccttcacttgtttgggaatgaagtcctttggatcgagcatgtacttcacaaaattatcttcggaggtcaaccggataatatttcggtcttcccccggcagtcgagaaagactttgagccccatcccggagagtaagagttaggggagggcagtgatatgttggaatctgctggaactgggtacaaatgatgcccgcgccatccaacatgaagtactcatcaacaaaatgctcaattttgctgatgaccgaatcatcggtgcccgtcaactacttaaagtctggttgagagaaatagaagtaccccgacctgccttgcttaggggtggacttcaaatcaaagaaccaagtgagttcgtgaggagaaggcatacctcacttctgggaggcgtagaggacgaagtgggcagacagatacttaatggccttaggagtgaacattgacggaaaaagactgaagaagtccgcaacattcttaaagtattgatccaaaggcattaatgccccttgctgggcatgagcacccgaccaattgcacatcccctttttagggtttgtggctcgattattgtgggcgagaatgtagcaatccaattcgcccaggtagccaccctggtcgagagtccgaaggcgcgccttagtaaccctggacggagggcttacccacttggcgccaaaggcaccttgccttctatgaggattcgcagcagtaagctcctcactagcatagtccacgccctcaaccaggacgtctccgtcagcatcgactggctccccagcctcattgtactccccatagtttgggggttcaacctctgcctcttcctccgcctcgaaggaactgctaggacgtacgttgtcctgctcttcaatctcttggacctcagcgtcctcttcatgatccctctcctcctggacagctggatcctgttcggcgcttcgcaaagtggcgtgtcgagccacttgaggatcagatacgtcaaccaaacgtgttcttttctttgtacgagccatcattctatggttgggtataagatttggaggagaatgtccttccctagaagaaggtgtgctagaacaaagacgaggatgatcctcatgcaaaagttgaagcaggtcctggtcgattcgatgttcgctctcttaaaactcacctgggttcatctacaaaagacaacatatgagatgagtgtttggtcggaatatcgaatgataaacaagcaaatatgccgac

SEQ ID NO: 354934 - DNA, 862 bp, Cannabis indica
tttgcctataaatactcattttactggcacattactcattttatcaccttcgtgttaagtaaacttcagagcgaaaagagagaattttctggcttcaaagttgccgaagtgcctacagacgattgcttagtttgcttgaactttggacatccgaatctttgagtaagtttctgattccctttatgctttcctttgcatgtttacgctttgaatgtaaccatgctgtagaaagaatgcttaggaaaccctagggttagaaacttctgcgactcttcttttccatgtctttatattggctttcagccatagagcttatttttgaactgcattgcgtctgtcttccatcttgcttatttcaagcttcacgaacttttttgccctaactcaagaaaactttctgacttcttgagttttgacttttctttgaacatagtcgttctttaatctgttgagtactcctggtcggcatatttgcttagtttttgtttgatactccgtccaacactcatcttgtgtgttgtcttttgtagatgaacccaggtgagtcttgggaactcgagcataagatcgaccaggatttgcttcaacttttgcacgaggttcatcctcgtcttcgtgctagtcctccttctagtgaaggaaattcttctgaccccgtactcagccataggatgatggctcgtacgaagaaaaccacgcgtctagccgacgcttctgaccctcaagtggctcgactcgccactctgcccgacgccgaaacaagattcggctgtcccgatggaggaagaccgtgagggggacgctgaggtccaggaggttgaggagctggacgaggtgcgtccgagcagcccctccgaggcgg

SEQ ID NO: 354935 - DNA, 859 bp, Cannabis indica
tttcttctttttgagagtgttggcacactcggcctgaatgtgtccaaacccatcacattctctgcactaaatgcccatgctcttattgtcactgggtagctgaccatgcctgaagtttccaacaggatttcttttgggaacattgtccttaccctcagaacacaatttcttgtactttttttttcaagaatgttgcatatttcttggtcagcaaatatacagcttcatctgagaaaccagcaaacacatctaggatagacttcttttcttctttgtgaatgaacgcaatactgttgtctcctttttctttgttcacatccttcttctttttttctttcttccaccttgttaaggacatttcataattctacaaggatcagtcatcaagatctagttcctccacgtttttcatttcttcaatggaggttactttagacataaatctcctaggaagaacttcaagaactttatgaaccagctttgcatttgaataagtctttcccaaagcataagcctcatttgatatgtcacacaatttagcatggaactcagccaccgtttcttcttcctccattgataaatctttaaacgcttttgccaaagaacgaagacaggatttctttactgcatccgttccttcatttttaattcgtactttttcccaagcctctttggccatctcacagtttgcaatgaccttcaattaatttgtgaacactgtattgaatagagcatgcatggccttcgaaataaaattagccctctccatcccatctggagtccacaggcacataggttttggtttggtgaaaccattatccatcaccgttgggcaggtccaaccatcttctatggccat

SEQ ID NO: 354936 - DNA, 727 bp, Cannabis indica
agtactcaaccaagaacccaagcaaaccccactgttcacccttcccagaagtccttttcctcacccggaagcttgggcaagaaatatccatcatcaacgccaaaaatcataaaaatatgtgcagaaaccctaaaagcccaaatataaagcacaggcaagtatagaatgatcggaagggacgaaggggttcaacaagctaggaagctaaccagcacacccaaaaaatcgcgtggctgaattcgaaggctccgtgtggctggattcaaaggggttcaagtggccggtttcgaaggggacaatcggaagggacgagtggctggttttggagaggacgactgaaaggatcaaggttggttttcggagaacactggccggatgcgaaggggataatcggaagggacgagggtggtttcgccagagcattcgaagagtgggttttggatgtgtatgaacagtagtggtgtgtgtttgtgttttagggaatttattaaattaatgtgtatgtttatattcctcacaaattttgcgtcggttttaaaccctcgaaaaaaataataattgacagttaataattgacgctaaaagaaagtaacttttttaaaaagaattcactttattacgtcagttttatttttagcctcatttatcaaacgacgctaattagatattattagtgacgtttttaaacagacgactcctataacttgagtactattcacgtcggtca

SEQ ID NO: 354937 - DNA, 702 bp, Cannabis indica
acttcaagcaaacagacaataactatctagactttcattgactaattaatttattttctaattataatatattttagttcattaattttaattaatcatttaaatgaaaaatataatgatttaagttggtctaaaattaaaataaataattttcaactttaatctatttttcaagaaaaattcaaaattttctgcatttaaataaaaaatgcaatttcgaatttaaaaaaagttaataaaataaaataaaatatattttgaaaattattcaaatttatgttgttctgaaattaaaatttccagcttaaaataaatttctatttaattaaatattctgaaaataataatatttaagtatcaataatgaaattaacttaaatatttaattttcaatttaattaaatgtattaaatataagaattaaataatcatgtataaaataaactcaattattaatgctaatttaatactaggaaaaatattttaattatgttgatctaaaattaattaataaataattaattaattttcaacttagaatatttcctaattaaatattagaaaaatataactattcactagaaattactctctagaatatatttcaattaattaagtgtttttctaaaattaactttaaaatattcaatgaataaataaatttcatatattttaaaagttaattatgttgctaattcaatt

SEQ ID NO: 354938 - DNA, 536 bp, Cannabis indica
tccaagccttgggtccagattcagatcccaatcttgagtccctgtctggtttcatttctggtgctgggtcacgagctgggtcctaggttcaagttcgggtatgtgtcgggtactaggtccccgtcctagttatgtttcccaggtccgtatccttattatgggtccaggtcccagttattgtgtgggtttgggtcccggtctaggttcaggttcgagtcctagtctcagttcgggtttcggtctctgtttgggttttaatctaggttcgtgttagggtttaggtcctggtcctagtcctagtccttgttcggttctagttccatttgttattttgagttcgagtttgggtttgagtttgggtcggagttcgagtcttggtttgagttttgtttcaggtctggatttcactctaggtcaagatcaggctccgagtgtggcttcgcatcctcaggttggtctaggttgggtgcgagtcccatgttctaatcccgatctgagtctagattcagttctgggtctaagtccttggttctgat

SEQ ID NO: 354939 - DNA, 702 bp, Cannabis indica
ttggatggtttaaaaacattggatgtgatccaatgaacacccctaatcatcatcatcagaatcttgggtgacaaattcattagatgacttaccctggttcaaaaacagtattgcaattgaaataaaacaggaaaacaactaacaataacatgagaaaaaatatgaaacaaaaattgtgaaaataaatacctcaatagtaggtctatcataaatgacattaactttttcttgaatatctttaatcacagtcatgataggcttgaaattaaggtcaacaaaacacctcaaagatataaaatcttcaaccaaggattcttgattggaaatgaccaattccaacttagattttaacatttctatgtcctctgaatcaatttttttagaagatgaaccactctcgaatgtctgcttagtggtatcacgatcatcaatagattaatctaaaaataagtcttccaattgcaacttttgcctctcctcatcagatgaactaatgttcttaatctttcactaacaaacagaaacaaaaaaagaaaatatagaaacaaaaaaaaataaaataaaacaaagaattaataaactggcacaaaacaaagataaaacagttaagaaattgaaattttccttgttcaacgacaaataaaaaatcttgcctttcaagactctaaaagttggattttggtcccaacctcattggtccaa

SEQ ID NO: 354940 - DNA, 681 bp, Cannabis indica
ttagacaaaagtccttaaatttaacaatctcaatagttcggggggaatttttaatggctaaaaaagtttagggggcacgatttactacatgtcaaagttcaggagaaaaaattactaattagcctattttttattaactcttttaccactcattagtaattttaataactttttacattttatttgtgagcaattatatagtcccttggttaattttttcagggatgtgaaacttcaaattagacaagaaaaatgttacacgtcggttaagaactctggcgatggatagggattttggatagttagagtgagagagttaaggagagagactcttttgaaatataagggtattttaggaagaaaaaaatattaaaagtataaataccctattttcaattaggtggtgttagagattttattacaaagaaaatcaagacattacaactctattgtaatacaatacaaggaccaataaaaagattaaataaatgttacaatacatcatataaaatatatatacattatatattatgtataagaaatgtagaagaagatatatatatatatatgtatatatataacaaaagaataatatatatgcatacactcactcacaacttgagtgtagattagtggggatcaccatgacttgaacaatgtattacacttttgtccaaaagc

SEQ ID NO: 354941 - DNA, 2692 bp, Cannabis indica
tccctaaacactaaacccaaaactatagacccaaaaccctaacgtggacatgggcctagacccatacccataccgagatcgaaacctaggacccagacccaaacctgaatctagacccgaacctagacccagactcatgacctgaacccggatccaaagactagaacctggttcgagacctagaccttgactggcacccggatcgagaccccgacccatacccaaactcaaaactgaactcgtactaggacctagactcagacccaaactcgggatccaaacccaaacttgcacttggacctacaccgagacctatgatccagacctagatgggggacctgggccccaaaaccgaacctagacacaaacttggaccaaggattcagacatagataggagattggacccaaaaccgggccttggaacagggactaagacccaaaactcgaccctagactcgagacacaggacccgaccctggacctggaacccaggacctgactacggggacacaaccccaaacacggaccgaaacccaaacttaggagccgacgctagacctagggccgaattggaacaagactgagatccgaatcttaacctgtggcttcgacctaacccgtagtcagtgtttgaatccataacccatacccggatccataccctgacctagacccagacccaaactgggatccagacccgatcccggacccgaaatcggaatcgaacaaagcctggactagaacccagacctgggacagtaacaggacccaaacctaatcccaaactcagaccaaaacccataccgggacttggacctagaccgggacctgtgacttagaacataaaccaagactgagaccgggaccggaaccggaacctagacctagacccaaaccaaaaactggggtcggacctaggacctaagaaccagacttagaccagggacctgaacctcagactcgcactaggattgggacccaaactggaaccgtaacccaaattgggacttggactcagattgggactaggaccttgaacttgaacatagattagggacccatacccgggaattgggcccacaaactaggaccaaaactgtggcctcagaacttggatcgagatccatgactgaccccaaattgagacccacactcgggaaccaaaatcaaaacttgaactggagccagactgggatcttggaataggaccggaacctggactcggacataaacccagcaccagacccaaccgcgaaccctaaccgagaccgaaacccagacctcaacctcaccctagacaaaaatcaggacgcgaacccagactcgaacccaaactcgacctgagcccatacctgtgacttgaaactagaaccaaaaccagaagcggatcaggacttaggaataggaccaggacctggacccataccttaaactgtaaccggaccaggacccacactcagacacaaacccaccctgggattgggtcccaaacccgaatccaagcccgaatcgggatgcgggaccagaactaagacataaacttagacccgaacatggaacaggactcgggacctagaattgggatcgagaccaagaattgcatgcaagtctcggtctcggacctagactgagacccagatctagacctgggacatgaaccgaaaccagactgtgacctgtaattgggattcagatcttgtcctggggtccgggaaccagggcatggacaagacccttagtcggtgtcttgatttgggactcagagaaggacccgaagctggaccaggacatggacccaaacccagacctgggacccaaaactgaaacttgaaccagaacgtgaccaggaccctggaacaggatcgggaccgtgactagcacctggacctagaccgggacccgaaactaaaccagaacccagccttggaactcaggctcggacccagtcccagacctagactaggactgagactcgaacctgaacccgaacccgaactcaggactcgatcccagacccagaccaagcccctgacataaactgggattcagaccaggacatggacccgaatcagacccggactcaaataccgacccatacccagtctggcatcgtaacacgggacctggactcagacgtagacccagacccaaacctgggacccagatctaggacccaaacttggacacggactcaaacctagacccagactgagatcagaagaacccgtactcggactcaaactaagacttagaccctgacccaacctggacccagaccaaaacctagaatcgaacccgaacacggaatcagaactagaactgtgacctttactagactgagaccttgactaggagtgggacccgagacttgggactcgaacctggaccgggacccaaaccgggacctagacctgacctggtcctaaaccctcgtcaggacctgagacacgcaacccagaccaggatccagaccctaacaaggacctgaacctaaacccggaccaagactaggactgagagctggacccgaatccagaccgagacctggactaaaaccaagactcaagacccaaacccgaactgggccctacaccaggacctaagaaccagactttgataggggacttagaccagggacctaggccccggtacccagacccaaatctaaatccaggactcgaacccaaccc

SEQ ID NO: 354942 - DNA, 598 bp, Cannabis indica
agtacaaaagttatttttggagtgtaacagtataaaagaaagaaaatgggaaaacacagtaaactgtgtaaatttccctaaaaaatttgatgtttatatttgagtgagggctttagcccaaatatgggctaaagtccctccgtccctgtaagtatacaatattaatattttaatgtaatttgtaagacttacacataatatatatgtgatgttaaataagtcaatattcacacaacaactttatcatttcttccataaagacttgtattaattttataaggagggccacaagttgcacacttttttatatataatttatagtaatagtctgcaagatcactatttttgtaagtccatttgtacccaattctcacacatctgttagatactaataaaatgctacctactaattttttccaaatcatgaatttaataaaaaaataattaaaaaaaattaaaaaaattattttaaaaatcataaaaattattattattattattattattattattattattattgttgaccgaggttttcggcaactaataaaatatgaatataacaatgagctgtaagaaagcgagatgaagacttttt

SEQ ID NO: 354943 - DNA, 537 bp, Cannabis indica
ttttaattaatcacgatttccatatacctcgttgattagcaacgagctgcacagtacatttaaaaatcacgttaacacgcctatgctagttagggtgttagagccaaggtgggagagcttacggtcgaggtggacaggttgaaggagaaggtcaatgccttggagacagccggtctcgacctcttctttgatttttggaaagctaatccccgggccaactttgactacttgggcaaggctaaggatatgtaccttgagtactgcgtggcccaagtagcttatggtgggaacaaggcggctgcttcaacattcggccaagcttcttcaacctctggtcaggctgctgatgcttctcctgttcaaacaacagatcctcctgctccaatttgcgcagaagaaccgaaccaagagcttgggactccagctgtttaaacattttccttatctctttttttgatatatatcttattcagccttcgggacttttctaagacatctcgaccggaaaagcggtctttaaacttggaattatttttc

SEQ ID NO: 354944 - DNA, 1052 bp, Cannabis indica
atttgtgtagctattattaaatatgaaatgagataatagaacttttttcaattagaagattaatgtacattttactattaataacatacattattataacacaactatgttttacttactaaatatactgacacatattttatttttataaaacaaatcgttcaaataattatactattttaattattaattaaaataaaaaactaaaataattaaataaaactaacactacgtggcttggcacgtaacaatcacctagtatataaatatgtaaatcagttatttctacaagtcaatcaatattcaatctccacaaatatagattttagatttttctaatccaatttaatctgcaaaagggatatccaaactttacaaattgaatcgtgcggattggattgaatattttatgaacattcctacatttttaattctgttttgaagtttagaatagaaattcaatcaattttttttataatttttttgtaatttttagtctattatgtaaatttttctaattgttacccctaccagaaaaagtatattattattattactatttgttgaattatataattttttatcatgttgtgttttaaggttagtctatttgtagttacgtcttcaaattgttgtgtttaaacccatttacagtatgatgtcgtgtggtggtcgtccctcccaaaatcgtagtaatttagtcccatgtcaaaaaattaagggtggcaatttgcgttgttctgtgatattcgtgttcgtattatgtaagttgacatatttaattggtcaaccttgacccgacccatatatattttctgtcaaaaaatctcaattctaactcgacttgtcatgttctcatgacgacctatcatattcgtgtgttgactaatgttacaatacttattgatcaacacgattgatatcacaaatttaatttttatatatatttttaattatattaatttttttatttgtttacataatatactaaataaaaatatatctatgtaaaaagatatagggaaattatagtaaatggctccaaatgatag

SEQ ID NO: 354945 - DNA, 685 bp, Cannabis indica
taatcttaaaaaaaattgattaaaaaattctttcagatgccgaaataaatagaaattgtattggtatacttttcaatattatgtatatgtaaatatatttatttacgaacttgaataagattctatctttaacttattactttcggttataaatcaaaacctaaactaaactcactcgggtcttttatgggtgagtttggaaaataattgagtaattcgaattgagtgtaatttaaaatgactactagatttaatgtgtttgtttaacgagataattacacaacaatcatgtaattagggataattgaagtgtcttatttttttaacaaactaacttgaagtcaacttttagtaggaataaatacaaaaaaataataattattttggtcataaacacatgttagaactttgactcaaattatttatttctttacttatttgatagtatttataaagttgcaattttttttgggtaattattaattatgaacaaatgaaagttttggttgccaagttttgaaaagtcttcttaaggaagctttggatggtcttgacctccaagttgtcttgatgctcaagttttgtaactctataaatatgtgttttgtgtgagaggtgtgtgtgagagaaaaaaaattagtgagttgtgaaaaagagaagtatgtgagtttgttatgtggtgaga

SEQ ID NO: 354946 - DNA, 555 bp, Cannabis indica
gtgtcaagctgatcgtctactccactctacctattcaggtgatttctgagatcatgagtcgtcccccgcctatcaaatacggaaacaactagctgtctcaatgattggttggtttggccattatgctgaccagcaccattaacttggtgtgagttattgggtatgacttttccaaatgaattactagacaaggtttgcccgcctaccacttggcccacaggcgaaacttgggtatgacgtttccatctctttgtccctccattcggcaaagatgtgcctctgttcttcgaacgcgagatttaccgcggcacagagttcctcctgatcatgatgtagggtgttggtatgaccctgcatgattccaagtgcagcacggaggttctggaactcagtgtcatctccaatggttgtttgaacattggtagcgggcggaacggctctgctatgaatgccctggtcggctgctgaactggtattccaagtctttttaacgccaggcgcgatttctgttagaaattattttacctaggatcttaaatctactcacaagtatgt

SEQ ID NO: 354947 - DNA, 551 bp, Cannabis indica
ctgaaaccagtttcatcagtcaaccaataaaaaaaacacacatacacaaataaaaataaaaatattaatcacaaatataattaaaaataagacacaatataatttagcaaaaaaaacattacacgatgcacaatgcacaatgcacaacacataatgcaatattgcaaaaaaataaaaataaaacaacacataatgcactaatgaatttttatggagtctattaatttgaaattacatagtgatcaacattctatccgtagtcgatgcatttcagaacgaaaggtggggctcaaatgcaatattcgacaagcaagagcttagatgtcctctcgggaacagtctcttgaaatccgaactagttcctacatagcacctccactaatcatgtcctttgcatttacttctgtaatttaaaaaactaacatttaagaaactaagctatgagcaaataaaaataacatggtgttaatgcctagcaacactattttttcactttttttgagagagtgaggaagagaccaagggcaacacttgagagagagagagagaga

SEQ ID NO: 354948 - DNA, 1393 bp, Cannabis indica
agaaattgtgccataatagtcatgctcgtcggagcttgtccaaaagtgagggatagacgaatttgtcctagaggtgcgactccttggccggagaaaccatatacaggcaggagacaagggttagatctttaagctagagccccataatttcataggatgttttgaataagatgttggaagaggctccattatcaatcatggttctggccacaatcttgttagctatttggacctccataaccaacgggtcgttgtgcggaaaccttattttaacagcgtcttcatcattgaaggttatggtaggccctcctgcctgtgggattttaggcttcctttcttctacgaccaggatcacttcttcttgcatgtgctgtactgttcgggcatacctctcccgagctttgcctaaatctccagccatgtgcgggcctccaatgatgacttgcagatgtccgtctaacggtggaggtagcaagtcttggttattgtcgttcctttgattctgatcgaccttgacatacttctgtaaatgtgggttatttttccttatcaggaattcaatttcccgcttcagattgtttcatgcattggtgtcgtggctgtagtctccgtgaaatcgacaaaacttggtcatgtctctcttgctgacatccttcttcatgtgcgcgggctccttatacgggactagggactgagtggccatgtaaacactttctatatcctcattcaagatggtaaatgtagtgtactttgcttgattctcccagggagcttgctcggttttgccggtgaactttccctttttcctaagctcggtcagccttttgttgttgttagaacgtttaccatttgagcttgaattatttggataatgggggaattgggcggactttccactagaaggagcttttgacttgccaggcttttgctcaccttctgctcgctgaatagcctcttcaagtttgaggaagccttttgcacgatcgagaaaatcactcattgagtctaccaggccgttcttccttatgttcttccaaagttcaccgaggacttcaatgccccgcattatcacagaaaactttccattttcagttacccatgagaccttggtcgcttccgtcatgaatctgttgatgtatgctcaaagaggctagcctggtctttgcttgacttcgaccaggtcttggaattccaaggagaaggccttccatgagttgaactttccacgagccagctttaaataccattgctgggcggctttcgagagggtagcatgaaaaattcaacaacatactattggaaatattttaccaggatcaagattaactaccatgtatgtttcattgacattttaatatgaattctaaaacaatgaaaaaaacacatataaagt

SEQ ID NO: 354949 - DNA, 986 bp, Cannabis indica
aaaagttgccattgattctccttcttgtttttgttttcgaatctcgatgagggtttgccacccttttactgagaaatttgtatctcaacgttgtaggccttcgagacgagctcattgaaatttttgggttctaccgtgcccacaaaagttgccacctcaggattgaggtttttggcacacatgaaaccgccgcttgctccgatatcctttctggacattggagattgagatttctccacctggttatgaactcattagcgctttcactggtttgttgcttcgtttcaaccaggtcatggagacttatggtcttctttaagctcacgaattgtgccagaaaagctttttgcatgtcatcccaagtatttatcgatcctgggggtaactgagtataccaagtgaatgatgcttcttttaacgattgcacgaattgtctaatcaatagtgcatctgattgggcagattcaccacatgaaaaagttaaatatgccaaatgttcatggggagaaccgttaatcccatcaaacttttcaaacttttgtctgacgtagtttggtggaaatagaatttgatcatagtaagccgggtatggcttatggtatccaagaatagccattgttgcagcctgatattcccaaatactctccatgataaaagccttcaggtgttgctaaggttggacaccagctagtgttggttgcacaccgagtggtggcagttgtatattgcctactggcggtgctgaagacgaggaatgttgcccaacctcactctccttttgtctcatattagcttgatgaaataattgtgttgagagtcgggctacctcttcatccctctcggccaataatctttgtagttcttgaatcttctcttcattattgatagccccagttactaacacttgcatatttttatcattgccaatggttagtgcttcgaactgagtaatgagatcatcagacaccccctcactgtgttcaata

SEQ ID NO: 354950 - DNA, 687 bp, Cannabis indica
agcaaggaaaagagcaactacaagcctaataaacaaggtaagaaatcggttatgaatgcaaaagaatcttaccataaatgaaaaaatattttgtcaactaacttgccaaaaaatgactttacaatagtgatgatgaaaataacaatcagacgcgattgaaaatatagtgtatttagtgttattgtaatccatcttatgtagtccttctgttttaaattttagggttaattacggcaaaacccctaatgttttcattttgcttgcatttaacccttaaaattcattttttggcggcaaaacccccaaaatcacgataccgttagcaatttacagtttgcatttaaatttagttgttaagtattatgttggattgtccatatgcacacagtatacacgtgacacaattttattgctccacttaaaaatatatatttaaaaaaataaaaaaaaaaatcattaaagaataattttttttccctaaaatatcatatttttcatacattttttttcaagttttcattcttcttcttcttccttcttcttcttttagtcacaaactatcaccaccaccaccatccatagccaccgaaactaccacccaccacttctaaaacaccaccacctattggtgctgaaaccaccaccactacctattttcaaatccaaatcatacaaaaaaaaaaaaaa

SEQ ID NO: 354951 - DNA, 711 bp, Cannabis indica
aaaccttcgtctgatgcaaccactgcgcaaccacgcagcaaccactctgcaaccattgtctgattgtgtaagtgatgatagtgtaagtggtattttggtaattagaattacataaaaggtataaatgttgactttaccttaagaatgtatttttgtaaataaaatgtcaatttatattttctatgtaataattctaatatatttttgccatctgcttaaatgtaacaaatgatttatattaatataagagatataataggtacatcatttataaaagtgagtatattttaaagaatataaaaataaaggtaaaaattaaaacaaataaaataaagtggatatacaatgtaatttctacataattatgtggattctggagtacttgacccaattcatatttttcgaggaaattatattatagggaaattctacaatgtaccctcttaaaatagatacattgatgtacccttatctattttagcacccgaaataattttttagataaattttttctcatggtcatatacgttatagttatttaagacatcctacaaaattttaagaaatttagaaaaatttaacacgccgaaaaatatgttcaaacagtgtattgcacgcgtgactattttattttatacgcgtgtaaaatagattgtttgaacattattttctatattgtaaattattctgaatttctccaaattttgtagg

SEQ ID NO: 354952 - DNA, 874 bp, Cannabis indica
ctatttggcatatctctttgtgaggttgattccatgtgtcacaagcatgtgatgccacgtcagagtgctaaaattgggataacacaaataatactagagcaccccaaggagagtagctcggtctaatgaatcccacattcagtaactcttgcaactggatctttaattccttcaattttataggagccatttgatatggtgctttcgatattggttccgctctcggaactaactcagttataaatttaatctgtcgggtaagtgggaatctcgatatatcttctagaaagacgtcaaagaactcgcataccaatcttgtactctcaggtccagatgtcacaggttggctggtatccactgcagtaactatgaatcccaaacaacctcttctcaccaaatcttttgttttcagaagtgttattcttggtatgcgtgtcccctgaactttacccacaaacactaccgggttagcactatcgggctcaaacaccaccatcttctgcttgcagtcgattgttgccccatacttagacagaaaatccattcccaggattatatcaaaataagacagctgaagctctattagattggaagttaattcacaaccgtctatgaaaaaagacaaagatcgaatccaccttgtggatactataacgtctcccaaagataacagggtaccaaaccctgaagcatatccatcacatggtttatgaaaatttcaattatcataatcgacatgtaggaatgagtagctcccgagtcaaacaatacagtataagaacaaccatttatagataattgacctgtcaccactgatggactagcctcagcgtcaaccagagtcatggtaaaaagtcgccccgggttctgagta

SEQ ID NO: 354953 - DNA, 631 bp, Cannabis indica
tttggaagcctactatcgtctctttatatagtacctcttcctctcctccttcctcatctctttcctttcacgtttattttatattattttcttttaagtccttctattcttgctaaattacataaaaatgccatctttcttttctttatcacttaggttttttttttcttgataattattaaaaaggggattaggtagatcgcatcctattcttagttcaaatattactatgggacactaaggtacctagcacttttatgacatgatatttaggagtttttagaatttttattaaattaaaataagtgaaatttgatattgaattgtactaataatgatattgcactagctgcccattatgcggagtgggggaagaatcttttgaacatcttttcctttcttgtaaaatggcttatcatctctggcgctcctctccctggggcttattcccagtgtgtgacactggcattcgtgtttgggactgagtcaagtttatttgggatctaaacaaaagaggaattgacgctgatgcagttttcttatatgcttcgattgttgtggatactatttggagagtgcgaaatgaaaaggtccataataactgttctcctgacataaaaaagtgtattga

SEQ ID NO: 354954 - DNA, 656 bp, Cannabis indica
tgcctacccctaagactgtgaaatacatccggtcatttctatcccatgctagtttttataggaggttcatacaaaaattttcaatgatttctcgtccattatgcaacgtcctagccaaagatgctacttttgagtggacactgaagtgtgaggagtccttccgaacacttgtgaactcactcacttctgctcccattattcagtcacccgattggactcttccattcgaaatcatgtgtgaggctagtaattttactgttggagctgttcttggaacaaagggaggggaaaccttttcttgtctactatgtaagtagaactctaaatagtgctcaaatgaactattccactactaaaaaagagttgcttgccatagtctttgctcttgacaaattctgagcttacctgattggatcacctattacgatcttcaccgatcactccacccttaagtacctcctttccaaaaaggatgataaggcgcgcttaattagttgtgaaagtacagcttgttgattttaaagatccaaattaccaagttgattctctttaggttgattgatttcaagatatgaattatagacttgaatcgataataaagcagtaaatcacacaaagatttacaagcttcatctgcactgagaacacatctcagc

SEQ ID NO: 354955 - DNA, 577 bp, Cannabis indica
tatatttaactccatggtagtgacataactattaaatttcaagttggtaagtgtcatctaacgattttttttttatcgacatataagtacttaatgttaataaaagtgtaatttttctttaatttctctaatacaaactctattaatatcttaaataagacacatataaggctcaaatttttaattattggagctagacaaaaatatgcagtttgaattacgactaaattttcttttaataaattcaaaataagcaaaattagatgaaaattatagttttacaaacattaagtacttatactgttaaaaaaatcattcaatttatgtcaattaacaaacataaaatttaaagtacttgtgttgcaattattcaactctactcaactaactactataaatagtattaaattaattaatagttaggaattatattaattacagtgttaaacgaaaaataataagaaatttttacatgaaaaattacttttgcacaatttattaccaaaatactcctacacgcctataccaacttttttacttacaatgttggttttattacacaaataccacttagtca

SEQ ID NO: 354956 - DNA, 637 bp, Cannabis indica
tatataaataaaagaaagtttataaagaaatttttacaccaaaaaatataaaatacacactttattacaaatatatcaccacacgattaagccaatatttttactcctcaactttattttattataattttactacttgcacacacattccatgcaaccctatacgtcactgatctataacttctatcaatcaatcttacatcatttccctctctttttctcttctttttcttattattttcagttttttttttaaaaaaacaaaacctccacagctgaactcgtctccctccacgatcacaaccggttttccctcttctttctgttcttccatttttttttcaactcacattaaccaatttacataatcgttttccctctctttcttttgctcttaatctatatatagatatggctattactcgttcttcatccaccccttcccttgtgccaagaaaagttctaaaatgggattgaaatctgtagctaataggaataagggcaaacgtcctgttgttcaagacgatgactccgattttgctcctcagttgtcgaaacatgagcgagctctataagaatattttatatatggaaataaattttctatttaaggaaatgattttctatttaaggaaat

SEQ ID NO: 354957 - DNA, 972 bp, Cannabis indica
ttttctcagttctccttgcttgctgctaccagtccttctcgtctttgctcgactcacctcatgacccccagttcaacacttcattgtaagtttcttgcatcctttggtaatgacattcatttactcgttctgtttgttcttttctgggttcgcattcgagatttctgggcatgcaagtgtttaagtccttcatgtattctgttttgcatttactgctttagttgtaggatcgccattatcatgcctctgttgttattgtgcattttcattgtagaagaccatacgctcttcgttcaatggttgcttagggcatagaataggatcttttctttctgtttcctttatcgtgtaaaaccaccttctgcgattttactgcacccgacacttgttcagggaatctttctagggtttcccgtgtgacacgtgtccggagggggcctctttccagcggttaggggacccccattccctttttcttgacttagggtttggtacggggcctaactgctggaattttctctttcttatttttttttgtttacagaatagaaaatgtctgcctctggctcgaagtcctcgaagaaaagcgggaaacgcatggctactttagaggaggtctccttgggacccgttgcccaggaggggtataagtcccgggcgaccggatgggaagcggccgagctccattccaccttaacctgtccccatcaactggagaatattgtggaagttgctgggatcaagccttccacatcaggaacgtaccatcggccacctgcccaaccataattatggtggcttcggagcctggagccagacgcacctgatggccggtgccatgcttcctcttcaggactactttgttaattttcttgtttttgtcggccttgcgccataccaactcattccccaagcttatcgcctgctctcaagcttatttattttttatgccgcccgcggatggggatctcc

SEQ ID NO: 354958 - DNA, 990 bp, Cannabis indica
ggacaaacataagttttgatgtaaaacgagagtatttacatagcttatgtgatttttagattctgaattcaatgcaagttatatgttaatttacttcaaagatgcaagtagataatatatgatttaggaccttaatgatctgagaagagttagggttaaatcgataatttgtcatcatcaaaagggagagaattaataattaacattaacaattgagaaactggactaacaggattcatattcctaaatactcatccataattaattacactttttattattattttcctgctttttaatttttagttatttaattattcaaccttattattgattctaccaaatagaaacaagaattcaattgattggtacttagctacagtcctcatgggaacgatctcacttacctgagtattacttgttaaaacgatacgtatacttgcgtgttggatttatcacaacaaacagcaaagttgaagaagcaacccgggaactagagatggatatgcaatagaaattccagagttgttcaagtatttcgggatgaaatttctataaagagtggataattgtaatactctaaagcttcgtaatcagattagcaaccctaactaagttaattaagtataaatgagaaattatattattatataatttaatatgtagaattattgtgatttattgcattctaagacctcgtttgtgtgtcaagggtattttcataattttgacccgagaagggtaaaaattataattttgcggtatattgtgaatatgggctatattattacatagtatgttcattttgtctttctccaggtgatttctaacaagttgacacggtatagtcacaattaggtattttgggccgaaccgggtttgtggtccaaaatatatttttaggatttagttatggcttatatgtgttaaatgagaaagtatgaattatgtgatgtatatatatatatgagtggaaatgacaaatttgcc

SEQ ID NO: 354959 - DNA, 1439 bp, Cannabis indica
atgaattagtgggcctccccacttcaacttgggaaaaacttctctcttagaggaatacccctcaacgatatagctcgcaagctaaccgcatactcgcataccggttcctccatactacttgtcactttgatgaagatgttgaactaatgcctcggtcattctgagtcttcacccctcgacatttcaatgttgccttagtaccttcgtcctgctaactttcaccttaggctaacattgccacggtgttatcttagtacctgagtcctacagactttcaccttagataactggctctgcctctgtcccgagtcttcttgactttacatcctgaacaataatcgatctctatgatactcatctcgatgcttgtaatgaatccctagtccgttaagtaaactgtcaaggtctctcccccacttcatatgttggcgtcctcgacaacatgcccacacgcaaatgcctgaccgccccaactcttcatgcacaccatgccatctaaaagtgcatcccgcaagatgtgactctcgagtcaactatctcatatagcacccctgtcaatttccatatgcatgcacaaccactcaaccctccagctgattcacacttgcatcacgcctttttggctctcccaatgtactaagctccaatgatgcagccctctggccttcatgcgaactctagcacccttcttgaccttcgtaggcttacatgactactaagtctcgctggaacagccctctggcttccacacaaactctagcgccatctcaacacttgcgctcggtcttcctagccctactggcttctttgatgcatttattccacaactttgcatctctgtcgatgcctttgtgtgacttacaccctctggcgctttaacaagccaacacatttcactcaactgtctcggcacttccatatggatcaaataaaactcgcatgcgaacacttccaagtacaaccatcctctgatgattgcggcattcgccccttggtctccatgtgcatccctcttgacacacaatttagcaactgaagcattccatgtccatcccaatttgaaccatctcagtcatcaactctcgaccactgtcatgactaacaagaatctgacggtccctgcactacttccacacccatgccaacaagcttccttgtcaacaaaagcgccacttgcggcttacaatgtcactcaggcaaacttggcctagtgtaccaagcatacagtatggactatcccctcaatcttgttttatgccaacgagtttcaaacattctattgcacctctctacaattgcacgtggtagttgtctttctagcatccttccacacgcctacatcctccctaagataggccaaccacgttcacctctcactgagatgaacttggctatgataccaactgtcacgggctcaccttttaatgcagcggaacacc

SEQ ID NO: 354960 - DNA, 743 bp, Cannabis indica
atatcttgacggtcttcagtggacaacctggtggctctgataccaaactgtaacgcccgtatttaaaaatttactaaactcaaaagataatctaaatatattataattatttaaacatataggtcgggatcccgagtatcaaaatatgacttaaaagtatcttattagcatatgtatatgtatatattttttttacaaattcacgatcaggcaactcaaaacacggactcaaaataataaaagacccaaaccctccaggttgcactgccgcgatatgtacaatcttcaccgagctccatctcactgttactccagcttcgcttttcctttacctacaccaggtagcaaactgatgagtcaacagactcaataagataggcaagacatatatatacaattaatgcaatgccggctttctgcttaagccgccatgagctcaataattgagctcaccaaatgaataagaacgttcttaagggaagtacgacctctgtaccaaatgaaccatagtaccaactctgtactcgtgttggtagagtcatcaatgtactctcgggaattactaagtattgtaccacttgcacgacgtaccccctggtactcgtgttggtaacactttaatcacactgatagcctacactatactaacactcttaaaatcatataaacatttagtgttagtagtgtagatagttaaaacaagcatatattcatatatacattcttatgctatcttacctcgt

SEQ ID NO: 354961 - DNA, 630 bp, Cannabis indica
atatatatatataataactctaaacttaattatgtgttatttactaatattattaatttacacacacgagttctctctctcatctctctctccccaatgtggttagccataaagaaaactacaacccaatgttttctcatcaaatttatgtacagagaataagaaaaaattatttgaattcatgtggtgggtcaagaaaagttattgatatgcattggtctattataaatagatttatatttttatgaacatcgtgtttttgagtttggcatgaatacaaaataatatcaatgagtacatatcaataaataaatttagtttgtactaaaaaaaataataataaataaatctggtacgattttagtgtaaatgttaagttttttttagagtatttattatattaagaaatagagtatattatattaatttttgtcaagaaaagtgtatattatattaattcattacttgcttcttttaactgtttattagtttaattataatggatttatggtcggctcctttgagaaatttttttttttttggttatttacaccacatactaaattttttaattttttttatattttcactatgttaattttttatcgttgttctacagttattttttaa

SEQ ID NO: 354962 - DNA, 1338 bp, Cannabis indica
aacataacaaattatttttaaattctttggcttgtgggtaagctttgcaatacttgcataatgttccaggtttcaccggtttaccgttaaagatgccttgtttgcaacgacagcatccttcggggaaccctggtggtggatccggccatacaccagttttgcgaaattctctttcaagttgcatgaacctgaactcattacgatttcgttctctttcgaaagctctatcagcgtcaaaaactttctgcatttcaggagtaattatgccatcatcctcctgcttcagctcttcaggagttaagatggggaatttgcccttgttctttcttggcgccatatttagaacttaagaataagagaaatttttaagagtaagagagaagtagaagacaagagcacttatgaataagaaagggatttgcttttatagagcagtatacatgttgggaatgtaggaaaatttaatggccattaaatgtgtaactgtacaggtgaaacgcatgaaatggtgtatttgtcgactgaatatcgatactatgtcgatatgatgtcgacaacatgccaatttagtggcacggctaacttatttgtcgatacaatgtcgacgtcatgtcgatagcttgtcgataggacacgtgtctgacatgcaacgtggcagttgggaagggttgttgggaacgtaggtaaaatttattaacattaaatgtgtaaccgtaaaatatgaaacgcatgcactgtgtgtttgtcgattgaatgtcgatactatgtcgattgtttgtcgacataggaatggatttattaccattgtacacgcgtctgacatgcaaattcctttgggagaatatgtcgatatgatgtcgatggtgtgtcgatgatatatcgatgaggagcatgcttggtatagttgtcgacgttatgtcgatattatgtcgacaaaatgtcgataattagtgtcatattttctgctgttgttgttatcgacattatgtcgattgatatcgatgggatgtcgatatttgtttttttttggtgtttttttctcaccttgtttgtttggtttgcaattgcaggagagaaagtgttccttgttgtatcgtacgatggtgtttggttatgtgagaattataattggatttacaaagcagatagcagcttgacgttgacagttacaactgagacaaccctacaagaactgcgacaaattttatatgaagagttggaagttgatcctgtagcgtatgatttaaagttggagatttgttccttgtacatgaagggacaaatggttgcgccagaggttattaagagagaacgccaactgagaacgttcttagagat

SEQ ID NO: 354963 - DNA, 580 bp, Cannabis indica
gtgaggtccatttgtaactctcgaaaccaaatcctcacacgagaaaggctcgttcagctgggtgtcatctaccgagtccgtactgctcccttctgcctcttcctcctcctcaccggactcgcgagctggggccgtccagtcgtcgtccgtctcctcgacctcgacgtcaggagcatgcctcgagtgaataagatagtcacgggctgacaccgtagactcactgtcttgaatatcaatggccccaggttcagcaagctcttgcacccttttctcgatgtccgaagaagacatcggacctaactctatacccactgcaggtgcgatctcctcttttgagatcgaagttgggataaaactatcctcctcctggtcctcgtcaccatcgaatgcgtggcctcctgagccgagcagctgactatccgataggtcgctcatctgaaagatagaagatatcttttcagcgtggtgaatttgtgaaaacaaagtaagtgatctcacccgcataaactataaagtcgcacttgatagaatggtcagcgttcttgcgaaatactgaccaccccgtcaatatgcaagtaga

SEQ ID NO: 354964 - DNA, 771 bp, Cannabis indica
aactaattaaatataatttaaaataaataatatatcatacaattaaaatatataaaaataataattatatatatgtagcatgccaataaaattatatacatacattaaaatatttgtattatgctaacaaaattatatattactattatacatagaaaaataaaaaataaagatcttcttagaataatactataccataaaatctacatatcaacaaccaacaataactcgtaaaaaattaaaaaaattgacataactttcaaataatttttttttttaacaaaactaatatagatataccataaactttaagtatttgcttctaattctaaaaaaaaatatggaaaaaaattattaattttttttatgtagccaaaaacaatataaataataatagtctaaaagatcatttctctaaaagttctgaaatatagatatttactaatatagtcttataatttagggtcatttgctatagtttttctaaaaaaataatgtatttgaaaaaagaaaaagacaaaatataaaactaaagtgccatttagttagaggtgataataagttgtttaaaaatattagaaagttaatccaacgttattacaaaaaaaaaaaaaaaaaagaagttaattctaatggatgatttctccataattttaagtttggcagagctgtgctgtgggaaaaagtagctgtagctgtactgtgaggaaaaacagttgtagtagaactgtggaaaaaagctgaactcagtgtttggtaaattataatttt

SEQ ID NO: 354965 - DNA, 879 bp, Cannabis indica
gaaacgcatcatcgtctatgtatatggaatttatatcaaaatattgcaaaatatttgaataacatttttgaaattttttgagaattctctaaagattttagtagatgcctatatgattatgaagatgaagaagcatttttacaagcttggaatgagatgttcgtataatcttgaagataataattggttgaagcgtatgtttgttgtaaaagaaaaataggctttggtatacggtatagaaacttttttttttgcagagatgacaactactcaaatgtctaagcatgaatagtgttataaaaattatgttaactataagcatgatctactacgatttttttaacattttaataggcttatagatgatcgtcgttacgaagagctacaagctggttttaggacatctcacaataacttattattgtcatttcctgctgaaatactgaaacatgaagcaaagatatacattccaattatattcaaattgtttcaaattgagatatgcaatgcttatgattgtgctttgtatatttttgatgaaacgacaatatcgacaaaatacaaagtcactcctcatggagagtcaattgattatatggttgaataattttttgttaatggcacacttaggtgtacaattgtaagaagtttgagtttggaagaattttatgcgcacatactttgaaagttttttctacaaataatatttcaaaaattcctgatagatatgcattacaaaggacaaagcatgcaaatgttagaatcaaagcaaacacattgtagcctatcaattttgagaatcataaggatagattgggattgcacaaaaaaatgtgtagaaggcaaacacaagtatcaacaaagtcagcaaaatatgaa

SEQ ID NO: 354966 - DNA, 782 bp, Cannabis indica
ttttttagacaaaagtaaacagaggtaattaagaaagaatatattttaataataaaaaaaataaagtgttataaaataatataatatataagaataaaagaagaagatgaagagagaaagaaaaactgaataagaatttatcagttgtttattctaatgaagtgaaccctatttatacgatgcttaaaagaatgggaaactaaatgatgtctataaaaagtaaaactatctcattaaaaactttgctgaaaaaacttaatcaaaagaaaaagagtccagtgtaaattaacccatcatcatttaagcattcgtggagatcttctaaatgatgaactccaatcttgtatatcgtcttctcaaatgttgatgttggtaatgactttgtgaataagactgtaagattgaaacttgattgaatttgttgaacaacaatatgcattcttttgaaatgtataaagaagaatttggtgaaatgtattttaattctatctccttcaatgtactctctttttagttgcgcgatgcaagtaatattatcatcatagagtattgcttgtgttgatacttcgttacaaagtgcaatcctttcccgaatatgttatgtccatgatcttactcccacacattctgtacttgcttcataaagtgcaagtatgataacatgatttaaatttgtctcattaaaaatcttgtcaggaaaacccagtgggacaaaaccctaaggaaaaaatagtgcaatatatattttatattcataactatttgcaagttgcctcgttaaa

SEQ ID NO: 354967 - DNA, 1018 bp, Cannabis indica
attttttacagcttttattttttctgtgtgatattaatacgatgaggctcaaatttggttaacgaaaatttgcattaccaatttggtgtttccattgagagcctctgtgaaaaattcagaaaaaaatcctcccttcttatgaaaaaaaaacaccttcttcatggctaaaaatatataaaatgttaacaccccacatgaggaaaccaatcatcattttgggaaagagcccatgggctccagaaggtccgccaacccacggtcaagacggaccacccgttccagaaggactcatcctgagggtggccctagtacacggaccacacgttcccgaagagcccaacctgacgttggtcctagtgcgcggacaacacgcttaaggagaactcaacgtgggagtagccagaactccggaacgagggattaagagctcaatcgtggaggtgcccagactatgggagaaggtacttatgaaacggaaaactgccgcctcagatgctgtcaggaagaggcgcagcgtcgaaacactgagttagagtgtgatacagcctcagccagggcggcacatgggatgaatgctcaaaattaacgtgaacctgaagtgaggagactacgaggcaaacctcgtggctcacgaactaggagataggaaaacacccgagaagaaccacctaaggaaaacgagataccccctgaaaaccaggacgaacagtcaaatgggagacaatccgaaaccgatgaatgagaaatccctcatgataatgaggaggatcttaggactcaaccgggagaacggaggtcacctgctagaaatcaccagcgttcttcccaaacccatagagcgaggactcgtacaaaccctgttgagattttatgccctaaataaaacccatctaaatctaatctgatttttatcaatgaaagattagaagtcatttatgtttacatgtagttttcatgtttatggtttaatatatacaaatctgttaagtccagaacatatagtcatttacaattacag

SEQ ID NO: 354968 - DNA, 725 bp, Cannabis indica
tattatctttattgttattataggaaaaattaaaaggtggagagctttctgctagagaattttttattaattatcagaagattttaaggtattaattttactagtttgtataagaattagatttttctatagctatatattgaattgttgtttgtctagcttaactataatctataatcatattttctaacttgtaagtataattttatagaaaataagttcaagaaatataaacaatcgatctcatgtgaatatggcgcatacttctggttctaagagtttgatgcgaattaaagttgatcggatatttaatatataatttttgtacaaaatattataaattttgatgaattcctttattattttttcatctattttgatattatagttgataatgttttatattttctattattatagttgatatatatgaaatattatctgttatattatttataaataatataatgtatagattaaatatgtacatgtaacaaattaatatgtaacatatgacattatatattatgtgtcatcattttgtaatatttggaggagttacttgttactacgagtaacttcaaccattatcgccaacattaagagtgtaaaaggtgttacacatctttatttgaaattcttaatggtataggagttatggtgtgcatgagttacatctctataggagttatggtgtgcatgagttgttgggttttataccctaa

SEQ ID NO: 354969 - DNA, 839 bp, Cannabis indica
aattttatccatcatcacataacggtgagcctgatactggatctttctagacagtgccctttcttgggacaactcaccttttgttatgtattctatgatggggaccatccagctgggttcttgcccaactgttgttacgaactcttttattttgatgcttggctctgccaagcgttccacgggtactacccccagtttctcgatctcactgtttgaggctaacttagccaggcagtctacgtttgcgttcttctccctggggattctttctactttatagtccgtgaactcgtggagtagttcctggactattgctacatacgcgaccattctttctccgcgtgtctgatattctcctgacacctggttcactaccagttgggagtcactatagacttctactattttagcccctacggtctttgcaaatctcagccccgctatcaaggcttcgtattcggccttattatttgaagccgaaaagtcaaaccgtagggctgcttggagtccaagtccgcttggagatatcattgcaacccccgctccagatccattttcgttagaggctctgtccacaaatactttccacgccgggaccgacggtgttggcatgttcgcggttacttcggcttcattacagtcggtgatgaagtcttctagcgcttgtccctttatggaaatacggggaacgtagtgtaagtcaaattgacttaactccattgcccatttgaggagccttccggatgcctctggcttttgtaggacctaccggagtgggtggttggtcaacaccttgattgggtgagcttggaagtgggtctcaacttcctcgaggccat

SEQ ID NO: 354970 - DNA, 659 bp, Cannabis indica
actctaacctcaccaatattactactctagtttactcgtttttgttactaaaataagtaaactaaaataataaaaagaaaagtgacaaaatgacaaagtgtatttttcactctaaaaatctgatgtactttttttagactgattttgttctctatttatagagaaaatattgttcataaaggtggaattttcgtacatagtatagtgggaaaagtggcttgaaaaactgaggagatgggagacgtgatagacacttgttgtgaggagtggtggaatatgtaaacagttggacgcaggtgagatagttggatcattgctatttttccgtttggaccaactggatacttgaagcccaagtgtagagtctttcatcttatatgatctagtccatatgttgagcacatggaaaaccacgacaaaggggaatcaaatgaatccattttcttgactagaagtataataattgggcttccatcctttgcttcatttttgcaaaaataccatccattaagttggattttcaagctccaaacatgctactattttattgactcaaatctgaaaataacattaaaataagttaaatatttccaattaaaataattttataattaaaatcatgaaaatatttaattaaattaattttatatacacaatta

SEQ ID NO: 354971 - DNA, 601 bp, Cannabis indica
tacaaaactaaacaaaaaattggaagttaattccatgaaataacatgaaaaattgaagaaaacgaaaaaattttgcaagtggtacggatagtatgcaatgcatactgtccgcgctcgtatgtagggagggctgaccgaggtccctcggcgctggaggctgcatgcagcctctccgcgcgcgcatgggatggttttcagacgaaatcttgtcctgaccaaggaagctcggtcgagcacttgtctgagcgcgtgcatccgagggttgcaccctcatccgcgcgtgtagggtgggtgaccccatcccgatattttctgattttcaaaaaatcataactaattcaaataaaatcaaaactgacatctgtaaaaaaagtaaattgcttaatttttttcatactatccaataaaaataattccagaaaaaaaaatttcaattatttttcacgaaaattcacaaacatcaatcaataatcagataacacatagatcaacatgaaaccatccaaatcacatacaaatcgttttaagtccaaatttcttgcaagcaaatcaattaccgtggctctgatactagttgttgcaatttattttaccaggatct

SEQ ID NO: 354972 - DNA, 628 bp, Cannabis indica
actgctccttcagctcgaagagtgttatcaaccatttctgcgtatgatgtggtatcattcgttgtaataaccagatcatgcctgatcttggcattcagtctagccaaatacttctctttcttgctaaaatctgttggtacgattccagaggctaacttagccaaacgatcaaacttagttgtgtattcagtcactgacataccctcaccttgtaccaactcaacgaattccttccgctttgcactgcggactacctcattataatatttagcattgaataaatcctggaattcctcccaggtcattctggtaacatccctggtgagggatatcatctcccaccaaataaaagcatcctcttgaaattgaaacgtggcacatgccaccctatcattcccaatcacacccataaagttcagtattctttcaataacggtcaaccactgttcagccttaagaacatcaggacctcccaggaatactggaggtgcttgctttctgaatctctcatataaaggctccacacggttaccaacaacatgttgctcagctggcaccgcaggggctgcaggaaccgcagcaggcggttgcgggggaagctcaacaggagcatcccgttgcctgagtc

SEQ ID NO: 354973 - DNA, 1101 bp, Cannabis indica
ataaatataatataataataaaactgtaacattttgaaaacaataaaaaaaatttctctcaaacattatctctcttctcgtttcttctttgccgtctgaagactcagaactgaagcaaggcttcaacgtttaagtcaccaccagccgacgatgaagtagctctactagcagacaacagacgagctccaccagtggagggtgcacccttcggaaaccttgagccaagctttttcctcaccggacgatggaactttgcaagtcaccttctagtttctctgccgcacaaaataggccacgaagagcttaatcgtctcactcgtttatctctctgtggttagaaattttaaaaatgaccttctttattaatttttcgattttctttgtttctctctctctcttttccttgtgcagttgtgcagcggcagtttggggttcgtggcagaagatggtggtatgtggtttttggccaacaatggtgatctgagagttatggacgacgatggtggtctgagagttatggacgacggcgggcagttgcgtactggatttgatttgtttttaactttttaggtttctttttctttttgtttcaaagtgtgttcataccaatttccattccattatttgttaacgtttgaatcacagaattctatttttcaattcagaattattttgttaatttattattttttttgcaattgtgtaattttttttcttctatatttttttaaagatttttttttttgtatatttgaattatttgcgtaaaattttcgtgtaaatttatggaattttttgtttctattttaattttttataaattataaattataattatgtatctgtatttatttttatttttattttaatttgtatttttttataaaatgatctgatttgcgtaataaattattaatttttatgtatgaattttttaaattgtatcattaattaaattattattatgaatttattgttgggattttatgccctaaataaaacccatttcaatctaatctgatttgttatcaataaaagattagaagtcatttatgtttacatgtagttttcatgtttatggtttaatgtgtacaaaatctg

SEQ ID NO: 354974 - DNA, 1047 bp, Cannabis indica
aagcagctaaaacgaaaggatagaaggggcgaaaaacgagaattgccttatgccctaaaatcgctctatactttgaaaatgttattttgacggaagagaaaactccagaaaagcaatggaggaaacagcaagggcacaaataagaaagattctacgcacaaagcaaattcaattgagactacttcctcgaaattcaacaatcaacccagatacccaaaacatgctatataaacaaacagtgatacaagtataaagttttctaaaaacttacatgaagcttgagaactggaagttcgtattgatcgtcggtacaatgaggattggcaacgacgaaggaaaagtagtaagtaatctatggtgtctggaatttttctctatgtgaaggctctgagaaaatttggcaagatagcgaaagtaaccaaatgaaatgggaagcttggcttttataggccagaacggatgtgaaacagctgtgatcaggcatcatcgtacggtgagaataacaatcgattcgccttctgcagatctaacggttgagataagagctcttcaaggcggttggaaacgtttgagtattcgactgacacccattaaatgcgccgtatcattaatggacaggaaacgaatcgttgcctgcaaaaagtaaaatctgcaataatgatagtcataaatgcaacccatgcgcccgaggcacgtgcccgtttgttaatacgacaaccggaggcacctaagcaagcctcatttacaccaaacgaggcttgaggggtaaatgttgcccctgatttttcccataatacgtggaccaatgcaatcgcgacacgtagatctgaagagtatggatttgatataatttggctaagtcttagtaaacctagagggtcggctaaaaaggcacctcccagagaaagtatgagggaaccactaactcccggagggcagagctatagcaaagcacttccgggagatatcagaccctctctgaacaatcatctcgcatttaatgtcgcatgggagaagataccgccataaatattaaagtctgacggc

SEQ ID NO: 354975 - DNA, 629 bp, Cannabis indica
gcataaaacccaacagtatggtcgctaatttcccttcttcagttaaccgcgccacttttgtcgcctccatcgtgaatctatttatgtaagctcagagaggctctcctggcctttgcttcacttcgactaggtcttctaaatgtaatgggagttggcgagaagaagagaattgtgcatgaaattccgaggagaaggccttccaagagttgaacctttctggtgtcaacttgaagtaccattgttgggcagcttctgagagtgtggtaggaaaaactctacaatgcacatctcctcgtaccccttgcaagtccatttgcatttcaaaatacttgatatgtgataagggatcttctttccctgtatacatcttccaggtcggcatcttgaacttgtggggtagctctataacattgatctctagagtaaacggggatccacattctcagtcaaactcgagatcattgagcttttgaccggccaggccttggaaaatatttttcagttcatccaactgtgcttgcacagagggatgagcttgttcagcctcttggccggttagtgtcacgtcaagatctttttaagctggatcttgaacgtgggccccgggctgagtggctggttgaacatat

SEQ ID NO: 354976 - DNA, 755 bp, Cannabis indica
actccttttatttatttatttatttatttattttgcaaatttaaagtgtccattaaatattaccgttaaattctatttgaattactactacatcgattttgagattttcctactacatatacacacagatgtatacagtggtgtatacagatatttaacagtaatatttaaatagcgtgtcaaatttataaaaaaaaaaaaaaattaaagggttttaccaccaaaaaaaaagaaaattaagtgtataataagggtttccctgcaaatttctcttctttttttttactgtaattggtaacaaagatatgtcacaatagcaaaaactgaaaatttgtatctaatccatatgaatggccgaatgggtgtaagaatttgtataaaaatacacacatttataacaatcacatgccaataatattatatctgccctaaaaagaacatattatagattatgaatcattacctcacctggatggtacaaatttgcaataagctgatcaaagagaggttgtctccataacaaatctgatggaaaaggggaaaccagctcgtttcttctgccattgcagctttctaaatccgtagggacatgaatggagcaagaagaactgcatcatgaatggaatctgaaagtgccattgcccaagatggaagctctccaaacctcataacctgccatgggatgtcaataattgaatttaaacaaaacccatttatctacattctttctatctagttcatatacaattatatat

SEQ ID NO: 354977 - DNA, 235 bp, Cannabis indica
ttactgctagaaagtctactgatgagatggtgattactttgggggtggagcagtggttttggagaagtgtaaaaaccgatctggattttctaactctaccagcgagactaaatgttaaagttttaggaaagatacttattcatgttagaattattgtaccaggatcttagatttactaataagtatgttatttaacatcctaaatattaacttttaaaacgatatgaaataaaca

SEQ ID NO: 354978 - DNA, 776 bp, Cannabis indica
caaactctggaaatagggaaacacccaaccacggcattgaaatggatgaaaatcaagaaaatgaagtgttaggggaccctgccaaaaccggctagccaattttagaggtctggtaaaaccggctagcaggtttgcaccagttcacccccaaacctttcatttcttgctcaattttccaccaaatgcccaccaaactttccagagtacctaaacaatgcatagacaatattttccaaccaatatttcacaaaaaaactcaacgaatcaaaatatgccattagagatcacagctttgaactcaaagctcaaatttgcaaaaatccaacacaacacattaaaaccagctgcaagaacttgaaaccaactcaaaagaaccctaaaattcgaatcctaaacatcccaaaccctaatagccactaaatcttaaaatcacaacttgaaaccaactaaaaccttgagaaaacttagctaatagtgtctagggttaccttagctttaagagtgcttgattccttagattttatccagtaaaacaccaagttttgatggtgattccctctggttttgtcccagccaaaagagagagggagagagcttcatgaggaaaggtctttttcctaatttttttttacttttcttcaaatgagaaaagggtttcctaactaatccttgctgaataaaagaggccacatgtcacctccctaggcagcccccaaactacccctttaaatgactaaaatgccctttaggtttaaacttaagtatttctaaagcta

SEQ ID NO: 354979 - DNA, 596 bp, Cannabis indica
taatagactaggtgtatgctgttcccttctctgattagcacggcacttacggcatgttccgtgacagctaagtatattcccagttcttctccgtctagaggttttgaagtaggaaaggttttgcaagttgcatttgtaggtcttggaaagctttttcacattcctccgtccactcgaactgcttgtttcctcgcacgatgttgaagaatgggacacacttatctgttgattttgaaacaaatctgctgagcgcggcgatctgaccagttatgctttgcacttctttggtttttgttggtgagttcatatccaagagggcttgaatcttctctggattagcttcagttcctcaggcattgaagataaagcctagaaactttcctgagctgactccgaaggaacactttaagggatttagtttcgtattgtacattccgaggactttgaagcattcgcccaggtcgtctatgtgcccccagcctttctggatttgacgagcatgtcatccacgtacacttccatatttcgcccgatctggtctttaaacattttgtttaccaatctttggtatgtagctccagcgtttttgagaccaa

SEQ ID NO: 354980 - DNA, 510 bp, Cannabis indica
ggtttcaagagtaattactcataacggtattaaccatttcccaccctaggtcataacctaggctcaacaaacatttaatcaaagtcttgataataatcaaggctataaccattcaaccattaatatttagccacatatgatgctgaccacttctcttaccttagtttagaactcaagcgtacgggccgacctgagtggaaaaataagctagacgatcctcggttctatgtcacgacaattaaaaactcaatgaataccttaactcgaaattccggattaaaaccctaatttaaaaccgattatacttagccctaaacaacttcgaaatagatcagatagcttaaaaacaatcaaagacaggtaccacgttccacctcgagccaaaatagggttcagagaaaactcgagaattttcccctacaggtaaccggtcgaccgattctggtacaccagaacaaccggtcgaccgattgctggcagaccaaaaaattctgggttttcttccccagc

SEQ ID NO: 354981 - DNA, 1030 bp, Cannabis indica
gcccgacagtctgataggcttttcgtatcagcacagtagcttgtcgaatatgagcctttaacgcttccatctctgtgtccctccattcggtaaacatgcgcctctgctcttcaaacgcgagatttacggcagcactgtgttcttcctgatcatgatgtagggtgttgatatgaccctgcattagtccaagagcaacatgaaggttcaggatctcagtgtcatctcaaatggttgtttgaacattggtagcgggcataacggctttgttatgagtgccttgttcggctgctgaactggcacgatctcatccacaggagtcgtcacaccgtgacccgcagttgatgactgtccgagatttatggctggcagaagccttgtgtttcttggattttgcagtgtaggacccactgcctgtggatttgctggatcaaccatgcccctacgagtctgtaccaccatcatacttgtgattatatttgcaataaagagccacccttgagttcaactctcaatgagagcaccaaaatgttgacctcgcttttagccaacgacagtgagtctaattttgtaagcgacaagtagtttattacgattgaaatattgtaaagcaaataaagacacaagaattttatagaggttcagcccccagcagttcggtaatagcctaatccttgttatttgtaatgacttaagaactaggagagtagttccttttcttagagctcttacaatagtatctctgaatatgaattcttagacaaaatctttcgacccttttcccagtgaatatgaatccctatttatagggctataagcttggagaggaagtatttcccttctcgttccaattgatataagcagagagattgcatagtaaatatagaatacactgatcatgggatttgggcagcttgtcatatctctataatttgatctcaaagttatagggatttccttgatgactcacgatgcgaaagctaaattcgctaagtgttgacattctgtatggattgctcactgctcggtctag

SEQ ID NO: 354982 - DNA, 405 bp, Cannabis indica
cctgatatgagttatagtgtggtagtttgtgctagatatcaaagtaatcctatggaatctcatgtatctgcggtaaagattatttggtatgttaatagtactctcgacttttgaatctagtattctaaagatactaattctaacttggcttgttttagtgatgcagattgggtaggcaaagctgatgatcgaaagagtacaagtcgaggttgtttctttcttggaaacaatttggtttcttggcatagtaagaaatagaattctatttccttgtccactgtcgaggctgaatacattgctgctggtagttgttgtactcaattgttatggttgaaacaaatgttgattgactatggatttgaactgggtgttttaacaattttttgtgataacactagtgcaata

SEQ ID NO: 354983 - DNA, 681 bp, Cannabis indica
agattgcacaataattaaaatcatgccttaaactccaaaacttcaactctaaacttgagcttcaaactaacatctttccaatattttccagcagctcaagaccaaataaaacatgtattttcaacctagaaaataccctaaaatcttactccaaactcaacaaacataagtcccaactaaatcatgcaatttcaccaagattaaacaccaaacttaacaacatgcatacacaagaacacatcaactatacatgctattaaagcataaaattcagcaaggaaaatcaattagaaactcaattaaaaactgtagagaatacctcaagactaagcaagaataatccccacaatcaagctccaaaaattagctccaattcacaccaattttcttcaaattcaacttgaaataacaagagggtttgggagagagagggggtcggccaagaggaaagcaaaaccagaaaattgcttttcatttcatcaaaaatcaattttaatcaaacatagtaaataggggtcaaatgaccaaaatgccctcatggcttatattcacacctacaccctcacaagggtaaataagtcattcaatactcaattaatttcaaataaatttcagattatcattcatcaaataaaatgccaaataatcaatccaatttacatttcgggcccgaacccagtt

SEQ ID NO: 354984 - DNA, 822 bp, Cannabis indica
ataacttgcctcttttcccgaagagtttaatccccttcattggagatactcataaaaacacgtggtcccctacttggaactcaacatctctgcatttcggatctgcataactcttttgcctactctatgaggcaagcattctagctttaatattctcaattgcctcattggtccgctgtactgattctggacctaggtatttcctctcctcggtctcatcccaatgaatgggagatctacactttcttccatacaacagttcatagggagccatccctatcgtactctgataactaatattataagaaaactctatcaatggtagatacttcctgcaagagcctttgaagtccataacacaagctcgtaacatatcttccaatatctaaatcgtcctttcggactgtccatctatctgaggatggaatgttgtactaaattttagtttcatacccatgtctcgttgcaaactcgtccaacacttggaggtaaacttcggatctctatccgaaactatggattttggtaccccatgaagcctttctatttctttcacatacaactctgctaactgatccactgaataggttgttttaacttgtagaaattgagcagactttgtgaatcgatctaccacaacccaaatagaatcaaacaaacctgtggttctaggtaacccaaccacaaagtccattgtgatgtcctcccacttccattcaggtacggttaaaggttgtaacaaccttaccggtctctgatgttcagccttgatctgctgacaggttaagcacctcgatacaaattctaccaaattcttcttca

SEQ ID NO: 354985 - DNA, 306 bp, Cannabis indica
tatatatatataaacaggagaaaaaagtgaagtgttcaaataactggattcccaggctcttggttcggttcttctgagccaactggagcaggaggatctgttgttcgggcaggagaagcatcagcagcctggtcagaagcttggcgggaagttgaagcagccacctctcaaggtacatgtccttagcgtagcctaagtagtcgaagttgtcctggggattagccttccagaaatcgaagaagagctcgaggccggcagtctccaaagcattgaccttctccttcaaacagtccgcctcggtcacct

SEQ ID NO: 354986 - DNA, 1740 bp, Cannabis indica
ttgaaaatgcccctaaactattgagattgttggatttaaggaatttttcctaattttagtaaaaaagtctaacatggatgaaagttcaaggggcataatttagtgcatgtcaaagttcgaagggcatgatttggtagatatcaaagtctgtggaacatggtttagtacataaacaatcattgaaatagtaaaattgaataacattagacaaaagtccttaaatccaacaatctcaatagttcagggggcattttcaatggccttaaaagttcaggaggcatgatttggtacatgtcaaagtttagggggtaaaaatcctaattagcctttaaattattacgtttgggtaaataattaaaatatacacattttatattaaatcacttcataaaatgcgaactagtatatgtaagtagaacctctatctaagaatacacttgggaccaattaaattatattctaattgagaggttataactaaatagagttatactagaaaaaaaaaattaaaatatcaaaaaatatcaatgtaacaataataacaataaataattattaatactatgtaataatagaattattttagagtaaatataatgtttatacatgtattataatttaaaataaaattattaattttacttaaataaatttacaaaatatatgtttatattttattaagctgtaattattcttatatagaagtatattttgttaatacgggatttagaaaatgtataactaattacaatttagaggttattcttatttataactggcccaaattgggacttgatttttttataacaaattagaggttattcttgaatagagtattcttaagtagagattctactgtactatgtttggtcaagtaattacacatatagccaaccaaaataaataatattttctacaacatatgaaatttggtgataaaataattattgaaaattaataatttttagccaaatttctaaaaagaaatatattaattgcttaaaatatatcgataatcacaaactaaagtgtccaccgtaacacattatttttgcatcaaacaatcaaattttacaattttacaacaacaaataatataaagatgttaaaaagtaagaatatgagtggagactacatagtcaagattaatcaaaataagagagtggctatgttaagttgaacgagaagaagccacaaattttttctatgatttatagattttgaaaaatcatcaaaaattatttttaataattttttaactgcttaattgtcattaaattaataataattattaaacggtgtcaaaaaattaattaaaaatgataaaattagaaattaaattataatcatgctaatcgtcaaaaaatgacatcggacggcagcgcacgcgccccacacactgtcgttgtcgagagtggacgttgctgggagaaggttgttttcaaccttgaatcaggtttgaagcgggccacgcaacccaatccgtgcgcaagctagtcagagctgttttctaaccactcgaaatggacagaaagaatggggttttgatcgggattctgatttctaagaaatcgccaatgttaatttcgagtaaaatgtgtaaacagacactagatcaaattaaaacccgtccaagactaagaacacggttgaactttgattttggtatattattctcatcaaattcgaaaaataaattatgtaaaaacattttaaacttgtgggtaatgagatttgcac

SEQ ID NO: 354987 - DNA, 978 bp, Cannabis indica
taactcgctcttttttgttttcgcatatagaccatctcgccctacacttgacgcgactcacagagagacagctgaagttcttgggagccttcctgtacaagatcgcgactggcgattgttgtgtatgactgctaaacttcgcgaacacaaactgatccctgagaacgcgagtttttggagagagccggtgtataaggaaccttctgaaaagcaacaagagcgaattgataaatgtctttccaagcaaactcctcgaccatcatcaggtattttatcgcatacatagactagggtgttagaattttcatccttattagtattaacccttattttttccttttgtaattacaaaaatgactttcctaaagtccgctcctatgctcaaccgcaaactgaagcctgggacagcagcgacttcccctattacctcccagaagaggaaagagacgtggtggttactcctgtcgcagattcctccaagaggcctgctaagggcatcaagagaaagggaagaaggttgtgatcgacccagtggttcgagctcgccatgtgttgtaccttcaggagagatttgtcagcgatgagttcctgtcgaagattgacaaggctcctaccgaggagctgctgcctcgctctgccgagttagcttcgcagttcatggctacgttctcgaaggcttttgctactgggtccaaagaggttgaacttgcgaagaaacatattgctcagcttcaagaagacaataagaagctgaaacaagatgcgtcttctaaggacaaggagctgcgaggaactccgcaaggccaaggagcaagctgagctagaggccaagaacgcacaggcgaaggtcgaagagatgtctcgcgacttggaaaccgagaaggagaacgggaaaaagcagtatgaccaggcggtctcggactacatctacaccactctttctaaggttccagacttcgacttctcgatccttggagc

SEQ ID NO: 354988 - DNA, 941 bp, Cannabis indica
atacggtttcacagaattttaaatatttttacgatttttttaattttatttacagaaaatacggtccttttatgttgtactcttgttaatttgttgttgattttttgttatatatatgttattttttgttgttagtttaatattattttttttataaaaaatggtaccttatgtaatcattcctaataaataataatagttgtcgatattttttttgttattattggcgaaaatggtgacggatgattgttttttctttagtaagtgcttttattattgatcaccttaccaattatcatgccaatgtaggaatgtaaatagatttggtcgaatctgatttgattataatctattctgatctaaatcagtagttgatccgattcacctcacattgtcagatttcttaaccgtattgtattaaaagcaacctagcttatccaggtcaagtcagatctaattttttagatgcgacatttttttacacaatatcttttataagttttaatagtgtcatcgttatattttaacgaaaagaaaaagtaataattgacccgacttagtctttcgttgagtttaattattactaaatataatatccaaatcttttttattgaaaaatgtaagttatgtgacaaaaatattgaagaattgaacacacagacgtatcaatgtaaaaataaaaactcatgagattctaactttggattgaggatgaaaattattattttttcattgacatattgaaaccaaattggatctggataaatttatagcaagtgatcaggacagttataaatgattcggttgttttggaccagtgctctaaattgatccaaaaattcgaatcactttgccatgcctatgccaaatgcatatctgtaagagcttggagttttagagttagactttgattaaaaaagaaagaaagaaggagaatgaga

SEQ ID NO: 354989 - DNA, 804 bp, Cannabis indica
agcagactgtttcggaggttgagatgtgagcacaaaaaaaatagcagagaaagaatgcactgccgcttagagagagataagagagagagagagacggctggagtgaatgagatgtgtaaataaaaccctaaaacctaatgttctttttatatgtgtaaaggcccaacaacattaaaaggctgagatattgtgtaaaaaccgggataaaaagtctcacttaaaaactaaagttacgtttggtaaacacataaaattagccctttcaacaccgttttttctccgtttgccaaacaaggcccttgttccaaatttttttaaggctccaaatgtaaaagtgggattaaaagtttttatcccactttttatttttttcatgtgtaaaaactaggataaaaagtcccttttgttgtagtgtgaaattcctctctatatgtttactgctcttgagatacacgattctttaatatttgacaactatatctgtgttagtcaggaagtaacactagtagttaagccattattgtaataactccaaaaactgtatagaactttccataggctgaataattatctagtagtcttcctggtcactttaacattcagtctcactagtagagttagagactccacattggtttttacacttctccaaaattactgccccacccttagagtaatcactatctcataagtagactttctagcatttacgcaagtctagaaatctaatttggtgtagaccaagagtactaaaataccacccttatcgactaacatatagttcatctttttgatcttaagatt

SEQ ID NO: 354990 - DNA, 518 bp, Cannabis indica
aatcaataattaaaacttacagctttttgatcttgtatgtaacagttggggtttgcacgtgcgacgatgtcagtcatgtatttcaaaacataaacaccacagtcttggcttttaggttgtcttggacaatttgctagtgaaattccttgcaacgggccaagatactcatgtgtgtcccatatatatctgaatgcactgttttgaaaaattatattagcatttcaattcattagttaatttaaatttgttacataagaagtcattaaattattaccttccgattatttgagtaatttcttcaggaattaggcggccacgtacagggtctaaatggataatttcctttagtggacgtagtgtaatgtgaatatgtgattcatgtggaatctttttgggtgaaataaagcttaattatatgcatttatcctcattttattcaagttagaaaaaattataaaaatttaagaaaaaattcaaagctcttttcctctctctctctctctctcgtcgtcgttggt

SEQ ID NO: 354991 - DNA, 678 bp, Cannabis indica
tggtccaactaagtatcaggtcccacatagtttaatataataggttttagggagtatcgctagccaaccacaacgtgacatatcgagaaagtgctaggcaccactggtgcctaatagcaatgctctaggctagcttagtgtcaattaattggagagtgaaacttccattaaattagccaacccaatggcatgagttacaacttggcaattgggcttaggcctatttttggagaaaatatagtaaaatggtcttctaagatttattttggttggctgatggatattatttccattggcttctacttagattttgatattcactttggcccatttgaagagagtacattgcattgttgagaaaaacacatgcggcttggacaataatttcaaaacttggagtgatcaaattgggattttgggctattgctcatttttacaaaaataccaactattgagttgggtttccaagctccaaacatactaatattttacaaactcaaatctgaaaaataacacaaaatcaaaattaattacatattttcaactaaaataaatttaccattaataatatgaaatatttaatttatattaatttaatatgcataaatgaagacttaaaatgtatatatttaagtcttaatcagtcgacatatttcggtgttgatcggatttgcaata

SEQ ID NO: 354992 - DNA, 687 bp, Cannabis indica
aggcactgtaaatcctccacctcgggagggatcctggaatcatggctcggggccggagtgtccactctccgcggccgtttaggtgtctcctcagctaccatcttgcctttgcgcttgcggatcagagcaacctcttgctcttcttcactttcttcaacttcctcaggaagagcccattgctcttcttgaccttctttagcttcctcaggaagtacctcctcctcatccactaagtcaatagtgtttggaggggcactggaagaagccttcatgggggtgaccatctgggaagaagttggaggaagagaagcatcaggactgtgggctccggcaagggtggccaagatcgcctccatgggattagctgctgcaacaagagaaaagagttaagtgttagaatatctgtgaaagcagtaaacacttaaaaagcaatcaagctagtcctaccctgactctctaattcggccctagcaaagttccgaatcttaatactggctgcatcatccccgagatagctgtccgagggccggaaccagctagaagaaagataggccgaaggatccaagggaacgggctccggaggtccagaacccatccgggaccgacctaaataatctcctaagttggagaaataataatcctttgcatgatccccccacgggtcgagggcatcctaaacctaaggag

SEQ ID NO: 354993 - DNA, 553 bp, Cannabis indica
gtcccacaatactaacatactaagttgtgaatttactgagccaaacaccgagttccatgttaccggacactagaaatgcaaaattatgaaattcactatatgacataaaatgcatttcagaattcaataataacagcataaataattatttaaatatctataaataattttccataattaaacataattaactgctaatttccaaattaaactaagcggtctttacagcccgcaacgacaatgtacataataaatcaatgggtaacattaaacactatattgactctatttcttctagttacacaaattatggctcctgccttctttcccctccacagtctattgggactcaggcttggtctccgccgccggaagattgggttaaaatcaactgcgatgtcaaagtcggaggtgaaactatgtgtgctgtggcgattgcgagagaccataacgaatcggttatgtgggtggctgaaaaaaggctacacttctctgacccactcactggagaagctgtggcctgtcttttagccatggagacggcggtctcatt

SEQ ID NO: 354994 - DNA, 572 bp, Cannabis indica
acgacacgatgatacgttttgccacccctaagtaaaaggatttctttgtttgtatttttgtcactcttttaatacactgatatgagattatatttcttatttttttcctctttattttttagtacattttctctgtttattttgataccctaagatttatttttttattatttttctctatcttgttggattattaattcctttaatatggacttttaatataggctcatatatatatatatacacacatatatatataaaagtgtgtattgctatctaaagtttgatctaaataaagtgatcattttagtaattgtggatcatcggtaattaaagtattatgagctaaatgtgtagataccataagtgacatattagatatgaaattatctataatttttgcacgagggattaaaaaaatttaaagaaattgagttattatcactatggtttgttttataaatagtttaatttattataggctaattaggatttttattcccacgaactttgacatgtaccaaatcatgcctcctggatttttttggccgttgaaaattccccatgaacta

SEQ ID NO: 354995 - DNA, 1358 bp, Cannabis indica
tcgccgctccaacaagcgaggtgcgggaaaaaaatacaacgtaaattgttcgtcacattactcactcacattattgtgttaaagttattcaaatgtgagaccagctcagtggttccgtcatatgacgagacatgcgtgttcttgaatcccgaaggaaaaagggtattcattatgtctggatgatacggctcaagctccttgtcagagctgtatctagataactaccctaattccctcacttgatatctcttgaacttgtcctccagctcgtttatccacaattgtattggatcctcttgctttggaccaagctgtttgcaaaggtcaggtttcttccgattcaagtactctcgtagatctggttgggagtaatttctggcagatcttgttttactcatagatcacgtcctactcatagactttgtctttgagtggctcgcgaatttactggttctcatactttctcgatcattagctcgttgagtactttcttctcttcgagttgatcgactatgggttcttgatgacctcgaagtcacacttacttcttcacgctctgttttttcctcccaagagtagtttgtcgtatttcccctatcagggtttgtacgagtcctcgctccatgggttttgcaagaacgttggtgatttctagtaggtgacctctgttccccaagttgagtcccaagatcctcctcattctcatgagggatttctcgttcatcagttttcggttgtctcccatctagctcgtcgttctaatttttagggggtgtctcattttccctaggttattcttcccaggccttttcctgtcttctggttcgtgagccacgaggtctgcctcgtggtcttctcactttaggttcaggttgattttaagcattcgtcccctgtcccaccctggctaaggcggcatcacgctctaactcagcgtttcgacgatgtgcctctttcagactacgtctcaagcggcagttttttgtttcataagctccttctcccacagattgggcacctctttgattgagctctacatccctcgtcccgaggttctgaccattcctacgctaagttctcctcgagcgtgttgtccgcatactaggaccaacgtcaagtccagttctccaagaacgtgtggtccgtgcactggggccaccctcaggttgagccctcctggaacgggtggtccttctggactgtgggctggtagatcttctggagcccatgggctctttcccaaaacgatgattggtttcctcatgcggggtgttaacattttctagattttcagccatgaaggaggtggtttttcttcaaaagaagggagggttttttcagagctttttcacggaggc

SEQ ID NO: 354996 - DNA, 229 bp, Cannabis indica
atactgggacttcgacccggaccgggacctgtgacttgggacctaaacccagaccaggacattgatgggggacctagaccagggacctaggcccaagaacccacccaaatcggaatccgggactcgaacctggactaggacttgacctggacccgagaatttgaagtcagatccagactcgaaacctaccccgcaccctaactaggataggaacctggacatgaaccag

SEQ ID NO: 354997 - DNA, 1121 bp, Cannabis indica
agcccgactttcagcttcatcatcaccatgaccgtcagggtagtttggatggtagtcactgttgacctcagggtcctctcttctccctctggacctactatttcttgggcgatcattgccatctcgtggttcggccacgttgatcgcggggttgccacttccctacgctggggcgtccttccattatttctgccacgatcactattattgtttctagagtttcctccaccactccgccttagacgaacattgtgggagtcatcgcgtcccatatgatggccgggtaagacttgctcatcaaccgggggtggtcgattattattgcggggaaccctgttggaggggtgactcctagtcctttcttggttccttgggcgctcttcaggtccatagaccaccctctccctctggttccttggggtagggacctcccgagggtaggtttgaggtacctgttgattgttggcatcagtacccatcccttgagtgttttggttgaagtagcttcgtattaagtcggcagcctcttgggtgcgacgatcttggtcgtcttggcgcctcctcatctcacgagcatgatcttccagccaagattggaattctctcctttgattagcaagactttcagtcagggcctctcgagcttgattttgctcttggtgcacagtttgaaactggccttgcatctggcctatcgcgtctcgcatttgatccatctcggggtcaattccctcgatgtcaacatggggttcattccgcggcgtaaagatgccagggccgcggccagtctgagcttggcccgcaccgtcagtaggtgggacaaaatttctaggattacctcttccggtggcgccatcagtagcgccgcctcctgcggcagtggcattggtggtacgcccagtagttgtctgtccagtgactgtagtttgaccagttgctccatggccagcggtttgagcggtggtggtagtgccgccgttccctggacgggggggggggtcggttctccattgtttccggcgaggttgctcgctgatggaacttggtgggcactttccatctcttcgtcaggtcgctcttgagatcttcgggttaacaccattttttccggcgaaaaactt

SEQ ID NO: 354998 - DNA, 569 bp, Cannabis indica
gttttaagtaacctaaatatcattttaaaataaatttgctaacttaccttttaaatttcatgttattcaataaaatagaaaatgataaatgcatactcttttctgattttacaatttaatttaagtaaaaataacaaaatttaaaagttaacaaaaatatcttatttccctttttaaaataccatgattatagtaatcttattctaaataaggtcaaattacttaaaaggaatattttattaaaaaaatttaatttctgaccttaaatttaaaaataagataaaataatcaaattttaaagaaaataagaaaagaggtaagcaaaacttgattttaacctattttcaaattcaaattacactaatatctaaaattaattttgaaaaatcaaattaatttatttctgataattagatttgaaatatgaaaaataaaatcaaaatacaaaactacacaaaaaatcggaagttaattccatgaaatagcatgaaaaatcgaagaaaacgaaaaaaaattgcacgtggtgcggacagtatgaaaaacacactgtacgcgcgcgcaggagtggg

SEQ ID NO: 354999 - DNA, 593 bp, Cannabis indica
tgtcgatccccaatccattgggagaaacaggagaacggaaatatctaggccctgaattggtccaaaagacaaatgaggcaatagataagattaaagcgcgaatgcttgcatcgcaaagcaggcaaaagagttatgaagatcccaagcgtcgggctattacgtttcagccgggagatcatgtcttcctacgtgtgtcaccaatgaaaggaaacatgcgctttggaaagaaaggcaaactaagtcctagatttatagggtcctttgaaatacttgagaaggttggacaggttgcttactggttagccttgcctccatcattgtcagttgtacataatgtatttcatgtttcgatgctgaggaagtacgtgtctgatccaatgcatattctgagttttgaggcattggaattacaaccggacttgtcttatgatgaacggccagtgcaaattctggatagaaaggagaaggtccttcgaagcaaaaccatagagttggttaaagtgctctggaggaatagtaaagtggaggaagccacttgggaattagagtgtgatatgaggactcaactgttggtattatatttatccaggatc

SEQ ID NO: 355000 - DNA, 661 bp, Cannabis indica
aagttacatgatcaaaaaccctaatttagggaaacccgaacccacaaccctatgttctgttatactatctataggttactcaaactctgaaattagggaaacacccaaccacggcactaaagtggacgaaaatcgaggaaatgaagtgtttggggaatcctgccaaaaccagatagaggtctggcaaaaccagctagccggtttgcaccagttcaccccaaacccttcacctcttcctcaattttccactaaatgccaccaaactttccagagtacctaaacaatgcatagacaacatattccagccaatatttcgcaggaaaactcagtgtaaataaatatgccatttgagatcaaagctttgaactcaaagctcaaacttgcacaaaacctaaatcaaacatcaaaaccagctgctgctaggacctaaaaccaactcaaactaaacctagaattcgaattgcatcaacacctaaccctaacaacccccaattcacaatttcacaacataaaaccaaagtaaaagcttaaaaacacacagctaaagattctagggttaccttagctccaagaacacttgaatccttagcttaattccagcaaattagggagaaaaagctggcccttcccctggttttgcctgagccgagagagagagaga

SEQ ID NO: 355001 - DNA, 656 bp, Cannabis indica
atcaactaactcataaacaatcttaatcgtatttggcatgctatgtggtacacatatatttttttacctttaatcagagtggagaaaataatgcccaatgatctagaccctatttctcaataataataaatcgataagtgtctattctaaaacacagcctaatactcgcataaaacaatctaaggtttttctacaaaacctcatggtataaacaccctaaaataaaatttatactttggctctaaaatctataccatattataaatctcgttgcaagcttcaaaacggtatatagaactattggaaattattttaccaaaatctagatttattaacatatatgttgattaacaccctaaatataacttctctaaaacgatgaaattaaacacatataaagtttaggaaaccttacattggtggtagcgaaataatatgtctccttccacttagatctctaacccttgttcctttttttcgtagagtattaacaagatctgagcctggatctccttcaggtattggattcttcacaatcttctacactatgattgagtacttgacttgatatgggtgggcatgtactctagcactacaaggaatgaaatttatgaatagaaagagagaaggaggattcaaaagagagagagagagag

SEQ ID NO: 355002 - DNA, 531 bp, Cannabis indica
caaggggaaacccttaatgcgtggggtacttacaccattcatggtagtcgtgccactactaagtgagaaaaaagcactgaggatccataaaaggaagcaaactacgatcaagcatccaaaaggactcagactcgagaacaaagaccaatggtccatttgcttgacatgaacttgtcactttttagggaaacaatctacaagcgagcgtctgaaaggattaaaactcaagaatgtggccctacaggtccaccacataccacttataggacgaaccataatcttgctcggagtaatccaaacaatacaagaaatcgttctcctccgcgagattctccttatagatccaattactctaggccctataatcctacaaaggggaaatgacttgcagtcaaccttgagggagggacttggaggctctacaatgaaattggggtgtatgagattcagacaatgaggaccaatgaaccactccacactcggagtactttctgttgggttttatgccctaaataaaactttgtttcaatg

SEQ ID NO: 355003 - DNA, 546 bp, Cannabis indica
ggtgtcacagttgtgtgtaggtcgagatggatataagaaattgttatattttgataaaaggtttttctagcggagttgcaaagttgaagagttacgtcagaaggtgtcacttatagggtcaaagatgtgttgtgcctatgatctttatcgttttcatgacgacggttgcaagtctgatggtatgttattgacaacatcgattgcattatttgaagattcggtgaattcgaaattatgtagtcatatatatggacccttctacaaaaaatgttgaattattgaaattggtagaagatattgtaggatttagcagtagtaatcttgatgtttcgattatacctaatgtgaaagatgaaaaaataatagtaaataaggtagatgaaaaaagtttgaatgttagttatggtaaaaagtattgcattggtgatgacaatgttcagtttgaaaacagtgggaaaattaaagaagtgtcatttgaaaaggaatcatcaatattggatgaatggaattgtttcgagacgaatgatggagactatatgaaagggg

SEQ ID NO: 355004 - DNA, 538 bp, Cannabis indica
tatcatctcttctccctgagccttgtactctccaggctagttttacaccggaaatcaaagcttcatattttcggcctcgttattggatgctttaaatccaaacttgactgcgtcatgcaggtgttgccccccaggtgtgacaagggaaattcctgcaccggatagttgatctgtagccgacttgtccacatgtactttccaagttgtcttgtcttgactgttacttggctgaggtatttgtactggctcggggttgccttccgatatgctttcttccttgcctgtgctttctactacaaagtctgctaaggtgtagcctttgattgttgttctaggttgaaaagtaatttcatactgacccagttctaccgcccacttgagtaactgtccagaggcgactggcttttgtaatatttggcataatggttggtctatgtacacccgaacaggatgagcttgaaaatattgccttaactttcttgttggtagaatcaggcagtacgtgagtttctctatcaatgggtatcggccttcggcc

SEQ ID NO: 355005 - DNA, 553 bp, Cannabis indica
tgagtttgttacatcataattaattaactaacattctatatgttaaaagaagcaatctcactctgtatagaaacaaaattttcaaaatagaacttttcaaacaaacaccttaatagtgttcataaacaattgcatcaatcaaatagatgtttaagaccaattacatcaatcaaaaatgaaaaaaaaaaactcaaaatgattgggaagtttttctttttcataattaagccatgggagaaaacaatttaagcacaagaaatgaggtttttataaaaaaaaatgttttcaagctttcaaaatagaaataaacggcctctgatatgaattaaataagctgtaataaataataatgaatctaaggtaacactttgaactatataaatataattagtgggaattgcagaataaagtgttgttagagattttattacaatggaagaaaatcaagacattataactctattgcaatataatacaaggatcaacaaagagattaaataaatgttacaatacataatatataatatatatacatacattatatatattatat

SEQ ID NO: 355006 - DNA, 758 bp, Cannabis indica
gtaaaatatttccaacagtttcaacattccatgttctatcggaggcccgattgaactaaaagtcttgagtgatttaggggctactatgaatcttatgactccattcataatttaaaaggtgaaattaggagaagctcatcatgcaactatctccttacaaatggcaaaccaatcaatcaaagaatctcggaaaataattgaggatgtcttggtaaattcatctgccttgctaattttgttattcttagtagggaagaagatgcaaacatcttaattattctatggaggccaattttaggcaccaacagagtgctattcaatgtgctaaagggagaattgaaattgcgattacaaaatgaagagataacatttattttttataacaactagtgttccaacttgttgtagaattgatacggtctataatgatgatgagttgaaagtcaccaatagaaagtacaatgttaaaatcgatagtctgacaattcaccattatttagaatggctcactactacaacaatagtttttcctgacatttgtaaacagtcgtttaaagtattcccgtcggttaaaatatgcgacggttaaaaaccgtcgctaatgtggacttcccgacggtttaaaactgtcgcttatagtatagggtacggtttaacactgttgcctataccctgttttaggcgacagtttaaaaccgttgggaatgtaaaagaaaaagagaaaaaaaaatacatatttttctgccattaatggtaga

SEQ ID NO: 355007 - DNA, 559 bp, Cannabis indica
ctacagaattgtaactttcattttcttgtttttttttcagagacctccacagctaatagttgcaatcttaaagcattacacaggccgtgtcacttggcccggcgaaagttattactacccaaagattaaggccaaaattgaggaattcagattatgggatagggtaaatcaatcccctttcaaacagttcttcgagagagaaccattacaatttttgggggcattgatccatcaattaatgttgcacaagaccaaatctgacaagccagacgatgtaaacttttacttcgcaaagaagagatgcagattcggtacggtggagtttggtttggtgaccgggttaagcttgttgtccagacctactgaacaagaaattgaagagaaaggaagtttgaactggttgattatagagtatttcaacggtaatccttccatcagctttggccaactacacagagtttttgagagctgcacagaagttgatgatgtctacaagttggggatgaccttgtttgttatcggcgtcttgttgggttttatgccctaaataaaactcttt

SEQ ID NO: 355008 - DNA, 545 bp, Cannabis indica
cttaaattgttgcaagtattcatctatttttcattaattttttcatgatttttcttttgaaaatacttacaacttacaaatatttattctaaggaaaaaaataattttctttcatcacgtatacataaccatcaatatttttccctcaagaaaactctcacacttttacaaatacataaaacatcaatactatggtgtgaaaaagaatgaacaagagattttttttaagctcaaaagttattgtatagggttaaatagaaaaaataaggtttcaacatttaggctcaaatcgggtaacaagggaatcgacaaatacggtaggcttgaaaagctcaatcgatccaaaaaaaattgcctgcatcacatcttaaaatcatgtgtaatttattgatttcgcctcaaatgattatcatacaagttctagagtggttgagattttaaatcaaaagtcaaacatgcattcatctttccaaacattagcaaatatgataattcaactgatgtccaaaagttttaaaaaaaatcaagcttgagcagtaattaat

SEQ ID NO: 355009 - DNA, 495 bp, Cannabis indica
gtagctagtatggttcaaatttcacctcagttagcagaagatatggtcagatcaagcatcgagtttgttgtaggaaaacttcatacttgaccctgcagtctgatctattctaacgtattaaagctgctcagctaactgatccagagttagtaaagatcagagaagaggtttcagttggtcaggccaaagattttatagtgtcagatagtggaatgctgttgttcaagaaaagggtttgtgttccttgaagtgcggaacttagaaatgaaattctcgaagaggctcataccactccatatcccctgcatcctggcaccaccaagatgtatcaagatcttaaaccctacttctgctggagtggaatgaagaagaatgtggtacaattcgtatggagaatgcctaacctgtcagcagatcaaggctgaacatcagagatcagcaaggttgttgcagcctttaaccttacctgagtgaaagtgggaagatatcacaatg

SEQ ID NO: 355010 - DNA, 542 bp, Cannabis indica
agagtttaataaaatctccggaattgagaaattataactctaatatttatttctaaatattggggtccacaattaaattaattcacaaataataataaaataataaaaattagtgctaattgcctttactaatccaaattattagagcggtcattaaggaacaggctcagaaagaggcagctaaggcgaaaagagatgccctcctggccccgatcacttgccaacactgtaaaaagcgctttgacgatggagtcttcatggcctggcagaccaatggccagaacattaacctcgacttttatcccaagcctgaagaggttcttgttcgcttctgggagaagaagaaaaggctagatgcagtgttggaggagcgcaggggtcctcgtcttccacctcgagctggctgaaccacttgtctatcaccattgttattattatcctcttttttttgttgttacatattcaatccttccccctgcttctaagacaattcatttctttttcttaaggggagacatttatggccagtccctaggcctttt

SEQ ID NO: 355011 - DNA, 924 bp, Cannabis indica
ggaccaacctgaacccagacccagaccgagatctagaattggacccaaacccagacctagacttggaccaggattcataccccaacccagacccagaccgaaacccgaacctagacactgaatcgaaattgaaactgggagaaggacccacacctgaatggccccagatcaggacctaggacctggacctacatttgggacctagacttgggcctcgaaacctagacccaaatcggaactcgggactcggacccgagcctggaccgagaatcaaacccagatctggatacataccgagatcggaacccaaacccagactcggacaaggacttgaaccccgactcgatcctgaacttgaacctggacgtaggactcggacctggatgggggaccgggcataaaaattgggaccgagacccgacctcagattcggactctaacctaggacccggactaggacctgggacccaaagtcgaactagactgagaccttcacctcatggcttggaactgactcgtagtaagtctttggatttgggacccatacccggactcaaacccagacccggactcagaccctgaccaaaacccatacccgtaccccagacttggctccgagtccaaggcttggtttgagtctaggaactagaatctgactaggacccaaaactagagccggacgagatgcggacccgaattacaacttgaatcaggactcgggacacgaacccaaacccagacatgggcttcgacaaagacctggacccaggacctggacatggattggagactcagacctggacccatgacctagacctagattggggtcccaaactaaaaattagaacaagaatcgagacctaggactgggagagtgacccaagccccaaccccggtctcagtcccaaaccttgaccaggacat

SEQ ID NO: 355012 - DNA, 425 bp, Cannabis indica
atctaacaaggttagttaggctcaatcttcaaagaacaagggctttagtttccatacctcattgtaagcaactgggtcttatcaacttgtgttttgctgatgatcttctgattttttgcaaggtaaacattagctcggttaagggagtgcaagaggcgtttattaagttttgtgactcctctggtctctccattaacaataccaaatcgcacatctattttggaggagtgaaggaagagtccaagatccaaattctgaggttagttcaaatgcaagagggttcccttaaaagatctaggggttcatcttagacctactagatggaaagcttttgattgtggggttactttggatagcctaaacagaaaattgagttgctgggcagtaggaatcttcttttgcagggagagttcaactaatccatt

SEQ ID NO: 355013 - DNA, 967 bp, Cannabis indica
ccccctcattcggtttcttgaattgagagggaacaaaagttttgtcttgagcgtatttccattgattaagattacctccagctaatgccaatatataacgagaagtcctagaattacctttccaaacttggtcattgcgggcttgccaaatagcccagcagagcatcacggctaacctcagattatcatcattccatcgagcagctgctgcaacaaaccagttgccaaaggtctgatctgcaacaactccggacgccaaaccagcagcaaaccagcaggtatacgcccgaggacatgagagcagagcatgaaaagcagtttctgctgcattttgacacctcgggcaggttctttgtacactcacatgtcgagaaataagttgcactcttgtaggtaagcagtttgtcaaggctctccaaacaagattaagtgcttttggaggcactttaatcttccaaaaccgctgccagaaacaggtatcaacatcggcaatgctttcatttttctgatcttgctgaaacttataagcagagctaacagtatactcccccgatttatcaaagccccagtgccatttatccataccagcagaataaaacaaaggtatgcttaatattttttcagcatctctaatattgaaaacatcccttacaatctcttcatcccatttcctatctcccataaccattaatgaatcaacatttttgttaataatggattgactcaccgtggttacataaggattagaactgtccggaagccatggatctttcattatactcactcccgtaccaggtcctatagcaacacgagtgcccaatttaaccaaatgcttagcttctaataaactcctccaaataaagcttggattagaaccaatctcagcatccaagaacgatccagaaggatagtacctagccttaaacactcgggctgccagcgagtgaggacaaaccagcagcctcca

SEQ ID NO: 355014 - DNA, 575 bp, Cannabis indica
gtttaatttataactttttttcaaataattttatatttttattaaatttttaattatttttctttatttattaagatatgagtttataaatataaatgagtgattttttcttcaataatttaattttttttaagtaaaattaatatttttgtgacttttttaataatttttattatttttttaaaattaatagaatattacaattgcttaaaaaatagaatattataatttttaaaattatttttttagtaaagggggaaattttttatattagtcaaagtttatgggataaaaatgttaattcttaacgataaagataatagaatctaacagagaagggacataattatgtaactgttatattttagggagaatttttatcaagtcgtgcattttaggaaataaaattaggtagtgccgaaagttcagaggccaaaaatactaattattcttataaaaaaattatgggataaaattgttaattattcttttttatataaacgtgttgggtcaggtcaggtcaacccgtttataaattagttgggtttgagttttagtttttgacacgattaata

SEQ ID NO: 355015 - DNA, 559 bp, Cannabis indica
atgggacacacttgtctgttgattttgaaacgattctgctgagcgcggcgatccgaccagttaagctttgcacttctttggtttttgttggtgagttcatatccaggagggcttgaatcttctctggattagcttcatttcctcgggcattgatgatgaagcctagaaactttcccgagcttactccaaaggaacactttaagggattaagtttcatattgtattttctgaggactttgaagcatttgtccaggtcgtctatgtgcccctcagcctttacgaatttgacgagcatatcatccacgtacacttccatatttcgcctgatctggtctttaaacattttttttaccgatctttggtacgtaactccaacattttttggactaatcagaattactttgtagaaatatagacccatatctattcagaagcttgtatgttctttgtctagtggattcattttgatttgattctagcccgagtaagaatccatgaagcttaatattacgtgccctgctgttgcatctacgagttgattgattcttggaagtggaaa

SEQ ID NO: 355016 - DNA, 632 bp, Cannabis indica
ctccgccctcaaggtgtcagacagagccgcactcttggaagtagcagatttagcccgggagtaggtgtaagccaacttcaaaccggcctgcataaaggaaaaagtcagcatatggagctaagtgggaaaagttaaaaggggaagtataaaaaaagactaaccctgaggagctccttcaaagctccgcccaccaacacatccagagatgagtcgtcagaaccagccagttgctcaccaacctcaggaaccagccggttcatgtagtgagcgatcacctccttgcccttcttggcctcaggcatcacgggcacgggtggaattggtgcctgcacccgctcaggaatcctcttgaccagtcggacctagttgttggtagcccaacctccttagacttggcagatttgggagtggaaggattcgcagtagtcagctgctcagaaaggtcaataacctctctagaaggcctcttctctgaagactcctctccgcccttagacttcttgcccagaagggaggcgctacaacttccgcccatcctcttcctcagagcgtcaatcatctaccgagacatgtctgcacagaacaaaaacagcgtggttagcacaaaccagtagaaaatacaaagcatgaaa

SEQ ID NO: 355017 - DNA, 593 bp, Cannabis indica
cctttcagaaagggttgggtggtggcggctgatcatatggataaaaccgaggaggtggcgccaagtaatttgggtcatcaatcccggtgttcattttgttgatgagagagttgacttggtgaacttgtccctcatcatctatactcctctgcaccatatagttttgcatgtggttgttctgctgaattatataactcagctgggcatgcgtatattgcatcgctggatcgatagggccaagcagctgtgggggctgttcctcttatttttcgacactaggctctctttgccgccttcggccttgctgtgcatcaggtggaggctggccataaggatgtatcttttttagcctgttgacaaatgtgatgtccacctttcgaagtggcagcacattgttatcatactctagttgtggcacatcatatgcccccgcagagttcagttatcacacctgccaaaccaagaccaccacccgtggctccttgaacaatttgctcaatgctgttctgatgacttgtccaatattaatgttgtaccccttcataatggcgtcacatattaaggtgatccatttggacatctgaaaaagtgtt

SEQ ID NO: 355018 - DNA, 718 bp, Cannabis indica
aactgacggtaataaccagccaaacccaagaaacttctaacctctgtaactattttccatctcagccaatccctaacggattcaatcttcatcgaacccactttgattccatccttactgaaaatgtgtctaagaaaagacacctgagttagccaaaactcgcacttcttgaatttggcatacaacttaggttctcgaagccgctgtagaacaatccagagatgttgttcgtgctcctcttctgattgagaatgcacaaggatgttgtcgataaaaataatcacacaaatatcgagcaaatccttgaataccatattcatcagatccataaaacccacaggagcattggttagtccaaaagacataaccaaaaattcatagtgcccatacgtagtgtggaaagtcgtctttggaatgtcctcctctcggattctcaattgatgataggctgatgggagatcaatctttgaaaagaccgtcttcccctatagctgatcgaaaagatcatcgatccaaggtaaaagaaacttgttcttgactatcagtttattcaagttctggtagtcaatacacatatgcaaagatccatctttcttcttgaaaaataatacgggagctccccagggtgacacactaggctgtgaaaacccgaggtcaagcaacccctgaagctaaatttttaattccttaagttttactggagccattctataagggg

SEQ ID NO: 355019 - DNA, 623 bp, Cannabis indica
cggaccacgactctagcctcaaatttgaatctagacctgacttaaataaaatcaaaaaataaaaaaggatttttacaaaactattggattttgagcaaaagtttacaattttactgtcacacagaattttttacaaaactactgtctttttataaaacaaccgtaaaataacaaaacggaataattaaaaaaaacagtaaaacaactggagaataatagtgaaaacttaacacaatacattgtataaacttacacagtatttttgaaaaaacacagtacaaaagaaaagaagttagaaatttaagtatgtagtacgtaaaaactcctttaaaatataatgtgtgtttaaatgtcaagtagtaattgtatatgaattcttatttttatatttggcaaatgagttagtaattcttttttcaaaaaaaaaattagtaattacttagtttaataatattaattatcttaaaatagtaaattatttaattacacccaatttttatgagatcataagaattagagagagtaatattgagacctctcaattattttcaattacataattactgtgtaattacctagtcgaataaacacgttaaaccttataattattccgaattacactc

SEQ ID NO: 355020 - DNA, 663 bp, Cannabis indica
atttacttcgaacagatctcctaggtgcaacggaagttggcgagaggaggaaaattttgcatggaactccgaggagaaagcctttcatgagttgaactttccgggcgccaacttgaaataccattgctgggcggcttctgagagggtggcaggaaaacttctgcagcatacatctcctcgtactccttgcagatccatttgtatctcgaaatacttaaggtatgataatagatcttccttaccagtatacatcttccaggttggcatcttaaacttgtggggcaactccaggatattgatttcagggggagaaaaggggttccacttgctcggtccaactcgagatcgttgttcctctgaccggccatgccttggaacatactttttagttcgtccaggtgtgcctgcacggctgaactaacctgtttggcattttggacgatctgagtcacatcagtatctttctgagcgggaacttgagcgcgtgttccgggctgcacgatcagcgtatcaagttgattgtctactcctctcctcctattcagatcgtttctgagatcatgagtcgtccccaacctatcaaatacggaaacgcctggctgtctcagtgactggttggtttggctaatgtgctaaccggcaccattaacctggttggaatta

SEQ ID NO: 355021 - DNA, 716 bp, Cannabis indica
gtgtaaatagtatgtaaatgcaaacctacatacacaaattacattcctaagtatatttgaaaagattatagcaatagcacttcttactattgtaacttgtcctaattaactggaaatataaatattatagagagatagagaggtcttccaaccttgaagttcccaagaggcttccaaggccactcggaaaggatcccaggattagaagccataatgcaagcactgtataaagtaatacgatatatagtctttaatactatcttttacgtttcttattctatttgatgaaaccaacatgtgacgttcttgctcccacgccagtgccttatatagagaatttcaagagtgccatttcattactttgacgcgcgtggcaacaaccaacccgtctcacaatatcttttcacaccacttttttacagagtaatgttattctgttcattttagggccgttgagtaagtaaatattttattgtactagttgaagagaagtttactagtgagatagtcacgtattttgtcgtatttagtaagtacttaattcaaattcagaaagagtcacgcgcatgtgatataaatttattgtatctctaaatttgggctggattttttgacaccgcacaaaatcggcacgagtttgggtggcacgagcacgactaggcacaaaaaaatatagatttaggtacgacacagcatgaaaaatatgggcttaagta

SEQ ID NO: 355022 - DNA, 550 bp, Cannabis indica
cgtatattatctatgatcatatatattctatatcttccagagtatgtgttgacttctaaattatggaggagaggtttgtggaacatcaatatttatccaacttatttaattactaatgcatgtatagatacaatattgttaatacaaaagtttaaaattttaagtagatatgaacataacacattattgataatataaaattttatttgcgagaatcactactacaatttgatcttttagtgacactctttagtgactcgcacaaaagtgcgtgtcactatagtgctaaagagttaggagtgatttttagtgacacgcataatgagactctaaatttttagtgttggtctcatgtaatgtgtgtcactaacactatgaaaggtcactaacggtttttacaaaaaaaaaaaaaattgctgacctatagagtcaagccaggagggattgcaaaagcgtgtcctgacatgcctggcgtgccactatatcataataatatatttaattattaaataaatttaagattaaggtatagtgacgcgctaggcgtgtt

SEQ ID NO: 355023 - DNA, 1298 bp, Cannabis indica
aggatagggacctgggaaacagaactaggaccgggacctagtaccagaccaagacccgaatttgaacctaggacccaactcgtgacacggcaccagaatttgaacaagttttggacccgagattgggaaccgaatctggacccaaggcttggaccaaacccgtagtcggtgtctggatttgggacccagccttagacatgaaccgtgacaaggaaccgaacccacacccagacctgaacccaatcccaaacccaaaagtgtatttgaacccgtaccttgtgacccaaatttggaaccaaaattggaagttgaacaggactagaactaggacttagacttggaatgataactgaaattggacaaagatccagaacagaataggaccaggacccggactcaaaataagacttagacgtgaattcagatccagacccggatcccaatccaaacctggactcgggacctgaacccgaacctgaactcagacctaaacatggaactagactagggacacagaaccagggtcgtgtcctagacccaaaccacagtctcgattccgaacccaaactcagaaatgggacctgggacctgaaccagaaccagaccgagacccgtgacagtgatccagatcatgactcgggattcggttaacggggccttgaagagaccagtagtcggtgtctagatttggtactcagactagggccagaacctagacgaagaaccaaacccgaaccctaacctagaattgcgacccaaaattagaacctgaacaagagtcgctgaaccaggaccctagaacaagactaggactgtgaccaggacaacgacccaaactaagaaccgaacacagacctagcctcggatccaaactgagactggaactcgagcccgcacacggtcatgtacttagaacagaactgagacccgaaccctaaatctgggacacgataaggatccggatacgaacctagactcggaccaagacctagactgggatcaaaatgctggacatagatctggaccgagatcctgacccagacaaaaacttggacccgcactcgaaacccaaacttggacttggacccgaacctagacccagatcggggtacaaacctggacacaaacccggatagagacacggacacgaactcaaacccacacctagaatcagacccaaagctagacccggacccggacccaaacaagaacccatatcaggataagaaccaaggacttagacccatgaatgaatccagactcagatcgggtttggaactttggacttggacccaacc

SEQ ID NO: 355024 - DNA, 600 bp, Cannabis indica
atactgagatattctcaccagtggtaaagcacacatcaattcgaatgctattagctttgacagctatagatgacttagaattggagcaaatggatgtaaaaacagcctttttgcatggagaattagatgaggaaattcacatgaagcagcctgagggttatgaagtaaaagggaaggaagactatgtctgtctactcaagaaatcactctatggtctcaagcaatctcctagacaatggtataaaagatttgatgaatatatcaccaaatctggttttaagaaaagtgtctatgattgctgtgtatatgtcaagagtgcaggtgttagatctgtggtgtttctcttgctattgtggatgacatgctaatagcaagcaagagcagtgaagagattaagaaagtaaaagggttgctgagttctgagtttgatatgaaagatcttggcccagccaagaaaattcttgggattgaaatactaagagatagaaataataagagtctaattctatctcaaagtgactatatctcaaaagtgttgcatcgatttgggttttctgatgctaaacctgtcagtgcacccttggcacaacacttcaaact

SEQ ID NO: 355025 - DNA, 632 bp, Cannabis indica
aactctaactcatgcaataatcatagctacagatttcgaaatttaccccttgaaaactaaactttgagctaaaacttctaaatctttaaatcaaagcaattatcatgcattactagcagctcaattcaactcaaataaacatgtataaatctcagcaaacaacaacaaaaatcacagcaacaacaacaacctaaactaagcatgcattacacttattttcatcaaaattcaacaaactttaagaagaaatgattagaagctaacctagcttgatttgaacaccaaagagaattgaaatcacaaggaaaaatccaaagttccttgctgcaccaagaggctgaaaaggagaggaaaagagagagagcttttgagaaattttctaattttttctttctaagtttggaaaaatgagaataaaagccatataactctttttccttcagccaaacaaataacatattaaacacatatttcacaattattaagtccactaaaggacaaaacatcattggggcaaaatgaccattttgcccctccacactaaaataacataaataacactaaagggggttttttgagaatttctaaattccggccattcccgacattcccaatgtctaataaaccgtccc

SEQ ID NO: 355026 - DNA, 789 bp, Cannabis indica
atttgctatcctgctactaccagagcttagatcgctaggtttcagattaaaaatataagaaaatggatatagagagagaaagttttattgaagagggaagaacgagggttcgttcgttcgttctttactgttattaatgttatatatgttaaacttaatatatatatataaaatatacatacgaaagtttcaatttacattatataataataatataatataatattaataataataaaataataatattaataaaatttttattattaatagttatcttatatttcttagccattaagaaatctttacttttagggtatttggtcaacttcgagtaccctaaaatacctcggtaatctaaaaacaacttatcttaataatcttatcaatatttttaactaaaaccgatgtgacaattttggcctccaatcgagtctctagggtcaccgaacctgaaaatatttttatttcacaaataactcatattatatccacgtattttaaataaatctctgtaattaataaattatgcttatttatccacttatcgggtcttcaaggtcgccaaacctaaaaatatttctattccacatatagctcatattacattcacacatgctttataaatctccgtaatttataaattacgcttatttactcacttataacaaaatttaaattttatgttgaaatagattagtaggatcataatcccacttattacatgattaacacataatataaatataaacactaattatttaccattagacttatcggaatattgca

SEQ ID NO: 355027 - DNA, 525 bp, Cannabis indica
atcctggtaaaacaaattccaacaaaacggtcgagcttcgtcgtatattctgttacagacatactttctccctgaaccaaattagtgaactctttttgtatagtattgcgcagtccatcatgataatacttgtcattgaacaatccccgaaactcttcccaggtcattgtagtgacgtctcgggtgagggatactaactcccaccatacactactacaatttgcctttttagtgacacacataaaagtacatgtcactaaagagtcaagagtgattttaagtgacatgcacaattagactctaaaaattcagtgttagtctcttataatgtgagtcactaaaaatatgaagtgtcactaaagactaaatcccaaaattttctcatttttattaatataaaaaatatagacatatagtgacacgccatgtgcgaatggaaaatatatccccactcatttagcgtgtcactatatcataacttaatttttttataaaaaaagtacataattaataagtaaacaaaaa

SEQ ID NO: 355028 - DNA, 734 bp, Cannabis indica
ttttgtttaagtgtagaactttttgatgaacttcccattaacacacggataaatgcgtcggccttctgaatttgaaagttcatatgcccctcttaggaagaccttagtaacaacataaggtccttcccattttgcctcaaatttgcctttcatccttctagttatgacaattggtcgtttcacagtaagcactagatctccaaccgaaaaagatcgaaatttaactttcttgttgaatgccccagctacctgggcttggtaaatttcgagcttttgttgaatagcaagccgcttttcatctaatgcttcaagctcggctagacggacttgcacattttcatctgggtttgttagttgagtagcaattcttaatgaaggtatttgtacctccaaaggtaacactgcctcagacccaaacaccaagttataaggtgtacaaccagtcgcagtcctcacagtggttctataagcccacaaagcttctaggaggcgttcatgccaatccctcttattctttgttgcggttttcttcatgattttgcataacactttgttaaatgcttctgcttgaccatttgaagacgggttgtaactagctgagaaactgtgcttgaatttgtacttgttcatcaacttgaccattgccttacatttgaaataaagggcattgtcggagataatttttgaaggaaccccgtatcgataaattatgtgggtccttataaaatcagcga

SEQ ID NO: 355029 - DNA, 596 bp, Cannabis indica
taagagccattcattccgtgggtgtaaggacctaatggaggcttgaagcggggacgttacagtattagtgcttaactcgctggggttgttgattacagggttactaataatggaccctccgcaatcatccagaccacaaggtgagcaagtagagcccggggctgcctgaaccaatccaccgacaccgcctccacctccgcaaaatccgggggataacgcgggggttggtaatgctaatcctcctgctgattggcagcagatgtttcatgaaatgtgaagtatcatacttcgtcaagaagaagagttgcaacgtttaaggcaaccggctgccccagttgatcaagggttaccaccagcacctgtgccagtggtgggtaactaggggtttattatgccgcaccgagattctatgttcgagcggtttgtgaagctgcaacctccgacttttctgggaggtattgacattataaaggctgagcagtggatgagcactgttacctgtatcctcgacaatatgggggtgacgggaactgagagagcgaattgtgcaaaccttcatgttacaagaccatgcccgcgtctggtggggacatagt

SEQ ID NO: 355030 - DNA, 639 bp, Cannabis indica
aactgaaacgaaaattcaaccagaaagagaactaccattaatttcagcgacttcacctcagaagacgacgagaatcaatcaaaacagggactgtttcaaattcatgaagaaaaaaaaagtgtagaacaactattacgaaactaaagtcaactagaaatccagtttaatttgcataaaactaatatcctgacttcaattttcaaattcatgaaatgcatatctcaagattttgaattggagttcttaaacaatctaactcaagtataatccaaaaaaaaaattacatcaatactatagtaaaatatttatgatgggtgtatttttgttgttttctaaatttttattggagaatttgttcatattaaattatgaagagacatgtagatagagttatgtacgtaaaaatactgttttgatttttaatgtttcgtaattgcattacagttgcacaaacattttgctaacaattatttcgactgattgaaaccattctcttatgcaaccttcggccaaccacccaacaaccttcgtctgatgcaatcttcggccaatcacccagcaattatcgtctgattgagtaagtgatagtgtaaaaaagtattttggtaattaaaagtacataaaagatataaatgttgt

SEQ ID NO: 355031 - DNA, 1280 bp, Cannabis indica
gaggttgttctaacaggcagaaaatgagcagacttcgtgaatcgatccaccacaacccagatggagtcgaacaaacctgtggttctaggtaacccaaccacgaagtccatcgtgatatcctcccacttccattcaggtagggttaaaggctgtaacaaccctgctggtctctgatgttcagccttaatctgctgacaggttaggcatctcgatacgaattctaccaaattcttcttcataccgctccaccagaagtagggtttaagatcctgatacatcttggtggtgccgggatgtagggaataaggggtagaatgagcctcttcgaagatttcattcctgagttccacactatccggaacacaaaccctagctttatacaatagcatcccgttgtctgacactgaaaaatccctggcttgaccagctgaaacctcttctctgacttttactaactctggatcagtcatctgagcgactttaattctttctaacagatcagattgcagcgtcaagttgtgaagcttgcctaccacaaactcaatgctagatctgaccatgtcctctgctaactgaggtgagatctgaatcatgctagctacctgcccgggacccttcctgctcagggcatcggccactacattggccttcccggggtgatagagaatctcacaatcgtaatcctttactaactccaaccaacgcctctgtctcatattcaaatctttctgagtaaagaagtatttgagacttttgtggtcggtatagatttcacacttttccccataaaggtaatgccgccagatcttcaacgcaaaaactactgcagccaattctaagtcatgagtcgggtatcgctgttcataatcctttaactgacgggaggcataagcgataacccgatctgcttgcattagtacacgccccagaccctatctggatgtatcacaataaaccacaaacttctctttatcagaaggcaaagctagcactggagctgtaatcaacctctgtttcagctcttgaaagctagcctcatatttatctgaccacacaaattgttgattcttcttcgtaagctcggttaagggtgttgagatcttagaaaacccttccacaaaccgacgataataaccggctaaacctaagaagcttctaatttctgtcactgtcttcggtcttggccaatccctgacggattctattttccctggatccaccttgatcccatcttggctaacaatgtgtcctaagaaagaaacctgagatagccaaaattc

SEQ ID NO: 355032 - DNA, 598 bp, Cannabis indica
cccactcttggtcctcgtcggttaaagatcgatctctgtcgtcggtcgaagatcgatctctgtgcacctcgctcccctaggggaggaagtgttgtaccctggctggccatgggtactcctactgatggctaaccgaccagtggctgtatagtgggggttgctgttgcgccagggattcttggctggcccaccaagctgctgattgccgagatctatctgttctcgtcgtttgacctttgagtaaaggtctatcctccctctgaaagaggaagatctatcctagttcccgaggaacctgacagtagtcttccttgaactggatccctaattaaggagatactgacctctttagttagatctctgattgaactattttattagattgttggcctcccaattgcggcgatctaattcttcttggtgagatcaaaggatgtactcctagtcatatccatccatcttaggaattcgcgtctctgctgagcgaatacatcgcaattagcagcgcgtggttctttagttaggcctgtacgacctacagcttccctgagtctggccaactcaaagtcttctcctaggtccaggtgaggctcgccaa

SEQ ID NO: 355033 - DNA, 570 bp, Cannabis indica
catgtcaaaagacaagacattcaaaatgtgatctaactaattccttcactattttaattttgttaaatgaccaatacatatgtttgaactagtttgatgttacgtgtaatgcacatatatagtaatgtttaattaaataatgttaaaatgcaatatacatatcaaattttttttaattaggtaatatatttttattttttaatttttgaaataagatttgagattttgatctttgagaattatttttagctattgcgcttgcattgatgtactctttagatgtaattatatatatacatattttatatatacaataaaagaataaatttcattgttatacgtattttatattaatttatatatataaggattatattataaaatatttttgacaaaatttgaatttgatttaaagaattaattactttcaaaatatattatatatataaatataaacatatattttttttaaaaaaattaatagtgatagatacaatattcttaatttgtaattaggagagtgtggttacaataagtagtacaaattattagatgtatacatatatcatt

SEQ ID NO: 355034 - DNA, 525 bp, Cannabis indica
tttttcggctattacactataatcaataacgctagtgacaaccactttatgtggaatcacatcaatcaaaaggggataaaagattatatccacctaactcctaagatactgatggtctaggtcatgtatttcctattttgtatttgttgggaatatgtgcccatatgaagctaacacagaaagacaagtgatccattcctagggatcaccccaaaaaacactataaataccccacaaacagactgaaaaggggcgaaacatttattctgggtttaaaggaatcaaagagagaaaatacgggagaaatccaccaagaacattctctgtaataaatactcttattaataaaaagactcgtggactaaggctcattaatgccccaaccacgtaaaaatcacatgcattaaactttctacaactcttcttatataattaggaaaattacacttaatatgggattttaaaagctcttatgataaatatggcacatttaattttgaccaatttatatgacatttttttgtt

SEQ ID NO: 355035 - DNA, 770 bp, Cannabis indica
tgagaggcttttcaagttgaagtcaacattcaactgtcttgctgcagttcgcttggaagtggagaacaagagaataaaaaaccatgctgtggagaagtggctggacgatcttttggatgctgttgatgatgctgagaacttctttggcgatattgaatacgatgctatgaaacccaacaaagtaaatgaatcaaagaaagagaaaagaaaggctcttagtaagttactctcttgtttctctaaaccttcttctcattcaactgatcgtgcaaggaatgcaaatatggaggagattcttaagaggttggagtacttagccaatcagattggaaacttgcatcttgaaaagaatgttgttgaggtgaaaccatcaaaaagttcacgtgcgaaaacttcattgcccgatgaacctgaaatttacggtagagatgctgataaggatgtcttaatgaagttgttgatgttggatgaaaatagtggtgagaagatatgtgttattcccatagtgggaatgggtgggattgggaaaactaccgttgctcaaactcttttcaatgatgaacgagtgaagaagaagtttgaatgtagagcctgggtgtatgtttcagataaatttgattccatggcagtcacaaaaactctccttcaagaattagcaccgactggtgctagtaatgacatgaatttgaatttacttcaagttaatttgtcaaataagctaatgggaaagaagtttttgattgtcttagacgatgtttgggaagatgatt

SEQ ID NO: 355036 - DNA, 535 bp, Cannabis indica
atacgtcattgtggcctggaaatgcgtgaggaataagtcgacgaaggtttcccatgtcgatatcgatgcctcaggtaattgggtgaacaaatcatgagcattttcctcgagtgttgccgcaaggatgcggcatttcgtgagttgcggtacctggtctacttccattatagtattgaatttttctaagtaatctatcgggttagaagtacctctatatttgagggattcggataaacgaaaccctttctgaagttgagcctgtcgcacctttgcagtaaaaggcgaggtgccatgcagcttgtatataggcttgcgctgctgctcgagcatcttcaaagctttcagaagcatgctttggtcaattcctcctgtcgcaggggctggagtcgctgcgactgcggggctagcaaccactgcggcaaggtttgctgggatattaatcccagtagtcgcgatcggcgcgataggcaggttattacctgcgttgacaccctgatcgcccgcgatggggatcacggagcgtctcagtgttatg

SEQ ID NO: 355037 - DNA, 683 bp, Cannabis indica
taaattggatccaaaacataggctaaaaatagcctaacacctgcatggggcagtcaaatttaggttcagagcctccaataatgaagcatagtacgaagccctcattgttgatctaaaactttcttgggaactatatgctgaacacatcgagatctgtagtgactcatagttggtagtaaatcatgtgtctagagagtacgaggcccggggggaaaatgatagcctatctaagcaaaatacatgacctgcttgcacaattcaagagctacgtcctcaagcaaattctaagagaagaaatcaagacacatgctcttgggttcaccaaggtaatcaaaatttccttcaggattagccttccaaaaatcgtagaaaacctcaagagaaactgtctctagggtctccacctccttctcgagctcctcctccctggtctgcttgttcctgacctccttctcgagttcttcctccctggtctatttattcttgacatcctcctccagtttggaaagaaaagtccggcgactctccctctcatccttgagattattgacctccttggacaagaaaacattatcaacctctagttgcttggtcgaaggcatatcttccagctctttggtcagctcctcaatcttggtgttagcagcaagaagcttcttgttcacctccccaagctcattcct

SEQ ID NO: 355038 - DNA, 512 bp, Cannabis indica
aattagaacctcaaaatccaatccaatccaatccaattactaattggattggatcggttttttaattggatatccaattacacacctaaatttcaatattagcttaaaaatataaagaaaaatacgtaaaaaactaagtatcactttttatttaagtttaatacttcataaatatactattcttacaagtgtattgtagctaaaagttttaaataattaaaacaataacatttctaagtaataaaatagaacaaaacatcatgaaaataaatacactaaacaatcaagtgttacaaattcaacatacaaaaaaatctaataaaaatataataaatatttattatatttttcaatattttttattatataaataattttttaatatatataaatgtaattggattggatcggtttttaattggattttgagattgacatccaataaccgatccaatccaattagaatccaacttttaacatccaatccaatccaattgtaattggatatccaa

SEQ ID NO: 355039 - DNA, 621 bp, Cannabis indica
cttcctggaattttgttattgtctttattgatgatattctaatctattcagactcagaagagactcacgaaagacatctttggatggtgctacaacatctcagggagcataaattttatgccaagttcaagaaatgtgaaatttggttgcctcaagtgagtttcttggggcatgtggtaagtaaagatggtattctagtagatccggtaaagattgaagtggtacaagactggcctcgacctaaattggcaactgaagtcagaagtttcttgggtttggtagggaattgtaggaggtttgttgagggctttgccaagatttctatgcccttaacagaattgaccagaaagaactgcaactttgtttggactgataagtgtgaaagtagtttccacgaactgaaacaaagattgattaccactcctgtattaaccttaccagtaagtgatgaaaagtttgtgatatactgtgatgcatccaaacaggggttaggttgtgttcttatgcagtcaaggaaagtgattgcttatgcatctaggcaattgaaagaatatgaacagcggtatcctacccatgatattgaattggcagtagtgtttttgcattgaaagtttggcgtca

SEQ ID NO: 355040 - DNA, 960 bp, Cannabis indica
actcttagctacaccaaatcagatttttagacttgcgttaatgctagagtatacttatgagattgtgatttctctggggttggagcagtgaattttgaagaagtgtaaaaacctatctagcgtctctaactctaccagtgtgactgaatgttaaagtggcccagaaggcttctagataattattcagcctatggaaagttctatacaatttttggcattattccaatcatggattaactactagtgttacttactaataacatggatttagttgccaaatagtaaagaatccaataccctaagagtagtaaacatatagaaaggaatttcacagtatcaagtattttgtgattaaggagatataatggtggagaaggttggtaatttaaaagaacctgtcagattctattacaaagataatactacatactacacttgatctggatatcaaggtgttaacattaattgaaacttttagttttatattagtgcaagtggcagtttgtcgggattttacaccctaaataaaactcatttcaatataattagatttactaattaataaaagattagaaattattttatgttgcatggttcacatgattgctttcatgattatatatttaatgtataagttctattaaattctgaacatatagttattcatgattatagtattgtctacacagtgaaaaataatcatgattatatgtttcaaagttcttagtctcatgatttatgagtgcattagatttacactaatgtgataaagcaatgaagtttacttacacattgatatgtggtatgaccttttcaggacattggcaaagtatgctagtatcagatgtacgaagtatacatcggactagaccaatattaacattggataagatatcataaactttttttttttttggtaaatcagcaagtgcattataaccaaacaacaatttatacaac

SEQ ID NO: 355041 - DNA, 587 bp, Cannabis indica
gacatgtgtcctccagccgaattgcgggtataacaattaccccttaaaacgttcttttttagtaaaacaaactttttaataattacgaacgacattttcgccaaaatcctttcgtggaaaggacgcctcctttgattatggcagttgtatggttttgaagatcattatgaatcgcctattcatattctgcacgatttccagtcattagatttctcaatctttggctttcttatcagtgaactttgtgtataaaagggcagctcaagcttttcattttcacaatccttctggctttttattgaaatccatttttagaatggattacttccttcctgccaaaatgtctcttctgagttcaaaagtttatccttccagactcataatacccagatgtaccaacaattttccattcgttcctacagactttaagcctcaattggagccgaaaatgatggatcccagtgtaatacccgaaattaagaaatggattagcaaaaccctaactagataattatatataatggaggaattatattattatatagttcaatatatgtgatttatatgaattttaatatattaaagac

SEQ ID NO: 355042 - DNA, 536 bp, Cannabis indica
agagtcaatcgaactgggttagggttggctgttaggggttggggaagaaagtagtaggcccaaatatgtgtgtaaagcccaaattatttttggtacacagttttccttactcgggatgggatcactaagtctaacctatgtttggtatgcatttttaatttttttgagtggagttttaagtttaccgtgggttacccttgtctttacactgagggaaagttaacatctctcaaaactgtgtgttttatttgcctggaatattaacatcttaacttggtgaagccctagccgcccctgtctcctacctcttcatcctgttccttgctgctgaactttcgtttggtatgtaggtttcatttcatgggaataggtttaacattgctgggagagtaatgaaggaaattataaacctaggaaagcaacattagtgtgtttggttatgtgcagtaatattatgatgatgcctaggaatatgaagatttggttgacataggaatggattgtgacaattttttttttaatataataattatttt

SEQ ID NO: 355043 - DNA, 560 bp, Cannabis indica
atagtagaatcttacatcatgaaagaatttttttagttgctgcctattcaaatcaggaggctgcaatacactcactaagtaatttacaaaattagcataccaaggagtgtttgcttgagctacaacaagcagctgctcatccagaaaagttttttgaatttgcatttcggcttccttttcaccacctgtttccaactgagataagtggtcagccacttggttctccgtcccttttctatctctaatttctaaatcaaactctcgaagaagtaacacccaaaaaatgagtcttggcttcgcatctttcttggcaactaaatatttgatggctgaatggtcagtgttgacaatcaccttcgttcccacaagataagatcgcaatttgtcaaaagcaaatactacaactagcaactccttttcgatggttgaaaaatgaatttgaacatcgatgagagtcttgcttgcatagtaaattgttaggctatttttagcctaagtttcgggtcacattttatagttgtttttctactttattattatttttggaatagaattacgct

SEQ ID NO: 355044 - DNA, 917 bp, Cannabis indica
gatgggaaatgaaaactattagccccacaagaggtttgtgaataagtgatttctgataatgagaaaggaatatccgtctttctgctaaacaggatgtattgaactcataattcattagagactttttatgaatgtcaactaagtatcgtaagtaaattactcccagttgttcaatcatttgatagccagagtcattggaaagggctagcggtaagtttatatagtttttttttaataataaactgtatttattattttataaggtgctcatagaaattcttttaatttgttaaaaaattattcaagtttatattttttaaaataatagactgtgtttattattttatgaggtgcaaatagaacttttcttaatttgttagggtgtacttataattatctgtagtgtaaatataactcccctttataatattgagagattggaaagggctaggggtgggagtggaattgacaatacagaaggtgaagtaggaggcttgagtataatacgtgtcgatttttggagagtggtgatactgaaagtcggtgaagcaagtgaagatgaagaacgcggtaattaagaaggtgaagactaaatgacacaggaggtttgatgtttgaaaaagatacttaaaaagacaattaagggtaatgaaaaattaaaaacttgagggtatataagagaatcaagcaggacgtgattaagagattcatagtatataagatataatatataacttatatatatgaacttgaaagttttaatattaataataatataatataatataatataataatataatattaataaaaactttattattaatagttattttattatttcttagccattaagaaatttttatttttagggtatttggccaacttcgagtacccaaaataccccgatattacta

SEQ ID NO: 355045 - DNA, 1019 bp, Cannabis indica
caattcggatctaggtcttatttagagttggcacctggtctggttacagttttggatttatgtcagatttcagttatgattccaagtcctagttccagtcccggtgaacttccggttttaattcaaattttgggtcacagtgtacgggttcgggtcaacttttttgtgtgggactgggttcaagtccgggtgtgggttcgggtccagggttgggtcccaaatcaagacaccaactacgagttttgtccaagctctggctctagattcggatctcaatctcgggtcccagtctggttccatttctggtgccgggtcacgagctgggtcctaggttcaagttcgggactaggttgggtactaggtcccggtcctacttttgtttcccaggtccctatccttattttgtgtgcaggtctcgtttattgtgtgggtttgggtcccgatctagtttcgggtttgagtcccagtctcaattcgagtttaggtctctgtctaggttttgatttgggttcgagttgggtttaggtcctgctcctggtccttgtcccagtcttgttccatttgcgattctgagtttgagtttgggtttgagttcgggtctaagttcgagtcaaggtgtgagttttggttcaggtccggatttcagtcttggtccagatcgggctctgggtgtgggttcgcgtcctaggtcttggtctaggttgggtcacagtcccaagttccaatcccgatttgagtctggattcagttatgggtctaagtccttggttttgattctggtctgggttcgagtttgggttcggttcctcgtctagctttgggtcagattctaggggtgggtgtttgagttcgggtccgagtctgtgtccgggtttgtgtccaggtcaggacctcgttttgggtataggttcgggtccaggtccatgttcgggtccaagttggggtctttgtcacgatctttatccagatctaagtccagcatttcgatcccattctgggtattggtctgagtccaggtt

SEQ ID NO: 355046 - DNA, 787 bp, Cannabis indica
aactcagaaccagaccgagagccgtgacagtgatcaagatcttgactcgggattcgggtaacggggcctggaacagaccagtagtcggtgtctagatctgggactcagactaggaccagaacccaggcgaagaaccaaacccgaacccagacctagacctgggacccaaaattagaacctgaacaagaatcgtcgaaccaggaccctagaacaagactaggaccgtgacgaggacccggacccagacgtggaaccgaacacagacatagcctcacaccccaactgagactagaactcgggcccggacacggtcgtgtacccagaccggaacatagacccagactttgaccgaaatcttggacccgatccacaacacagacttggacctagatagggatccggatacgaacctggactccgaccaagatccagactgggatcgaaatggtggacctagatttggaccgagatcctgaccaagacccaaactttgacccgcactcgggacctgaacttggacctggactcgaacctagacccagatcggggtccaaacctggtcacaaacaaggacacagactccgacccgaactcaaacccacacccagaatcagacccaaagctagacccagacccggacccaaactcgaacccagaccaggatcagaaccaaggacttagacccagaactgaatccagactctgatcgggattggaacttgggactgagaccaaaccaagacaaagacccaggacgcgaacccacacccggagcctgatctggacc

SEQ ID NO: 355047 - DNA, 1082 bp, Cannabis indica
actgggatcgaaatgctggacctaggtcctgactgagatcttgacccagacccaaacttggacctgcactcgggacccgaacatggacctggacacaaacccgaacacagactcggacccgaactcaaacgcacacgtagaatcagaccaaaagctagacgcggacctggacccaaatcaaaaccaaggacttagacccagtactgaatccagactcagatttagatttgaacttgggactcgcacccaacctagaccaagtcccaggacgtgaaccgacacctgaagcctgatctggaactagactgaaatccagacccgaactgaaactcggaacaggactcgaactcaagcccaaactcgaactcgaacctagaaacaaacccgaacctaaacgtagacctcagagcaaaaattagaacctgaacaacaatcgccgaaccaggaccctagaacaagattaggacagtgaccaggaccctgacccagacctagaaccgaacacagacctagcctaaaacccaatctgagattggaactcgtgaacccataccggaactgagacccggacctggacccaaatctgggacctgatcccaaacacagacttcgacgtagatagggatccaaatacgatcctggtctctgaccaagaccaagattgggatagaaatactggacctagatctggaccgagatcctgacctagacccaaactttgacacgcactcgggacccgaacctagacccagatcgcagtccagacctagacacaaacccagatacagactcagacccgaactcaaaccaacacctagaataaaacccaaagctagacatgaacccggacccaaactcgaacccataccaggatcagaacgaaggacttagacccaaaacttaatccagactcaaattgggattgtaacttgggacgcgaacccacacccgagcctgatctggacctagactgaaatctgaacccgagccaaaactcagaccaggataggagctctgacccgaactcacccaaactcaatttcaaaatcgcaaatggactagaaccaaactaggactaggac

SEQ ID NO: 355048 - DNA, 550 bp, Cannabis indica
ataactgaaattggacctagatccaaaaccgtaggcggaccaggacccggactctaaatcagacctagacctgaattgggagacggacccggatccccacccaaacttggactcgggacccgaacccgaacctgaactcagacccaaaaatggaacaagactagggacacagaaacagggtcaagaattggacctaagacctgaacctgaaccagaaccaaacccagacccgtgacagtgatcgagatcttgactcgatattcgcgtaacatggcctcgaaaagaccaattatcggtgactagatctgggactcagactaggactagaacccagacgaagaacaaaacccgaacccaaacctagacttgggacccaaaattagaacctaaacaagaatcgccgaccccatccccaggcctagaaccgaacacagacctagcctcagacccaaactgagattggaacttgggcccggacacggtcgtgtacccaaaccggaactgggacccgaacttggacctaaatctaggacccgatcccaaacacaga

SEQ ID NO: 355049 - DNA, 814 bp, Cannabis indica
agttcatccaaatcattctgcgaggccagttttactaaggcataggcgttagagttttgttctcttgggattttctcgattttgaaataatcgaacctttccaagttcttccgaaccttctctagatacttggttatttttaagcccttagcctggtattccccgagaacttaatttactatcaactgtgaatcactatggcatatgagatttttaactttcaacgcttcagctatcctcaaaccagcgatcaaggcttcatactaagcctcgttgtttgacgtatcaaattgaaatctcaaggcatagtgaaacttaaagccttctggcaaaattaatatcacccctgcacccgagcaatgctcattggatgcaccatccacatataatttccaagtgtctacatctcgctgaacaagcatatcttccactggagttattccttctatcaggaaatctaccaaggcttggcccttatggatgtttgtggatgataagttatgtaaaactgccctagtttaagtggcccttttatcaatcttccagaggcatctagttttgataaaacttgtctcaggggttgatcggttaacacatttatcagatgtgcttggaagtaaggtcataggttgcaagatgcgtggattaggcataaggcaagtttttcaagaggggaatacttgattttgcccccagtaaccttttactctcatagtaaataggttgctggtgctttccctcttttcgcactattgtagcactaattgcacttttcgagacaaccaactagaggagtaatgtctctccaattact

SEQ ID NO: 355050 - DNA, 555 bp, Cannabis indica
gaaaataaaaggaaaaagaagagaaaaaaaagggaaatgatggatggttgattgatagaggtcatagtctactaacgtgtagtgatgcatgtatgaaatgtgtgtgcaagtggtaaaattgtaataaaataaagttgaagagtaaaaatgtaagcttaaccgtgtggtggtattttagtaataaagtatgtattttgtatttttggtgtaaaaatttcttaattatattataaaaaataacaaaaaaatataattacacaattctatacaattttataaatatttacaaataattatcatattcacattatataataaaaataaatataaatgtttacgattttaatatgttgattatgtttaattattttttttttaaaaaaaaaaacataaagctaaatataaaaaatatacatcaatatttatattttgatatattactaaaatttaatacaacattatatatagacaaacatatttaaaaacattattaaatagcggcataagtacccaaagtcttatgtttgtaagcgacataaacccaatgtttatttt

SEQ ID NO: 355051 - DNA, 496 bp, Cannabis indica
ttttattttatttttttaactttacgcaaatattgatgtccaattaattttatatcaaaatagaattgttattatgttatttttttgttgttattaggctgtttaacaaagagaaaaatgagtatatgtttattttttttaatgtgtagatatattttagagttggtgtacaagtattatgtaattgtttttaaatttattttatagattatttgtgtatttttttttcttggatcttatgcaattcatggagttgttttcatgcctatttaacttctgtattataatatagagttgttaatttgttgttatttagttattcaatcaaataaaaatgaatatatctatatatacatgtttattttattttatacattagttatattttttacttttttgagagttattttcatgcctatgtactctgcatattgtagcggagtttatgcacttttttttttttgttatttagctgtttaactaagagaaataaatg

SEQ ID NO: 355052 - DNA, 531 bp, Cannabis indica
ttttttaatatatatttatattagaaaggtaatcatatatttttacgaattatacaaatacaattagtgttttctctcaagcaagtttctctaagatttaggagtgcttaagctttaggtaagcttttgactttatcctcttgagtttcttgaatttaaagaaaatggttatgcatgatttttgtagtttttgttgttgtagctgctgttagggtttgatgttgttttctggaggttaaatatgttgtttaatattgatttgagcatgttttagtggctgatagaggatttaaccaaattttgagttttagaactcaaacttggagctttaatggtgaaacttgtttctgagcttgtagttgtgttttattgccttgagtatgttctatgtggtttaaatagcaggtctggaagttattgtggtgtttggggttgatttgaggttatagtgaatttttgaaatttttctgcactgaactggaattccggttcagagggacctgtaggaactggaattccggttggtcccca

SEQ ID NO: 355053 - DNA, 733 bp, Cannabis indica
tttagttttaaatatttaagtgattgtttttttttttttccttttttgacattggagaagatgacactacaaaaaaaaaaacttttagtaataattttttaatcgcaatataatttttttgtgactaaatttgaattttaatcacaacaaaaaattacttttaattaaaacataatatttggatacaaattttcactaatttaattttagttaaaaatatatttagtcacaagatataaatgatatgatttataattttagtcacaaattttattataagtaaaagttaaaaaattgtagtgtgaattggaacttaaggctcctgtttgtaaggactaaggactaggagcaaaatagaagaatctattaacaagtaaattggaccactaaatcgtttacaataataaaataataagagttactaaataataaattcacactaagaagatattcgatctaaaataacccattttttttttttttgtatgtcagtcttaagtttaagttattaaaataatgagttaaatttgatgaacacccactccatataatattaatattcatacctttgccacttcagagtactttccctcataacacagatcggattgtgactggagtcgatataaatttggtgttgtagtgtgacagttatttttttttttttaaaaaaaaattaatttattaaacagcaatatccgctatcacaatagactgaagagcatgtggaaca

SEQ ID NO: 355054 - DNA, 610 bp, Cannabis indica
atagcgagctggggccattttttttctgaggtcgacgatacgtgtcttgtgtcaatcgcggttcttatttacaacaagttcttcgaagctcatttgaatgttagcttcttgacttgccagggttgtgaacctcgctagcattgacgggatgaagttatacaatgtcttcccatagcgagacgggcacctcaattatttggtctcgagtcgattgactgttacacttagtttgtacactaagggctttcgcaattgatacatgtcgctttcatcttcctatgcgtactgtccttgatgcctcgctattcacttctagtaacatatgatttctcactaatataataagtgcccgtttgtatatttatccttgcctaagaccttacagtcagcagatttcaaatatactctgatgcgtacgtaattaatgagttattccataaaaagcgattacatcgattaatattccctttatctttacacgcgtcttccagtgaaatggtagccaaatttcgggtataacataacttgacactcaatggcctggtaactaggaaagttctagaaacataacataggtattatcaccataaaaattaaacctaggtattta

SEQ ID NO: 355055 - DNA, 788 bp, Cannabis indica
caatttcacttgcatgacacaccaaacacaattatttgtcactataatttacaccaacacattgcatgtacccatacaaatattttaacgtaaaacataaattcatacaaatactttttacgtgaaattttactaaaatactatttattaacaaaatatacaattatgtaattatttaccaaaatcagaagttagcatatttcttaaccatttatacagatcataaaacatattcaatctgcttagaaatatgtgtgaaatactatccatgattttgtataaatttattgtaaaatatgaataaaaccttaaataattaaccaaaaatagcaaaacatctcaacatagtctcaaattaattccagacactataattataccttaaaattatattgaaggttccccaaacagtaaacacaatttttacgatttattctatttaaaatctaattaaatagttaattagtcataaataattataataaatacttacagcagccaataaaaaaataaaaacatttttgtttcgtatcatagatagtaaacagtattacaaaaatatactttactgttttagcatcacttaactatttttcataattattttaagtattaaataaataaattcatgaaaaatacaaaaaatgatcgaaaaccaaatctaacaattctaacacagcttatagtatgtactaagccctaaataattaactttcaattttctgaatagtctaggtattttcttttttaaattttagtaaataatacaaataagtttttgaaaaatt

SEQ ID NO: 355056 - DNA, 728 bp, Cannabis indica
agatgattgtcaacggtttgctgacacaagagccactcatcatgttacctcgaatggcactcagttagatcatccgtcccttacaatggcactgagagtttggttgttggagatggtaagaaactcatgatttctcatacaggttcaatcttcttgccttactcttctctagctttaaagtctgttcttcatgttccccaaattactaagaatttagttagtacttccaagttaacagatgataataatgttttctttgaatttcacaaacattgttattttgtgaaggacaagcaaacgggggctgtgcttctcaaaggaaaacgtaaacatggtctatacacccttagtgctaccccttgttcatgtaatatcagtacaagtatattattttttttttttggtatattattgtgtgttttgatattttattgttgcattaaataaaatatgaatattattggtatttgctaaatacaattgtattttcatattagagattttgatagttagattaaacattagtgaatttgaagtatattagaaaatagaatttattagtgaatattggtatgaatagataatagattgttatatattataataggatttataatatataatatagatatatgtgtaggtacatgtataggattgattattattattattattattattattattattattattattattattattattattatttattattatta

SEQ ID NO: 355057 - DNA, 408 bp, Cannabis indica
gtttctactttttaaccctaattactctagatcaatctcagccgtcagatcaaataactctttcatttggcggctgccgtacatcacggattacaattcgtgaaagtacaataacggggcaaaatcatatcccaaactttataataatattatagaaaaaatttaaaaataaaaatataaaaaggaagacaaatataaatgttaaatattagtaaaaagagtgacttggaagaaaacctccaatctgatttttcttgaacatagaatctttttagggtaaatggcggcaaaacccccaatactttcgttttggtttcattaaacccccacaacccaaatttctgcgggtaaacctccaaaaccactattctgttagcaatttaccctttccgtccaaatttagctgtt

SEQ ID NO: 355058 - DNA, 638 bp, Cannabis indica
aggatagggacctgggaaacagaactaggaccgggaccttgtacccgacccagacccgaacatgaacctaggacccacctcgtgactcgccacaagaaatggaacaagactgcgacctgagattgggatccggatcaggacccagggcttggacaaaacccgtagtcggtgtctggatttgggacctagccctggacccaaacccacacccagacctgaacccagtcgcaaacccaaaaatggacacgaacgcgtaccctgtaacacaaaattggaatcaaaaccagaagttgagtgggactggaattagatcttggtcttggaatcacaactgaaattggacgtagatccagaaccgtaaccacacaatgacccgaactccaaatcaaacctagactcgaattgggagcctgacctggatcccaacccaaacatggactcgggaccagaacttgaacctgaactcagacccaaacatggaaccagactagggacacgataccagggtcaggacatagaactgcaccccaatctcgatcccgaacccaaactcagaaatgggacatgggacctgaaccagaacaagactgagacccgtgacagtgatccagattttgactcgggattcgggtaacggg

SEQ ID NO: 355059 - DNA, 948 bp, Cannabis indica
ttttattatacttgtaatcttaatttaaaattattacacttaattatttaatttttatttaaatatttaaaaagtaaaaagtgaaataaagtgaagaattttccaaaaaaatggctacactcgttgaagaattaataatacagcagctcctctacattccaacacaaaaaaacaaataaataagtaaaaattataatagggcaagtatattaatttcaaaaaataaaacaaattaattttttctttcttccatactgttagcagtaacaaatggggagttaattacattcttgaaataaacatctgaggccattaataatataaaattaaacaaaactcaaatttactccgtagatttatttcttgcaaaagtaaacaattacaaccaagaactaaaaagagcataaagaattcatcaaataacaacattatttcctacaatagccccaccgctgacaaagtagctcgcaacttctttccttttcttagaatctacaaaaacacctatagtgtgcatcaaacgatgtgtcgtcatcaggtacgtaacaactctattttggagttgttttgtaattaacttattgcttgttctaattagtcgtatgatctttttatttgtgttcataaacatccaacaaaatattttgtgatagctatggagttggtggataattttcaaatattcaaaggagtatttgaactctataaaaagtggtcactttctttttagagtgttctctagtgttgttgagggaatagtttgtaagttggacaaagtcctttgagacttgtctaggccttgagttgtctggcaaaatcttttgagaattgaagcatttacgcatatagttaattttgcttgaaaaaagtcaaccacaacttcacaaaagttttacccaagaatatgtcagtaagtagtatttaaaaaaataactaacaaactttctg

SEQ ID NO: 355060 - DNA, 672 bp, Cannabis indica
gagttttcttataacaatagttatcagagtactattggcatggcaccatacgagatgctttatggaagaaagtgccatttgcccattcactaggatgaacccggtgaacgtaggtatcttggacttgaggcagtccaaagaacaggtgaggccattaaaaagattcgagctggtatgcttgcctcacaaagtagacagaagagctacgctgatctaaagcgcagggatattgaatttcaggttggggattttattttcctttgggtatccccaatgaaaggaattcagagtttcagaaagaaagggaagttaggccccaaatttattggcccatttgagattattgaaagggtaggtcaagtagcctattggttagccctaccccctgctttatctggggtgcacaatgtgttccacatctcaatgcttcgaaagtatgtgtctgatacgactcatgttttaagttatgaagatatcaagcttcgaggaaattagaagaagtatcacccaaagtcatctcttcttcttctctctttcgtgacctagaagccagctgaagcacagggagaaattcagcccctttcatgcaatttcttggcagaatccatagctctaagtgttagctatattgaggtaagctattgatgcctttttctttgattttcaataagt

SEQ ID NO: 355061 - DNA, 814 bp, Cannabis indica
ccttcgtgggctggacgaggagaagaagtataaggaggaggagcttacggccgaggtgacgaagctgaaacagaaagttcatgccttggagagagccagtcttgagctcttctacgactgttggaaggctaatccactagaaaacttcgactacttgggggaagccaaggacatgtaccttgagttctgtgcttcccaagtggcttatggtgaaactgaggtggctgcttctacctctggccagaatgctgatgtagctccgttcaaacaacagatcctccagctcctgcttgcccagaggacccgaaccaagagcatgggactccagctgtttaaatacttcttcttttatccttttgtttttatcttatcttattcggccataaggccttttctaagacatcatgaccggccaagcggtctttaaacttagaattatttttcattttacagaaaactggctgaccgggcagcttttaatcccggtattacgtgctcctattctctttaacgaatttcatactctgtttataatcatcgtgcaattgtgattgttttatctttaccaaatgctttgtacaggtataggtgccccccaagtgaccgagcaaacttttgactcttggcacttgtttcttacaagtattctttttatctgttcggtgcattgggtttgaccaaaccttttgtatgcactggatggtaaattagaaacatgctgataatttcgactgaattcgaattttgaaataactatctttattcatttattgatcgaaaaatgagtttgttaccgtagtaacttacatcagag

SEQ ID NO: 355062 - DNA, 683 bp, Cannabis indica
actcaatgttgtaggttatatccagtatgtgagttagaggctctaattttaataagttacgtgagattatatttagtactttaaatataaaaaagaatatttatcaattaaaattattttacaattatatttaattaatatacaataaaaataataattctcaccttatcccaaatttaatcacaagcatttattataaaattatggcttatcctccattgacacttactcacaaaaactcctataaacatgctgagtttgcatggattaaattcatgcgaacttgttagcaataatctatatgatttatttcaaataagtaataataaaagaaatgtaaaaagctaccaataatatttagcattctctaaagtataatatttatatttagtataattaaatattaagtctcatataatttaatataataccattacgctacactaaaaaaaatataatttaatataataacttttatagagtattgttaactaatcataagacatcaaatataaatgatgctagattactaatacataataataatagggaaatttacatggtatactaacttttgccatttttttacaaaaatactgccaggcagtattttttacttttttactgtgtttttttataagtttcatactgcagtagactgtgttaagtttcactggtgttct

SEQ ID NO: 355063 - DNA, 963 bp, Cannabis indica
atactaataatatataattagaaagtcatcaatctaaatcatattataaacccattattgaaaactagatttaaatgttgagatcccatataaaattaccaaaatacttctccttttcattttgaaaaacactaccagttacttgttaccataactaaaaacacaatataaaaataaaaaattgcgaaccacattgtagtaaccagtgtattcaatattagttggtaaatagttacttgtatgcatcaaaatattgctctaattaatgctcctccctctttttctcgtcatgctccttcttcttttcgaaaacattattggttatacgagttactataactaaaaacatgacacaataattaatatatatggattagtacatcctagcaaccaatttctaattttattagttactagttaaccattactggtacgctaaaaaaatcaactataggtgttatagtaaccaattacccatttttccaaattactagttactaggtaattgattaaccatgtccaaaatgaaactaaaaaataagaaaaaaaggttgctaatatgttcaaattgattgtaattttcaatattattattattattattattattattattattagtaaaaggaacatgcttacaaacaatattaagttaaattttgaaatcttaaattgattcttttacataaaatacctaaaatgatatataaatatatacgaaaattctaccatgcacccccttaaaatggatatattgatgcatccctatctgttttagcatccgaaataatttttagttaaatttttcttcatggtcatgtacgttatagttatttaagacatcctgcaaaattttatgaaatttggaaaagtttaacacgccaaaaattatgttcaaacagtgtgttgcacacgtgactattttattttatacgcgtgtaaaatagactgtttgaacattaa

SEQ ID NO: 355064 - DNA, 590 bp, Cannabis indica
aatcaagattctcgtttgattgaagtttgatatgatatacaactttaaatcaactgttatggaactatttaaaaaattaatatgcacaatgtattaaagaaaacatttctccctgtataagttctaaaaaaattaaaaaagtcaaataaattttcctttaatatataattgtatagatgtagaagactaggcttggatcgtcttttatctcaacggttggtaaccttctttcagttaatatttcagttgtagttgagtgttttctttgctgcattccaatacttgtttcaacttgtctacaagttcttcatatttttcaatccattgagatgaattcgccactaactttgtaatttacactattcattcctcgatcaaactgcccattgtaaaatatgaaaaatgaaattacgttccttttttgacattttgaaaatttatttatggtcagtctattattagaagactgtaaagaaactgtaatacaacagttatatctgttgcgagccaactaacataaaaccataaaacaactaataatttcacattacaaacgaatattacaacaatcatgttttatctgttcaggt

SEQ ID NO: 355065 - DNA, 557 bp, Cannabis indica
aagaagaaaaagaaatctaaaacttttatgttttgactttttttaaaatctgaccagaacatagtcaaatttaagcttgaagtttcaactttattatcttgcagaattttctctattctatagattgttattttctgaaatttgatcaatttatacattccaagtgtgaaacctgaagccaaagaaaacaagcataattctattccaaaaagaataacaaagaatgaaaacaactataaaaagtgactaaaaacgtaggcttaaaatagcctaacatgtcccaaggacgactttcctttaccaagcattgacaaactcagttatgctaccgtaggtcatgagctccttagtttcatggatgcttactcaggatataatcaaatcatgatgtatgagccagaccagaagcatacctccttcatcattgatcgatgtttgtactgttataaggtaatgacttttggtttgataaacacaagatcaacatatcaaagattagttaaaatgatgtttgttgatttaataaggaagacaatggaagtttatgttgacgatat

SEQ ID NO: 355066 - DNA, 517 bp, Cannabis indica
gaacaagtcgttgaggagaagaaggaggacgtagaaatctcggtactatctctctcttttacattttacattttgattttagttatcgactctttcattttctccatgtttcatctattttattccttggattttaattatacacaagtcaacaaaaccattggaaggagctgaatcagaattgcatgatctgattaactcaactgtcctttcaatgattaatgaggtaagctattagtatttagacaataattgttggttataattgaaaagtaaaaaaactgttaaatcaagtttacttattcagggttttttggtggaatcaataatgaagaaatttaaaccttctgtgcttatgaaagaagattagaatggtatagaagtgattgaacgagtcttcgcaaccctccaggatccaaataaggttgatttttttttaaaaggggaaatttttttttggcccctcgactagggggccctaggcacaggcctagccgcctatgcctagggccagccc

SEQ ID NO: 355067 - DNA, 559 bp, Cannabis indica
ttgaagagtttgctaaaatgacatacttatatttaatgtgtatgtataataagactatacaagtaaagtaggggtgttacaatttcttttttacaatctcctatattatctattttaccttttttattttacttttttttttttttcaatttttcctaattaagtcttttcttattgagtatgcaatacaaatttataataactagagattgagagtaagggattaattcctagaaaagaaaaagaataaaacgtttatttcatttgaatggattcaacacaagctataagaatggaggagagagacttatgccatgtggaccaatgtcataagttttcttaaatcctttctcacttgttaccttcctctataaatagtagtcaattacccaaatcccaaactttcaatttcctaattgttgctgtcaaattgtagagtaaataaaatttctcctagagtagtatgaataacagaaacactattatagctatttttatacaatcaatgtactcttcgaatcaaagaatacataaagattggttaaaccgacttaagcat

SEQ ID NO: 355068 - DNA, 994 bp, Cannabis indica
catccgaagagttccatccttttctttacaaacagaaccggagctcccaaaggtgacacactaggccgtgtaaaccctaatccaacatcccttggagttgtatcttcagttcttttaattcagcaggtgccattcggtagggtgcttttgaaacaggttctgctccaggaattagatcaatgataaaatctatctcccgctgaggtggtaacccaggtaattcctctggaaacacatccaggaattccttaaccactttaacctcttcaggtccaggtaacacaggtttactggaatccactacaactgccaggaatccaacacatccactgcgtaacaaatccctagctttcaacgctgagattcttggaacacgagaaccttgaaccgaaccaacaaagatgaatggttcctcattctccggttgaaaagtcaccattttccgtttacaatcaatactagcagaatatttggacaaaaagtccattccgagtataatatcgaactcggccaatggtaactccaccagatcagcgctcaatcccctgtcttcaattctaattaacaccgatctaacccacttccttgaaataactaattccccattaggcaacagggtaccaaatcccatctcaaaaacatcactaggtctatcaagctgataaagaactctcgatgacacataagatcgagtagcacctgaatcaaataaaacagtaaaaacatgaccgttgataagaagctgacctgtaaccactgaagggctggcagcagcatcagccagcgtgatatcaaaaacacgtgctggggcaggcttaacctcaggtttaggttcctctttcttcaattggggacaatctttcttgaggtgccccaccgatccacactggaagcaagctctccggttacaagtcccgggatgatgtttcttacaacgcgggcactcagtataggagtaagtctgacgtcctcctttattctggtttccccgaaa

SEQ ID NO: 355069 - DNA, 492 bp, Cannabis indica
atatctatgtaatttttatttttaaatatatataataatatataaaattaataaagaatgttttgttaagtaattgagatattttgtcaaagttaatgtagaaaactaaaaaacctcgttaaactaagaattctgttgcataaccacattttatataaaataaatttataattaaaaaaagggtagaacatcctaaattttttttaattgatcaccggttcatttatccttcaatgccatcacataatataaaatggaatctatataatcctaatctatagaaggatagctctcttttgacaaaccaacccgaaactatttttaataagttacaacatcacaaatttaattgaacaaaaaagggttttctcttcgagtttctcatatgatcgtatcgtacttaattaatgcttggcttaattgtcaattttaacatatttggcttcatcaatttttaaaccaccaaggaataggttgttggaaattatttta

SEQ ID NO: 355070 - DNA, 815 bp, Cannabis indica
tttaaaaaaaaaattaatgagttgaccgggttgacccggccaacttgatcaatccgaacacgcgaactcgcgagtccgaaacctgggaacccgaaccatttcacgagtcgggtctgggtacaattttttgaacctgaaacccgcgaactcgaaacccgcaaacccgaaacctggtcaacctgcccgatgttcaaccctagtatcaatgatgaagagaagagtcagtcttttgacaatgtgacaagacaattggctgcttggttatcattgataaataacaaccaccaaaagttctttattccctggaatatcggtaaacactatttaatttttaatgctaattattttttgtatattataacttgaaattatttttatactatcttacctatatcccaatataattttttagtgcgcatgtgatgctatagaggtcgttgcgctaaggaaagttattcatttagaccctatatgtggccaccaagttcccgaacatattactgaaatgttgaaaaggtaataatttaatgactatttatgtaacaaattatttaattaactaatgaattgaaatgttaatataatttttcaaacagagcatacgaatgtatagggacatcaaatgcgtatcttgggtcgtgtctaggaatttcactagtaacttgtccaagacaacctaaaaatcaagaatgtagttgcggtgaatcctcaccctcaaaacaagttgttacagcagtaacaatgttcaagaaacacaaatcaaaactaaaaccaatcacaaactaaaacttgaacttaattgaaataagacaaag

SEQ ID NO: 355071 - DNA, 988 bp, Cannabis indica
tggtcgagggcgtggactacgtcagtgaggagcttgctgcgccggttcctcatagaaggcagggtgccttgggcgctagatgggtaagtcctccgtccaagattacggaggcgcgccttcgaactcttgactaggatgggtacctgggcgagctggactgctacattctcgctcacaataatcgtgccacaaaccctaacaaggggatgtgcgcctggttgggggcccatggtcagcaaggagcgttgatgcccttgcataagtacttcaaggatgtcgctaacttcttcggtctctgccaacccaaatcactcctaagggcattaagtatttgtctgccctcttcatcctctacgcttctcaaggatggggtattccttctcctcatgaggttgcctggttcttcgatttgaagtccacccccaaacaaggcaggtcggggtacttctatttctctcagccaggcttcaagtggttgatcggcacagatgacaaggccatcagcgaaatagggtgttttgctgatgagtacttcatggtgaaggatccgagcattacctggactaggtttcagcagattccaacatatcaccgtcttcccctcactcttgctcttagggatagagctcaaaaacttgctcagttgccgagggaagaccggaatgttatctagttgacctccgatgataatcttgtgaggtacgggctttatcgcgaggattttactcctaagtccgtgatggggaagaagaggaaatctggtgctggtcggcctgaacgaactcatccagagaatgagttgattcaacagaagcatgaagctaagttgaaaggaggtgccagggccaaacaatatgcttaggagcctttgaatcctgaagatgaggatgaggaagagcaggtgactccactgaagaggaagaagaaactcccggcctcgcccaggcctgttgaacatgcaatttgcataagcgagcccatttcacct

SEQ ID NO: 355072 - DNA, 688 bp, Cannabis indica
taaattaattaaataggaaaaaaagttgttaagataaaatttttttcaagacaatgtttgttgacacaaaagttgtcaggacaaaagacaccatccttctcttaatttagacatggtaggcacctatatactatggagtttgtctttttggattaattcattatttaattaattcaattagataaatatttgaatttgaaaagtagttatagatatttcaaagttgttgagatactctctcaagtagtgagagatttcctcataaatatcagtaaccgaatttggttatagatatttaaataattagatatgatataattaaaggtttttaactactataaattgaagcctaatttgaaaattaaaaagtgcttttcataagtgattttttaaattacttgaggagaaaaggaaactgtttttttttccacaactgttcttgctcatgtgttgagaacttaacaagaacaacattatacactttatcctaatagcctacactatttcttgtgtgtggtggattaacttggaagacactagtgtgagttcaattgcatcatccacatcatctggattaacggatacaatatacgacaagtttcgaggataccctgatagtcttcaagaggtatatgttccaaacttatattttatgttttgatttaatgtacgtgttgggttttgtgcc

SEQ ID NO: 355073 - DNA, 789 bp, Cannabis indica
aggagtagttttcctctagcttggatcgatactaatttaccattcccaaccttgagcttcaactcccttggatttaagtaatcccaagtttcaagcagctgcaatgaagagcaaacatggttagtagatccagaatcaacaatcgaaatggatttgtcattctctaaaatacattattcaaaaaaaaaaagtgttaccttcgtccttatggttcacaagtctggggcatcttgctttaaaatgtccattccctccacagtgagaacgtacaagaatacgtctgttcagttgttctttgattgtctctatttccggttcaatttgaattctggctcttaaaattgaactcgaagaagcagcattgtcggatgtatcatcctcaatatcttcagctttcctcttgcccttatctataactctagagcgatccctccttgccagtgacaatgtctgcttataagcacgcatttcaacttctagcttatccatgttggacgagtttgaagttgttgatcatgtaagatacaacaaatttgttatactcaggtgaaaggctattgagaatgaactgaacccattgctcttttgataaaataattcccagcaagtttgctttttggaactttaagttcatcaaaagtaagtgtgaagtgatgctctgaccaggagacatcttcgcactatagagtttagttgcaaaggcatataatagttgaggattggggtgagggttgttcattttgacactacaaatatcaataaagaaaaataaattacttggttcaaata

SEQ ID NO: 355074 - DNA, 559 bp, Cannabis indica
ataaactctatgcaaagttcaaaaagtgtgagttctggctgtcacaagtgtcctttccggggcatattgttggaaaagacggaattatggttgatccagggaagattgaagcggtgaagaattggcctagacctaaaacagtcactgaaatctgaagttttctcagagtttagcaggttattatcggcgttctgtggaaggtttttcaaagattgcaatgccattatccaagttaactagaaagaaccagcgatttatatggtcagataagtgtgaaaagagttttcaagagctgaagcaatgatttattacagctcctgttctagccttgccatctgatcaagaaaagtttgtggtgtattgtgacgcatcaaggcagggtttaggctgtgtgttaatgcaagcagataaagtcatagcctatgcttctcggcaattgaaagattatgagcagcgttacccaactcacgacctggaacttgcagcagtggtgttcgctttgaaaatttggcgacattacttatatggtgaaaggtgtgagatctatactgaccacaag

SEQ ID NO: 355075 - DNA, 512 bp, Cannabis indica
acgattttttgttgcaatttagattgcagcgttagttgcaatagaaatttttatgtagaattccgtaaaaatataaaagaaaaaaaaaattgttttgaagtagaaaaataaaaaagctcctattttattttataaattattttaaaatttttaaataaatacaatatatgaaaaaaattaatattataattatttgtaatatatttatctgcaatgcatatatagtgaattgtttaattttgtgtttgattttttcttttaagttttgattttgttttaatttgtttagatctcagtcggatctctagtaatggttttttatctgttatcggcataaatttaccctccccgcgagaaagacttgtctataaagaactccttgaattgaaagtggcatttcagttgtttaaacatacctatataaatataaaaatacctcctcttcaatactcaatactcacaacaaaaatccctcttcaaaccctttgaggatctcaaatatctctaaaaaa

SEQ ID NO: 355076 - DNA, 861 bp, Cannabis indica
tttattattatttttacattttattatcgtataaaaatatataaatatatataaacattgtgaagaaacgagaaagagaaaataacaaacaacgaaatggaaagatatcgagtagaaaaagagttgtttacaaccttttatacacaaaataggtacaaaaatgtaaaggactaaactacccttgaacactaactaacataactgaaaaataaagttagttatgaattattgctcttaacactctccctctcagggttgagagaaactcaactctgggtttggcgctaagtaacatgaacctggtattgtacaatgccttggtgagaatgtctgctgtctgatcatatgtaggggtatgcttcacgatgagagttttagccagaactttttctctcacaaagtataagtcgagttcgatatgcttagtccttgcatgaagaataggattagctgccattagaactgtgctgagattatcacaccaaattgttggaggtcgaagaattgagacttttagttttgaaagcagtgactgaatccaagtaatttctgttgtaacactagccaaacttctgtactcgacttcagtgctggaatgagagtaccatcattctcgcaaatgaaagtttatattaatgttttatgttcatatctacttaaaatgttaaactttagtatgaacaaagttgtatacacatatgaatgatttaataagttggataaatattgatgttccatgaacccctcatccataatttagaagtccacacatactctagaagagatagaaaatatatgatcatagataatatacaatgatatttaaaagtgataacgataatcttatgagatatattatca

SEQ ID NO: 355077 - DNA, 660 bp, Cannabis indica
aaaatcttctggacgttaaagcagtaaagggtgtattggtgcacccatttttaagaagttacactgtagatatctttctacgatatatactactactaaattcttaacatgtaatcatttaaaataaaataatataaaattaaaaaacttagagaaaatttgtagtacactcctaaatgagtgttttggtaaatctattttttgtttcggtattttggagagttttttaattagtctaattttttttcataattatttatgttgtagtcatttaagatcgatcacctgtaaattttaaaaaaattctaaataagtttacaatgtcgaaaaataaacttcaaataattgcttaatacatgtataaaaaaaatactttcatgtgaggtgcaacaaaatatatatatttttttagaatcgtaaactattcgagattttgtggaaatttagaagtgttcttaaatacattattaagttttataaaagttgtgtctaaattacatccaaaaaatggtgtgtctaaatttgtataataacaattataacatttttaattgcaattttatcataaattattaatgctaaaattttgatacatatttctttttatcacaatattatctttaataatttttaaatatttaatttgttaatgcttttttt

SEQ ID NO: 355078 - DNA, 664 bp, Cannabis indica
aaaaaaaaaaataaccacaaaactaaacaaacaacaacaacaaacttacaaagactttacatttggcttaaaatctcaattcttacatccctaggactcaaagtatcacttttatggcacatttactataaactgtaaatggaatcagaataatcaatgtgaattatgaattaatttaaattaaaaaataatcggaaacaatattttatcatactttttactaacctgtccggaacaaaaaccaaaatcatattattttgtttacataactagaaaaagtaatcgaaatgctttaatttgaaaaaattacaattattagagcatgtaattattttttatttatagatttttaaaagacatatttgtcttttttattttaattaataaaattaaaattaaaagaatataagtgacgaaaggaaaaggaattccctatcaaaatgggggggagaacctttctctttattctctccctaatttgtgtgggctcactactttctatctttccaaaatttagtaaacaattgtatggaaattaatatcataccattgattccaatccctttaagtaaacatgccttttcttatcaaagctctagctttaacatctctctgaatcttcttatttacaaattaaactaaattacgtctgatatccgaattt

SEQ ID NO: 355079 - DNA, 767 bp, Cannabis indica
tgaaagagtgacgtgcccacacatagcaagtcaagtactcaattatagtgagtaagacggtggtaaccaaattcgaaggagagaaagagatccaggttcagatcttgataatgctttgctacagaaaggaatgaagggctacagatcttgaacggaaagaatcattatattccgcagtaatcaatgtaaggttttcttaaaccttatgtgtttattttcattattttagagaattcatatttaggatgttaattcaacatacttgttagtaaatctagatcctggtaaaacattcccaacaacagtatcataccaatggagaaatagatggtgttcgatagtccttacaagtggtatcagagccaaatctcaaaattagccatgtgaatgtatccttggattgccaaacaaaaagaaggtgaagctatgctgctagagctgtcagcggtttagatctagttcgaagggatttcgaatcttactagtgaagggattcatctagcttactcaaggggatcttgagtggttgaatcgagggattcatgtatttgaagggatttcaaatcaagctggtgaagggattcatctagcttacacaaggggatcttgagtgttggagtcaagggattcaggtttagatctgtaatcgtttgaggggaggcaaggtggtccttagtttgaggggaggattgttgggtgtacatccaaagtcccaaattggctagaaatgggaaggatcttgggtatataaggatgaacactatctc

SEQ ID NO: 355080 - DNA, 1112 bp, Cannabis indica
atatgtttacatgtttagcgtacttttctgttaagcctattagattacattagaataacggtattagtatatttagaattatattggatatcgatgaatgtatgttttgactttagtaatgattgatgttatcacatcggtacgactagagtatgactagcgtaccgagtataggctgatattatggtcaacagtactgtcatttaaatgttcttgattcagtaccgcctagggtgtggggagtaccgcctagggtgcagggatttgattatatttggggctatggacgtctaattatagtctggttacatttatgattattattatgcttttcttactgagtctgtcaactcacaattattgtatgcatgtgtaggtaagggcaaggctagggttgagcagtcgtgaggcgagcggatgaagattgtacattttgggactgttagacttaacgcatatgatctttgggacaattggttatgttttgtatagtcactaggcgacaacttttgtattaaacattttgaatcagatgtaaatattttatatacgagatcctggttatctatatatgacacttattttgatatttataagtatttaaacaaagttttaattactcacaattttcaataaagtcgttgattagcaataagcagcacaattaacataaaataacgataacacgcctaaactagtagggtgttacacttggggttctgggatttgggacctagagagcatggatggtaggggtgcacacgggtcgagtttttggattttcgggtggtcggatttgggtttttgggcttcgggtattggaaatgcacaaccgaacccgatttttgggtgttcaggtgcgtcaggtgtcgggtcgggctttttcgggttgggtgtagtcgggttcgggtcctattgggctgagctcaaatatttaatttatgggctaaaataaaatttaatttttaaaaatgctatttttatatttttaacattatttagaccttttaaaaatttaatatatataatattaatatatataccagtaactaaagtatataataatattatatactttatgaagatttccagtagtatataataatattaaa

SEQ ID NO: 355081 - DNA, 641 bp, Cannabis indica
atattaaaaccataaaacaatgttaaacaatatccatctaaccctaataaagtgtttagttactcatgttcattgaagcacaaatacacatattaactgatagaaaagagatgaaaaatagagaagagaagaaaagaagaatgctgaaaaccctgagcagtatgtctccagtattgcagttgatctctctactctgtatctgaactctcactttttttctctctgaaattgcttgctgaaatcaactctcttctgctctttatataggcattcagggcctaaaaagatggaaaaacgcacatgtttaaattccattcggatttgaattttcgggaaacctcaagccagattttttttctgttgacaaagaggcgggccgcggcatgctaaacccatgtcgcggcccgtgtggccatgtggggtgtttccgttgacttcttcaggtaggcgggccgtggcatgctaataccatgtcgcggcctgtgtcttcctctgctctcaattccacacgtttttatcctttttccgaatttgattctgatattttccaccgggatattttcatgtgatattttatcatttttctgctgatattttccaactcttcatctattttaaatctgtaaaattaaaagataaaa

SEQ ID NO: 355082 - DNA, 1158 bp, Cannabis indica
aagtgttgctcattctgcacggctcgttgagtattccattatggacatgccagcgaggcatcctgctcggcatgttgatccgaccaggtgctctaagttgatgccacgtgtcaccattcttgtgatgccacgtcagagtgccaattttgggataacatttgccccccaagtctgtgcgggacctccgaggttgcgtatagacttcttccgagctggctctgcctttggaaggggacacgtgtcgagcatgaccgttcgagactcgatgtgaagctgactgggcgtcccttcggttttcggctaattaatgctctgacaattaatattttgaaaatccgaatttctctctccacggctgacggttgcactcgattattttgatttcccatatttgctttcaaggcgggaagtcgaggcgtctaaggttcctttacgtacagttacccttttgcctataaatacttggagtactggcacattacctcatttcatcacccttcgttgttaagcaaacttcagagcaaaaagagagagttttctggcttcaaagttgctgaagagctttcagacgatttcaggcttgcttgaatccggacacttgaatctttgagtaagtttctgactccctttatgtttttcctttgcatgcttgtgcttttgaatgtatctttgctgtagaaagaacactgtaggaaaccctagggtttgaaacttctgcgactcttctttccatgtccttgcgttagctttcagccgtaaggcttattttagaactgcattgcgtctgtttttcattctgctttctttaagcttcatgaactttttgccctaactcaagaaaaactttctgacttcttgagtttagacttttcttcgaacatggctgttctttaatctgttgggtactcctggtcggcatatttgcttgttttttcgcttgatactccgtccaacactcatcttgcgtgttgtcttttgtagatgaaccctggtgagtcttgggagcccgagcatcaaatcgaccaggaactgcttcaattctgcacgaagtccaccctcgtcttcgtgctaatcctccttctgattccgtacccagccatagaatgatggctcgtacgaagaaaactactgtaacgccctaatgctaaggcacgctac

SEQ ID NO: 355083 - DNA, 1111 bp, Cannabis indica
aaaaaaagactcttaaatattcatttatcaatgcaagatgaaaaaaattaattattttttattaatttttttcatacattttaaatatttcatttaattttattactattcttattcttgtatttttattcttttcaaacgcaaacttagagagaaggtgtaactatttcatggacaaagacaatatttaccatactccaggttcggttttttttcttcttctttctttctttctaatttttattatctagtaactacaagtctacaagggttgtttttgtgttatatgtttattataaatactatagttgttgataagtaatagatttaatctacatgcttataaatgtggtatttctctaatatgttgtcataatcacagttttatatgttaccatatttctaaatttagtttgcaataataccatattctcttaacaagagccccatagcaaagacttgtaatgataagatcagaacaattaaactcagaaacattattatgtcaagctagaaaaacattatgagttgttttaacttatatattgtcaattagttttgaaactccattaacaggaaaaccatgatattaattcttgatataacataaccacagtgctatgtaattaagatttgaaacttggatttcatttgaacatgatgaataactaagagaaaagaaattgttaccaacttatcagagctgcaaactatgaagatgacaagttaaaatttaagaaataaacttaaaatgtgaaatttggaatacatgcacgatcaacaagacaaaacgaatttgggtccaaatatatggaatgaaaacctatttaactttacagttgaaattttggcaattaacatccaatcaattttacattgttataaaaatattagaggaaaatacacttgtcttattattatttttttctttttacctttcttttattagtttttaatttatattcagttttataagcatatccctgttatgtgcattagagactctaattttgatatgtgaaattatatttgatactttgattatcaaaaataatacttatcaattaaaattattttataattatatttgattaatgtgtaataaaaaaaa

SEQ ID NO: 355084 - DNA, 794 bp, Cannabis indica
cttagtcaatcggagaagcgtggagggaacccgtacccttcatggttgatagacgggttcaatgaagcggttaatttatgtgggttacgtgatttggaattacttgggcatccctttacttgggagaaaagcagagactctcctaattggattgaagcacgtctagatagagctcttgtaagtcaagcttggttaaacatgttccttttagctaaacttttcaacttagaagtctctccttcggaccattgtcctttattattggaagttcaagcggggaatgttcatgaccatattaagattttcaaatttgagaattgctggacaagtcatcaaggttgtgaggaggtaattaaagggtgttgggataggatgagagggttcggtattgaagaaaaaattgctgaatgtggccgattattgcaacagtggggaaaagatgtttttggcaacttctcaactcgtatcaagcattgcaaccaggagcttaaaagattaaaaagtaaaagagatgaagaaggaaaagagcttttttatgaggctaaaaaggagttgtttgttgtgttgaatcaaagagaaatattttggaaacaaagatcaaaacaactatggttgaaggagggagatcagaatagcaagttttttcattcaaagtcatcttcaagaagaaggaataaccagattttttgtctcaaagatgctaatgggaactctcggcattggggcaatggcttggataatgtgatactagatttctacaccaacttgttcactgctgaagcggctacatggga

SEQ ID NO: 355085 - DNA, 748 bp, Cannabis indica
aacaccggattggccaaccattcgggataatacacatcccggatcatgccactagttagtagcttgtcaacttctttctccagagctttcgcctttactggattgaggggacttatgccggtcatgtctccttggtaccatgcaaagacatcggtggatgcccttagtgctttaattatttttcctttttcctctggttctaggctctttcccagccgaaggatcttagtagggtcaaggacgcatactggcacttcctcaacgtcatccataggttctacaattttttcggatcccacacggggatccaactcatcttcttctgccacatctggctcgataccttcacggaccatcaatactggtaggtgggccgcaacattgtaacattgcctgacttcaccttgattacccctcacagttcctactcaaccttcctgggtaggaaatttcagacacaggtgccggatagacgtaactgtaccgaagtccactaaggccggtcgtgcgaggattgcgttgtaagcagttgggtagtctaccactatgaatgtgcagtatttaaaagtgctctggggtgtgtccggacataaggtaactggcaacctcacttttcccattgggataagtatggttccattgaatcccgtgagctgggaaccgcttggcgaaagatcctggtccgtgaggataattaccgtgaaggcttctttaaacaataaattcacagaactcccattgtcgatca

SEQ ID NO: 355086 - DNA, 531 bp, Cannabis indica
aaaaaaaatgaatagcattaatgctacaatatagcatccatgcaaatttttagaatgaaatcattttctctttgattgtatagtatctcaatattttactacaaaatatgtccacctcactaagtatcgtttaaaattttactaaggaaatttgactttttatgcattttataagggataattggttaggagaaccaataattatggtaattttaaaaataggatacttttaccaaaacccctaaaataccctcataatttctaaccctttctctctccttctcaaacaaactctctttacccacttcgcttgaactgaaccgcgcgacccccacctcccaccaagacgacgacccccacctccgacgaggcgaccgccacctccgacggagacccacagaaccacttcgatcgagaccgcacggtaccgactatacattggtcggatccaagaacaacatactcgtcaagaccatcggacccccaatcccatcggaccaaaggacaagaccatcggacccatcggtccga

SEQ ID NO: 355087 - DNA, 469 bp, Cannabis indica
atccttcccctcgagttttattgggtttttgaaaaatgttaggtcgattgatcatagctttcaagtagttcgacagcttatagcatctgggtcgaatatgacctctcctgtcacagaagtgagacactgggatgaatctctccatctgagatatattgtccgggtaattcttcttccttctaacttcaccttggtaggtccagatggaacatcaaattttccagtggggtttgaggactcaggtgtcgagggaagtgatgattgctcatcagcctttttatcctggttgatcactggtgtaatggactcttctacccccaagttatctccttgcttatacaacatcttgtatccgatagaggttcgatcaccataaggtttttgaagttgaagagtttgattgatggcagccgttcctggagggataaactctaaagcctgtttcactcttatgagttcagctaaaagc

SEQ ID NO: 355088 - DNA, 1021 bp, Cannabis indica
atctgtcctagttcctgaggaacatagcggtagttttccttgaagtggacccctaaggagatcttggccttttctatcggttctctaattgaattatcttattagattgctagcctcccgactgccgcaatctcattctgcgtggtgagatcaaaagatgtactcctggtcatccatccatcttaggaattcgcgtctcttttgagcgaaaacatcgcaatcatcatcgtgttgttcttcagttaggcctgcacgacctatagcttccctgagtttgtccaactcaaggtcttctcctaggtctaggtgaggctctccaattgcttgctctcccactctcgggcctatctctccagcgtagaactagagttgaggtccagttattgttccaaggggttgttgtaaagaccgcttagtttaaatttggaaattagcagataattagggtttaattatgaaaattatttattgatatttgaataattatttatgttgatttatttgaattcagaatgaattttatatgtcatatagtgaaattttataattttgtattttcggtgcccggtaacatggaacgcggtgtatggctctgtagaatcacaatttaatattttagtatagcggggcggtattgttagacattgggaatgtcggaattggtcgagaatttagagttttctcaaattacccctaagtgatttgtatgacttataatatgggcaagggcattatcttttgcctattgagtttttgtctttagtagggatttaattttaagtttgaatgtgatttttattaatattgttggctgaaatgggtttttgaaaggttatgttatctcattttctaaaattaaggaaaattggaaattagaaaaaaaatcaccttcttgcaaactccctctctctcttttttgttccatcctagagcaactagggttgcttttgttcttcaaatattcaggatttcagctaggttttaagtgattttggtcaaggtaaggctcttagctcctatc

SEQ ID NO: 355089 - DNA, 701 bp, Cannabis indica
aagctgaattcgctaagtgttgagtgctctgcatagatcgctgaatatcttactcaggatgtgccagcaaggcatcctgcccggcctatcttcccgagcagatgctccaagtggactccacgtgtcaccattctcgtgatgccacgtcagagtgcaaaatttgggataacaggtacaaattaccataccaacttatagtgagtctcccgttgatgatgctaatccatcaacatctaagacccttgtatatttttcccgtcattaccactaaggtttgactccctagttcataaaacaccattgcttctttgcaatcatcactatcttcatacttggttaaccactttaaaacttattctacactcaattatatagctcgttgtttaataaacaacctactttgtgatccaacatccaccaatcactcaattacgtgtctattaaattgcatctcaattcataagttttttccccattcagggtgagaatgcctttccataattgcataataaagtaatcttttcccagaatgtcaatggtctccttatataccatattgactatccagtcaattataaagtactctccatcattaccgtatcaccgtaagtaatttaggtaatcttctttactttagtgataccactactcttcctaacattcttttatacgttacccccagtaacgtccacacttcaagc

SEQ ID NO: 355090 - DNA, 718 bp, Cannabis indica
ttggacaagaccgatattgaacttagtcaagatattataaatgttcttagatttattagttaatcctactttttgggcagggtgatatgtaggggtgtgcagaaatgatccaatccaatgacaaaccgaccgatccaatgtcaaccgaccgccaaaattggatatccaatcatgattggattggattggatgatatttttgaaaatccaatattggatcggtcggttcttggatgacatgtaaatccaatggatccaaccgaccgatccaatccaatactcatccaataccatccaatattaatatattataaatttataatattaaatatattatattttaaaaaccaaaataaaaaaaataaaaaataaaacatcacattgattaagggattcagatattagaccctctctctccatatattaaacaatttttattttttacataaaaaacatttaaaaaaaacaaaaccctagatacccctctctctcactgctcaaccctctttgaagccgcttgctgccattgcccagagagtggacgacgacggcggtgattcgatgccctcttcgctgacgacgacatcaagcaacatcttcacaccaacgacggaatcgcacaactcctccctcctcaaagacaacacaactcctccctctcctcctctctcttcttctggtaatatttatatatagagttatgtttcttgttttcttat

SEQ ID NO: 355091 - DNA, 595 bp, Cannabis indica
tttagggcagaaaacccaacaatatcttgttcatagtggctttgacaagatcactctttgcaaagagtaaacatccctatatccacttgaaagtatgatcatctacattagcatatggatgtactttcaggggtggatatgagtttttcgttaaattcttaagacgatcactctagattttaccttatgctaagaaatttgaaatgtttgagaaatttcatgaatttctagcaatgttgaaaaacattaaggtaagtggttaaatatcttgcaaactgataggggtggagaaatatttggtagatatgcagttcaaagatcattaagctgttttctttaactgtatccaaacttacctccccaaaaattcgatttgcatattgatgatagtataaggtctatgattagttactagccatttcctaagtctttctagggaaataccctagtgataggaaaatttcagagtgatggaatggttgtgtacttagtgtaaaccattactcgaatcatggatgtcctgatcgtgaccttaagaaaagctagaactgttaaccaaggtttgcctatttgatagctattctaagtgattagg

SEQ ID NO: 355092 - DNA, 976 bp, Cannabis indica
ggaaagatcacttcattaaaaaaggcaaacaaaccaaaacacacaagaaagtcttagatggcaacaagaggtgccaactcctcagcattgaaaaaaccaaaatgataagagttaaaggaccacttagcaagcttatgagctttttcattcccagtacgagaaatccaaacgactaaggccggcgggatacgatccagagcatccaaaatccgcgcaaacacccctgcaaccctccaatccggagtctttcgagccttaatgccccgcaccaaaagttggcagtccacagcaaagtaacatgtgccatccttggcttagacaccgatgcacagcatgtagaagagcccaagcctcagcttccacgggcagagcagcctgaagctgaacagaaaaggcttcaacaacctcgaaattagccttagtaacgatgatacccgcgactgacctgaggtctttgcaagcagcatcaacaaacaccacaaactctccctgcaacactccctgtcgaacatgcagagaagattgaccaattgaagtgtcctgaggagtagttaacaccgaattaagctcagcgaccaagctcttaatccgattaaaggtgatgaagaaggagggttggacgtgttcgtggaacgcttgattcctaactgaccagagaatgaaacagagagagactccaaatttcctgaattcctccacctcaaagtttccatgttgcatcaaaggggtgggttcaagcaaccacttcgtaaactgcagggagctattgaaattcaactcttcactccggactccccacgggcttgccagccaaagggatttagcaagcgggcaatgacaaaacaaatgaaccacggagtcttcttgttcatcacagattgcacacaccacctcgttgccaaaaatgcgttgaagtctttctccaaaaggcaagatatctctcccaagtttctaaaggaagagtttcatacgttcc

SEQ ID NO: 355093 - DNA, 639 bp, Cannabis indica
atgacacgtagaaccgaaaagaccaacacttatggaaattagctaagtcttagacgagagaagagtgactcaggaaaggtgtctcccgaaggagacaccacgagtatcttagtactcccggaggccaaagacgtgctaaggcagttccaggaggtattggaatccattgaacaatcacttcgcatttgatgccgcatgggggaagacgtattgaagtctccataaacgacatgacagatggcgtaacccccttgtttcggctactacactatgatcgataaggctagtgacagctactttatgaggaatcgcagcaatcaagaggggataaaagattatatccacctaactcctaatatacctacggtataggtcatgtatttcatattttgtatctgctgggaatatgtgcccctatgaagctaacacagaaagacaatgatccattcttagggatcaccccagaaaaacactataaataccccacaaacatactgaaaggggttgaggattctgggttcaaaagaatcaaagagagaaaataggagagaaacccaccaagaacattctctgtaataaatactctcattaataacaaagactcgtggactaaggctcgttaatgccccaaccacgtaa

SEQ ID NO: 355094 - DNA, 732 bp, Cannabis indica
ataatattaaaaacttgattaaagtgaaacatttaaaaacggccttcataacagcattagaaatgtgttccggggatccctgttataaaaagtttcataaaagaaccatatataacgacaccttaaaaatataaaactaaaacacacaatagatacagcctaaaacaactcttgacaacttgacatgcaggccggtgatgtcaatatatacattgctggagaaggtagtcacctcatggcagctctaacttttccttccccttacctacaccacatagcacctgtttgtcacaaggactcaacaagaataataataatcatataatttattattcgaatattattatttatacgcaatcgtaatcaaactatttcgcattattcataagatgaaatccaaattaccactggcatctgctattgttacgaaaattatggttattacgcaagtgtacgcaatcaagtagtatctcacgcaagtgaggtcgaaccacagggaattggattaagtactactgaactatacttataattctatttggtaaaataataagtttgcaatttgaaagtaaataactcagaaaattaaagagaaaataaacaaagattaatcaagatgagagattagggaggtgaatcctgttgataagctaccaatgttaatacctaattgctatccttatctcaatgtgaatgacagattataaattaacctaactcttttcagatctt

SEQ ID NO: 355095 - DNA, 583 bp, Cannabis indica
agattgttggatataaggacttttgtctaatttaatttaattttactatttcagtgattgtttatatactaaatcatgcctccctagactttgatacctactaagtcatgtccctcgaactttgacacgtactaaatcatgcccttgaactttcatctaggcgtttttactaaaattggaaaaatattcttaaatctaataatctcaatagttgatggtgcatttttaaaaacgttaaaagttaaggagacataatttagtacatgtcaaaattcagagaataaaaattcttattagttttaaatctatttatgtgggttgcagaaaaataataattcgagtatttaaatacttaatacacgcagatgatgcatgcggagctacaaattactaagtagatcaacgcaattaacaactactaattattatggtgaatgaaggcgttttatgttgaaaaaccttacaagctgagatttcttatattaattattcactgcatgatcagagttccttaattagcttcaaattgaaagtgaaaaaagacaaaagaaaagacattcatgaataggaaggatatatagaa

SEQ ID NO: 355096 - DNA, 932 bp, Cannabis indica
ctaacaggtgtaaggtatgttcctaatcttgctagaaacctaatttttataagtgttctagatgacatgggtattgtcagcaaaattgaatcacgttctatgaagctaagaaagggagctatgaccattataaaaggccataaacatgaaggactttactatatagatggagaaccagtgactcaatgcaaaaatgcattcactagtaatccagaggacctaaaagttgttctatggcacagaagactgggacacatcagtgagagaggcctacagatcatgagtgatcagaaattactgggaaaggatacagtaagtaaagtagacttttctgagtcttgtgtcctaggtaagcatcataaattgaaattgaaagctgacacacataaaactaaacacatactggagtatgttcactctaatctttggggaccatagaaaactccaacacatggtggtaatgtgtactttatgtccattgtagatgatagaaaagtttgggtatttctactcaaacataaaaatgatgcattgtataaattcatacaatggaaaacacttgtggaaagtttgactaatcaaagggttaaaaccctaaggactgataatggcttggagttttgtagtgatgaatttaacaggtattgtggatctgttagaattcaaaggcacagaactgtgaggattactcctcaacagaatggagttgcaaaaaggatgaacagaaccctaatgaacaaagtcagatgcctattgttgcaatctcgactctctaaaggtttctagggagaagctttgttaacagcagcttatttggtgaacagatgtccatctagtgccattgaattcaagacactagaggagatatggtctggtaaacctccatatctctcaaatttaagagtttttggatgtgctgcttatgcacatca

SEQ ID NO: 355097 - DNA, 667 bp, Cannabis indica
catctaaatcaatccagagatgttcatgtcgaagctgaagatttacaacaccagaccattcaaatccattccaaatacatatatactcttcatagaacaaaaataataatactaagtgtagataaaggttgtggttcaataacccaaactcatcatcaccaacgtaatgtgaggacgaggtgtagttacagagaaatagattgagagtaagaagaggaagagaataaagtttatgggagctgacttggttgaattagtcaacaaaatggtgacattattaatatagaagaaaaatgaagaataataccagaagtcaacaaaatggtaatattagtaatatctgttttaaaaagaacaaatttgtcatcaactatcacaccaataagccatatttataataggaagataatgttaattatattctttaagggtaaattgtgttagaaattattttaccaggatcttagatatactcacaagtatgttgattaacaccctaaatatgaacttctaaaacgattatgaaataaacacatataaagtattagaaaccgtacattgggtgcagcggaataatatgactccttccgttcagatttataacccttgtatcctttctgtcgtagagtattatcaagatctgaacgtggatctctttctctccttc

SEQ ID NO: 355098 - DNA, 513 bp, Cannabis indica
ttcctttccattccattccatttcattacctccaaccaaacgccacctaagactatttagaggtaccgttttgtaaatagttaatgatattctattaaagttattaatttaaattatatagaattcaatactcaattgcatcaatatataacgagaagataatgtattagttcttttgattttactacttggccaatttctttttttggattagaaaagttggataagaaagttatagtgaagggtttgcataatcaaatttttgctgctatcatggctgttgttgtctactattttattcaagatgtttgtgtttttgaatgtctttaattaattaatcaaacatgatattaagactagatttaggagttttagtaagagaaagttgacccctaattatagttaaactccttgttgagctttgtttgtaatttggcttgatttaatgttctcttttcatcaaataataataataatatttatatacgtacatatattttttttgaaaactta

SEQ ID NO: 355099 - DNA, 1868 bp, Cannabis indica
ctagtctcgattcgagtttgggtctttgtcttgattttatctgggttgggtttgggtttaggtcctagtcctagttcggttccagttctagttgcaattgtgagtttgagtttggctcctgtccagagtccaaatctagatcctactctagttctagctcatgtcttgggtcctcgtttgggtttaggtttgggtcttgggttctgtgtcatgggtttggatccccaattcaagtgagggtgctaggtctcgatctgggttagcgtcccacccgagtgcaggtcccggtacttgttcggtggtccttctctcgagtcatggccttgtcttggtctgggtcacggtttggttcttaggtcccaggtccaagtatcgggtcctggtcccgttcccagttccgaatcgcggttcctgtctggtttctagtcctagtcaaagtttaggtctcggtttttgtccaagtctgggtcccagtcctaatcttggttcgggtctaagtcccggtttcaagtcagagttctggtattagtccgggtctgggtctgggtccaggtttcaatcagtgtttgggttcgggtcttggtttgagtctgggtctgggtttgggttttggttcttgtacgggtctgacatctggtccaggtcccgagtcacgggtcctgtgtcggtggtcctggcgcaagtctgggtctgggttcgcgtctagagctagttttgggtccaggtccgattcctgttccaaggtccttattccgattcttgttccgatttcgggtctcgggtccgagtgtgggtttgggtcttggtctagaaatggttctaggttagggtcttggtatgattccaagatatagacaccgacaacgggttgggtccaaccctaggtcgtgggtcaagatccgcatcccaatcttgggtctcggtctcgtttcgattcagatcctcggtcccagtccgtgttcgggtctgggtctgggaccgagaccggggtcgggtcttgggtcttgatcccattcctgggtccctattttggttataatttttttgggtcccgaatctaggtttggtcctaggtctaggtgtgagtctccaatctcagtccgagtcctaggtctgggtcttggtccatgtccgtgtctgggttcaggttcgcgtcctgaatcccgatccgagttttgatttgggtccgcgtctcgatctgggtcttggtctaaggtcctagtctgattctagttcccgaagtcaaacccagactcagactgggacccaggtctggggtccgggtctaggtctaggtctgggtctcggtccgagtctaggtatgggtcccaaatccaaacactgactacgggtcaagttcaagccccaagtccagatctggatcacaatctcgggtcccagtttagttccacttcgggtcccaggtcccagttcatgtcctaggttagggtctaggtctagggtcgggtcttgggtctcggtcccaattctgatgctcgtgtcccggtccatgtcctaggttagagtttgagtcccggttcgatttccaatctcggtctaggtcaggatctgggtttgagtcttggtccaagtttgagtctgagtcctgtgtttagatctgggtctgggtttcgaggcgcaggtcatggtctgggtcctaggtcctgatctttgtccatgttcgggtttgggtcctagtcccagttttgatttcgattcagtgtctgagttcgagtttggtttcgggcctggttggggtctgagtcttggtttgagtctaggtccgagtttgggtctaggtgtgggtctaggttcgggtccaggtccgagttttggtctcagctgcaggtctaggtctaggtcttggt

SEQ ID NO: 355100 - DNA, 1854 bp, Cannabis indica
acactatgattgaggactaacttgctataggtggcatgcactacaatcacgtaaggaaggctcgaattttaatggtgaaaaacactataggatttcgaaatagtagagagaaaagaagaagaagaagaagtctctaaaacactagttgtctaacagaatgaaaactagattttgaagcattagttggataatgagacatttcttttctttttatactaattcacttagggttagaattaaattatttggaataaaaaatggtaaaataatagcaaaagtaggagcatagtggacgggcccatcactagttagaattttcctattttttcaactatttatctattatttcacaaatgctatattttgcaattctaatcccattaatgccaaaattatttatttaacttattaattcctcattgtactactatagatttggaattacactttcaattatatagaacgttctatatgttccacgatatagatacgctatgagattatccatttgttataattctaataatcaatgatcctctatagatgacctacattgagtatggactaatttaccgttacactctttagtgtattttatccttaaaacacttggctacctataaattaggcatgtcaaaaagatccatttagttggagcgggtcaaagctctgatctgatggatcacttataattcaaaatattcggatacttattggatctcgaatattccagtgaactaatataatcactaaaatgagtactcaaccgtttatttatattaagccaagctcgaaggaaatcgtcgttttacttctatgtccgaatagaagctatagattccgtatatatgattagcgctcccactcaattgaactaccatgtccttaatatatatgtcatgagaagaaccatttggtcgactttaataaataaatttaagaacacaaataatgcaactgaactagaacctaaccatttcaggattgagatcacttgatctaagatctactaggtgatattgaattgaatagatattacggtaagtttatcatatctgattcaagttcaatatcagtcccttccgatgcatactccatgcattcaacccaagcttactttaaccaatgccctagaaaggatataacacttatccaaggtacaagtaaactacattgtagattaacctatcagttaaaccttgtgtactgataaatcataggaatacatttaatcacacaatcttgattactttccactgtgttgacaatacaataaacaagaatatcaatgtgaaaaggatttggatgaatttataaagcaaataaataaataaatgatcacatgaaccaaataacacactaaataagtaatgaaaataatattatttctttattgataattgaatagaaaagattacattgaaatagaattttatttagggcacaaagcctaacagtggtagcatcagtaataaatatgactatgttgttggttggccaaatttgaggtcaacactaggtttttgtgttttatcgatatttaaggtgttgtcacgctatttatcaataggaaaatgttcagttttgagttaaagtcttagatcgatactaattaagttatttaccgatttatagttgtcgtgacataaggttctatattgtcaagtattattccactcaggtcgacccacacagctgaacttggacttaaggtaagaaaagtcaattgtaccgcattgcatgactaattgagatacgtaatgatcgttaatatgaaagagttataacttgttaggttttatgccctaaataaaacttcatttcaatataatccattttattcaacatcaataa

SEQ ID NO: 355101 - DNA, 667 bp, Cannabis indica
gaggatcggtacgtatgtatgagctcctattttttattgcctcacaaatttcatcaagttgtttggacaactttgctgttgtagaattatttctttttcccttcttaaattgcttcttatttgggtcaagtaaattcttctcttttcttatttgttgacacactctctcatggtcactttcctctgaattctcatcgatctctatatcattatgatcctctgtgtataaaggaggaagtgaaccagaagttggtgcccaagctctagcccctgtagcggtaacatctctaaacaactcatccagcttgaaagaatgttctaaacctctcactcgaaatttagcagcatcaggatacttctgttgattgatttattaatcagaaaacaaaataatatgattgttatatatataaaaaaattataattataagaggtatgtataaaaacctacttgtaacttttcctcccaccattcattaggagcatcaactgtttgcctttgcatgtcccaaccaagtccagtctctcctctaagtaatgaatcccacaactgccactcctttttaacattatcccaatgatttttcatttgttttcgatcataatttctacccgtctttaaattaaatttttcaataaaatttttccaacctaatttgcttaaatg

SEQ ID NO: 355102 - DNA, 1215 bp, Cannabis indica
aacacgcccagaaacaaaagcactctgaaaaggggaaataaccttgtctaaaacaactttcaaccggttagcaacagccttagaaatgattttataaagcgtagaacacaaactaattggtcgaaaatctttcattgcattggcatgttgttttttaggaatcaaaacaatcaaagtgctattaatctcagagaagtcactatgaccattcaaacaattcaacaccaccgaagtcagatcattcccaaaaatggcccaattcttttgatagaaaaaggcattaaggccatccagcccaggagccttatccccagaaatgctaaaaacagcctttttgacctcatgggcagtaaagggctgagccaaaaacccataatccaaatcatcaaggggaggccccaaacaatcaagaatatggttagttgcctcagcatcacaaccatcagaggaaaaaagactagagaaaaaagaagagataatatcaaacatagcctcaggatcactagttgaattaccagcatcgtccttaaggtatcgaatggtattattcttttttctgtgggatgcaaaacgatgaaaaatttttgtgtttcggtcaccagccttaagccaggacacacgggacctctgcttccaataaacctcttccttgtagagaagagcatcaagctgagattgaagatttttgagatgaatcttatgctcactagaatcagggcctaaggattgaatcctaattatttccctttgaatatcctgaatacgaggctggaaatgaggcaagacagatttgtgccaagaggacagagcagtgatacaggaattttgcttggctaagaaggtgccaagaccatctaggctattagagaggtgggaggaattgttccaagagtccctaacagtggcataaaaactagggttgtctaaccaaatattttcaaattgaaaacgctttttaattctacggggctggttatgatcagggttagagtgtagaacaatcttgatagctcgatgatctgagccataaaaaggcaagtggtgcaaaatagcattagggaaaagcattctccaagattcagagcctactgcccaatcaagaagttcatacacagtattattatgccaagtatatttattgcctataaaattaagaggagaaagacaaaacttatggataaattgagcaaaatgatccatatcagaaacattata

SEQ ID NO: 355103 - DNA, 1593 bp, Cannabis indica
tgctacctttgaatttcctttctcgcaagaaaggttctttaataaaaaaactttaaaatttaaaaaatttaaagtgtagtgggtttgcaatgtatcatgtatttccagattcttgttattcatacacacacatacatatgcccctcaagtaattttaaagattgaaactttgtaattacttgaaaaatcactcaactttgttaatagctaaagttcaaaatattacatcaaaaatagaagttacaacatcagtttactggtagtaggatcgcaaatgctctacgttccagtagttctttattagtgagctgttaagacgagctaactggtaaaccccagttcctactattgcctcgatcacataaggaccctcctagtataggttaaatactcctgcagatgcgtctctcgtatttgtaaatacacgccttagcaccaagtctgcaatgttgaacagcctcttcttcacttttttgttgaagtatcttgtcactcggtgttggtatgctgcattagtgatttgtgactcagtacgtttttcattaagtagatccaaggacaattttaagagttcttagttttcttcatgattatagaaatctcatctatgggtcacaatattgacttctaccattagcattgccaccaagccaaatgctaacgtgaatggagtatgccctgttgttgtcttctcagttgttctatgagcccaaagtacttgaggtagctcatcgacccatctacctttagcaatgtccaacttcgttttgatagtatcctttaaggttttattagctgcttctacttgcccatttccttgagaccgtgacactaacgagaagcttttgataatcttgttcctctcgcaaaactcagtgaataattcaccattgaactgagttccgttatcagatactatctcaatgggtattccaaacctacaaattatggtcttgacgacaaaatcgagaactttattacaggttatagaaaccagaggtttagcctccgtccattttgtaaagaagttgacagccaccactacgtacattgctcctcctcgggctgtggggagtgccccaatcaaatcgatcccccatattgctaatggctaaggtgaggtcatcattcttagtcctgttggtggtacgcgaggtatatgtcagaatctctgacatttatcacacttcttgacaaaattgttggtgtccttatttatagttggccaataatatcatgtcgaataatcttctttgacaagctttgccaacctaaatggtccccacaaaagccttcatagatttctcttatgatctcgtttgcttttgcggggagaacacaccgtaggagaggcattgaatagccccttctatacaatttgtcttctactatcgtgtagcgaggcaccgaatatatgagttttcatgccttttttttgtcaacaggaagttacccattgagaagatagttaaatataggtttcatccaggtaagtgagctatctatcatctcgacttcttctttctcacgtatacttggctcgtttagcatctccactgggaccaagtgttggaatttattttaccaggatct

SEQ ID NO: 355104 - DNA, 580 bp, Cannabis indica
tggaaccactttcacccaatttctaggagcctcacatgacgccatatgatggtacaactgatccaaagtaccatcagctctgaagaccatctcaaggtagaaaatagagctcttgactttccatgctatctctcttatcctttgccggtactgtggcctagatctctctctttgtcagagtcatggcccagagctctctcttcatcggagctatagcccacctcgaaaccaccacgggttgttgggcagtttttggccttctaagaccgagactggtcaaatatattactcctttccatttttcattttcgtattaagtaagaaataataataaggctaattaggatttttgccccctgaactttgacaagtaccaaatcatgtctcctgaacttttaaggccattgaaaatgccccctgaactattgagattgttggatttaaggacttttgtctaatgttattcaattttactatttcaatgattgtttatatactaaaccatgttccccagactttgatatctaccaaatcacgcccttcaaactttgacatgcactaaattatgccccctgaactt

SEQ ID NO: 355105 - DNA, 526 bp, Cannabis indica
ttgataaatcggtaataaattttattgcaaacagaacactttcacatgtttacaattcaaggcacaaataatagattgtacataaactatcaaaccaatcaatatcaatgatactaactttctctcttttataaactatattaattagttaaatagaattttatctttaaataatattaaagaaagaaatatattattttgttaaaataatatttattttaatcctattaaaataagagattaatgagaattaattaattattatttattggcaaaataaataataaatcttatttgtgaaaaaattgagaaatcaattttggactttaaaacatggctcacatggtagggtgatatgtaaaagtccatgttgattttatttataaaataaattaaattaaaatagataattatcttttaattattatattaaatatattataagataatatatttaaaatttataaataatataaaataaaagaatataattaattttgttattcagttatatgatatttatttt

SEQ ID NO: 355106 - DNA, 982 bp, Cannabis indica
tttttttcttttttctcttgttataactagaatagaatttgtttatttatttttttgcagagaaaaagaaaaaagaaaaaaagaaagatgtgtcggttataattgtcattttatatgagaagagaggcttttggaaaccaacgcaaactacggaataaaataaagagataaggtcagtacaaagtcatctcaatgatccacacaaccaccatccctcccctcctctcttcaaatgaccattataccctttaccaatcattatcatcatatcgttgctaacactactttggtcttttcaccacggttcctctaaatgcattaataaaaacccaaccacagtaagatgggagacaaacatattatcagaaccagcaccaaaataataataataataaatatatattattatttttttttaaaaaaaatctgtatttatttttgggagatagactgcgagctaggattcattcattaatacgaaaaagctacttttttttattaataaaagattgaaaaatgaaaaaaaaaattatggaagtactatttttattttaatttagtaatttgataagttataatttgtttttttttttaatatgattatattatgtacattgtattataatatgataatatttcattctctattgataaattttttaaaataatttataataaaattaaatttaattatttaactactattatatatataacataggaaaattctacaatgcacctccttaaaatggatatattgatgcacccctatctgttttagcatccgaaataattttttagtcaaattttttctcatgatcatgtacgttataattatttaaggtatcatgcaaaattttaaaaaatttgaaaaagtttaacacaccaaaaactacgttcaaacaatgtgttgcacgcgtgactattttattctatacgcgtgtaaaatagattgtttgaatattattttctatattgtaaa

SEQ ID NO: 355107 - DNA, 687 bp, Cannabis indica
tccaatacattcaatcgaactaattagtatttttatttagtttggatgaataattaaattttatattgctatacgtaaaatatatatgtatatatgaaaattaacattaaaattttactatttttttcttggaatatggatggatccaatccaatctaatacatgctggacctaaaatattggatggattcgatccgatccaaaaaatactagctctaaaatatgggataaaccaaaattaaactaataaacatatttgaaatacatccaatggataaaaccgatccaatccaacatccaatagatgttagatcgattggaaaactgaaatgaattagtcagattggatggtaaaatctaacatctaatatataattggatcagatcagaatagacctaaaaacattgaatgtgatccaatgaacacccttacaatagtagtcatgcattaataggaaaaatgatatctctacctaaaacttatatattagatagattattgaattaaaaaaactgcttaattgttttaaataaaattagtagtaagaatttgctgagacagtaacttgatttatatagataaatgctaaaagattctatatagcaaccttcgtctcactacaagaaatgtcacttttgccagcatatttttgtgctggtaaaattgaatttacttgtgatgtgttg

SEQ ID NO: 355108 - DNA, 1179 bp, Cannabis indica
atctctttgcctctccattcagcgaacatacgcctttgttcgtcaaatgcgagatttactgcagctcccagttcatcctgatcatgatgcagagtgttgctatgactctgcatgagtccgagtgcagcacggagattttgtaatttggtgcatctccgatggtcgtctgggcgttggttctaggcggaacagtcgtattatgaatgccctagttgggtgcggaagtgttattcccagtctcttgcacactagaagcagtttcagtaataagagctgtttcaccattcaccacgcttcccgtctgtccgggattaacagcaggcggaacccttgaactctttgggtcctgtaatgccggatccagcgtctgtgaatttgctgggttagacaggcctctacgagtttgcaccatcgtgttggcagttgaatgtcgaaaagagcgatttgtgatccttctctcaatgaaagcaccaaaatattgactttacttttagccaacaacaatgagtctattttataagcgataaacgatatgtcgtaacaaatatataataaagcaataataagacaaaggaattttatagaggttcagacccgagcagttcggtaatagcctaatcgtcgttatctgtattgacttaagaacaaggaagaagattccttttcttatagctcttacaacaatatctctgaatatataattcttagataataatatagtcttaccttagctacgtatcgtctttcaatctcctggtccccttgcccagtgaacatgtatcactatttatagggctggaaacttgaggaggaagagtttcctctctcgtaacaatacgcataaacagaaagatcgtgggatcaatgctgaatgcaaggatcgtgagattgaggctgattacaatgatagtgggatcgtgtgtatgtcgtatccacgtaaattaatccctaagttatagagattgagctgatgactcatgatgcgaaagctgaattcgctaagtgttggttgctttgcacggatcgctgaatatcttactcaggacatgcctgcgaggcatcctgctcggcctgtctccccgagtagatgttccaagtggacttcacgtgtcaccattctcgtgatgccacatcagagtgcaaaatttgggataacaaggtggcacgatttagtacatg

SEQ ID NO: 355109 - DNA, 523 bp, Cannabis indica
gaagtgttaattacaacctcttaatcagcttctatgtccgaaatcacatatcgaaatatttttttcaattttttttttcatagcggtattcgttatagttccagtaccatccctgtaaattttttaaaaaattaatatagtttacaataccaaatatagaagtcatgatattccagtttactacgtgtgctcaaaaaacttcaaacgtattttgggctttgtaaattgaagctaataggagtattttaaattgggaaatttacatagtatactgacttttgtcattttcttacaaaaatactactaggtagtagctttttcaattttactgtatttttttaaatgttttatactactttttattaattttttttgtcaaagatgacaaaagatttgatgttgatataaaagccttttttaaaagctttttaaatagggttattttcaaaaatatcgaaaaaattattaaggttatgataaatatgacataaaaagtaaatgccactaaatatgacattatcta

SEQ ID NO: 355110 - DNA, 590 bp, Cannabis indica
tttacaatatagaaaacaatatttaaacagtctattttacacgcgtataaaataaaatagtcacgcgtgcaacacactgcttgaacgcaattttcggcatgttaaacttttccgaattttttaaaattttgtaggatatcttaaataagtataatttacatgaccatgagaaaaatattgactaaaaaattatttcagatactaaaacagatagagatgtatcaatgtatcccttttaaagaggtgcattatagaattacccaaattttttttaacaaaagtaatatagatatatcataatccttaagtaatttgcttttaattataaaaaaaatatgaaaaaaaaaattatggatatttttttatgtgacaaaagacaatataaataataaatagtctaaaaaaattatttctctaccagttgtaaaataaaaatatttactaatatagttctataatttaaagatcatttactataattttttacaaaatattttttctattaaatatgttcctagaactcagattaatagaagttatattttttttttggaataattacataagacactattttttgtaaaatattt

SEQ ID NO: 355111 - DNA, 1142 bp, Cannabis indica
taattttgattagtaaaggcaataagaactaatttctggcatttttataattagttataagtttaattatttgtgggccccattgtttgaaatgggcacaagagttataatttctcaatttcgaagattttattaaactttatgggtattttatgaattatatatgaaatatgttatttttgtaatttttcctcggtgacaacacaaaatgcgttggatgactagtttgatcacatgggtaagtttgaacttgatttcttagtgggaaaaattttagagaaaataaaatatcgggttgagcggggttatggaattcgacaattttacacctagttttggtgaaatgcctaagttataacttggagggcattttagtcttttggtttaaagaagagtaggtggctgcctaattagatgacacctagcaattctatggcagcaagagattaattacaattcccttccaaatgaaggaaatcaaaagaaataaagaaaaatcaaaattgaggaaaaccatctttctttctctctctcccttgttcagccatagcaaaaactagaggagatcacctctattcagttggttttctggatttttagctagggattcaagtgagactcaagttgaggtaaaccctagacaattggttctttgttttaaagctttgatttggttttagtttgtgattttgagatataggggctgttagggttagaaatgtttgagctttgatatttgaattaggttttgtgcaagtttgagctttgagttcaatgctttgatcaataatggcatatttgtttacactgagttttctgtgaaatactggttagaaaatgttgtctatgcattgtttaggttctctggaaggtttggttgcatttggtggaggattgagcaagaaatggaaagtttggggcgaaccggtgcaaactaactagctagttttaacagtacctgcaaaacctagccagttttggcaggatccccaagtgcttaattttctcgattcgtgtccattttagtgttgcagttgggcgtttccccatttctaaagttagagtaacccctagagagtataacagaacctagggttgtgggtttgggtttcccagattagggttttgatcatgtgatttac

SEQ ID NO: 355112 - DNA, 811 bp, Cannabis indica
tatactaatcttacctcaattccgaattcaggtgtgccggtcaacctcactggaatgaactgcgtggcgatttacaggctcctaaaccataacaatcacaacactataagtgatacgctaaatcacttcccgggaacttaaactaggaactaaatgttttcctatcgataaaaagcatggcaataccccaaataacataaaaacgaggaaatctagggttcctgaaaatcacccaaccggcagaccggttgcccagctggaatttcggttttgggaatttcaaaaccccatccggaattccggatgcacaaccgaaattccggttcctcgcagaccactttcaaaaattcataactcattcaattcaaacccaatttaacacaaaccttccagacctgttctaaacatcccacagaacatttctaaagcaacaaaaccacccagaatatcataagatcaaaaatcaccattaaagctccaagctttgagtttcaaactcaaacttggttaagcaacattatcgtgcattcaaatcagtccaaaactacctaaacatgcatactaaagctgcagaaaacaaacacaaactcatgcaacaatcatagcaacaactttcaaaatttgtctttgaaaacttaagcttttgaactaaaaattccacaactctaaacaacctaactatcatgcatcacaagcagcttaattatcctcaattaatcatgcttaaacctctacaaacaacaacaaaatcacagcaacaacaacaacctaaactgagcatgcaaacatcatcttttcatcaaaaattaaa

SEQ ID NO: 355113 - DNA, 633 bp, Cannabis indica
tagagtaaaattatttattctcttgtgaacatccttacatgccattaagagtaaaatcatttattctcttatgaacatccttacatgccattaagagtaaaatcatttattctcttatgaacatccttacatgccattaagagtaaaatcctttattctcttatgaacatccttacatgccattaagagtaaaattatttgttctcttatgaacatccttacatgtcattaagagtaaagatttatatatatatatattttttcttatagacatccttacatgccacaacagaaacattatatactacataaaatagcatccaataaagagcatgcagaagatcttatgttagcttctctttaactattctcaatcctcctttgaatgttattacatacagaaagcttaatttcctaaagaaatatagtccccaccatagagtcatagtgccacctacagctttgtagttgttaatctatcatctatagatacttgttcccatgatacgagaaaatcaacaaagacccttttttaaaattctttatgtaattttaataccaccaatgaacatgagatataacttcttagcttccttatgtcgtatgttcgttgcacttgtccttccttctatt

SEQ ID NO: 355114 - DNA, 779 bp, Cannabis indica
tcgtcatatgcagtgagtatctcttccttcataccagtcttcccaggtgacacaatatttcatacctatgataccatcgattgctccaaccatgtttgtgtatggtatcttgattctcttcaattgaaacataattgaaagcctctttaatttgcaaaaattctcgctttctaaattgccctgccaatacctccaaatctttggaacaaacttatattccagcgatgattatctacttaagactataccatatatgtattaaaacatagaaagcgcactaatattccctttaaaataagttcaaccttaccatgggttatcgtagctcaattatttacttttttgacttttaacaataggtcaactataccaatcttaaaatgtactaatcagccaagttatcggggtaaggatactatatataattggcaaaccatgccgaacagaccttactctgtccatcactattatttctcctatacccctacttgtatttgatttactactagagactcactatttataattccttagtcaggggtatttgactcttacttcccacactacctttaagcacaagtcgatacttcctttaagcattttattttatatccaagcgcaatcaaattatcaatacctatcttgttcttttcttctaatttctccactttcaattggacgaaacttacttgtgtctaataagttggttactgtcagcttgagagagtccttccaaaaatttctgtcactagctttttagattgagaaaaacatctaat

SEQ ID NO: 355115 - DNA, 781 bp, Cannabis indica
ttatggtattaattaggtgattttggggaattttgagctattagaaaggctcccatacgttcaaaaatgcattcaattgtatgctaaaaaacagtagctagttactagtaactattttttttcagctttggtcaattcttcttcaaagtgttccaaaccactcccacttaattttaaaccatttatacaccttataaataattaaattaattctccaacaactatatttttagtgactatcattcattcacatcgaaatccaattagtaatatctttgactaatttaagagtgataaatgtgaaaacgataattacacaatttatgatcatcatttctcaaaaatttgcaactcctttgtttatgattgtattaatataatgtaaatcctattgtttattactatttgataaattaataatttatcacacttaattatttgtaacttgattatttaatttaaatattatattatataaaataatataacactacgagtcaatatcaatattggtgcatttaagtattggatctcatataaataatgtaataacttttagggagtatcactaaccaattgcaaaatgacacatctaaaatgtggtagatactacttgtgcccaatagcaatgcagttttattaaaacataaaagtaattaagttctgatttttacggtgccactcatattttgttagctcaagtttgaggtggcgtttggttggaggtaatgaaatggaatggaaaagaaaaaaaattaggattttttttcagttttaacca

SEQ ID NO: 355116 - DNA, 1011 bp, Cannabis indica
caagcaataaaaccagctaccaaaaccttcaattgacttaaattgaacataaaaactgaagcctaagcacttctaaccctaacagcctttaaaactcaaaatcacatatgtaaaccaatatcaaagcttgaaaaaactacaacaaatgatctagggttacctcaacttgatttctccttgaattccttgctaaaatgaagaatccggcaacaattcactctggtactagctgggtttgaagagagagagaaggaaagaaaaagtgttcttcacttttttggcttttcctcctattttccttattttccttaagtgataaaagattaaatgatttaatcttagctgaaataatatttactaggtgtcatgaacctaggtagccacctatcccttcatttggcaatttactaaaatacccctaatgcttaacttttcacccattccaaccctaagggtaaaatggtcaaaaatcataaccccgcacaacaccggtattttattttctccaatatacatcctaataagaaataaggttctagacttacttatgtgatcaaactagtcatccatcgcattttccattgtcacagaacaaaaattacaaaaataacataattcatatataactcatataatacacctagagtttaataaaatctctagaattgagaaattataactctaatgcctatttctaataatgggacccataattaattacatttataaataattataaaaataatagaaattagtgttaattgcctttactaatctaaattaccaactcggtcagtcgccaggtttgtctaccgaagcttgctaagacgtacaatattctttagagaaagcctggttcacggttcaataagcacgtacttgtttagtatttgtttgaatttcaaagcatgttaggaggcatattagattatgattacttgttttaagtgtgttgccttaaaatctataagagtggtattaagttttgtgatcgctgtctaacctgcctgg

SEQ ID NO: 355117 - DNA, 1015 bp, Cannabis indica
atgttagcgctcccactcaatcttactaccgtgttcccaaaatgtatggatgatggacatgttgggttttatgcctgtaacgtcccctcttcaggaagatgtgacttatgaagaacaacctgacaaaatcttgtcgagagagttaaaagtgttaaggaacagagagattccagtagtcaaggtcttatggaagaaccacagagaagacgaggctacttgggagttagagtctgagatgtatatgaagtatcctcacttgtttaattttccacttgaggttgtactttaaaatttcgggacaaaatttctttaaggggggaagaatgtgaagactcccgagtatatatatataataaataaattaaatataatataatatatatatatatatgtatattaaaaaaagattaaattatatacagtagcagcagatcgtttccccctctctctctatctatctatctatctatcatttctctctcttcaaactcaagcacaaaagaaacctaccatcaccaccactccggcgaccaacctccggccaccgcccgaccccacgcgccagacagaaccgaaccccaggtcgccagcgaccccacctcccaacgcgtccccgctcctttcgccatcgttaactcgggatcgcaagtcaaagtttggggtttcaaactttgaacggattttcggtcacctccggcatccgtttgacgaatcgtcttcaccactaaactcagctcatcgaggagaacaacctacactaaaccatttttcccggttcactactttgtacggtgacatttttgtagctccacccctttatggaaacttttcggtgacatcgtgtaccgttttgaaaaacggttggcatgggtgtcatctactcgttgaggtggtcgttttgatatatactactcctattttcggcgacattttcggtacactaatttttaccgccaccgattgttaatgtgcaccgcttaggtgaggcttcagaatcccaaattttaaatatagt

SEQ ID NO: 355118 - DNA, 709 bp, Cannabis indica
agatgggtcggctatagatcaacaatctggtgcacgaatttcccttgtcacgcctgagggccaacacctgcacgctgcaatcaagtttggattcaaagcatctaacaacgaagccgagtacaaagctgtaatcgttgggctaagactagcccaggagatgaaggtcgaacacattgaaatctgtagtgattcacaaatggtggtaactcatgtatccggtgaatatgagggtcggggagaaaagatgatagcatatctgagcaaaatacatgatctgctcgtacatttcaaaagctacggtctcacacaaattccaagagaataaaatacaactacagacgcgttagaacgattggcaaggagcaatgtaagtgacaaggcaaacttggttcctatccagttcctcgaagagcctagcatcactggcacggaagaaataaaaattattgatacatccccaaactggatgacaccaatagcagcctacctcgactctgggaaactcccagataaccgaaatgaagcttggaaaatgagaaggaaagctacaaggtatatcatagtagagggagttatgtacagaagaggattgtcgatgccattgctcagatgtgtcactcaagaagaacctgcacggctcctatctgaagttcaggacggattctgtggaaatcatgccgtcgtgcagagcttatccagaaaatctaag

SEQ ID NO: 355119 - DNA, 680 bp, Cannabis indica
ttctgtttctttattgatgttaaataaaatagattacattgaaatggagttttatttagggcataaaacccaacaaatggctccaacagaattgaaagaactaaagatacaattgtaagagttattaaatctaggagtcattaggccgagctactcttcttggggtgctccgttgttgtttgtaaagaagaaatatgggtctctgcggatgtgtattgattacgggagttaaataagcttaccatcaagaacaaatatcctttacctcgaattgatgatctttttgatcaactcaaagggaagacggtcttctccaagttcaatcttcgctcaggctatcatcagctgagaattcgagaggaagatgtcctgaaaactgctttctgtactcggtatggagattatgaatttctagtgatgtcttttggactaactagtgccccagcaacatttatggatcttatgaatcgagtattcaaggattacctagatagatgtgtgatcgtgtttatcgatgacatcttggtttgttctgaattagaagaggagcatgagttgcatctttagatctgtattgcaacggttacgagaccacaagctgaatcggaagacattagttagcacgtagagatatgcacaatggagcttatatggaatgtgatatatatgagaaactagaa

SEQ ID NO: 355120 - DNA, 802 bp, Cannabis indica
ataccaactaaaaattatttttccttatctacccttctcataaataaatgattaaagttataattatatgagtaacattttttattttaaaacatatatctacaacatttaatattacaataatatatttattgtatttttttgtacagaattataggaaaacaatattattattattattataattatatggataaacaatgtgtgatgattaaattatatgaataacatttatgttaatacttaaatatttaatataaaatagactattaaattagatatttatttatattttattatttaataattaaatctaaaaaatataatttgagagtgatacataaatatatatcatttttttatatatataccataatggtaattttataaaacaaaaaatattttaaaagaataaaagatagcatttcggtcaaaataataaaaattctattttatttgatactatactaatcatcacaattcttattcaattattgattctataagctttaccaaacaaaagaatagaaatttcattccattctattcatattcctattaccattcccatttctattctacttttattttgtaaccaaacgccataacatttagaaagcaaaattaatcaacaaatataagaattaaagtcatgataaaaagaaatacaaccctaacaacaaactccaataagacagtaattaaacattcagcgattgtgaaagtttttttttaaatgagccaataacaaatcaaacccacaaataaccacccatatatattattccaaaaaaaaaaaaaa

SEQ ID NO: 355121 - DNA, 811 bp, Cannabis indica
tctttttgcggttaatttcatgacaaaaaaaaagttaaaaaccaaaacttcaatggtgaattgtgataatgttctctaaaaatcaatcaaatgggtttgaacactaatgccaaacaatgtacatagataaaaaattctaaagcaaatctgagaatagataacaaaaaacaaagatgaagattaaaccaaaacctaataaatctgaacaaaatcaaatcaaatccaagcccagcccagcccagcctatgttcgatcgaatctgcgatccccaccaagccggccagccagcagcgaagcccgaaccccatatctaacccagcgaagcaagatgcaaactccaaactcgacatcgcaagtccaattgcacaaagagaacctcaaacacctgcaaagaaaatggaagtagcagatcaaaggtcttttgggctatcgcctgttaccaatatggatcttccgaaggatgtcagaggagatggcaaagaagcccgtcgttggactatttgggcgatgtcagtgggtgatgaagtccggtgaggcagaatatcacttggggtttcagtccgtgtgtcgtccggcgtcgatgggccttgggagggtagggatggtggtcgttgcttcgtcatcttggaggtggttcgcgcacaggaggtcatcagatttcaaaagcaaagagagggagaagaagaagaggcatgtttggctgggttgtttaggctaagggatagaaatatgaaaccctaaatgtgaaagttgaagagataaagaaataagggttttgctagttaaaaaaaaaaagaataggattttttaa

SEQ ID NO: 355122 - DNA, 594 bp, Cannabis indica
aggtggccttcggcctctaatatacctaggcagaacacttaagttagttacaaagtatttaaccactttgtaactaactctcatatttttactgcattccactataacacatataaataatcatcagatcagtatgataaaacagagcaacaaaaagagagagcagatcagatcaagaccaagaaaaacacatgatcagatccggaaaagtggagagttgaaagagacttactttgagtgagttttggagccctagggttagggctcggatgttcaacaccaaaaccagggagattgattcatggagaaacaaagaaaggaagatgattagagattaaacatagtgagaaaaacagtgagagaagagagaaacaaaatttgtaaacataaaggattaccagattgtacctgtgatttggaatcaacaattgtaactctttgatctttatagtggaatcgagctatctgaggcgagctcaagaggatgtacccatcaattattttttggggaacctctataaatctggtgtattctcttcctttatatttctgcaatttctatattatgttcatgtgatttctgggttgggtatt

SEQ ID NO: 355123 - DNA, 684 bp, Cannabis indica
agttatctgggttgacaacccaggagcatcagcacttacagctaatccaatcttctatgctcgatcaaagcacatagaaatcgatctacactttgggatcaaattagggccaaggagttatctgccaaatatgtcccaacagttgatcaagttgttgattctcttacaaaacctctctccacagatcgatttttgtatctaaaaggcaaactaaaatggttgctaccccttttcgtttgaggggggatattaactaacattttacttgttttagtttcttaagattagttagttaatccagttagttttcttaactaactttctatttttgccttgtaatttctgaatataaataaatgaattgtgctctttttcgagtcaaacttttcagctaaattctctcactttgagttttctctctgatttttacctttttggtttagcttgttaagtttctttattatttaactaaaataaagagtatgacttaaaaaaaaacctccaaccattcaaaaaataactcgctataataaaaaatagatagaattctctaaatgtaaatgtaaaacgctccttacttttttactaaatttttttaatagtactttaattaaaattactattattttttttattttataaaattaatttatatttgacaaatttaaattataatatattatt

SEQ ID NO: 355124 - DNA, 562 bp, Cannabis indica
aagaaaatcaattaccatggctctaaggccagttggtggaattattttactcggatctagatttactaacaagtatgttattaacattttatatataaacttctaaaacgatatgaaatgaatacatataaagtacaagaaaccttacagtggttgcagcgaaatataatatctccttccagtcagatctctaacccttgtatcctttttgtagcagagtatcaccaagatctgagtccgaatctccttctcttgaaattggattcttcacagccttacacactatgattgagtaccgcttgatgtgtgtggacactcaccctttcactatgggttacggtttagaagagaggaagagagagagagagagaggtttccgctaggtataggaagagaggctacaaattttcactgaaggaatgagatgcatcatccgtttcccttaagccatcactacctatttatacggaaaccacctatggttagttagatttatttggctattaaaataataaaaagataaatggtaaattttactatagagtggccggccagtgaagtt

SEQ ID NO: 355125 - DNA, 646 bp, Cannabis indica
aaaatcactttctaagaataactcgagaacaaaatcgcttaatccaattctcatatacatttttcttttactcacttaatcatataccattagtaatgaacacattgggtcttgggcccctatagccttcgtgtataagagccattattccgtgggtgtaagggcccaatggatgcttgaagcggggatgttacaaatatggggactactgactgtcaaagcctcaactgacaaaatctgctccaactcctgctcgatcttcttcagcagcaaaggcttctgctgctgccaaaggcaagcagcgaatgaaggaatcctcccctggtaacattcctacaaccctttctcactgttctcgattttattatcgtgaaaatgagcgtgattggaatttgtatgctacccgtaagtttgaaagtgagaggaattatgatttgcatgctcatcgggtctatggaattgttaagtttattcaattccatcaatgggaaaacactctcactggtttcaatgggtacattgcaaacattgttaaggatttctatgctaatctcactgatgattttcttgatgagaattctagactttttcgaaaagtttatgttaggggacattggttttccttttctgaaaaagacattgctca

SEQ ID NO: 355126 - DNA, 509 bp, Cannabis indica
tcttttagagtatgttatgctttaatttggaatatctgtgatattggtagattttgaaaggtgatttagagattaattagaataaaatgttataggaaagtttcttatttggttttaatttaatggaatccggttttaatggtattgattgaattgcaattttggtactaaattatgtaatatacactgtcttactataattaagacaataaaatttaggaaattttaattttaatgttgagaaaattttggaatggccatgtatgagctgagggttgactctttttgttatggtatatgtgtgagttacatattttgtaagtttattggaataattatttattaattatatatttaatttaatttattactatttattcataaccttctttattatcccaaaacttaatttatttaattagtatattttctttcatcgtataggattgttttattaattctattttatataaggaaaaaataatcaatttgtatatatataaatattt

SEQ ID NO: 355127 - DNA, 819 bp, Cannabis indica
aaaaaccgtaaccgaccggtcggttataaaattttaaaaaccgaccgattttcacccataatttgagtaaatgtgtggggtgataatgaaaattttgcccatggatgaattatatgtggtgttatggccctatggggcattttggtcttttcgaccatttattgtattttcaatgaaagaaatttttggtggaaattagatgcatttttctggtttttgatcagctctaaacggaatcccccttcccctctctctttctcaattttcttcactttgatattgctttcaattggttttttagtgtgtttagagcttgaagaaaattgtggtgttagttgttgaagagcttgaggtattttttacctctcctctttttattttgttgctgtaaattaaagttgttaatgcatgttttgctagtaactatgttcttagtgcatatttgtgtgattgtaataatttgagagatttgtatgttgtttaagcttgcaaagttatagggtttgtctttaattatgtgtttgtttattgggatggataaaagagggttttgagctactgaatttgggtttgattttagagttttcgatctataatattagcttgtaaatggaatttaattattaaaccttttggaatatgtgattgtacatgtttggccggtctataggacacgggcattacagtttggtatcttgagcgagaaccctcggcgcacacaggggagacacgggcgaggcttacgggcgctggcagggtgcactcggacgtgtcacgcgcgtgcgattgagcaccctgcatacccgaaatccctatttt

SEQ ID NO: 355128 - DNA, 1322 bp, Cannabis indica
tttctcttctgaggaacgataggagatgtcatcgttgttgtagtttttggcttgcggttgagtaccggtgcagacttcagaaaagtcatctctgcgaggacaaataaagataagtataaataacgataaattttaaggcactagtttataacatgcgatatgttacctgacgttggtcgagaagtttgcttggaaaggcgtttgtctatctgctcttgttgcttctcagatggctccttgtacactggctccctttgaaggcttgcgttatctggaattagcttgtgttctcgcagctttgaggtcgtgcacagtaatcgccagtcacgatcttgtacaggaatttccaagaacttcagcagtttctctgcgagtcgtgtcaagtgtaggtcgagccggtctatttgcgacaataaaaagggcgagttagcttaaggtcacaagataactcaaaaaattgactaagtaaagaaacacgcgacatactaagtcgacggttaaagtcagtcctaatccctggaaccttaaatacataaaaccacttggatttccaatctcccatgttggaaaccatgccttccaccccattgatctcaaaagtggcccacttgctgaaacaatagaagtcgttgtggagacctacattctttatgtcgtagaaatagctaaactcttctgtcgagggtgccctgtgcacgtactccatatacatcgcgtaaaagcctaaggctatgcgatagttgttaggggttaattggaaaggggacacatcgtactgtttgagaatagcagagatgaatggatggaaggagattgacactccgcatcggagaatagggatagacactaagacatcttctgagggtatgatcgcagggttggtaaaagggaggtgtggtctttgagtaggacgaggacgcatggtgccaagacgcaataggtttaacctcgaaaaggtggtcaagtcagatttggtaacccgcgagactaagtcttcgtaggagaatggctcatttaactgcgtgttgtcaaccgagtcagactcactcccttcggcatctccatcttcgtcagacccacgatcaagaacttcccaatcttcacccgtctcctcaacctcgatgtcaggagcatgcctggagtgaataagatgatcacggactgacaccgtagactcgctgtctcggatctcgatggttcctggttcagcgagttcctgcaccatcctctcgatgtctgcagaggacagcagacccaactctgtatctccagcagtagggacctgtcaagtattttgtgattaaggttatgtaatagtggag

SEQ ID NO: 355129 - DNA, 653 bp, Cannabis indica
ttaattcatctatgctctaactacctaactactatgagtgtttgtttttattaaaaagttatttttgaaagagtttggatgaatttttaagtatgttttgtagctctttatatattggaagtaaattttttatgataggttctctatgaattaggtcttttgaaatattataagatggttttttataggttttaattgaaattttaatatgtgctcatcttaaactaaacaaaagttcacttaaatttccttccaaagtttacaagtagatctttacattttgcctttttttagtgatatgttgaggaatattatttttttttgtattcgtaaattaaaaataatctcatattatattttattaaaatgtatcaacttttgtaaataggttgttcaatatatttttaccatttacgtaagtttagcacataatttttattaacttaagaggtataatggagacatcatttataaaagtgtgtatatcttaaaaatataaaaataaaagtaaaaattaaaaatatgtaaagtaaaacagagtatacagtataatttcatcaacaccgatcttaaaaaactgattacattctatatacaattatatggatttatatatgagatttttatactactgaaattttacaactttttta

SEQ ID NO: 355130 - DNA, 810 bp, Cannabis indica
ctaagacttcttgtcctggcgatgggtggtatgccggtaaattttcattttctgactctgattccgatctctacctcgaaatgataatctggtatatctccatttgacttgttatcatttgttgttggagacagttctgcattttctaattcctcattatctaacgatggggaatactctgattcgtctaaattttctaccatctcttcatcttcagattttgagtccaaaaggagttccatcgtttctattatctcttctacttcaatttctggtgggctctttaattccactactaacatattttctgtcacctcgaaatagtcaggcctttttgtttccttacagtcccgttcagttgtagggtcaatggaatcggtaatatctttcttactcttatcactaagtttgtaccgtacggtcttgatgcatgttttctccacaccattgacttctgcagtataagtcttctcaaaagagaaactatggaatttcgttgctaactcccgtatcaacattgtgtacctagttgtctcatcaacattctttatggtactatgccaaatgctatcgatataataaagcaattcggggacgtgagacaatgccacccttaatactaaaaacttctcttgtgaccagatcaaagctccccgttttcttactattttattgatctctccattaatagcaataatctccctcaaagctctaagtattttatcttccatgcccaaaacatggtcgatcttaagcgataagatgctcttaatttctctaagtaccacatcacgtgacgctcttattcta

SEQ ID NO: 355131 - DNA, 1035 bp, Cannabis indica
gcgtgttccgcctagaaggccattcacttaaaagtaaatgttctttttgcttagtacttagtatggtcatctgacctggtacttccatttgtagtattttctttaatgttcctcattccaataccttggtatcagaacgagttgcattttttcatcatacttacccaatttgtatgctcatgattcgagaacttcgaccacctgatatggtccttcccagttaggtctgagtacacccgtcgtactgtctttggtgtttagaaatacttttctttggaccatatctcccacaaagaatttctgagccttcacttgtttgttgaaataccgagctactttttgttgatgggccatcaactttaagtttgttgtggttcgcttctcttcgatttcatcaagtgtttcggcaaggagtacgtgatttgcttcttggttgtacgttaatcttctgtgggatggtggctcgagttctacgggcagcattgcatcatatccatatgccatggcaaatggagcttgtctggttgccgttttctcggttgttcgatacgaccatagaaattcaggaagttcctccagccagtttcctttagcatcctcgagtcttttctttagtgtatccttcagggtcttgttgattgcttcaacttgaccatttgcttggggatgcgccactgtggagaaacttttgatgataccatggttcgcacataaatcattgaaggactgactgtcaaactgtttgccattgtccgaaactattttgaacagcaatccgaaccagtagattatgttcttcacaacgaagtcttgaacttttttggatgtaatggttgtcagtggttcgactttcgtccacttagtgaagtaatcaaccgcaaccactgcatactgcattgcacctttgcctttgggtaattttccgatcaggtcaattccccaaatggcaaaaggccacatactttgcatctgagttaactcaatgggcagagctcaaggtatctttgaaaatctctagcatttgtcacatttttt

SEQ ID NO: 355132 - DNA, 615 bp, Cannabis indica
ccgaacccacacctagaccagaagcctagtcccaaacccaaaaatggacccaaacccgtaccctctgacccaaaatttgaaccaaaaccgaaagttgaccgagactggaactaggacttggacctggaatcataactgcaattggacatagatctagaactgtaacctgaccaggaccaggactacaaatcaaacctagactggaatggggagccgcacccggatcccaacccaaaactggactcgggacccaaacccgaacctgaactcaaacccaaacatggaaccagactagggacacagaacaagggtcgggacctagaaccgcaccccagtctcgatcccaaacccaaactcagaaatgggacctgtgatttgaaccagaataagaccaagacccatgacagtgatccagatcttgactcgcgattcgggtaacggggcctagaagagaccagtagtcggtgtctagattttggactcaggacccggacccaaagctcgaaccaaacacagacctagccttagaccggaactcgggcttgggaatggccgtgtacccagaccggaactaagacccggacctggacctaaatctgggacccgatcccaaac

SEQ ID NO: 355133 - DNA, 603 bp, Cannabis indica
gagcagaaggtgagaaaaaacctagcaaattaaaagctccttccactggacattcgcccagctcccccattacccaagcaattcaagatgaaacgataaaagttccagcaacaataataggcaagggaatgggaaaaagggaaagttcaccggcaaaaccgaacaagctccccgggagaatcaagccaagtatactgcatttaccatcttgactgaggacatagaaagcgtttacatggccactcagtcactggctgcgtacaagaagcccaaaaaagatgtcagcaagagagacatgaccaagttttgtcaatttcatggagactacggccacgacaccaatgaatgcaacaatctgaagcaggaaattgaattcctggtaaggaaaaataacccgcatgtacaaaagtatgtcaaggccgatcagaatcagaggggtgataacaaccaagaattgctacctccaccagtagatggacatctgcaagtcatcattggaggcccgcacatagttggagattcgggcaaagctcgagagaggtatgcccaaacagcacagcacgagcaaggagaagtcatcctggccgtagaagaaaggaagcc

SEQ ID NO: 355134 - DNA, 554 bp, Cannabis indica
tatatgccaaaataaataaaaaatttaaataaacaccctttaaaagatgcaatgtagactactcaaacacaatttttgtttcgaattaagtctactacttcgagttacatggttctataaaattggtcgtgcattacagtcacgtgatctctttggtacccaaattaacaacacctacaacaaaaacttaggttttttgggatataataaattagttatttaaatggatcaaatattaataagtatgtcatagtttttatattttaaaatagagtaattggcggctaaaccatcccaactcttattttacttgcaattaaccatccaaatttaaattttaatgggaaaacctaccaaactcatattctgtttgcatttttaaggtgccgtcccataatctctgttaatttgtcattttgtctacatggctagtgacacatcaccactaattccaacgtggctgccaatgtaaatggtacatatttacacaaatgtacaattgatttaattaatttatattattttaaatttaaaaataaattaaaactaaaaaa

SEQ ID NO: 355135 - DNA, 658 bp, Cannabis indica
actttataaacatatgggtcgggatcccgagcatcaaaatacgaatttaaaagtatttttacaaatacaatatccactagtaatattttttttaaaacatcagtcaactaaactatacttcaaaatattataagaccgagaccctttaggttgcactgccgcgatatgtacaatcattgccaagctccatctcactgttcctctagcttagcttttactttacctacacaaggtagcaaactaatgagtcaacagactcagtaagatatgcaaaacatatatataagcaatgctaaaccggcttaatgcttaagccgctctgagcaatgagctctccaaatgattaagaacgttcttaagggaagtacgacttctgtaccaaatgcaccaaagtaccaactctgtactcgtgatggtagagccgttaatgtactcccaggatttactaagtgttgtaccacatgcacgacgtaccccctagtactcgtgttggtaacaccgtaaccctactgataccctacgctatactaacactctttaaatcacgtacatattagttttagtagtgcaaccatccaaacaagcattcattcacatatatgtaatattcatgctattttacctcattccgtgctcaagtgtgccggtcagcctgagt

SEQ ID NO: 355136 - DNA, 681 bp, Cannabis indica
acttcatcgctgattatcacatcagtataaatcctgtgcactaatgaattagggactttgccttttgaagcatataatcacaatcgcattccactgtgttgacatcactgtaattgtgaatgactatatgttctggacttagcagattttgtatatattaaaccataaatatgaaaactacatgtaaacataaacgacttctaatctttcattgataacaaatcatattagattgaaatgggttttatttagggcataaaatcccaacaataatctcataatctcgctgattaaaatcccccaataaaacctagtcatagagaagcttcaatgatccaagaataagttaagaccgagagatgtggaagtctacctcaccttacttcaacttcccgaacacaaaagactaattaccacttcgcgacccgaagtgatccaaactcaaagtctacccaaatgatacccgaatgggtactcgaatggcctatcgcaaatgctgaccgcctaagattatcgcagatgtctaccttggatgcaacccagatcaccccaatgacagttatgcttttagtgacacagaatcagatcttgacccttgtgccaaaacatggtagtgcgcgtagtgttgggttttatgccctaaataaaactccatttcaatgtaatccattttattcaaca

SEQ ID NO: 355137 - DNA, 785 bp, Cannabis indica
ttcttgccttcaggaaaagttgagccatctattctataccctaatttcgaaccgctcaaatcttggagatactccgcgacagataggatacaagcattaaagatctgagcggaaggagccattaatattctgctgcacccaatgtaaggttttctgaaactttatatgtgtttatttacattgttttagatattcatatttaggatgttaaataacatacatggtagtaaatctagatcatggtaaaacatattctaacaactggccttagagccatggtaatgatttactttcatgaaatatgaattaaaacgatgttttgtgatgatttggatggtttcatgatggtttatgtgcttatgtgatgatagttcagaaattgcaatgtatgttgtaaaaatattttttgtttcgatctggaattatttttactggaaagtagacaaaaaattaataaatttaggcttttacagaacctaatttggattttttatgaattagttattatttttttaatttaaatgaaactgaaatcggatgcacacatgcgcgcgcgggtaccaggcaccgctggaacaagcaggctcgttcagacagaaatgatcaaaaattatcggacacgccttttatgaatgggtgcacacgtcgagcattcttggccaattgaggctgcatgcagcctctttctcggccattccttccccatccgcgtgcgcaggggtatgtaatgcatacccctgtgcaccaatcttgttttcttcatatcttttgattcaaaaatcgtt

SEQ ID NO: 355138 - DNA, 937 bp, Cannabis indica
tgatattaccatatccctcattttgtggctgattattaatgattgcagagccttgaaattggccaactaattcccccattacctccggatttctagaaattagaaccactggaggatcaaatttgctaggttggccttcacgtcgtgcttcatctcgtatcgccgcttccgaccggagccactatgccccaaaggtcaattgtcttcgtagtgtcgatgcctttaactccaaactgtaaggcttttcatggagatgtaatggcttcaagaataaccttggacaaaacttttccgaatgtccgatgatgccgcatattaaacagaaagtaggcagcctctcgtacttaaaattcacccagtaccacgaagagtcctcattgataatcttcatacaacgcttgattggtttgccaacatctatccaaacccagacacgtaaatagtccctccaaacgcccacaaagttattcggatccgattcaacaaacgaaccaatatagtttcctagggccgtgacaacactgagtgtcatatttccggattgtaaattatgaagttgaacccacatatcaacatggttgatttcaacaagcctagggttctctccctcctttaatcttgtaaaaataaatggtttcctatcataagtccacggacttccatcgatgactctttgtatatcaacttcatggaaaaaagaaatagattaggattgagttccttgacatacattcccattcccggttgccataggaaagccatcatgttctgaaaaacattaaaatccgaaacacgaccagttaggagtttgcccaccaaacaccaccttgtgtctatcgctgcctcttcagccctgcctactggcacccgtaagacttcattatcttcttcctccagaataacatctcccattacccttccttcattactgctagac

SEQ ID NO: 355139 - DNA, 645 bp, Cannabis indica
acagttttctctctatcaacccgagtacaccccttgttcttgaccctcttcaagaacagaactctcagcttagaaccataagcaactctctcttattctcctcttttcctcttacttaaaatagaaaaaactagacatatatataggccccaactcaaacaaggatagcaccaactaactaactaacataaccgaaagttagttaagttagttggtttaaggagttggataataaattggtttagaggatcaatttccacaataaccctataattctttactaatttggggaatatatatataaatatatatatataaatatattttcctttcttgtttaccattttatcttgttttgtagtgataaaaatgagaaggataatgatgcaaatttatcacaaaaaaggattactttcaaatcccaatttataagagatatttgaaaataattctcaggctcatccctcacctactctctagtctacccaaaaattaaattaattcttaaattagaaatgtaattaactaaataaataaaataaaaaagaggaaattagtgttttaaaattgaccttaacaattaaataaagagataattacataagtgactatttgctttaaaaaaaaaaattacattttacattt

SEQ ID NO: 355140 - DNA, 616 bp, Cannabis indica
gatattttttgatatttttttaattaagtagttaaattaaggttaaattaagcatagaaattcaaatttgtgatttcattattcgttattagatcaaaattcgatagtttgatatttttaaaattaatatttatatttaaatttgtttggtaattattcatgggtaatacccattaagaagtgttccatatatatatatatttatatatgaaatatataaaaataaattgagtgtgaatgtatatataattgggaatatatgaatatgaatgtatatatataaaaaaaataaaaaatagccgaacgtgtatatatataaattaagacagaggttaaaaccgctcaaataccaactgttagaatataatataatatgaacgataaagcatatataaacgatatgtaatgcggaataaattgtaaacatatcgaaactgtatatgcaatgaaatgatcgaaatacatctgaccattgatgtttgagcttcaatccctacgatagcttcggtattggagttcgggcttcatcgctctctcaactctcttagtatggaattttactgttttgaacagaatgagtgaagagctcggggaccaagaccctatatttataggt

SEQ ID NO: 355141 - DNA, 596 bp, Cannabis indica
atctttctcatttttattttgaagggggacgatttggtatttgtcaaagtttagggggcaaagttactaatttacaaagatacttcagtatttaaatggaataatgggatggaaccgaacataaagactaaattctgtaaatgtaaatgttcagggggattcttaacaagccatatattttaagggagaaaatcagtattgtcgaaagtttaggtagaaaaattgctaatatattatgattcttttacttagttttgacaacttgatttatttttttgtactatttaatgattttttcatagaatttgttgttacaactttattcttttaatgttttttttctcttttctgttttgagttagtgatagttaaaattataatttattttttaaaagttaaataaatagttacattaataatagaaataataaaatcttatgatttcaaaatgcggtatataatataacgagtaatatataataaatatgtcaatatctactattgtacaccgtgccgattgaaaaacaaaaaattgtatcattgaatttcaaaaaaatgtgtcaaaaaaataaattaaatatatgtatatacatcta

SEQ ID NO: 355142 - DNA, 1808 bp, Cannabis indica
aaaaagctaacgttttaacatggaggaaaatcaaacatctggaacaacaggagcagtctcatccgcgactttgctgatgacctcgttctcggcttcctcagcatccgcaccctcgacctcttcaggaaggttccctccaccaccttgggtttgagtaggcgacatagcacgaaaagcctcggccatctcagcggcttccgctctgaggatggagaagtcaaagtctgggactttggaaagagtggtgtaaatataatcagaaactgcctgatcatattgtttcttcccattctctttttcggtctccaagtcacgagtcatttcctcgatcttcgcccgcgagttctgggcctcgagctccgcctgctcctcagctttgcaaagttcttcaagctctttatccttcctagccgcctcttgcttcagcctcttcatgttctcctgaagctgggcattgtgcctcctcagcgagtcagcttccttcgaaccagcagcagcagcttttatgaacagggtcatcgactgcgaggctaactccacagagcgcagaacaagctcctcagaagggatcttctccaccttggacatgaactcctcgcccacgagcttctcctgcatggccagaaagtcgcgacctcggacagttggctcgatcaggactttcttccccttgtcctgcgtggtcttggccagcttcttggaagaatccgcggcaagagtagccaccacatcgctcttcctcttctgggcgacaacaggcgaggtcgtcgttgctccacccttcggcttgatcttaaggacgggcgcggacttcaaaaaagtcatctctgcgaggataaatgaaagataagtgtaaataaaactcaagacatcagtttataacaagagataaattacctgagattggtcgagaagtttgcttggagaggcgtttgtctatccgctcttgttgcctctcagacggttctttgtatactggctctctttgaagacttgcgttctctggaatcagctggtgttctcgcagcttggcagtcgtacacagtaatcgccagtcgcgatcttgtaccggaaggctcccaaggatttcggctgtctctctacgagtcgcgtcaagtgccggtcgagctggtctatctgcgagaacaagaaaaagcgagttagcataaaatctcaaaataaatcagaaaatgcctaagttaagaaacacgcgacatactaggtctgcgattaaagtcagttctaatcccagggactttaaagacgtagaaccacttcgatttccagtcccccatgttcgacaccattccttctactccattgatctcagaagtcgcccatttgctaaaacagtagaagccgttatgaagacctacgctttttatgtcgtagaaatagctgaactcttctactgagggagccctatgaacatactccatatacatcgcatagaaggctagggcagtgcgataactgtttggagttagttgaaaaggtgatacatcgtatcgcctgagaatagctgcgatgaaaggatggaaggggaccgataccccacatcggagaatgggtattgagactaccacatcctctgtgggaataatcgcaggattggtaaacgggagatgcgccctctgggacggtttaggtcgctgaaacgcaagtcgcagcagatttaacctcacaaaggtagtgaaatctgatttggtaaccctcgaaatcagatcttcacacgcgaagggctcgttcagctgagtgtcgtcaaccgagtccgtcccgctcccttccgcctcttcttcatcttcgcc

SEQ ID NO: 355143 - DNA, 851 bp, Cannabis indica
tagatcatagggagacaggtgggtctctctcgcatctgttatctctatcaagacttttgatgagatactagccagtggtctagtgagaggtgtccagtttgtgatacccactagagatcaaagagcacacctacttactatcggttggatggcttggtcggagcatcatatacagtagagggcagtgttactactacaccccatacttcagagacattgctgcttactttgggatgtgtccaacacaatcatcctcggtaatgtttattttatttgcaaagctaggctggcctcagcctactgttggaacttattttaccaggatctagatttactaacatgtatgtttgattaacaccctaaatatgaattctctaatacgatgaaattaaacacatataagagtttagaaaaccttacattgatgacagcgtaataatatgactcattccgctcagatctctaacccttgttccaatctgtaacgccctaactaaaaggcacgttacccaagataattaagaaaccctaatcccctagacgggattactaataaaattagcgcgatatttaaactttaaatacaaatggaatgaaattaaacttgtaataatttaaactttacaaacaaaagttacatgtgtcgggatcccaaaaatattttacaaaacactattacaagtctgtttccactggccgacctaagcggcaaaatagaattacaaaatgcatcactggtagaccccaacccacttggtctagtgtggcccgaacatgtacatacatcgcttagctctcgaactcatggctaatcagagtcagatttaccctttcctgcacagtagagcacc

SEQ ID NO: 355144 - DNA, 1130 bp, Cannabis indica
atccttcattcctcgtttagtgtagaggctttggtttggtttgtgataattgagtttttgagtacaaatatcatgtaaaactaatgatacactcattgtaatcaaagatattttgggtactaaaatttaaaaaggccatttactttaaaaatttaaaaaagggacattgactttcattagtattaaattagggccatttattacaatttccctaaaaagaatagggagaattccattagaaactttaaatgaagctctcctccgaaaatttttgtattggaaggagagggataagtgctcaaagttctttgtttcagccacaattcaaaacctatgaaatgcaattgagagcataaaaattggaattggattaattctagggctctaattggtaggaatgctcggattacttcaaagctatctttggggatcgcctactcgattgttagaaagtttggagggccttatcccgattagaatttagaattaaggtgaatgaggttccatttcaaaattaattgacaatgagagcagtaacttattactaattctaatacactcttctcacgtttaggcttggaaagtttgggtataatgaaccacatttaagacactacagagccgaacgtgacatttgaaagaattccacaaggccacaaaaaattagtgggtatacacattgggaaatttgtagatattttaaaacatatcaaatattgaccttgcttttagccaacgacgttgagttaattaaagcgataagaattattagaaataatgatatgtaatttagcaataagaacacaaagatttatagaggttcgaccccgcgattattgtaatagcctactcctttttttgttgtattgttttgaaaaataataagatcacaagaagcttgtcaagtgagtttcttaagaattctcaggaaaagcttacaattcttttacagcataagaattctatagaaaatataatttcaaatccatgtataatggaatggttccactattgatagaaaaaattatatcattttgttttcccaaaacaattaggaataaaaagggaaacttatttattttcctattttacatttacaacatgtagaaatcccacaaaaatagggattt

SEQ ID NO: 355145 - DNA, 533 bp, Cannabis indica
cattacatatccttagtcacaaaattcttaatattgtgaaattactctcactactacaaataaccccttttatgtctaacaaaaatagggttggacatgaaattttttttgaggagattttatgtccaacattgatggactagaaaaaaatttatattatgtctaataatattggacttgaaaaagtcaaaggacgttatatgttaaaaaatttaattaaataatatatatatttttaattttgagtataattttcgtccaactactatgatggacgctactatgctggacgtggggttagattatttgaaaaaaataattcacgcctacctagaggaattcacatgtactactaaaaaaacttatcagatttcaaaaataaagtaatttcttattatttaataaataatatattttctctttctctctccaatttaaacctaaaaacctatcaaagccactcagccgctccactaccttctctctctcaataatatgttttattctatttttctaacataaaaaataaccag

SEQ ID NO: 355146 - DNA, 806 bp, Cannabis indica
ttctagctttaatcttctcaattgcctcattggtccactgtactgactctggaccttgatatttcttctcccccgtctcatcccaatgaacgggagatctacattttcttccatataacagttcatagggatccatccctatagtactctgataactgttattgtacaaaaattctatcaacggtagatacttactccaagagccttcaaaatccataacaccggctcgcaacatgtcctccaatatctgaattgtcctttcatactgcccatctgtttgaggatggaatgctgtactaaattttagtttcgtacacatggcttgttgcaaaactctgccaaaacttggaggtgaacttcggatctctatccgaaactatagactttggtaccccatgaagcgttactatttctttaacgtacaactatgctaactgatccactaaataggttgttttaacagacaaaaaatgagcagacttcgtgaatcgatccaccaccacccaaatagaatctaacaatcctgtggtactaggtaaccgaaccacaaaatccatcgtgatgtcctcccacttccattcaggtagggttagaggctggaacaatcctgctggtctctgatgctcagccttgatctgctgataggttaggcatctcgatactaattctaccaaattcttcttcattctgctccaccgaaagtaaggtttaagatcctgatacattttggtggtgccgggatgtagggaatatagagttgtatgagcctcctcgagaattttttttctaagttccacactgtttgg

SEQ ID NO: 355147 - DNA, 979 bp, Cannabis indica
attatttatgaatttaattttttgtgggctccatttgtagaaatggatattaggctaaaatttaacattaagggcattttagtcttttgccaagggaatgttttggtggctgccctagagtgtgacacatggccttttatttttcagcaagagttagttaggaaatcctttttcattttgaggaaattaaaggaaaaaatcaagaaatagaactcttttcctcttcaccttctctctcttcgaaccagccacaaaactaggggaaaaccattcaaatcctcatattttctggaatcaagctgagtatcaagtgttcttgggtttgaggtaatccttagttctttgttctatgtgtttttaagctttgaatttggtttcaagtagtgatttttagtgttggtggcagttagggttagaaatgcttggagttcagtttttatgttcaatttaagttgattgaaggttctggtagctggttttactgctttatgttggattttcacaagtttatgctttgaaacctaagctttgatctttgatggcataattttatttagtgtgttttttagggaatttctggttggaatatgttgtgtatacattgtttaggtactctgtaaagtttggaggcaattggacaagttttgagcaaattagtgagtttttggggaggacaggtataaaccggttagccggttttggcagggttccccaaatgtcccgttttcttaattctcgtctatttcagtgccttagttgggtgtttccctatttcctgagttagtgtaatccctagtgattatagtagagcctagagttataggttcaagtttctcagattaaggttttgaacatgtgatttacccgttttcattatgtgattagggcatccatccagtacgagacttcccgttcaggtcggccaacacacttgaatatgggaaggaggtaagaactgtatataatgtgtgatatcaat

SEQ ID NO: 355148 - DNA, 634 bp, Cannabis indica
ttgtcgcggtttcccctgatcgggggcggcttcttgaagaccccgttcctttcctcaattacatagatgtggtctcatggcaccgcgagttcggtatagttcacgaagcgcggtccacctttccttttcggcgaagactccttctttggaggagatttggccaacttcgggcttcgcagtctccatgggctgcgtcttcttgggcttcgacctctggaattttcactcggggactgcgagatcgtgatcgcgacactggtgacttacgcttgtccttgcctttttccaactctgctagagaattctcaattctcttatgaggttcggccatagcgaagaactcgactagtgattctggtcttcgagcttgtaattccttccaaaaattagttcttggcaggacaccttttattaacatacaaacaagcgaagactcgggagccttctcgacttttgttacttccacattaaatcgtttaaaatagtcttgtaaagactcaccgggttcttgtttgatgtgggccagagtagtatagggaggcctataagtcatcgtggcctgaaaatgcgtgaggaataagtcgacaaaggtttcccatgtcaatattgaggcctcaggcaattgggtgaacca

SEQ ID NO: 355149 - DNA, 915 bp, Cannabis indica
gtactcaaccatttatctatggttagcgaagctcgaaggaaatcatcatttcacttcatgtccagatagaagctatagattccatatctatgattagcaattccactcaattgcagtaccatgttcccaaaatgtacgtgtcacactgaccaaaaagtaggcttaactacaaatcaaagaacatgaataatactcttgagatcaaacctaacaaggaaaatttagatcatttgatctaggaccaactaggtgatattgaattgaatagatattacagtaaattttttatatctaatcaaagttcaatatcggtcccttccgatgcaaactccatacatccagcccaaactttactttaaccaatgccctggaaaggacataacacttatgcaaggtgcaagtaatctatgttgtagattatcatattagttaaaccctatgtactgataaatctaggaatatatatttaatcacacaatcttgattactttccactgttctgacaacacaataaaattgaatataactgtgataagcgtttggatgaatttataaatcaaataaaaatataaatgataagatgaaccaaataacacatcaaataagtgatgaaaatacttctgtctctttattgataattaaatgatagatattacattgaaagagagttttatttagggcacaaagcccaataaactcccacttgcacttatataaaacaataagtacatttcaattagtcaaaaattcatgcggtgcttttcaaatgcagttcctgccaaaactttggtgaaaggatcagctaggttgtcctcagtgtccactttctccaccagttcatcccctttcgccacatactctctgatgatgtgatatttattggaattatttttctaggatcttagatctactcac

SEQ ID NO: 355150 - DNA, 806 bp, Cannabis indica
cttttgtgaaattattaagttaattaaatcagttttttttaggttaatagactgatgtttttaaataaaacaagatttatttactcattttcttaaaaaaaaaaattgaaaaaaaacaaagaaagacttttttggtctcttttctctctccttcgaaacccttggggaaggcagcttcttggtatatttgcagctggtttttactaatttagagtgattcttggaggatcttttgaaggtatagctttagtaaccttctcttgtactttctttggttttaaagaaatgaatttttttgcatgaggtgttgttgttgttgctgtagttgtttgttattgttttcagtagttaatttatggttgtatcaggtgatttgggcaagttttgatagttatttagttggatgagcaagctttgagtttttgaactcaagcttggctcatcaatggtgaaattcgtttctctttatgggtagttattttatcacttggaaatgtttattggggtataatatgcaggtctggaaagtttggttgagtttggaaacgatttggttaggggtttgatttttgtaggttttctgggtaaaaccgactaaccggttttacactgcttgtaaaaccgattacccggattttgcagcaaggaggaaaaccggtttttcagcttatcgtttcgtgtcagtttcaggtttctaattagttgttttccctgctagtttgggatattagtatattaagttgcagtagatagggttttggttttaaaccttagtcccggttgtgatttagcgagtcacttatgtg

SEQ ID NO: 355151 - DNA, 944 bp, Cannabis indica
tttcgagctctatgtgattatctgtgatttgaatgccaattttatatttttgtgaaagtggatttagggattaaccctatttgtgtaaatcccggtattgtgactaggattaccggcacctggtcaggagcacctggggatttggaatctctactattgcgggacatcaggtaagacagtaggtagcacgtagagttatgcgcggtggcgcttatattggaaatgggatatgtgagtaattaataaccgggattagggttattaccctaatgtgagcggtttgatagcctagggttattaccctagtgatatatgctgtgtaaatgctatgccatgttatatatatgaatatgttaagatttagggttatgtgttcaaggcataaccaggttggactcggtaactagaaccgagaggaaccattctaaggccttattgtaattagacgtgtgagcgcaacacataggtctacgctacgtagacataaataggcatgtgagcgtaacatgcaggtctgtatcatacaggcatatgtgaatggcattactgattatatagtgtgataactatgtttatcattattttatactgtcttgctgggcttggctcacgggtgctctactgtgcaggaaagggtaaggctttagctgatcaaccatgagtttaggagctgggcgaagaatgtacaagtccgagccatatcagaccaagagggttaagtgtctactagtgatatattttaaaattctattttgctgcttaggtcggctgaaagaaaaagacttgtaataaagtttgtaaatatttttgggatcccaactattaaaaaagattaaattattacaagttttattttaattctgtttattataaaagtttaaattatgctctattttgattagtaatcccatttaggggattaggatttgttgggttttatgccc

SEQ ID NO: 355152 - DNA, 555 bp, Cannabis indica
ggaactcaattacgataaaaattaaaaaagttatggtggtttgaagtttcgggtccatcgggtgtcatcgtgtgacaccgtgcgcgcgcaggtgctcaaacaagaaggcttgtccgagcgcggagctcagacaattcatgtttgaaggctcggcgtgcacctggttcagacacgcatgcgcatgtccaatgctgcaagtggtcgagattcctcggcagtccaccctacaacttcccctgctccgtgcgcgcatgggctgcttgcagccttcttgggctgcacgtgcaaccctcctgagcagcaacacctaaaactcgatttttgtggattttttccagaaatttcgatttttccaatttcaaaccctaaaaatcaaaataaaatattatttttaacatatttaaacttaaatatcaatttacaaattaattatatttaatttttaatagattattataatttttgatattttgatgtttaaatttaaaaattgattattttattttagttaaatcatggtcagattttaaaaatttgttaatttctttaatattt

SEQ ID NO: 355153 - DNA, 527 bp, Cannabis indica
tcatgtgaaccatgcaacattaaatgttatttctgatctatattaataagcaaatctgattatattgaaatgagttttatttagggcataaaactcaaaaatctctttgtggctcgtgaccaagatctcatatttagcattcagcttagtgactcggctgttagagatggatggagttggaagtttgagtcttgtggacagtatttagttaaaagtgcttataagttcttgtaggaaacaaaaggagcttggagtgcggatggcactacaggtttttggaagactttatggtcattaaatgtgttcctctaaaggtcagtaacttcttatggcgagctgcatcgggtgtccttccaacgtgttttcagcttcaaaaacgtcatgtccctattaatgctgattgtcctttgtgcaatgttgctgcaaaaattgtgcatcatgccttggtagagtgtgagtttgctactgccgcctggaatcacagctcggtggatgttgggggcggctctgcaacatttagcagctgg

SEQ ID NO: 355154 - DNA, 1209 bp, Cannabis indica
aaattgtttcagtcagatgagtatatatataaatgtatatttagtatatcgtgaccttgaaacaattcaagaactttaacgaaatacttacattagggcttgggtagagattcgtgctgataacgtgttataaaataatatagaataatataaaatagatatgaagaagagaagaaaaagatgaagagagaaagaaaaactgaatgaaaatttttcagttatttattctaatggggtgaacccttatttatacaaaaatatgtctaaaagaatgagaaactaaatcaatataaaaggaaagtacaaccaagcgacaatggtaataattaatttggtgatttgaacatccataaataatatttcataatagtattatcttttgggtaaatactggcataagtacccaaagttttgggtttgtaagaggcataagtacccaatgtttataaaactgtaattttctttcagtttcatcagtacagtctctgttattgtcttaaacaggacacatataagactcaaattctagattatttggtctggacgaaaatatgtagtatcagttatttccaaatcttttttttaatgaatttaaatggagcttgtactaacaaaaatagagaaaaattacacttttacaaacattaggtacttatgccactaaaaaaaatcattgagtttatgccccttacaaactcaaaactttgggtatgccgctatttacctttatcttttttttttcttcttttctcattgataatactagccactatttttataaataattaaattgagttttatttagctatttatataaatatatttattattatgatagaaagtagcatatataattaactagcagtaacaattttacataaataaattaaagatcattccacgtcaaagaacagtgattaacatcaaataaaaagtaagggtatgctatagaaaatgacatatgcattttaaatatacaatccaaattctaattttgttcattctctcaaatattatatataggctaattagcaattgtttcccctgaactttgacatatactaaatcatgcgccctgaacttttttaaccgttaaaaattccccctgaactattaagattgttagatttaaggacttttatctaattttagtaaaaaaattctaatatagaggaaagttcaggggatgtgatttagtacatatcaaag

SEQ ID NO: 355155 - DNA, 741 bp, Cannabis indica
tttttttggtaaaacatacaaagttctattcttaacttcccatttcacttgcttaactaaatcagctgcgtggtgactagttgcattccacaataagtcatttcttgctctccaaattgcataagccaaggcagccacagctgccatctttacacccttgcagaatttggagattttggactttcggatacacttcagcagcccaagcaaagaatcggcctacaccctccaattcagccaaaccttcaacatcttcaagcaaacaagagaaaatcacacttaaaaaataagtgttcgacattttcaggtgacctgctgcagagtatacagtcgggtgagtcaatgatattgaaattataaagtctttcttgagttttcaaccggttttgcacagccaaccacatcaagaagctatgtttacgagaattaagtctattccagacctcattgccccagacaaacctgtcaaacacaggagcaaaccagcagtaaccagctgatatttgatattttacagcagtaaattgttgcggctactgcacttgcttgattttgttctttatttccaccattttcctctaataccagctgctggttgtgggaacattatactcccaccaatcttgttgtttgatgtacacacaatgcacccacttaacccatagattgtttttttattggctacagcccaaacatgcttagccatggctactatgttccatgaggcaatattcattatgc

SEQ ID NO: 355156 - DNA, 1385 bp, Cannabis indica
gagtttaagaaagaactagttggtgattgcattccggatcgccaccattgcttcctctgcctccttctttcacttttgggtccaatttctgcctctcttccttctaaaacacgagccccttaaatagaaattagggttgctacctttgaaaaagtcaaaaactggccaaaaatcccgtatttcgcccctagtcgcgaccacataaagcctagtcgcgaccataggcaaaatacaaaaaaaaacttactgtctagcctcctagtcgcgaccatgaaaaagggccgcgaccatggaaagtggtggtcgcgactactgaagcaaaatttgacagcttcagcatctttcagtaaaatgtgcataactttcacatacaaactctaaatgagttgattcaagacgagtttgaaagaagaaaaagaaatctaaaacttttatgttttgactttttccaaaatctgatcagaacatagtcaaatttaagcttgaagtttcagctttattttattgcagaagtttctctattctatagattgttgttttacgaaatttgtcaatttatacattccaattatgaaacctgaaaccaaaaaaaaaaaacaagcgtaattatattccaaatataataataaagaaggaaaacaactataaaaagtgacccaaaacgtaggctaaaaatagcctaagaagggcattaccctatggctatctccttagctatttattcccacttctagaaatcccaatagaagatgaaaccaatgtttatgtacccaaggattccacactcttggtgagatcacattcaaattcatgcgctacaaattcaatgaagaggaaaaaaagtggattcccaccaatccaatttcacatgcccatgaggaagaacacttggtcccaagtgaaggtgaaggggaagagcaagaagtccaagctcaaagtgaagaggaaggcgaagaggaagtgcctccaataccccaagctcttcacttcaaaccttgaagaagattttgctaaccttaccacctccatgacctctaaaatttcaacaacttgagaggtgaaatgaacaaccaattttccactcttcaacatgagatgacaaccataaggagtgatattaccacattgagaggatacatggagcaagggtttgacaacatgcaagtggaaatggcacaatggaggacatacgtggatcattttggacctccaccacattagttttcttgtcattttttttagcatctttactcttgttttattttattttgtttatgtgcaaaggcttcatgccttttgactttatgtgttggatgttatttttttctgttttgttttcttgttggatgttattttttcttagttttgttggatgttatgagttt

SEQ ID NO: 355157 - DNA, 542 bp, Cannabis indica
agtctctgttaaacttgacgataacaattttcttctatggcgcgtccccagattctctctacaatccgtggccatcgtcttcaagattacatttctaattcgttccaacctcctctcaagtacctgaatcaagaagatgaagttcttggtcaaatcaatctcaaatacactgaatgggaggttcaagatcaacttctctactcttggcttctctcttccatgtccgatgggatactcacacgtatcgttggtgctgaaacatccacttagacatggaaaaccttggagttatatttcgtgactcaaacttctgctaagattgatatttacactactcagttgcaaaatcaaaagaaaggttccttgtctgtaaatgaatatctgctgcgtattaaaactatcgttgatcaattattatctggtggccatcttgtcactgtaaaagagcatgttgctgctatattcaaaggtttgcctcctgcttatgacacctttgttattagtgtcaactcaagaaattctccctactctgtggctgaaat

SEQ ID NO: 355158 - DNA, 594 bp, Cannabis indica
tataaataaaatataaaagaaagatattttttaaaagatttcgtaataccaatgctaaattttgcttaaaaatggaataaaattaaaatgtcacaataaaaacatgacgttgatttctcattgttttgtagttggtttttttttttaatttttgatgagcaaaatgtatttttataattttaaaactttacaagtatatttttataattaaaaattttagaccataaaattataaataaaacataaaagaaagatatttttgaaaatttccataatacaaaggaaaattatagtaaatgcctccaaatcataggagtatgttagtttatgtcctattttcaaaaaaaatatagcaaatagccctaaatcataagactatgttagtaaatgtccttatttcaattttttttttttttttgaatttagaagcaaattatttaaacattatgttatatctatattagttttgttaaaatcttttttattttaaagttatgtcaatttttttttaatttttatgagttgttttgggttgttggtatataaattttgttgtacggtatatttctattttgttgtatggtatattattat

SEQ ID NO: 355159 - DNA, 1013 bp, Cannabis indica
cttctattttggggtatgaagtttgtaccctaaaaacccaacaactataaagaagaaagaggtgaagtacaccaccatcaacctccataacgtgcaactgccatttttttgagaggagctttgactacagcagaagtacaacagagaacaaaggagaattaaccaagctttagtgtttgatttttcttttacccttctttaatagttttctttttctactttcttttatgttgtttgtacttagtagtaaaagctctgtgagattgtaaaaacatacgggcagcagccatggatgagtatttttcagtttggattatactttcttacttgactatgagctagatttttgaggtttgaatggctatgaacttctaagttgggtatgattaaattttaagcttactttagtatttttgcctttgttcattcaagtgagtttcatttttattagattgttgttccttggccatgaataacaatttgctaagctagatcttgtaccggaagggctagatctagtagttcaacttgaatggagcaagtgaaaacctagatttaggtttttctttgtaagtggaataggaatatttcatttaccttgcataacttaaaaattgatgttttgaatagtgttctgcttgctggtttgatataggaatatattgagctaagtggtagacttaaatttgtgagtgttggaaaattctcacaagcctagaggaatttttgttatctctgtgcagaatgctggagtaatgctgaaccgatgctgtaacacctgggaaaaaacctgactagaaggaattagctattcaagccatttttaccatattacaatttttatcttgcagccaatttttctagcagcagtagttttaattctagcaagtttaattcatgtcatttttaattttgaatcgttactcaaccatttgcatgttaattcctcttactttaagttgtaattagttggttttacatcaaactttgtttgcaatccctgtggagacgat

SEQ ID NO: 355160 - DNA, 1288 bp, Cannabis indica
gggtttccaaaatgggacgatgcgggggccagggcctggccttggctatatccaggagtagcagaaaactgtatgccgctcatcggtggagctgctgctggcacagtgcctgagagttgggctccgggcacatatcctgctaccccggtgggatagtatcctccataggccactatttgggcctcttcaagattaatgtatttctggactctcttctggaagtcctgaaggtttgaagctccttcttgttacagctcgttacagaatggggtcctcgtacggatgcctgcttggagaagggcaagctattgtccatcgtctactttcttggtttttgaggcttattcctggaaccgctttatgaaattcttcagtgtctctgtagacagctgcttgatgttagtcaaggcgctgacctccaggttgactttccttgtggcgacaaactatctccggaagctggtttgcagcttattccagcaatccacggatgctggctctaatttcttgaaccactcttccgcggacctgcttagcgtaagcgggaagcacaaacacttaggtccccttcttcctctccctccgggctcttggtgcacggaaacgctttttcggtcctctcgatcctgagggccaagactccctttttggagtttgcccctctgcggacctttccctttcgggaaatccgagcggacctttcgcggatcctgcacctttttctttttcccaggagtggaagtagggtttttcttttggttcccttcagcgggataccttatagggcttggttccctagatttctgcttttgggtacttggcgaggattcctctggttcctttccaagtccagcagggatggctttaggatgcacgtggattcctgctgcctccatggctttttgcatggccagcatcacctcttgcatcttttggttttgctctttttgggctgcgatttcagcttcatgatcgacagccttttgccttaagagtaccaattctgagtagctgccttcgtcgtaggcgtactcatcgaagtttccttcgtagtcgtcatcagggattccttcttcttcctcggaacccacagttgctcttgaggccacgtcctcgtcatttggatcttgagcatcttgaagagggcgaggttgacgtgtgcttcgagtctccaccattgttgttttgttgtaatgcagtgtctacttacagacgctttcttcagctctcaatgaaagcaccaaaatgttgaccgaggttttcggcaaccaatataataataataatt

SEQ ID NO: 355161 - DNA, 508 bp, Cannabis indica
acgagcattccaactgatgacgatcatggctcttggcgggtgcgctgggcagcacccgcctcatcaatgtatccttcatccaaagaacgagccagatcacgagtacgcttgagcattttacgaaattcaatctcgttaatgctagggggacactttggcttgtagcggcggccagaggtggaggttgtggctggagaagatgaagaccccacggcaaagtgaagtggctggttagcattgagatccaccattattgtagcaaaagcttgtgagaccggtacagtataaccagtagcatcagaagtgttcatggcattagtgatagcaggggtagccacaacagattagatggtgcaacttgttcaggtacaaacaagctattgttgatatgtgtgttttggtcatttagaatgggataggccaaggggggaatagatctatgggattgagaagggctatcaaggtccacaacattgctagaagtgttaggctaaaattagtctaagtt

SEQ ID NO: 355162 - DNA, 764 bp, Cannabis indica
ggtccccaagtcgaggatccacatcttcatccgcgccttgggaagttccctatttagaaatgtttttctccttgtccgaactcttgctagaggatacttcgtttttagccttggctatggcaaggttataacattcccaagcaaattgctggtttcctcttagataccctaccccacttgttgggaacttaaggcatgaattaaatatcggtctaatagcctttaagtcatacaaagctggtcgacctaacatgacgttaaaggttgatggaacgtccaataccaaaaattgtgccattataattatgctcgtcggagcttgcccaacagtgaggggtaagcgaattttccctagaggtgcgactccttggccggagaaaccatacacaggctagagacagggggttaaatctttaagctagagccccatcttttcttacgttgtcttgaataagatgttggaagagggtccattgtctatcatggtttgggccaccatcttgttggctatttcgacttccacgactagcgggtcgttgtgcgaaaatctgatcttgacagaatcttcatctttaaatgttatggtgggctcccctgctcgtgggatctttggcttcctttcttctatggctaggactacgtcttcttgctcatgttgtacagttcggccatatctctctcgagcttttcttgaatcttcagctatgtgcggacctccaataatgacttgtagatgtccatctactggtggtggtagcaagtct

SEQ ID NO: 355163 - DNA, 885 bp, Cannabis indica
gtagcagtatacccccttatcggtcctgaagctagtgcattcttgatccgcaacatgcatcttaatctggttatagtcggagtaggcatccatgaaggacaatagcttgaacccggaggtggcgtccaccatctggtcaatctggggtaaggggaagcagtcttttgggcaggctttgttgagattggtgaagtctatgcacacccgcaatgtcccatttggctttggcaccagtaccggattggctagccactccgggtaatacacatctcggatcaggccattggctagcagcttgtcctcctctttttctagggcctccgcctttattggatcaaggggacgctgcttctgctgtactggcggcatatctggattaacgttcaagacatgggtaatcacatgtggacttatgtcggtcatatctccttggcaccacgcaaaaacatctgtggcttcccttaatgcttcaataattttgtctttctcctccggttctaggctctttcccagccggaggagaaagacaaaatcattatcaaaatttattccaagtataattatataaatctattactcattgaagtctattagaaactctaaaaagctcacaatacaaaatttcacatcaaaaatttaaaaatgatcaactatgtagcaacaatgataatacaataaccaaaattgcctagtcatatacagtcttaaaacttaaaagagtggcattattcattcaagtttcgactaagtgtttctgagtttgagttataatattgtgtcctgtgtttatgtccaaatattgtgtgtgtctggctaatctagtgaagaagattgaagttttgattctcaataaatagaatgaatataagtgtatactttgtagta

SEQ ID NO: 355164 - DNA, 934 bp, Cannabis indica
atttcacataagttgaaatatcatttatacggggttaagtgttttaaggattaaatatgtaaagaccgcctatgaaagaatactttgtattattaattatttaagaattatgtattaataattatggaatgcatattttagaaatatattatatatcatatgtgttttatgcttaattacctaatttctctgattgtgttcggaagctgtggaaagcgacgttgggcctagaaagttgcattttataatttagaatattatcggggtattattgtttattagtagaggcgttagaattttcggggattagtagttgaccaaattgcccttaagttgtttggttgtgatattttaattgaagggtaaatgggtctttttaccttagagtcttggcttttagtggaagtagaagcttcctttagttaagtaatacatagataaataataacaatttattaaggagaatgaattaagtgagaattgatgatcaagcttgggaattatcctttctccctctctctttcgtgcaccctagaaaacccagcaagattaaggtgtggattgctgtttgttctgacttcctaatctcttgaaggagaatttgcttaaggtatggtttccttgtcttcttctctttgtttctagttagtataaggttaggttttgaggtttaaattaggatctttggttctgtagctatagttgttgtttgaatctgatttctgttgattaggtgagtttaattgagttgtttcttgctgtccttgttgcttgtagtaaggttttgacaaggtttgagtttgaaaactcaaaccttgacctctaatggtgtttttgaaaatttaatgaattgctgagatttgttgcttggaactggtctattttagtgcatacaggtgttctggaaagtattggaaaatttggggatgaattg

SEQ ID NO: 355165 - DNA, 881 bp, Cannabis indica
cactaggccgaataaaccctatgtcaagtaacccctagagttgaattttcaattctttaagcccagctggagcaattctataaggggctttagacaccgtttctgctccaggtccaaatcaattataaaatcaatttcccgctgaggtggtaaacccagaagttcttcaggaaaaacatctaaaaattgctgaaccacctgaacgtcttctggccgaatagggttaggccgagtggtatccaataccacgaccagaaaccctagacatccatcacacaacaattatttagctgataaagccgaaatcaccgggatctgagatccctgaaccaaaccgacaaaaacaaacggttcttctccttctggttggaagattaccatcttcctcttacagccaatactggctgaatatttggacaagaaatccattcccagtagaatatcaaaatttgttaagctcatttctattaggtcagcacttaactccctaccgtcaatcctgatcgacatagacctaatccaccttttggagataactaactcttcgccaggtaatagggttccaaaccctaattcataactatcgtgtggtctatccattttactaaagattcaggctgccacataagaatgtgtggccccagagtcaaacagagaaataaaagttgttgaccgagagctgacctgtcaccaatgaatggctggcttctacgtcagcctgagttatggcgaacacccttactggagtaggtttcgctggagccttcggtgcttcggttctgagttgaaggcaatcccttttgtaatgccctggcatgccacactgaaagcacccttgtcctctacactcccccagatggtgccttttacaactggggcac

SEQ ID NO: 355166 - DNA, 777 bp, Cannabis indica
gttcgagaattctatgccaatcgatagaatgttattgctgagggtcatccagggtgtgtgagtgcctttgttaggggtcatagagttccttttggtccatccactattgcatctttattgaaagttgagtccatcaggaaaccaacatatgggaaacacttcaatccagatcaatctttgatgggtagagtgctaactggcagggatgactatatttgggacaaacaggaaatcctggtcactcatctgactccattctatagggttcttcatcggatagccttgtacaattggtttcctaattctcatttttctgctgttacacttgagattggcaagttcttgtatgctgtaggcactaatgtgtccattgatctaccctcgctcatttttgaacggatacttgaagcctcacaaactactggcactcgtaacaagctaccatttccaagtttagttcaacgagttcttatggatgctcaccctcctctcacaacacatgattatcaagttcagaatccggttctcagtaagagctttctctcggtggtcaataggaagccttcttcaaccactccctctggaaccaaagtgagtaaaggcaagtctcctatgttcaaagggctttcggatccagctgacaggtacaaatgttttctgagtttcaatcttttgccaaacgctataagaaggatcaaaagcgtcagcttgcctttgaggcctccatgtatcaaatggttcgctctatcaagtccactcttttgcaccattttcctg

SEQ ID NO: 355167 - DNA, 1920 bp, Cannabis indica
tcaatttcatagaagaaatagagtgacatcataagcagatgatttataaaaccttctgtccaatgatataatatgtaagcgatttcttaatgaaaaaagctaagagaaaaaataaaagatacttttgattaaaattagaacccaacgatgttccgtttaggtgagagtcaaagttattcttatttttaaactttttcattctttctgtttaccaagtattttagaaaccacataatattagagcttaagaaagtaataaagatacgaataatagaataacaaacaagagaaataacaaacaagagattttacgtggttcaggcgttaattatccctaatccataagtccattttattaggcccatcggccggtggttgtttatacaaatacaaaaaggatggacttttaccccaatccactatgttcctcttgaaggagaggaagcttagtaagaatattctgaagttgatattggggactgtaggattcttttataaaggattagtttttgatcctaaggtgaagagccaaaggatggaaagtgaagtcaggcctcagaatctgaatctgaatcccttgccttgtgtgtcttcaggggtatttataggcaaaccctctcgcatgggctacccttgatggatcttcatggggatgaacccccaccattggattggtaggtggcatattttccatgtggtctttaccggtgtcagattgtattggctgtactgacgatgctttggacgcatgtcattctagggccattgtcgtttgaattacccttatccctagctgtaggattgtattgcacagtacacaaggacacacatgctttgcacggtagcatggcgtgggggacaacttcttacattatattataaggagctccaccattgggtctgtagcttgtcatgcctgggctaagcttcagcgggttaatggcataccccagaccagtgtttcttggttgaagatccatgttctttacaggagcatagggtctcagcttctagagtagagtgagtctctagcttacgggtgtctctcttgtgacccatatccgagaagacttatctcgcaaaaacctgttctgtaagtttaaggctcttaccctcccggagcatggagcgaggaacttgggcagccttaatgagtccttgacgttttcctaatcaatttccacgcgtcatgcttgcaaaaatgcaaataacatttacccctaagcttccgggacatgccatggtccgggagcttacaatacctccttttgggagatctttcgcgcatgtggaattttcgacaagccttttactgctgtacatcaacggccatcaaaccaaagcatcattatgtaggaggcatgatttctcctattttcttgtcaaagttttaaatactgacttgtgaacttcttcgcgtgtgttgggcgcgtatctctagggaaactcgataactggcggtgattgggcttgggcagttttttcctcgagcattttttacgatgcatgtgatgatgggagccatccattgggaagtgaggtatcctttcagcttctcacatccaatcactggacatctcttggggtgaatcgaagcatctgcttcatgcaaaagatgccccttgcagtagttccataaatacttacagtagtctatccatttttcactcttctactcgtcaagtcatagcttcttgagttcccttcctctcagttgcattttacttccatcaacgtagcaccaaaaccttcgattctaacacccttttctgccgggaagttctctgtttacttgtttaagagttggagggtaccttgaatggtgcaccgacttctgggaccacagtgtgttctagcattttgggtcagccatgacctttcttttgtgtgccaatctgtggatggtacatcatgtttgct

SEQ ID NO: 355168 - DNA, 1172 bp, Cannabis indica
caagacctaggacctccacctgaataggacccgagacctttacccgaactagactcggacctgaaccaaacccaagataacctagacccaaaacctaaacttgaatcggaccggggaccctgacccgaacccacaacccagacttaggatttgggacccgaacctggactcaaacccagacccatacccatgattcgaacccaaacccatgaccaaactcgagacccaaacctaggactcggaccaagacctagatccgggacctggacccaaaactcaaacctaggatcattttctgagacccagacccggacccgaatcagacccgagacctagactcaaacctagacccgagacccggacacgacccgtagttggtgtttgggtcgagtttattgaaaatatattataaccttacacatatacaatacaatacacaatacaatacaatacgacgtatcccaaatgagcctaagtgtatatattatatatttagtgtgattgattttttcagtttatgtattgcaactataacatttttagaaaattttaaaaagttatttttttctgcttgttttttatgatatataattatttaattcaattgtccaagctattcaaagtaatatcactatggtttcgcctcttgggggagtggcgatgaactgtcgacagcttctatctattttaaacaatgtttctttgttttttattaaacgatctgctattatgactgcgcacagttttgctagagtgtcatattcttttccagatcgagttttcagtgggaaagatgatctactgaattacagtcttggtttttttggccgatttaagaaataaataaaattccattttgcattaaaaaaaatactaacaaaattaattgacaaaaaaattgttcaaaattaaaaatattatcagctaataaaaaagaagctagattagagaaagtaaccagtcacctcatgaattgacaaacaaaattaatgtcaaccaaattaattacgaaaacatataaaattcaaatctcttatatattcatatataaatagagtaaaaatagttattaggtaacaaatattttaatcatataataattaaattatctctaattataataaccaaataaataatagtaaagtctgttgggaattattttaccaggatct

SEQ ID NO: 355169 - DNA, 933 bp, Cannabis indica
cttaggctttgctaggagtggagggaaggtgagatagctcttgagttgtcttagcgcttcttcgcattcctccatccacacaaagtctttggtctttctgagagttgaaaagaataagtggcaacggtcagatgattttgaaatgaaacggctgagtgctgctatccttccgttgagacgttgaatgtctttgattgactttggagattgtatattttggattgatcttatctggtctggatttgcttcgatccctctttttgtgacgaggtaacctaagaattttcctgaagagacaccaaaagagcatttagtaggattaagtttcatattgtatttttctaatacctggaatgcttgcttgaggtgatcgaggtgattctctgctgctaaagatttgacaagcatgtcgtcgatgtaaacttccatcgtctttccaagcatatcagcaaacattcgattgaccagcctttggtacgtggcacctgcattctttagtccaaacggcatgactttgtagcaaaaagtccctcgctcagttatgaatgatgtcttttcttgatcattgggatgcattaagatttggttataaccggagaaggcatccatgaaactcaacaattcatgtccagctgttgcgtctaccatcatgtcaatgtgaggaagtggaaacgaatccttcggacatgccttgttgagatcagtaaagtcgatacataccctccattttccattcttcttcttcacaactactacgtttgctaaccagtcaggatagtcaacctctctaactgatcccacgtcgattagtttttgtatctttcatttatcaccttgttgcgatcaggtgcaaatttacgtcttttttgcttggctggtgggtaatcagggtcaacctgcaacttgtgaacaataatgttagaatcaatacct

SEQ ID NO: 355170 - DNA, 1488 bp, Cannabis indica
aaaatcacactcaaaaggaaagttagtgagtccagaaaaataaaaatagtgatgaaaatattaagaaaatgatttttgaaaattaaatacgtaactaaaattagaaatgatcagaaaacggttatggaagacataagttttgtacatacaattatatcttcctaataaaattaattctttaaactataattctacaccattaattatagttagaaaatgtgtataattaagctcactagaaaaatatattatttaattaaattaatactacttctagaaatactatcatattatataatttaaatcgacaaaatacaatcagcagaatgtagtaaaaatcatataatataataaatatcctaataattaatagtctaacttacataagaaaagcatgattgaacttacataaaagatactattaaatttaaagtgcaatttaaaagaagagaaatttaatataacaaatatagaaataaagaataaagagaatcaatatattagaagaataaaaattgcaataacttacactcgagtcttgccaaagaaattagccttaaaacggtattgtttttgcaccaaaattaataaagtaaaataaagaagaaggaaagaaaaagaaatttttttagtataataaccactaggtaaaatctgatagataacacaaaattaaaattaattaaacattttcaattaaaataattttacaattaaaaccataaaaaatatttaattaaattaattttatacacacaattaaaagcttaaaatatacaaatttgagcctcaatcacaaccccaactagcttattgttagtctctagtaattcaagcgaaaagaattaatgtcaacaaaatatattcatatcaaaatttctaaaaattacacaagtattcaaacaaaatattagtaacaagccaataagaactatacaaaattaccttgtataaatctatagttgtgagtgtgtgcactaaacttaaacctttcttaccgcaaaccaaaacacatagatgctttcaaaaaatgtaccaagtgaaagtctcaactccattagcctcacaggtttttgaaaaatatttattcatggctaaggattcaactcatgaagttggaaatttgaaagtgagcactcggaatggatagatcaatttaggacaaatatttgaataaacattgaaacgaatataggttatgaattgtttagataaactaccataaaaagtaccacaaatcagcttttcgggacttttgaaagaaaatagacaaccttttatatttattttaggagccaaaacaaataaaaaatgaaatactacaaactttcttttcttttcttttctttttccttttccttttccttttttccttctttctttctttatttttctttgtaacaaaaggcaacatgttggatataatgatagaaatattgctcttgtactatatatatatatatctatttttattctcttttttttttt

SEQ ID NO: 355171 - DNA, 567 bp, Cannabis indica
gattttgtttgagaaaagtcgttgtttttctcgctgctgaaaagtcaatttagagccaattttcaaaactttacaattatctacgggatcaataggtacctcaatagtgtcttccgcgacttgggcggctgcggcatgatcgaggattattggttccagatctagtccatctgtgtgtggcacctcttcaatcctaaggacctcctggcgaggaggcggtgcctctaacaaatagatgacatttactgacttcttctgtgcgagcttgactgctgcattgtagcattctcgcgagtctgactagactccttgcacaaagcctactccagcgggagtaaggaacttcattgtgagatgatagatcgacatcacgatcttcatctctttcaagattggtcgaccaatcacgacattgtattccgaatattggtcgattacggcgaagtcagccattgacttggctactacaggggcggttcccaaggtaatcgagagtttaatcatccctttcagtgcaatgacatcgtcggtaaaaccgtatatactcgacgttacaggtcgcagatc

SEQ ID NO: 355172 - DNA, 707 bp, Cannabis indica
ctctctctctctctctctctctctctctctctctctctctctctctctctctctctctctctctctctctctctctctctctctctctctctctctctctcggtggtggaaaaaccgaaccacaccccaacactcaagaatcattcaatattataataggtaagttgtgttttaagcattttgttagacattagtaatagtatgtagcctgcattcgttatatctgtggtatttattggaactggtatttttttgtttaaaatagtagatctagttttctttcgaaatctgggttttccagaggttatcgacaatttatcgatagaatatcgataaaatgtcgatgacatgtgaaggatggtcagggatgaccattatcgacatgatatcgacaaatgtcgatgaaaaagcaatttaaataattttatttatttggcaatgtatcaacaatttgtcaatattttttacttatatttgtcgatagcatgtcgatatattgtcgacgttaagacaaaaaaaatgaaaacttttaaacagttgactagaaacaagtgaattttttttaaacataagtaaagactaaataaacattaaaaatgacagttcttatcaatggaatgtcgataggtttgtcgaatatgttaaatttttgccttttttagttttttttattatttttgggtatttttccctaacttacctttttt

SEQ ID NO: 355173 - DNA, 593 bp, Cannabis indica
tcttcttcatctatagaagattctgtggaattaaatccaactagaacattcctaaccataagtcggttacatagaagacaacttgcacaactaaattacctagaatacacttacaaatcaagatcctaactgagattaacagaaaacaacagaccaacttgaaagatatacttgtcagctcatcgatccttgtcaagcatactcaactgtttcccactcctataaattgcagctcctaagttcaattctggttagatctgaagactagagagagagtgcaatcctgtaattgctctgaactcaaaacataagtcagagttgagaaaaagagagaagagtgagaatctgagagaaaagaaagagtgttcttgagagagaaagaagtagaatctgagaagctgatggagaacttgaaatggagagttcaaagcctatcatgattttgcccaaaaattgaaatgtaaagatagagaatagttttatgatttgtatagtgtaaatacaaagtatgtatagatgtattaattgaggcttctaattgtgaagtgctcctaggatgtaaatggttttgtgcaatataattctctgattca

SEQ ID NO: 355174 - DNA, 601 bp, Cannabis indica
aaaaaagaggaaaaaacctagaaaataccttagctcttcatctttctttccctctctccttcgaacctcactctttctcacccaaatccagattttcataactgaattcagaagctaacaagggagttgaagcttgtatttgaggtattatgatctaacctttcttttctttagtaattcttaagcctaggttaggttttgaagtaaggttataagatttatggagctgtgaatatagttgttgttttaatttgaattctggagattgcttgagggtttttagatggatttggattgtttttattgaggttgaaaggttgtagcaaggtttgagtttatgaactcaaaccttgacctctaatggtaatttgaaattttgtggagtttattgtgttctgctgcttgggtatgcttaattatagtgtatacaggtgttctagaggtttttgcaaagtttgggattgatttgtggtgaggggatcggtttttgaggttcccagctatgaaccggtcgaccggttctgggaagcctctagcaaccggtcgaccggttggtacccaggaactggggttccggttgggaaccggcctgccggttggg

SEQ ID NO: 355175 - DNA, 878 bp, Cannabis indica
agtcaaaacttaacagagacgttgtgagaggtgcagagattcaccacataaatctaccttaagatcaaaaacgatgcaagtataagaaggaaagataatgtataattacatggtattttagtttggtatgatgaataacttaatgagagtgaaatgttttatgtactattatcactaccacagacgatacgttctgatttgtattttacgacatgtcgttctatctaagagagcggcattgaacttaaacaatttgcatgtttcttttgctttgtcaactactactctacttactaataaaatgtttcaaaattgaaaaatattaagaggttccttaattgctatcagcactgaatatcgggcaaatttatcgagtttcaagtttaaaaaatagtacccaaacctgccgtgaaatgggcagactggctgggttcgcagtatagatggaaatttatactgcggggatgagtaaccgcggggatccgcccctaatgggagggaatttcccgtcttggtagttaatggggcggtggtaggggacaatttcaatacctaaaacgggaatggaacggaagcggggataatactatccgcaccatatctgaccccgatatagatatataatttcttttttattcttaacatatatatatagtatatatatgattgataatcaaaattatgaagatctaatgacgatagtgaactgatgatcattgtggattacatgtgtaaagatattttcttctcgattcttaatttcatctttatttactttttaatttgttgggaggcttgagaggtatgagactatgatcctatacttgggttatgattttttttttttcaaacttttgagacatatttagtttttattt

SEQ ID NO: 355176 - DNA, 786 bp, Cannabis indica
gttgatctatttatgaaagacacaaatcaaaagactatatttgagaagcacatttaagaatataagattaatgaaaatatactaatagttttatgttagttcaaatggaagtttgctgagattttatgccctagataaaaccctatttcaatgtaatcttatttacttattaataaaaaataatcaatgtgattatatgcttcaagtgaagtatcttgatttatcaatatcaaaaaatgcaatacttaatttttttttaaattaattattctttatatttgaaatatttttttaaataaataaaatataatgtaataaatttgtaatattataggattaaaatactaaaaaattaatttgtaacattatttgaaaaatatattcatgaaatgaataaacagtttaaataattttatatttaaattcaaaaaatatcttattattcgaatggagatctcaatattaaaagggaaattctaatttctatgcttgcatttagttaaaaaatttcctcaaaactcacaatacccaatatttaaaatatatgaccacttttctattatgctcaaaataccttctttatttacttcaccccctctcacttcttctctctttccctctctcttattttctctaagttgttgctgcccgaagctacgccacaagggaagctcaaattttcgctcttctctattctcattcttttcacctcactacactagcatctactacacaagactcaccacataatttctctcatttttggacgagcatcatacactaact

SEQ ID NO: 355177 - DNA, 1598 bp, Cannabis indica
ttaatctagtgaactgacaaatcatgggaattaaacttttgaacatataatcatgattatattccactatgctgacgatactataatcatgaacaaatatatatatatatatttatatatgttctggacttagtagaatttatacattaaacataataatgaaataaactatgtgaaccatgcaatataaaagcagtttctgatcttttagtaaatctgattatattgaaatgagttttatttagggcacaaaacccaacaatcgcttacttcatacatttggcgtagtttgatgtggggttgtgagctccttgagctgagggtttgttagaggattcgtaatgggcagacaattcgcataaacaaggataagttgcttcctagagccttttgtttctcactttgtgtcaaaaataatgttcccgtgacactatagagttttttagagccttttgtttctctcatcgggtcataatcaagcatcttttctatctcagtgatgtgggtctggccttgttttgatgaaaaatcaagtagatgatgatattatttggcactttacccctaatggtaccttctcagtaaaaaattgttatgtgatttgctcccttttgaaagttaaaaatttcacttggagtgtgtgtttgaactagcttcctgtgaatacaaaccagtgtcattgaggtatgcaaggttataccaattgtgatagatgcgattatcaattcaaaatcatttttatgctatgtggttttgtctggctattaaaccactttgaagctatttggggtgacatcattgttttcctaagtctccaatggagccgtgggatttcttattgtatctacatactaatcattcgaccacatgttttgacttgcttcttcctttatcttggatggtgtgggctcataggaataaaaaaagattgcatctttctaaaacccctttgtagtgttggataccctgggccctgtctcaagttgactttcaacaggtggaacctatgaattcttctacttctaccatttcaaagggaaccccaaagtcttgttggttcgatgaccaggatgaggcagttcttcttagttgcgaggcgactctcacggaaggcttacctaaatgtgtgttgggagctttaatcaaatcgaagcacggtcacatattttcggctaatgcagtttcccgtttaggttttatctcagtccccatggcggagtgccatgtgagtcagttggaggctgagcagggccatctcaaggtgtggagaggcttagggcaaaatttgaaatgaggccttttttctttcacaaaaaattaaaataaatattatttatttatttattttttactttgagatattatttattatttaaattttgacacaatataatttaactattttatctccatatgacaaataattttttctcaccacataagctaacataaaaaataaatcaatagtatgcaaaaattatgttaattttttttacactacaaaaaactgctattttagtgacaactttttagtcacaacataatttttttgtgactaaatgtgccttttaatcacaacaaaatgttacttgtgacta

SEQ ID NO: 355178 - DNA, 640 bp, Cannabis indica
tatgtttctttattgatgttgaataaaataattacactgaaatggagttttatttagggcataaaacctaacactagatgactttgttagttcccaaaaaacactcaaatcttaattattaacaaaacaaagaatattcctagaagacttcttctaaactactattggaaatggcccaagttgagaaaatgtcaacctgggcgctgggcccaccgcctaggtcaacgtaggcgttgggtccctgctttggcctctaagtcgatccatttctttcctaaaacacttttctcctcgttttagacagagaaaaataaaatgctcgtgatacttctttagtattatgattggaagctccccaggttgacaatatgtcaacctgggtgctgcctcgggtgctcaaaaatgaaagtgttctgattctgattatgatgcctcaaatatgtttgtgataggccttattcatgccaaagtacaaaaactgagccatcttaactaagacagaccagaaaacataaactctagttggaatgtcaacttgggcgctaggtgaaaaccctaggcgtccgggttgactttcaggtgatgctttatgtaaagcccgcttagttaatttggaaattagcagctgtttatgtttaat

SEQ ID NO: 355179 - DNA, 712 bp, Cannabis indica
ggtaaaataattccaacaacgtgaaggtggccaaaacccagaattagggaatgaagtacccaacacaggtgttggtggtgctcaacccatagatgatggtgcctatgatcccaccagatacgtaccaattgttaagttggaaaattgtcatctcaagcgctgtctagacgaggaaaatcgacgaaacgattagttggaatgggaggcagccgcagccagggcggcataggaaaataatgcaaaaaaccaacttggtcctagagtgaggagaccatgaggcagatctcgcggctcacgaactaggaggcaggaaacggcttaggaggagcctcagaatgctcaggaagaacaacctggggaaactgaggatccccttaaaaatgaacaaccaaatgaccaactggagccttctcaaaaaaataagaatagaaggcgacccgagactagggaacaggaaatccctcgtgagaataagggaaatcctaggacccaacctaagacaggtgggtttccaccgaggcatcgtcaacgttcttctcgaaccaacagggaaggggcatatacaaaccctgacaggggggcatgcaacaacccgtaccgaaaggagagggctgacacgtgacggggtgagtgccagctcaggacacataataaccgtagttgatcaatgcgaggagggatggaactcgtcgcaatactgatcgagagagta

SEQ ID NO: 355180 - DNA, 519 bp, Cannabis indica
ttacttgatagaacattgaaataacttcaaaacacaagttgaattgcgtcaatcgaataattattgagtgagttattgctattttactgaagattgttctacgcccagcatcctggttaaaaatccaagcacccaggttcacatgtgacgtcaacctcgacactgagtaagttggtaaaacgtgtcagggatgtactttttgatgcctaagtgatattttgacattacttagccaattttcgcattctggtgaagccagttactagttctcggagatgttaccattttgcagaaatgggagactcgaaactctcaatttttaagtaagccactttgccagaaaagtgaaaatatgaagttatgaacttgactcttctgactccatgactcatagtgattattaggggtgtacgtcggtcggtttagtcgggttatagcatatttttatcaacccaatataaatatcgggttgtaaatatttaatcgtaacctgcccaatcaaaaattagagaaagttca

SEQ ID NO: 355181 - DNA, 562 bp, Cannabis indica
agttttaagaaattgaatttatgcatgttttgagttattggctgttgtagttcctgctggtatttagtatgactttctgtagttagattatggttagaaatgttgaattaagcatgttttgatggatggtttattgattgagcaagctttgagttttagaactcaagcttggctcattaatggtgatttttgattctgagcttggatagttgttttgtgcttggaaaatgtttattaaggtataatatgcaggtctggaaggtttggtacggtttggaatcgatttggttagggtttggttggttttggattttctgggtaaaaccggctaaccggttttacaatgcctgtaaaaccggttacccgaattttgcagcagggattcccaaaaaaattagattatcgattcgtgctagtttcacgtttctagttggttcattccgtactagtttagggtattaccatattaagttgttgtagactagataggtttttggtttaaaacttaagtcccgattttgatttagcgtgtcgcttatccatgttgttatcgatgtgattt

SEQ ID NO: 355182 - DNA, 538 bp, Cannabis indica
ttatctaataaggtgtgtcatttctgttatttacttaaagtagtggtttacctttttaataatcaattatattttcgtttatcttatttaaggcatgcagtttatctaataaggcgtgtcttttattttatttaagcaatgtagtttacttaataaggcatgtcgtttctgttattttaaggtagtagtttaccttttcattgataaattatattttggtttaccatatttaaggcatgtattttatctaataaagtatgtcgtttactttattttaaggaagtggttacctttttaatgataaattatattttggtacagaatttacctaataagacgtgctggtttaccttattttgaggcacaaagtttacacaataagtcgcgctgtttaccttaattaagggtagttgtttacctttttaatgataaaatatgttaatgcataaaatttacacaataaagcatgtcgtttaccttgtttaagacatagagtttacttaataaggcgtgtcgtttaccttatttcaaggcacac

SEQ ID NO: 355183 - DNA, 826 bp, Cannabis indica
aaccttaaaagttcaggggacatgatttggtacatgtcaaagttcagaggcagaaatcttaattaagctatacataaacaatatatattatagaccattggtcatagagtggtgacttctataatgtgaagagttgtgtaagtttgtggatttgggtttccacgtagagaatcaaatttatatataggcttttagtttgatgagagtacacatatttcaagataccaactttacttcccatctcaataaacattgacccattttccataacacgccctctaaacaagatatattcatatgatgatcaaaatgatccaataattgatcaaaccctaagtaaatatactatttatgtgtcctaaaatgtggtaaccataatgaagtggatgaaaatttcaagaaggaatattaattaggagcacctaatcccccaccaaagattaaaagtaattaagaaaattggttttgttgaccactaaagaagcaatggggtttctttaattcttttcctatgggtttgcatttccatgcaagtccacacagtcttgcacttgtttcaatgggtcataatatatacattaaattgaaaagggaagacatatacacacatttctttcttaattttcaaactcactttttggtaaaaactactttacaattcttcaaattaagtgtactcttactcacatcaaacattattattattattattattttttactttcataaaatgacattattttttgatgatttcacattatcttttgaggaaaagcgtgtgaatagaaaaaaaaaatgttgactgtcattcagaaaaaaaaaatgt

SEQ ID NO: 355184 - DNA, 605 bp, Cannabis indica
cttcttcttcttcttcttcaaccaccctcacgaatggatgtggttgatcgtagggatgcagggcggtcccaatggatgtagcaggtacttccacaagaatcaccccttacgcttcccaaaatcagagcccaatgtcttcttcctttccaagtccaatcccttcataccaagtgagtccttcatcttcttcgttggctacaatccctctaatctgattccttatctacgggatgccattccttcatctcttcctcccttcgaatttcaaacagtgcccctgtaaccccacctctgtcgagggtgaagagtccggcgaggagtgcttccccaatgtcggctttgcttagacggaggaagaaccaccacgcggccccactggacccgttgatctcgagatctgggagcttgaggcctgccgaggccttgtcgccgcttaaggaaaggcctgatggaacagacggtgaagattcgaggatggaagggaggtggggtaactggacggtgaacggacggtgaagattcggtctcttgcttcacctataagaggtccgatctgaggttgcttcttggggttttgggtagggcaatgagagagagagagagag

SEQ ID NO: 355185 - DNA, 498 bp, Cannabis indica
tttctcttcgatcatcgagtcacaactaatacatatcgagatctcgatcatgatcgacactatcacaactataattgttgaccataaacagtgcataatacttttcttacctcagtcaacaaattaagtatgcgagtcgacctgaatggaataaaggacgatgatcccgggtcctatgtcacgacaaagaaattcgataaacaagtcatctattttccaaaccaaccctatctccataaccggacaaatttctaactctccactagttcaaaatagcttatacgttactaaatcacctaaatctaagatctgacaaacaccccgaacaaaactggtttcgaggctaaaaacaaaagttttcttccactgctacaaaaaccggttaaccagtttcacagtacctgtgaaaccagtttaccggttttccctactgcataaataggaaaacttagttttttccccaaaaccgaaccaaaactcctccaaacctaatgaaac

SEQ ID NO: 355186 - DNA, 572 bp, Cannabis indica
taattttttattaatttttatatatttatttatgtggaccaataaaattatgttatgtgtacactgagtctatataaatgtacatgtagacagtccaacatgacacttaacacctaaaatggatgaaaattttaaattgttaacgattttctaattttttgagttttaccgataaaatttaaattttagaagttaagtataaataaaataaaagttttgagagttatgccacaattaattaatttttttatttaattaaatgaaaatttgaaccaaaataaaaaattatgttcggcaatgatatttatttttgtctttttcaaaaaattaagagtaatttgcggcatatatacctaagttttacgccgagtagcagataaatacttaagtcttatttttggcggtaaaaataccttctattagggtcttggaacttccgtaggtacctggacgttaagtgtcaggtcattacctacatggcatgttgtgattggtccaagtggatttatttttattttttattttaaataatcatttaatattttaaattgtaaaaaattaaaaaaatatat

SEQ ID NO: 355187 - DNA, 877 bp, Cannabis indica
gatttcgtctcaaatttttcaggtattgtcggtagtttgtggtacgattttagttatgaactcatgatcgatcttatgttgtttatggatgaagcttttttttaatcattaatggagttttggtggaaaatagttttcgatttgtgatttattattttacaagtagtaaatttataagttttcattttggttggtgtttcatgcactgattcaaagttgctattgtaattaatggagaagatagtatgttcttggtgcaaagtggctgatttgtatttttgattacggtaagtaaatttttttatatacagtatatattgcttacgtgtcacgttatataattctatttaattgattgaagttatttatgttattaaaatatatattaggtatatatataaaaattttcctatacactactacaaaaagggctattcccaacggtttataattgtcttttatatgatttcccaacggttcctataaccgttggctatgtgggtgtcataaaaatgcggaatttttaaatgacggtttagaaatgttggaaaaagtcattttaaatgacggtttataaccgtggggaaagacttccgtgatggaaaacatctctttaaatgacggtttataactgtggcaaaaagttactttaaatgacagttaagaaatgttggaaaagactttagtcagactataactaacaaaatacactacttaaaatgacggttataaaccgtcagacaatatgaagtaaagtataaaatagaaatatgaattcaattatcctcttgtatatttattatttagatttccaatacataatgatgaaaaaacataataacaataataatatttttataagaaaattcatacattt

SEQ ID NO: 355188 - DNA, 554 bp, Cannabis indica
taagcatccatgaagcttaatatttcatgccctgatgttgcatccacaagctgatcgattcttataagtggaaaacagtctttggggcatgctttgttgaggtctgtgaaatcaatacacactcgccatttcttgttcggcttgggtaccactacgggatttgcaacccaagctgggtagaaagcttcaattatgaaattttttgctctttgtccaatagccttcactttttttgaactggtcagaaaatgggatcaatatttaggacgtgcgaaatgatagaaggatcaattccgaccgtatcctcatgcgaccaggcaaaaacatctaggttttctctcagaaattttatcaatgttgattttacttcgagaaacaaacctttttcgctctttagctttctagcaggtaaatctggatcaatctcaatctcttctaattcttccacagactgcttgggtccccaagtcgaggatccacatcttcatccccgccttgggaagctccttacttggaaatgttttttccattgtctgtgctctggctggaggata

SEQ ID NO: 355189 - DNA, 866 bp, Cannabis indica
ttccggttctgggaggaaccaaaacaccaaccgaaattccggttcctacaagatatactgaactggaaattccggttcagtgcaggaaacttcaaaaattcatttctcactcaaatcaactccaaactccatgcaaccttccagacatgttctaaataccccaaataacaatctcaaagcatcaaaacaaccctacactctcagaatcaaaaaccaccattaatgagtcaagcttgagttccaaactcaaagctttctcaaccaaccaattagctaactaaacttgctcaattcaacatatataaacataatataaccccagaaaacaaacccaagcacaattaacaatcacagaaactttccataatttaccataaaaataaagattttgagctaaaattccaaacttgcttaaaatcaactaatcatgcattaaaatcagttttatttcactcaatcaagcatgcttaaacttctgaaaataacacctaattacaacagcaacaacaaaccaaaactaagcatgcaacctatcattttcttcaaaaattccaagacacatagaagaaagttataggaaccttaccaacaattagagatcactaaatcttgttaaaattagcttgaattaccaaggaaaaaaatcaaagtcttgctactcaagaaggggccgaaaatagaaagagtttgagagaaaaaggattttggctttttcttgattttttccaatttttaataaaatgagttataacattcattttccttatttgattcagccaaagaaaataaaaaattaaattacttaacatattataaaaatccataaaagacaaatctcataaaggcaaatgactattttgcccttc

SEQ ID NO: 355190 - DNA, 788 bp, Cannabis indica
gacaataaagctataacatcttcaaacaccgctcctagctcattgaaattataaaattatcaaattgaccaaaatctaccaaacaacaagaactaagcaaccagaaccccactaaaaattattagaactagccaaagggataccctttggctagtaacaactgaattatagcactctacttcataacatttttaaagtcaccatcccttactaagaccatatcaataaagttatattattttatatatctatttatggaaaaaatagatatcaataaacaaaattttctaattcattattaatgtaccctttctcttgaatgagtttattcattaataaatctcctaattttaatttaaaaaaaaaaaaacaataaaatcaatactcattaacctttactatccatttatcaaagattaaagattattgttgttaacccaagaataggcaatgagctcaaacccatatattaccacccgtgaaaggagtaagtaggaacctcatacttttggagctttgtgaaatttcataaaagtgaaaagtgaagtatgtgagtgaatggagtcttatatgggtgagaaacacttcgttaaaagtgtatataatgtacaagtttagcacttgtgtttggaccccaagaggtacccaattttgtgtgcatgggtggtaagaactcacacactggaccaccacacacgtgcgcgtcgccgtctgaccgagttaggcggacgaatgaggtgtcacttatttttttaaagaaaaattatttaattaaataaataaatatt

SEQ ID NO: 355191 - DNA, 840 bp, Cannabis indica
gtcatcattgggggcccgcatatagctggatattcgggcaaagctcgggaaaggtatgctcgaaccttacaacacaaacaaaaagaagtggtcctggccatagaggaaaggaaaccaaaaataccacgggcaggggaacccaccataacgtttaatgaagatgacgctgtcaaggttaacttcccgcataatgatccgttacttgtggaagtacagatagccaacaagacagtggcccaaactatgatagataatggagtctcggtaaatattttgttcaagactctatatgaaaaaatggagctccaccctcaaagatctgatcccctacctccattccgtgtacggtttcttcggccaaagtgttgcacctttagggaaaattctcctactcctcactatttggtgttggatgctccatcaacttttaacgtcatgttgggctgaccagccttataagacttaagagttgttacatagaaattccattcatgcatcaagttcccaacaaggatagggtgcctgagagggaaccaacaaggtgcgtgggaatgttacaaccttgccataactaaggctaaaaaaagaagaatcctctagttagagttcagacaagggaaagacatagcctaatagggaactgcccaaggcgggaacaaagatgtggatccccaacttggggaaccaaatataaatgttgggctggtggaagaactagaagagattggaattgacccaagtgtcccgaccagaaaactcaaaattggaaaagtttgctgctcaaagtaaaattcgcactgataaaatttctaagagcaaacctagacatttttgcctggt

SEQ ID NO: 355192 - DNA, 592 bp, Cannabis indica
ttttttcttaatgaatattttagactccggttagacctggacccaaatcccctcccacgaccctagcactgaacccagcctctaacccgaacccgaattcgaccccagacttatacccgacttaaataaaatcaaaaaataaaaatggaaatgaactttacaaaacacacttttactttttgtttttaaaattaaaaaacaaaagtggttacagaacgtatttttatttttgaaaaaaaaattacaaataaaaattttacttttattttgtgattaaaaaattaaaaaacaaaagtgttaccaaacggtacctatatgttctggatttatcaaaaattgtatattaaaccataatcatgaaaatcacatgttaacttaaatgacttttaatcttctattgataacaaataagattatattaaaacgagttttatttagagcataaaatctcaacataactcaattgtactatcatgttcccaagatataagtattgagaagatccatttggttaactttaatgaataagtcaaagaacactaataatacaattaagctagaacctaaccatctcaggattaagatctattga

SEQ ID NO: 355193 - DNA, 1534 bp, Cannabis indica
atattttgacaattaatttaggaaatcaaatcaagtaataaatattgaaatctcaccatataaataaaatattacgtaattaatttattgaatataaagtattcatgtattataaaatcaatcatttattttattccttaattagacacattctaatacacatatcattctaagtttgtccagctaaccaatagtctttgaattcatcatggtagggactaatgtaagtgcccaaccctataaaaatcctatattataaccatatataaatatatgtatgaaatacttctcaatgggtactaaataaatttaactgtaaatatttattttgaaaatattaaactattagatttttgttcgatagcgaataataaaagaaaatttttaatttttatgcataatttagctacatacttaaaaaaaaatatcaaaaaataacttttttttatactatatcaaaaatatgtttatataaaaaaataaatcaaactcaactttttttatcacttttttgtcgaatttttttattatttttttcagatgatggaccaatcccaacccaaataatgtaaaaatgaaaaaatttactaattaaataaataaattaatcataaaaacttatttttttctaatattacccattcattggtaatacccattaaaagtgtacccaaatatatttagggaaaattaaacagtgtactatcttttgcctattttttacttttacattgccatgcggtatagattacatttatactgtataatttaatactttatacgacagtgtactactattttttaaacttttttatatataagctgtaataccctagaattaaggaaatggatttgcaaaaccctaactagttaattgagtattattgttgaattatattattatataatttattatatgtgaattaatatgagatacaaaatgttaagaccccgtaggtgagctaggggcattttagtaattttgacccgagaagggtaaaacagtgaaatatatttatttacgtgcttgtggactatattattttatagtatgcttgtgttctcttttttcaagtgtgttgtgacaagttggcgcggtatagtcacaactgggtatttcggaccgaaccgagttcggggccgaaatacaattttgggtttaaatattagtattttatttatgtgggaataatctgaaaattaattgagtttatttgtgtgtgcaagtggctattttacccttgaagtgcttatgtggatgttttatggccttaagggcaattgtgtaatttttaccattttggagtaaggtttataaaagggattttaagcaaaattaagatttaattttctgtattttgccatgccctttggctgaaccccctttcttctcaaaaactccttctaactcttgattttgggttgtgcttccttgaattcaagcttggggtttgtggcttttgtgattgagattgaaaagagttatttttgcattttaaaaaggaaaaattttggctttttcctctgccctagc

SEQ ID NO: 355194 - DNA, 519 bp, Cannabis indica
ttcacatgcacttgctgtcattgcaaaaaaaaggataaattgctatgagttttgttctgcttacaaaactgaaaatattgaaagcaacttatgcagaaacagtttaccttttgccacatgaggatgaatggagtctaccagaagaattggacatacttgtcgtacctctaaaaggaaaaattcctcccggtagaccaaggaggagaagaataaaaggacggggagagccaagagtggttatgaagtgtggacgatgtggcaaatctggtcataataggaaaatacagaaacctacctatggagaagccacacaagccaaccaaaataagagaattattcatttagttttacttaaggatgttgctcgttatattcattcataaaaagggaacaagttactatggacaccatactacataaggttgtaatgatttgttacattctttactttgggagaacattagttattttgcttaaatgaatattgatcaaactttgaatactttttttaaaaaaaaa

SEQ ID NO: 355195 - DNA, 1062 bp, Cannabis indica
taggttgggtccgagtcccaagttccaatcccattctgagtctggatttagttttgggtttaagtccttggttttgatcctggtctgggttcgagtttgggtctgggtccgggtctagctttgggtctgattctaggtgtgggagtttgagttcggctcctagtctgtgtttgggtttttgttaaggtctggaccccgatctgggtctaggttcgggtctaggtctaagttcgggtgttgagtgagggtccaagtttgggtctgggtcttcgtccgagttcaggttcgtatccggatccctttctaggtccaagtctgtgtttgggatccggtacacaaccgtgtccgggcccgagttctagtctcagttttggtttgaggctaggtatgtgttcggttctaggtctgggtccgggtcctggtctcggtcctagttttgttctagggtcctggttcggtgattcttgttcaggttctgattttgggtaccaggtctaggtttgggttcaggttttgttcttcgtctgggttctggtcctactctgtgtcccagatctagacactgactactggtctgtttcaggccccgttacccaaatcccgagtcatgatctggataactgtcacgggtctcggtctggttctgattctggggtgcggttctaggtcccgacccttgttatgtgtcccagatctagacaccgactactggtctatttcaggccccgttacccgaatcctgagtcgagatctggatcactttcaccggtcacgtgtgtcggtcttgttctgcttcaagtcccaggtcccatttctgagtttggactagagatcgagacctgggtgcggttctaggtccctaccctagttctcgctcactagtctggttccatgtttgggactgagttaaggttcgagttccgtccaagtttgggttgggatcccggtccgtctctcaattcgggtctaggtttgatttggagttcgggtcttggtccgattactgttctagatcaaggtcaaatttcagttatgattccaagtccaagtcctagttccagt

SEQ ID NO: 355196 - DNA, 687 bp, Cannabis indica
ttgttatcttaacttttatcggttacaaaacatatatatacacgtgtgtaacgaatatttaatttttattttcaatacaaaattattttaaatattttaaaaatatataaaatatttgttaaaacttcaattacacattcttacaaaagaacgtgaattataattggtgtaaaattttcctgtatatttggttgattttgacaatgatatataagatgaaggaagtttcctggaaattttgcagtacataactatcattgggaaaagtcaccatgtcattttctcttctataaatatattatataactccattttcaagttgtccaaacacatagtacactattcaaaaataaatattattattgtgtataaaatatcaaaaatttatgtattatagttagggtatttattgaaccacatttaatatttttaggtctatcgagatccgatctaattatatattggaagttagattttaccatcccatctcatccgattaatttcagtcatccaatcgatccaacatccattggatgttggattggatcggttctatccgttggatgtattttatatatatttattggtttaatttgaatttattcaataatttagacttagtattttttgaatcgaatcaatattttaagtccagaatatattggaaaaaaaagagtaaaattttaa

SEQ ID NO: 355197 - DNA, 804 bp, Cannabis indica
gtattccgggttgttgagagtatttttcatctcaactcccatgatcctcctaagggcttccacctcagcatacccccgggagtattcgtccatggcgtagttgtgtttacctatccggagctcctgtctcgcctcatctccaggaaccggttgggaggggcagtgtgttcctccatgggagagacctcgccatcaagaccgtgggccggagtatcagctctccgtggccgtttgggctcctcctgggcaaccattttgcctttgcgtttgcgaatcagagcaatttcttgctcttcttcaccttcttcaacttcctcaggaagagcccggtgccctccttcaccttcttcaacttcctcagaaaagccccattgcttttcttgaccttctcccgggagcatctcctcatccactaagtcaatagtgtctggaggagcactggaagaaatctttagaggggggccatctgggaagaagtaaagggaggaggagcctcaggagtgtgaaccccggcaagttcggccaaaatggcgtccatggaagcacctgctacaacaaagaaagaaagcaagtgttagaacatccgtgggaaaccaccaacactcagatatgacaagcaagctagtcctaccctgactctctaattcggccctagcaaagttccgaattttgatgctggcagcatcatctccgagatagctgtccgaaggccggaaccagctggatgtaatataagctgaagggcctaaggggacgggctccggaggaccagaacccatccgggaccgacctaggaaatctcct

SEQ ID NO: 355198 - DNA, 1374 bp, Cannabis indica
aaccatgcaacataaaatgcaatttctgatctttattaattagtaaatctggttacattgaaatagattttatttaggacacaaaaactcgacattacccactgggcgaggaggagataagtattcggtagtagaagtcgacttcttcaccaaatggacggaggctgagcctctactttcaataacctgcaagaaagtccttgactttgtcatcaagaacattatctgtaggtttggaattcccatgaagataatggaacccaatttgatggtgacttgttcactgaattctgtgagaggaataaaattatcaaaagcttctcgtcagtatataggcctcaggcaaatggacaagtggaagctgttaataaaaccttaaaggacactatcaagaagaagctagacgttgccaaaggtagataggttgacgagctacctcaagtactctgggcccacagaattacctaaaagacagctacgggacacactcctttctcgctagcatttggctcgaaagcaatgctgcctgttgaagggaacatatacactcacaaaagagagttttataatcaagaagaaaaccaggaacttttaaaattgtccttggatctatttgagtaaaaacgaactgagtcgcaaatcaccaacgcagcatacaaacaccgagttacaagatacttcaacaaaaaagtcaagaaaagactatttaatgttggagacttggtgctaagaggagtctttgcaaatacgagagatgcatctgcaggagtgttcaacccatcatcgaagcagtagttggagttggagtttataaattgcctcgactcgatggctcgctaataaagaactactggaacgtagaacatttgcgaccctactaccaataaataaatgatgtaactcgcattaatgatgtaaactttaaacttcagttatgaataaagagaatcatttacattaagtaattacatagttttactctttaaaaattacttaaggggtatttatgtatgattttaccagaattcatttagaaatacatggtataatgcgaacccgccatttcaaattttttttgaaattcaaaggttctcgactaaacctctttgacgaaagtggagtcaaaccgttataactccctgaccaaacctttttgacgagagaagggttgaatcgttatagcatcttgatcaaacctttttgacaaagaagggatcaaacaactataattttgatttaaaatctatccaacgagaaaggaaaatcaaaagttataaatcgcgtataaaactgattactaacagttctcgcaaactaggaaagtactaaacgaggcatcactacgccttgataaaagaacttaaacctagaaaa

SEQ ID NO: 355199 - DNA, 659 bp, Cannabis indica
ccctgcatagaaacacttatgtgagtagtagcaccagaatctatccaccaagtgtttctaggtactgaaactaaattaacctcagaacagaccaaagcaagattaatacctttctttacacgccatgcgtgatatttggcacaatctttcttcacatgtccaggttggttacaaaagaaacaacccttagaatcctgttgttgtttcttttgaactggacccttagcagcttcattctcaaatttccttttcttgcccttatccttaggggtagtggccaaatgagcactttcagttttgtcctttttcaacctttcttcctcttgcacacaatgagaaataagctcgttgagagtccatttctccttttgacagttgtaactaattttaaattggttaaactgtggaggaagcgttaacaaaaccatgagtacaagtacatcatctgaaagctcaatcttaagtgtccttaatcttgagacaatatgatgcatttccataatgtactcccttacatttccttgacccttatacttcatgttcattaaagaaccaagaagtgttgtcatttcaaccttatcgtttttagcaaaacgttcctcaatttgttcaaggaaattcttagccatagtaaccccttcggattctgtgccccaaaa

SEQ ID NO: 355200 - DNA, 709 bp, Cannabis indica
aaaatcggattttggggcttgctggcagcaaggctgcacgtgcagcccagataggctgaaaattgcctgatatgcacgtagaatgaaggagctgcagcctccttgatcgagaaacctcggacaggtgcaggattcctgaggcgcgagtgcagcatccctggatgaggatcccgtctgaatgcagcacaccgtgtctgaagacatgggtttgtccgagtgtctgcgtatgttgggcctccttgtccgagggtctggtgcgcatgagcacctccctcgacacccaatgcaccccgattttcaaatattcataactttctcgttgttcatcggaattaagttccgtaaaaaagaaaattgcttaatttttcacaaggaatctaaatgaattattttcagaaataaaataaatgattttcatgaattttttttgtaaatcacatacattcatcaaataatcacataaaccatcatgaaactatccaaagcaacacaaacatcgttttaattcatatttcatgaaagtaaatcattaccatggcgttgaggccagttgtcggaatatattttaccaggatctagatttattaccatgtatgttatttaacatcctaaatatgaatttcttaaactatgcaaataaacacataaaaagttttagaaaccttttagtgggtgcaacggaattaaatgactccttccactcaaatct

SEQ ID NO: 355201 - DNA, 793 bp, Cannabis indica
aaataataatcaaatatttttttaatcatcaaaacaaggagacttaaaagtttgagttaacagaggtgtggtcggccaaggtgtgcagggtctggctagacaaagtgtgcaggacctggtaggttaagggatgcaggatctagtaggtcaagggttgcaggacttgataggtcactatagctctgtctagaagaggccagactcatggcactgattgtggtgacaggattcaccacttttgcaatgttcatcgggattccagttgtgactggaacctgaatatctagacctacactttgtgggtcttgagggagacctaaagatgcagattgtgtgacaggaattcttctcatgttaaccatggcatttgatcacatacgatatccacgctctgaatgaaagcaccaatgacctcaaaaaatgatcaactaatagctggatcgtataagtcggatgcttgccatgtgttacacaaacaaaatagaaaagcaataaacacaaagatttgttattgaggtttggcccccttgtgatagcgggtaatgacctactccccttttggttgtatttatactgagggaaatactacccagattactataggtgggatctgctatatcacccttaagattacaaagtatgaatcagtaggaaaatctcaagtgttggacaacatagggtgttggccagccttgggtgtttgccagcctagggtgctagccaacctagtgtaggcgtgtgagagagatgaatagaagagagagagaggagagagagagaggagagagagaga

SEQ ID NO: 355202 - DNA, 600 bp, Cannabis indica
caggttgattttgagcgttcatcccctgtgccgccctggtcgaggctgcctcacgttctaactcagcgttcctacgctatgcctcttctagacgtcatctcaggcaacgactttccgtttcataagttctttctttcacagattggacacctccacgattgagctcttcatcccctcgtccccagggttctgacccattcccatgctgagtttctcctcgagcgtgttgtccatgtactaggaccaacatcgagttgagttcttcgggaacgtgtggtccgcgcactggggccaccttcaggttgagcccttctagaatgggtggtccttttggactgaaaaatggtagatcttcgggagcccacgggctcttttccagaacaatggttggcttcctcatttggggtgttaacattttctggattttcagccatgtaggaagttgttttcttcgaaagaagggaggatttttctgagctttttcacagaggctctcaatgaaagcaccaaactgttaacgcagattttcgttaaccaaattttagcctcaaaatattgttttcacacagaaataattaaagctatcaaaataaagaatat

SEQ ID NO: 355203 - DNA, 1481 bp, Cannabis indica
caatgatattggtgtgtttggaaagccacaatgtaattagatttgtgtgtaattagaggtaattacacaatttggcatgtttgtctgaccatgtaattacactgtaactgtgtaattagaagtaattgaggggttccaattacactctccaattctcatggccccccatgagaattgaatgtaattacactgtgtaattactaaaaactttccatattaaacattacctactaaaaaatatcattttctcatgtaattactaactattttaccaaacaagatattaggaatttatatgtaattaccacctcatatccaaacacaccttgcattttaaaatatagtgtaattactaaactgtgtaattaccaccctagtaattaccctacctagtaattacacagttacttccaaacagtaattgtacaaattgtgtccaatactactaaaaaatggacttttatttcatttttacgtagtcctattaacctttctcctaccaaacctattttcgttttttttttgttgaatgattttttttgggagataaagtgtgaaactacaatttgggttatgcatatgaccatgatttattgttatacctacttatacctacttataccgacttttttttttaatatttatttgttaggattatcttatcatgatttcttgttagtactcttatagatctacaagtgtacgtagctaaatccttgtatcactaagaatcttggatgtatgttaattatatattgaattggtcacttggagtcgtatttgtatacataatgttaagtattcttattcttacgacagtgtgtcataattgaaagacattaagtctttaattaagtccaatatttatattcaaatattaataaattaaattatttaagatatcaaaaatctttaaaaagagaaacccaatatatcttcctttcctctacactcctccttataccttacgttaaattttttaatatttttagtgatgattaccttatcatgacttcttgttactcttatcgatctacaagtgaagctaaatccttgtatcactaagaatcttggatgtaatgttaattatatatacaagggcaagaatattatagtaggtcttagcaaaagtcccataccgtattgaacttttattgaccatttgaattttagatcatgtggttattatgatgtaaagtatatactcttacgatgagactgcttgtatacgattaaaactttatacatattataataatatttaatgatatctatttttaaaaaataatattaataattaaaaaatttattaattttatttgaattattttttaaagttatttgaattaatttatattggtatttatttttaaaaaagaattattttttctaattattttttttggcttcttattttttggcttttcataatttactaatggttttttttttttttttttttacacctagtcttttctttg

SEQ ID NO: 355204 - DNA, 476 bp, Cannabis indica
caatccactcaatccaacatgcttaaaccactgaatacaacatataaacacagcagcacaagcaactcaaaactagcatgcaacactcatcattttcatcaaagtttctagaaactaaaagagcaagatgaagaaactttaccaacaattagagattgaaaaatcttgctaaaaagagcttgaatcaccaagaaaaattccacttccttgctgctcaaggagggccgaaaagagagggaaagagagagagctttttcacaacaatttttttttttctaacttttttctaagttttgaaatcttgaataaatgagagaaatacaacttaataaacgtttatttcagccaaacaattgccacataatcacataatttccaattacaaagtccactaaaggacaaaatatcattggggaaaaatgaccaatttgcccctccatactaaaataacataaagggcactaaaggggtatttt

SEQ ID NO: 355205 - DNA, 584 bp, Cannabis indica
gacatttatattagatgagtctgtacgtcgtcaattttaaaaacaagtgttcttccatgcatagaacaatccaaataatgaaccagaactgaaagtgagttgataaagacactcactcttttgttaattttggaggaaagtatgtgttaaatctttgaatgtacggttggttttattctatagaaatgaggtcaggtttcttttttcaacttttattatcatgttttgagcttgcctcatgtgtttccccctatgaagaaatgtatttccattttgataatgctgtttactgtgttgaaactactttttttttctttcttttactgtttcgtcaaaggcttatgcatctcatagcactcaatcaccagaagtcacttccaaagctgcattaaacgatgaagatactactgaaactgtgaagcgttgagtgacaaattatctgctgcacttcttagcgttagtgccaaggaggacttggtaaaacagcatgctaaagttgcagaagaagctgtctcaggtattcagttttctcacttttcagtatttcatttccatcagaataaaaccaaccatacattcaaaga

SEQ ID NO: 355206 - DNA, 767 bp, Cannabis indica
accgagtgttcaaagactttctgaatgattttgttattgtctttattgacgatattttaatttattctgacacagaagagacccatgaaagacgtcttcggagggtgttgcaacgcctcagggaacataagttgtatggcaagttcgagaaatgcgaattctggttgcctcaagtgagtttcttggggcatgtggtgaataaagatggccttttggtggatccggtgaagattgaggcggtgcgggactggcctcgacctaagtcagcaactgaggttagaaatttcttgggattagcagggtattacaaaaagtttgttgaggggttttctaagatttttacgcccttaacagaattgactcgaaagaactgcaagtttgtttggactgataagtgtgaaaatagttttcaggaactgaagcaaagattaattaccgctcctgtgctaactttacaggtcagtgatgaaaagtttgtgatttattatgatgcatccaaataggggttaggctgtgttctcatgcagactggaaaagtgattgtatatgcatccagaaaactgaaagagtatgagcagcggtatcctactcatgatattgaactagcagcagttgtttttgcactgaaagtttggcgtcattatctatatggcaaaaagtgcaagatctataccgatcacaagagcctcaaatactttttcactcagaaagatttaaatatgaggcgacggtgatggttagaactagtcaaagattatgactgtgag

SEQ ID NO: 355207 - DNA, 588 bp, Cannabis indica
agagtccgacaagatggctcagtatctagagttgttcgggttagatttcgaggatgaaatccttttaaccgcggataattgtaaagatttcttaactttaatttggaaattagcagataattagggtttaattatgaaacttgcatattaattatgaattatcattttacgaagatttatttgaattcagaatgcattttatatatcatatatggaatttcatatttttgcatgttttgtgccctacaacattggaacgcgacgtttggctaatagaatcatattttagtatttttagtatagcggggcaatatagttagacattgggaatgtcgggaatagctgagattttagaattgaccaatttacccctaagtgattttatcacttttggtgtaggcaagtgcattatggtctttttgcctttcgggagttttgtcctttagtgagattttatttgattattaatttgattttatttagttgatattagatagataaacaccttgctttattatttcatttgattaaattaaagaaaaacacaaaaaaatcatttctctctctcttcaaccctctctctctctc

SEQ ID NO: 355208 - DNA, 725 bp, Cannabis indica
gttctagggcctagttttgggtccaagtaccccatgtaggcacgaatccttgctcctagtctgggtccaattttgggtttggggcccagatccccaatctaggtcacggtttacttctcaggtcccaggtttgagtctcgagccccgggtcccgggtccaattttgggttcgggtctatgttcgattttggtccttgtatgggtccgtgtctaggttcttgtcctagtttgggtctggggcaagttttgggctaggtctgggtcggacttcagattctcgggtccaagttaggtcctagttcgggtttgagtctcagatttagatctaggtctaggttccggggcccaggtccctggtctaggtccccatccaagttcggttcctaggtcctggtgtgggtccaggtttggaatctggtcctgaatctttgttttagttccaggtatcggtccatattcgcgtccaggtttcgatcccactcttggttcggtttcaagttcgggtccttgtctgggtttggatcctagtctgggtcacgggtcttaggtcctagcaagggtcgaggaccaggtcaggtccaggtcccggtccgggtctcggtcttggtccaagttcgggtcccaagactcagatcccaaaactagcaaaggtctcggtccatgttctcgtctgagtttgggttatggtttgggttcggttttggtctaaagtctgggtcctagtc

SEQ ID NO: 355209 - DNA, 500 bp, Cannabis indica
tgtgcttttccaatatagtctctgtcaatgtctttgtgaatgggtcagctaggttatctttagtatcaactttttctaccagcgcgtctcctctttcctggcttcaaggctctttactattggcaatttcacgggtgttgttacaaagtaacaccaatagttttttgcatatttggaataacaccaagctgtgtgaagaactttctcagccagaccagttccttagcagcctcaacaatagctatgtacgcggcctccatggtagagtcagaaattatatattgcttgacacttctccaaacaactacttcacccccaagagtgaataccatcccagatgtagactttttgtcataaagggaagcttgcaaatttgagtcaatatagcctaaaggattcaaagcacaactcttgtagactaacgcatagttcctagtcccctttaaatatttcagaatatgcttaactgtcgtccaatgttcctttcctgggttggacta

SEQ ID NO: 355210 - DNA, 620 bp, Cannabis indica
aaaattattcccttgaaatcaatagagctatcaacaaatctctctggcataaaactctcaggttcaatccaatatttaggatctcttcccattgcccatgcatttacaattatccgagtttttgtaggtatttcataaccattaatctcacacttttctctactttctcttggaattaacaaggcaactggaggatgcaaccttagagtttctttaacaactgattttaagtatttcatctcattgattgaagattcatccactaatcctttttcgccaaagacttgtctaacctcatcttgagcttttttcatcactcttggatttctcatcagttctgccatagcccagtctatagttgttgctgatgtgtcactccccgctccaaatatgttctgaaaattttgtcaccaattaagaatgttaattaaatttcacaaaaattgataataatatctatgtatatatagagaacttacaaaaatgactgctttaagattgtccctagttaatgtgaacttatgatgatcttcactcttataaaacttcaaaagaacatcaaccaagtcttcctcttctccacttttctttgttgatgacttgatctccttgtcttgatc

SEQ ID NO: 355211 - DNA, 744 bp, Cannabis indica
ttgatttatagctatctttttgttatttcattgttgtttatagtaatttttatgttattatttaagtgtattatagttatttttctgttatttttttttgtacaattgttatttagtttatctgcattttttatggtatatatttttagtttgttccccataatttttttgttgtacatatgtgtatttgttttgtaatttttatgctattttttagttgtttttaagtggttttcataaaaaaaaaatttcaacatttattttttagttatttttttttcatgtgtatttttttttttagagtgtatatgtttaatttcttcctcacaattttttttagttgtatgtgtgttgttttgtagttcaaaaacatacatttagtttattttcttgacacatttcattaaaatacaatgataaggatttttgtattattaattcacacaatctacagtagtcactacaaaaaatcttacttttagtcacaacaaaatttgtgactaaaatgtgaaaaaaattgttaaattataaatcatgattcctatgttgtgctaaaaaggttcatgtctaaaagtattagtcacaaaaattacaattgttgtgactaaatgtatttttagtctacaatatacttgttgtgactaaaactaaattagtgataacttgtaactaaataatatgttttagttcacaactaacattttattgtaactaaaagtcacatttagttcaaaaaaatttatg

SEQ ID NO: 355212 - DNA, 635 bp, Cannabis indica
tctctctctctctctctctctctcacacactctctttctctgtgtttcgtttacagaggtttttacgaggttttagggaagttggaagtgattgagtccattgagtaggcccaatttcatgagtttgacatcctaatgggctatgttaccaaaggactttcataactttctaggactcccatcacttgcctttgctaacaatttttaatcaaatttttgtttctttaattaaaaaataaaaatatttttttaaaatatattctataaaattatttttattaagagttacttttaaatgggcgtttagtaatattttttttttaattcacaaaatatataaaagtaaaatttgtgtttttaaaattttatttttaaaaaataaaaatgtgttatataactatttttttttaatttttaaaaattagaaaacataagtgtgttctataactttcatttttatttttatttttagtttttttgtattttatttaagttgggtccaggttcgggtctaggacatgggtcgtgatttgagttttggaactggggacagggggatggagttcgggtcctaagggttcaggttgggggtcgggagttcaaaatattaattaagaaaaaaaaactgtttaaaa

SEQ ID NO: 355213 - DNA, 1108 bp, Cannabis indica
gggcataaaacccaacagaacttcctttcctgcacgggatagaaattttccattccaactgttgagacaattaataatcttatttttgagaaaaccaaggataacagttttctttctaccaataatgtttggtaatcccaaataaagagagccatcagtagcttctgtcatgacaagaacaatgcagatttgatttcgatggtttgcttcattgttggggctgaagaagatagaggactttgatacattcactttctgaccagatgctaattcaacggagtgaagcatttgcttgattttgacagccgtattaggacttgcttgacaaaagaggtagctatcatcagcaaatagcatgtgtgttataggaggggctcctttggcaacacaacaaccttgaatgacatggtcatcttcaaacttcttgatcaaggaagaaaagccttcagcacaaataatgaacaaataagttaataaaggatcaccttggcggattccacgggcagtaattatcggccccaacatatgcccatcatgaaagatagagtatcaaacagaagtaacacatttcataataagattgatccattttccagcaaaccccatacggtgcatgaccgcatacaagtagtcccattcaactcgatcataagccttgctcatatctagtttcatagccatgaaacctttcttgccctttgttttccgcttgagataatgcataatttcaaagccaatcattatattatccgagataagcctgcctggaataaacgcactttgagttggagaaataacatgatcaattaaaactctcatcctattggcaaggaccttagaaagaatcttataggatacattgcaaggagcaataggccgcaaatcacccatagtggataaattcttctttttttgggatcaacactagatgagtgtcattgagtcctgtcggcatgtattcattattgaaaaaatcagtaacaagttgggtaatgtcagtaccaaccgtatcccaatgtttttgataaaagtcagggttcatgccattaggaccgggggctttgtcgggatgcatttggaagatggcttgcttgacttcttcggctgt

SEQ ID NO: 355214 - DNA, 1015 bp, Cannabis indica
ttaatttttttttgatatttatatatataaattattcaataataaaatattaataatttaacatttatgcttacattaaaatgtttaacttttattaattatcaaaatatctttacaggttttttaggatataaaccctaacacattgatgatgatctaatagtgaaattgactctggagttcggttgttaattttcagagtttaagtcgcgtcgcgggacctactttgggtaacttatagcttaaattcgtaactcccttggggtgaaacttggatttgataattttagaattgcgactgaagtgtcagacatgacttgatataacattgaaatagcttcaaaacacaatttgaatcacatcaattgtatcaatattgagtgagttatagccgttttactgaaagatgttcttggcctagtgcccaggttaacatccaatgccccggtttacatatgacgtcaacttggacgcgattcgtaacaccctactagtttaggcctgttatcgtgattttatattaattgtgcaattcattgctaatcaacgtgtttgtcaaaaatcgtaattaattaaaactttacttaattaccctttacttaaaataaaatatactttacaaaagtcgggatcccttatttcaaaagttacaacctaaatacaatatattaattacaaaacttttcgccttgcgactaatcaaaatgcaacctgctgtcccgaagatcaaacactccaggtctaacctcctcgatatatacaatcttcacttgcttgacctcactgctgttcagccttagctttgcccttacctatccatgataataattgtgagttaacactcagtatgaaaagtataatcatattataacataaacttgattataactaggcgcccatacacccaattataaccctatcccacgtcctacgcgtactgagtctagaacgttcacacgatagtactattgaccataatattagcctatactcggtactctagtcgtaccgatgt

SEQ ID NO: 355215 - DNA, 537 bp, Cannabis indica
attagccttaattttttcattattttaatgccaaataattctaacctaaacctaggtggttacctataaatagatagtgatggctctcattcacacttaactttgtgaacttctgtcagatgaaaactgagcctctatcttttctctataggccgaacctcttcccttctcttttcttctctaaattttcgaaatccttgagtgaatgagtgagtgcccacacacatcaagtggtatctcaatcatagtgtgtaagactgtggaaaaccatccaacaagaaggagaatcagcatcaaaggaaggagagaaagagatccaggttcagatattgataatgctctgctacagaaaggaatcaatggtaaaatatatccaacaagtaattaatgaggaaggtaataaatgaggaacatctccaaggaccacactaaatttggtgttatattatcaccaaatttagtatcaaaaagtattaccactccatccacaacaccaaaaattacactaaaaaatattccttattattatattatttt

SEQ ID NO: 355216 - DNA, 664 bp, Cannabis indica
ctatcacaagtactttgggctcacagaactactaaaaagataacaacgggacacactcccttctcgctagcatttagctcagaggcaatgctacctattgaagtgaacatatcgactcatagacgagagttttataatcaacaagaaaaccaagaactcctaaagttatccctggatctacttgatgaaaaacaaactgagtcgcaagtcactaatgtagcatatcaacaccgagttacaagatatttcaaaaaaaaaagtcaagaaaagactgttcaatgttggagacttggtgttaaggcgggtatttgcaaacacgagagactcatctgcatgagtgttcaacctgaattgggagggttcatatgtaatcgaagtagtagtaggaatcggagtttacaaattagctcgaataaatggctcgctaataaagaactactggaacgtagaacatttgcgaccctattaccagtaaataaatgatgtaactcgcattgctgatgtaatattttaacttcagttatgaataaaaagaatcatttccattatttaagtaattacaaaaccttactctttaaaattacttgagggacatttgtgtatgactaaccggaattaatctggaagtacatgatataatgaaaacccacaactttaaaaaaaa

SEQ ID NO: 355217 - DNA, 741 bp, Cannabis indica
tctttgtgcagaccggtctgaagttggactacacttactcccgggctaagtctgccgcttccaggaacatggctctgtccgacaccatgagggcagaggtggacttggccagggcggatctcagagctgttcggttggagttgggtgaggccaacaagaagctgtttgccacccagaagaagataactgagctaactaaggatctcgaggtttctgaccgtcttgaggagaccatcgagaccttatctgctgaagtgaacagtcttcaggatgagagtacttctcttcgagcagttcttcatcgggtgaaggaggagaaggaagctaaggaggaggagctttcggctgaggtggcgaggttgaaagagaaggttaatgctctagagacagtcggtcttgagcttttcttcgacgtttggaaggctaatcctcaggctaactttgactacttgggtgatgctaaggacatgtaccttgagttctgcgcgtcccaagtggcctatggcgaaactgaggcagctgcttcaacgtccggtcagactaatgatgtatctcctattcaaacaatagatcctccagctccaattggcccagaagaaccgaaccaagagcctgggactccagctgtttaaacacttctccttttatctatttattttttatatatcttattcgcgcacaaggcctttttctaagacatgattaccggccaagcggtctttaaacttggaattatttttc

SEQ ID NO: 355218 - DNA, 509 bp, Cannabis indica
tatgtaacagaaattaaaatcgagcccttaaatgaaaaacgaaattaatgttcggactaaaaagttccaaactcaatttctaaccaaaaatcacctcagtttcagcaagaaaacatcgaaactagtctcatgactaccctagaacaatcctataaggtcagaaccttcataagtactattctaattcacaaaacccctatatgaaactaattatttttaaacttaaaacgaaattacaccataccttaaatttttttctcttcaaggatttgctatccagctactactagagcttaaatcgctagattttaaattgaaaattgaagaaaattaatgtagaggaagaaaattttgtcgaatgaggaagaacgagaatttcgttcgtttcgtttatttttactgtaacttataatatatatattaacataactttatatatatatatataataatattataacaatataataatattataatattaacaaaaactttatcattaatagtta

SEQ ID NO: 355219 - DNA, 581 bp, Cannabis indica
gatacaaaaaatgtaaacagttttgtcataacacttttagatcggattattattaaattttattttgacaaaaaatcagtttagggtcctatttttaccattttagaaaatacatggtctattttgtcatttaacaaaacagagggtccaatcggtaacttttgcaaaacaaaaagtccaaaatggtatttaccctataaaatattcatttatcacaaaatcaattatttatttatttccttaaataaaaatatatttcccaatatagaaatattcttatagattcaacttttggtggagatgactcttcaagggatgaattgttgactcctttagttagaatcaaatcattaacttcttggcgtggtggtaattcaagttatgtaccactttggagtgttatgaccttgacattccccattgggttactttctatttgtgcaggtaaagtatttgaacgttgaattttgttcccactcatagatattttcattgactccacaagattctttaacttttgtagagattgttgaagactctacatagtttcatgacaactttgctgaaactgcaaggaatta

SEQ ID NO: 355220 - DNA, 805 bp, Cannabis indica
aagagatgaacttgttaaaaactagctcgggaagcaaactcagcactgtttcaacaagtactgtcttgactcaagctaataacctaggggcctctagctcaaagaggaaagacgactctaaggggtcatctaaagaaaagaagaaataaaagaagcacaataagtacgtgccagtttacgccatttatactgagcttaatgaaattcgagaaaacatttatctcgcgcatgagcacaaggttgcctttagcaagcctgagcccatgaggcacgcaaggcataaaagagatccaactagatactgtaagtaccacaaagacattgggcacacaacagacgagtgtcgtcagttgaaggatgagatagagagtctcatcgcacgaggccacttcaagcaatatgtgaaaagacatggaagtttacataaccagcccaatccacccaataaccctaaccaccagggattacaacctcctcctatcaaaggagaggatatcctggttatctcgggagggccacatattgcaggagagagcaataatgcccaaaagaggtacatgaaggaagtgaagaacgagcagtcagcctttgctccaaaaccttctaagaaagtaaaaattgaggaacctctgattctatttttggaggaagatgaaaaatatgtgaggtacctgttgggttttatgccctaaataaaacctatttcaatataatcagatttactaactagtaatgatcaaaaactgcattttatgttgcatggttcacatgatttagttcatgattatatttaatgtataaattc

SEQ ID NO: 355221 - DNA, 1078 bp, Cannabis indica
tttcgaccgatcccctgcccagtgaatatgcatcactatttatagggctaggaagcttgaggaggaagagtttcctctcttgttacaatgcgtataaacagaaagatcgtgggatcaatgctgaatgcaaggatcgtgggattgaggatgaatacactaatagtgggatcgtgtgtatgctgtatgcacgtaaattgatccctgagttatagggattgagctgatgacccatgatgtgaaagctgaattcgctaagtgttgattactctgcacgaatcgctgaatattttactctggacatgccaacgaggcatcttgctcggcctatcttcccgagcagacgttccaagtggactccacgagtgaccattctcgtgatgccacatcagagtgcaaaattttggataacatttgcccccccaagtctgtacgggatttctaaggttgcgtgtagacttcatccaagctagttttgcctttggatggggacacgtgtggagcgtgaccgtttgagactcgatgtgaaactgactgggcgtcccttcagttttcgactaataaatgctctcacaattaatatttcgaaatctgattttgtctctccacggctaacagtttaacttgattacttttgatttcccatattcgtttttaaggcgcgaatctgaggcgtctgaggtttctttgagacaatttcctcttttcgtgacttgcctataaatatccacagcattggcacataaactcattttatcacccttcttagctaagtaagctccatagcgaaaagaaaaatttcctggcttcaaattctccgaagtgccttcatataactcctggttggatagacgttgctcgaacccagacactcaaatcttgagtaagtctctgatttcttttattcttatctttgcatgtttacatttcaaatgcaacttttactgtgctgtagaaaaatgcttaggaaaccctagggttagaaacttctgtgattcttctttatcatgtcttcatgtgggtttacagccataaagcttgtttctgaactgcattgcatccgtctttcatcttgcttatt

SEQ ID NO: 355222 - DNA, 604 bp, Cannabis indica
ctgcagaaggttgtagctctgtcatccacagaggccaagtacatggctgcaactgaggcaataaaagaggcattgtggttaaaaggactttcaaaggaactcggattcaactctgatgacatgactgtccattgtgacaaccaaagtgcattgcacttgatgaaaaatcccatgttccatgataggtcaaagcatattgacatcaaactacactttatcagagagatcattgccaatggagaggttcaagtgaagaaaatctgcactgaccacaaacctgctgacatttttacaaaatgtgtcactcaaaccaagtttagacactgtctaaacttggtcaacatcaaagaaattggatgagtttctcatcttccaacaaagttcagccttccatgctcatgtgccctaagtctgagtgtctatgccaaggtggaattgttgtaaagtggcctagaaactaagccttagtgaatgtacttaggactttctaactgctttaccggttttatggttaagttagttatgttggtttatctataaatagactcaactaactcttagcaaggtgtgattcctttttcaatttacagaaacaagagagaga

SEQ ID NO: 355223 - DNA, 595 bp, Cannabis indica
aaaaataaatactactcccccttcttgtctatcaaggagccaaagataacaaaaaaacatgaacaaagtcataatagttcaatcacacataaataaaaagcaagagataaaaaaatggaccacttattcatcatcattggatcggaagaatttcatgatgttgtccattctcttgagaagcaaggcttgactggtctccattcttcccaaacgcaagttgaattcagccatttttgtagaggcagaagtggaagcagatgcagcagcaggttcattagtagcaccagcggaagcagaccgagcatttttcttagtagattttccttgaggaggtttctctggaactttgaaagtggttccatagcaggcatttcaatggtttcattctcaaggatcaactcctcttggttagacaaaatcttatagatcaaatgaggaaagataagattgagtctaggtttcttgccctttttaagagaaacaattttctcccaaatcatgtatgccaaatcaattttagcaccaatagaaactttatacaaagagaaggcaggttcatttgaaacatttaccgaattggagcaaggaaaccaat

SEQ ID NO: 355224 - DNA, 554 bp, Cannabis indica
atgtcctcccacttccactcaagtaaggttaaaggttgtaacaacattgccggtctttgatgttccgccttgatctactgacaggttaggcatctcgatacaaattctaccacattcttcttcattccgctcaactagaagtaaggtttaagatcctgtatgcagggatgcagggaatatggagtggtatgagcctccttaagaatttcatttctaagatccacactatctggaatacaaaccctggctttaaacaataacatcccactgtctgacactataaaatccctggcttgacgagctgaaacctcttctctgatctttactaactctggatcagtcatctgagcgactttaattcgttctaacagatcagattgcagcgtcaagttgtgaagttttcctacaacaaagtcaatgctagatctgaccatatcctctgctaactgaggtgaaatctgaatcatactagctacctgcctgggacccttcctgctcagggcattggcaactacattggccttcccagggtggtaaaggatctcacaatcgta

SEQ ID NO: 355225 - DNA, 890 bp, Cannabis indica
ttatttattttttcagatggctccgagactcataattccagcattcaagcattttactggccgcgttacttacagaggcaccgaaacttttgcaaaaatcaagtctcggtttgaggagttcaatttgaataacacggcgaaggaaagccgtttcggcaacttttggaatgccgtacccctgacattctcctcggtgttatttcaccaactgatgctgcacaagatgaaggttgatgctcaggaggagttgaggatgcggttttacattggtcggaaggagctcagattcggagtgcttgagtttgcactcattacaggcctggacttctccacggggccaacagaagaggagaaggctgcgcaggttgctcgctcagggtcagaccgattgatcaacaaatatttcaaccggtctggtagtgtgaagacagaagcactccaagataggttcacaaactgtcagaacccggaagacttgtacaagcttggcttgtgcttgtttgttgagtcagtgcttctgggtcgcgaggctaacgcgctgattacgcctgacatacttagatatgtcaaagatctcgagttcttcttccggattccttgggggaagcactcattcgccagactcatgcactcgcttcaaaaagacatgttgaaacagaaggccaactacgagaagaagctgagttcggatgttcagcatgagtgcaaatacacagcttatggcttcgcacctgcagtacaatattgggcgtatgaggccattttggaggttgggaagaggtatggcacgaatcatgggattcggtatcctaggatgcttagctggacgagcaaggctgatattgggaagaaagaagtcagtgcatattttctagacgggtatgaatttc

SEQ ID NO: 355226 - DNA, 690 bp, Cannabis indica
tatgctttattgtagtttgggcagagtttatgatatttctaggttggaattgcatatcaaagtggtgttatgctgatggattttaataggtttgtgttgggtgttcatgttcttgaacttgaaatcttgataagtttaagtaagatttgtgttgttttaggcaatctgatttttggtattgttatggggattttgctgcatgaaatgctttatttgagcatctattaattgctagtaatcctatttgttaatttgaaagtttggttgagaatttggggtgaaaaggttggattttcttgctgaaaatcgtgttcaagcttgctggtttctgggtttggaacccagatgtcgcagcatgctctgaagcatgtcgcggcccgcccctgctgatggaacttgggggttcatcccaggtgccgacgcatgacttgggcgtgccgcggcccgccctcgtacttttgggcagtttcgagttgaatttcgaaaattcataaatttagattcctaactccgatttgggagttctttatatcgttggaaagctcgttccgagttctatgtgattatctgaatttgaaatgccatgattgaattttatgagtatggaatcaggggttaactctaagtgtgaaatatcccagatttgtgtgactaggattacagtgtagacttttcttcagtagaataact

SEQ ID NO: 355227 - DNA, 703 bp, Cannabis indica
taaatgttatggtgggttcctctgcctgtggtattttcagcttcctttcttcaacgtccagaaccacctcttcttgctcgtgctgtaatgttcgggcatacctttcccgagctttgcctgcatctccagctatgtgtgggcctctaataatgacttgtaaatgcccgcccactggtggcgatagtaaatcttgattattatccgtctgggcggccctctaattttgattggacttgacatattttggcacgtgctggttattctttcttattgaaaattcaatttcctgcttcagattgttgcattcgttagtgtcatggccataatctccatgaaaatagcaaaacttggacatgtccctcttacttacctcctttttcatgggagtaggtttcttatacagagctaatgactgagtagccatgtagatggtttccaaatcctctgtcaggacagagaaagtagtaaacttggaaggattttctttgggagcctgttcggcttttccaacaaactttctctttttcccattgccttgtctgttgttgttgttagaccttttactgcccgagcttgaattgcttgggtactgagggggctgaacgtatgttctagcagagggagcttgtggttggtttggtttaagctcgatttctgcccgttgaatggcctcttcaagcttgatgaagccatctgcacgatc

SEQ ID NO: 355228 - DNA, 838 bp, Cannabis indica
agaaagagcttgaccgtgtcagagaagagttacgaactcaacttgatgctaaggagcaagattctaatcgtttgaagtctgccttggctgatcttgctactgcccaagctcgtgtggacatgttggaaggtcggttagtcgaaattggactggaggctgagatccagtgtcgcggaaaaatggcgatggagtatcgagacaacaaggccgagtcttgggacataccccagtacattgctgactatgaagaattgctgcggatgagggccgaggaagacgctcgaactagccaactggctaactcgtttgaagagatgactacgaacgatctcccggtggatgactcacatctttcttgagttaactatatgtcaagtgttttatgtttttaatgttgtaatatgaacttttgtctggttggctgacttgcatgggtctggtaccccattttccccttagtctaaatgtaggtcagccaaattggacttagacttagtattttggaatgatgtttgttgtatgcgttatgtatttgttgtagtaactggtttggctgacttgtatgggtctggtaccctattttccccttagtctaaatgtaggtcagctgagttagatttagacttagtagttcagaatgatgtttggactatgtggttcgttgtatgcgttgtgcttctacttcagtagaatattgtcttgaatttattttcgttcggtgggttgtcaaatgaaactatcaaatggatgttgtatgtcaaatagcttgaatgacgcattatcctaaaaagaaaaaaaatggttatgatagggggctgtattggaaatattttaccag

SEQ ID NO: 355229 - DNA, 1043 bp, Cannabis indica
aatcagtataaaaagaataggatagtgtcataatccaactaatgactctaaacctactttacaacttgttagacaactagagagttcttgagacttctttttcttctttctaatttcaaaatccttgagtgttcttcatcaaatttttgagccttagtgattgagtgcatgctcacccatagcaagtctagtactcaatcatagtgtgtaagaatatgaagaatccaaacaactgaaggagaatcacgctcagatcttgataatactctgcgaaagaaaggaacaagggttagagatttgagtgggaggagtcactatattccgctgcaactaatgaaagatttctcaaattttatatgtgtttaagtttcattgtttaagaaattcatatttaggatgttaaaaacatactagttagtaaatctaggtcctagtaaaatacattcaaccaactggcctcaaaaccattgtaatgatttactttcaagaaatatggatttaaaacgatatatgtgcgatttggatgtgattcatgttgatttatgtgtttattgatgattgattgatgtttacaaaatctttacttaaaataattggattctcattctggaattattttatttggatagtatggaaaaaattaagcaatttgtttatttatagaacttaatttcgattttatttgaattagttatgatttttttgagaattttaaaaaaatcaagggtgacctacttacacgcgcggacaaggggctgtctaaaccacccttacgcgcgcggaaatcttgctgtgcagggttggtgtgcgacattccctcgggtcaacccccttcccactcacgcgtgcaccaaatccatttttttcgaatatttttaattttttacatgatttttctaaggaattaatttcaatttttttgtgtaattttgaatgtagatttttattattcaaatgaaatatctaattatcagtttgaaattaattatttttttttaattaattttagatattagtagattttgaacctaaaaatagatact

SEQ ID NO: 355230 - DNA, 620 bp, Cannabis indica
gctccaacagaacttaaagaactgaaaattcaactccaggggtttgcttgacatagggttttcgcggcctagtgtgtcagcctggggagctccagtactgtttgtcaaaaagaaagatgggacttttcaaatgtgcattgactactgggaattgaataaagtgacaatcaagaataagtatcctttacttaggatcaatgctcttttcgatcaactttaggggaagacggtcttttcaaagattgatctccgattgggctatcatcagttgagaatccgagaggaggacattccaaagacggatttccgcactaggtatgggcattatgaatttcttgttatgtcttttggactaaccaatgctcccgcagcttttatggatacggtgaatagggtatttaaggattttctcgatatctgtgtttattgatgacatcttggtgtactctcaatcaaaagaggagcatgagcaacatctccgaatggttttacagcggcttcgagaacatagacagaatcaaggtggattcggggaagatagaatccgttagggattggccgagaccaaaaatagttacggaagtcagaagtttctttggtctggctggttattaccgtcg

SEQ ID NO: 355231 - DNA, 503 bp, Cannabis indica
gcttgactttgttgattttggttatgaaattgcaagaattagttgtgagtttattgtttattaaaggagattattgagtattttctaggtcaaatttatgtgtttactggttgaatttgcagctggaaagtatgggtttgaataggttgaagttcatgtttatgaacttaatgagttgttagtttaaaacatgattttgtgttgaattgcgggatttatttttggtaaattcagaggcgtttttagggtttccttgagtttgaaatctgatggtaagatctgattttggttgtgtaaagcaagcttgagttcatggaactcaagcttggagctttaatggcactttttgattcttggtgaaattattgtgtttgagctgtagaatatgtttaatatgtcatatgttgatgccctggaaattttggtggtgattggagaagatttgagtaggtaatggaggtttaaaagttatgtttttttgtgttgttgctgcccagacaacc

SEQ ID NO: 355232 - DNA, 585 bp, Cannabis indica
gtggcctcaagagtaaacgtgggatctgaggaaggagaaggaacctacgacgacgaatatgaaggaaacttcgatgagtacgacgcctatgacgaaggcagctacacagaactagtactcttgagacaaaaggctgctgatcacgaagctgaaatcacggcccaaaaagaacaaaacaaaaagatgcaagaggtgatgcttgccatgcaaaaagccatggaggaagcaagaagccaagtgcatcataaagccatccctgctggacttggagaaacaccaggagaatcctcgccaagtgaccaaaagtagaagtctagggaaccaagccctataaggtatccctctgaagggaaccagcagaaaaatcctacttccactccttagaaaaagaaaaagttgcaggatcagcgaaaggtccagtcagatttcccgaaagggaaaggtccgcagaggggaaaactccaaaaagggagtcttggccctaaggatcgagaggacaaaaagagcgtttctgtgcaacaggaaccaggagggagaggaagaaggagccaaaaataccctcccatcgatctgagacatcagatt

SEQ ID NO: 355233 - DNA, 600 bp, Cannabis indica
gaaaaaaaaaattagtattaaaatagtaaattattggtgttgatttaccaccaaatataacttttatgattggagttgccctaaatttgattttttttgtttgttaaggaagagatgtgtagtgatattgaaagagaatgtatttttatatttcttttctctttgcttaaaataaaaagtaaatggtcatctagcaagtgtattcccataatgagattatattattggcaataacagtaaatattcttgcaaattatttcaattcaaaatttgctttgtgatatatttactatgaaaaatgacaatgcacaaaaataaaatacaaaatataacatgggctatttatgaaaatataggtaaaagaagataagttttgatatatatgtatcttacctaatatataaaatgcctatctaactgattttgttgtgcacttaacaaattgttgtgtatttaacagaatataccaaaaaaaaaaagttaactttaacagccacccattcaattcacaattgaacccattctatttacaaagattatacataccaaacaacgattcagaagatacccattcccacattaacacaggtcataaatcat

SEQ ID NO: 355234 - DNA, 755 bp, Cannabis indica
tgatttgaaatgaaatagccagaaaagctcatttttccaatgtgtatgtgtgttctctaatctaaactataaaaacagataaaattcactccaaataaattgcatgtgacaccatatctcaagtttcatccaagttaggctatcagcagcccaaaatcattaacttggtgatatatttaaaatcattttcagaattgaaatcttttaaagctaaaacaataattttatagctgttttgttagttatgagcatagaatagcatgtttgaattcctcctttgaactcatgcacttcaatttggattagttcatggtgtagcaaagaatctacaaaacaaaaaaacaaaccatatttaatttaatgttaaccaactttaaaaggcataaaatgattaaacttaatctggaggggtgcgccaagcctatgcaatagtgcaaaacataagcgacacttaagaatcccgttagcaagctaatgtggtggactcttccccttaaaaaattaatttaatatcgtgcgagtcattgactcacatatcagatattaaactgataagaacagatactacacttgatcttagccaaaaggccgagaaaggtatgatttgattggtcaaaggcctagacctttataagtcattaatatgctgccattgcagcttgtaacccatgtgggagtattaagactaaccatttaacagccgtatcattttttttttcattgtaatcttacagactatctatgagtcaacaaac

SEQ ID NO: 355235 - DNA, 748 bp, Cannabis indica
gcaatgcttgccaaacaagggtgacgattgttatgctctgattcatcccttgttagtcaagtttttaaagccaagtactacccacgatcggattttcttaatgctgaactgggaagtaatcccagttttgtttggcgtagtatttggaatgtctaagacttggtacggtctggtactaggaggatcattggcactggtactgcaacaagcattctggctcatccttggctccctgataacggtaacccttttgtatccaccattactccgggtctcgaccatcatacggtcaactctctttttcatgtggatgatagaagttgggatgtctctcttgtgcgagatatgtttaatgtcagggatgctgaccttattctgggaattcccctcagtttctctgctactgatgatcaatgggcctgggctggtgagaaattaggccattattctgtcaagtcggcctacaatctgctgcaaagttggaagaacaaccgttctagggaagacaattcaggcttttggcgtaaactgtggcacctcaaaatacctcctaaagtgaagaactttatgtggcgggcagtctcaaatgtgcttcctacctgtcttcagctcatctctaagggggtaagtgtttcttctatgtgccctgtttgcaatcatgctactgaatctgcttcgcatatattacttagctgcccctttgcaattagttgttggcaaaaggctgatattgttacccatgctaact

SEQ ID NO: 355236 - DNA, 514 bp, Cannabis indica
ggagctccccctcaaatccaaaaacaaggtatgatatgaacttttttttttaaatactaaatctacgttatgtacagttgcatcctggttgattcatggtttataatgggcaattcagcttgttaaaacacaataaaagatctaattctaattaaggaacgacatgttacgtataagtctattttttattttttgtcactgccttatagttgcattatcgttttataatagtttacaaattatggaagaatttcagttgacgggtaccaacaaatagcatttatacaaggtaagatttatgttaaaagttacaaattagttttataatagttggaaattgatctgattcaaataaaactgatgaaaatgcacaaggatctcaacactgttaaattgagttaagtagcatgttttttcaagttgatttacagttgcatcatcatttcataatagttttattcatttttttgcaggaattttttttggacagtagaaaaaagagaaaacacttgga

SEQ ID NO: 355237 - DNA, 824 bp, Cannabis indica
ttcttaatataccctcaaatttaaggctgaatattaggcgagttttgattggcggtttcaggtgaagaaaaaaatgaacccgaatttgctcgttcacgtgttacgagttggtaggttttgaattggcgggttcgggttggacgggtcaatgaattgactcgatcaatcttttttttttttttctacacacctaattatctataaacatattgaatgaaatatttatatttatatatattttaactttcaatacataaaaatatgatcatataatatatattatgttgatctcgcttttagtcaatgacagtgagtcaattattaagcgattagaatataattaaaatagagcaaaagccaataagtaataaagaacaccaaattttgaagaggttcgaccccattagtgtggtaataacttactccccttagattgtattaactcgagaacaaagaacaaagtgttttctctcaaagctcttataatgaaatctctgagtaattctcttagatctttctatgaagcaattctttcgatccctttcacagtgaagctaagtcactatttatagggccttaatgcagggaaagttttccttttgcttacaatgtataaaataggaaagagtattcattacataattacaatgcacaaaataagaaattagaataggttgccatattcctctgactcaatcccacgattgtagggattatcttcgtgcttggacttcacgagatcgttctgaagtagtcaagtcttgataagtaattcagaaagccaaacttgctcctgctcggataatctaccttccacccctgct

SEQ ID NO: 355238 - DNA, 628 bp, Cannabis indica
caatgactcaaaagaaagctattaaatcaaaagcaataaaatgcaagtattcttatcataacataatatacttactcgtgattcattatctattcaacctgcatatatagtataatgtctatactaaccgtatattacacaatataaaaatatcataacatcctgccgtggatagctttatcattacactaatcaaatattcattcagccagactataacaaaatgtattcgattacaactcatcacctaataacatgcttagttcatttcacaacatcgtaatcacacaatcctgatactttataaagtacccttaccactcgttaaccacgagctacatatgtcactatcgttgcccgatacaacaaacgataagtaagaaacctattcgcggtttcaagaataatactcataacggtaatgacagttaccaatcctcatcactcgttatccacgagctgtgtatgtcactatcgttgcctggtatagcaaacgataagtaagaaacctatctgcggtttcaagaataattactcataacggtaatgaccgttacaatcctcaccactcgttatccacgagctgcgtatgtcactatcgttgcccgataaagcaaacgataagtaa

SEQ ID NO: 355239 - DNA, 337 bp, Cannabis indica
aggcagttctcacagcaacttatttgataaaccgaagtccatcaagtgctgtggagttaaagacccctgaagagagatggtctggcaaaccaccagatttatcccacttaaaagtttttgggtgtgcagcatatgcacaccaaggagatgaaaagatagagcctagagttctaaagtgtgtatttttgggatatccagaaggaacaaaagggtacagactttgggtaagagaaaaaggttttaaaactattaatagtagagatgtaatatttgatgaaaatatttttccatgcattgctactaacccaaatgttttaggttcttgccctagtactaa

SEQ ID NO: 355240 - DNA, 624 bp, Cannabis indica
tctatgcagacatgtctcagaaaatgctcgaagccttgaagaagagagtgggaggaagcttgggcttatctcctccggccaagaagtctaagggcggtgagacaaccctgtccagagaaaaggcaccagctgaagtggtcattgatctctctgaggaacaaaccattatagaccctcctgtctcaaaaatgactaagtccaaggattcttgaggaggtagatcggacaggccagagcaggcgaggagcgagtctgagctggtcagaagcgggtttgaatagatcaaggcccctgctccacctcccgtactgcacccagagaccaaacgaggcagagaaatacttattcactatgtgactcggtcgattcttgaggtgaatgagtagttggctggggcagacaatgacctttctctggagctggtgatgggaggagtcctgaaggagctttcgagggtaagtctttcctgacagtttcctttttgtccttctccaattagttcaaattctgatgttttctctctgtatagaccagtttgaagatggcttacgcttattcttgagctaagtcggctgcctcaaagaatgttgccatttccaacacaatgcgaacagaagtggactt

SEQ ID NO: 355241 - DNA, 516 bp, Cannabis indica
attctgatgttttctctctgtatagaccagtttgaagatggcttacgcttattcttgagctaagtcggctgcctcaaagaatgttgccatttccaacacaatgcgaacagaagtggacttggcaaagaaggacgccgaggaagccagggttcaacttggggttgttcggatggagctgggagaggtcaataagaagcttcttgctgctgagaacaaggtggccaaactgaccaaggatctacaagccatgccatccacctaatagcttgaagccgatattgcctccttatctaaggaagtgaccagccttcaagaagaaagggaggttctccagactctttttcgtaggttggaagaagagaagaagaacaaggaggaggagcttagaggcgagtttgagaagtataagtcaaaggtcaggcagcagaaatctgaagtggagaggctcggagagaaagtgaatgccctagagacaactggtgttgagattttctatgacttttggaaggccaatcc

SEQ ID NO: 355242 - DNA, 555 bp, Cannabis indica
tgcttttcttactgagtctatcgactcacagttgttatttccatgtgtaagtaagggcaaagttaaagatgaggagccatgagagcgagcaggtgaagattgtacatgtcgcggggcggttaagcctggagcgtacgatctttggggcatcagagcttatgttgtatagtcgctaggcgataaacttttgttatatacagttaaaattttgtaaatacttttaaaaacgggatcccagatttttatatgtatgatattttatgttaattaaataagcaaattttaattaatcacgattttcaataacctcgttgattagcaacgagctgcacagtaagttaaaaattacgttaacatgcctaaactagtaaaggtgttacagatataatttttcgaagtgccgaaaatagaaaacaactctacaatagaaacaaaaataaatatctttacttaatttttttatatactacattattgttacgtatacttagttatatttttaatttttatttttgttatgtgtattttaaaaattttataaattaaagaaaacta

SEQ ID NO: 355243 - DNA, 802 bp, Cannabis indica
tagttcttgttttagtgagtaatcatccctaatggatgaatcttcattagcaatttaatgtcgtagaatttggaaggataagtattattgtaagtgttttattcttagtaacgtcaaccctaaagttgctgctaggagtaagacttacaaggtatgaaacaatggtggaagctcataagatagaatgaccttgactctcgcctaaacgggacaatgccagattctagtcttgatcgaataaaaggttgctagaatggtatccattttagatgaattgactactttattcaatgaatgatatctttgactctcgcctaaatgggacactgtaccagtttgttggaaaccttggaaattatttaagatgtgtttattttatattttcacatatctttctcacgtgttactgtatgatatttttgaatgtgtatgaatttatattgaaccatgttattttttgttattgatgttgtagtataaattttgaatcttcattgttggtctaacttagcttgttgtttttcgtgagacgaatcccaaaggattgtcatccattagacaaacataatagtgttagatctcgacagataagtatttgtaaatgcaacatctagttgtatatccaaatatgacaacttagactagtgtttacaatatgaaacaatgaaatttttttaaaataagaataactttgattctcgcctaaacgggacatcattggattcttatttaattcgaaattatcctttattttcctcttagctttttcatttataatttgcttaaatagtatatcattgga

SEQ ID NO: 355244 - DNA, 503 bp, Cannabis indica
ggtggaaacaattgcaatactagctctgcgtgattcatagattcatcttttggttaaagggtggtacattattataatcgttggtgtagattttcattctttgcaaaattggtgtggtgagtgtgtgtgcggtttataagaaaaatttggtaagttttgtttatttattttatttccaatgtaataaaaagattgtattttgtgtcatttcttaaaactagtggtgtgattttattaaaaaaaaatgatattactcatgtgtgatgtgtggtatttacattacatttagtaatttagtagctaccaagttttaatcataggatagagttttagtaattggataaatattatattttgtgcgattttatcgaaaaaaaatccaaaaatgatgagtaattaaattttatattcttatacataaatatatatatattaaattgatgttacgtgtcaagttaattttattttagtttttagtttttttaatattataattttaaaat

SEQ ID NO: 355245 - DNA, 602 bp, Cannabis indica
ttaaacaagtaatggattgtcaagataagaaactaagaagaaaagctaagagaattatgtttgatccattcacatggagtaacctaaagttttctattacaaggactgtaaagaccgcttagtttcatttggaaattagtaattaattcggatttaattatgaaaattatttatagatatttaaataattatttatgttgttatatttgaattctgaatgcgtttttatgtcatatagtgaaatttcataattttacattttcggtgccccgcaacatggaatgcggtgtatggctcagtagaatcacaatgtagtattttagtatattggggcagtttatttagacattgggaatgtcaggattagtcgggaatttagagttttccaaaattacccttttagtgctttttaacacttaggggcaaaatagtcatttttccccataagctcttgtcctttagtggacttagtatcatgtatttattggatttattttaagtcttgttagctgaaataagtgtgttatattgaattatcatccatttttacaaattaagaaaaatcaaagaaaagaagcaaaattccatttctctctctctct

SEQ ID NO: 355246 - DNA, 763 bp, Cannabis indica
atcagatccgacccgacccattgacactcctaaactgactatataaatatatattacacatcactacgtgaaataatattgcgaaagtatacgtaattacttttgtagtttaattcaataagacttatattattctcacagaaaccaataaagtattttattttttatttgacaattgaaattgcaattgttaaaaataataaatagcaaaattaaataaagaacaacaaaaacaataaacttgtatcaaataaataaatgagaaattagagattctaatatcttccactttatcattaattaatgcaattacaaagataattattctcactaagatgaaagacatgcaaaagtgttaaatattccagttaagaaatataaaattcgacctaatgcaaactctttatatttctatgagaaatttaaacaacatgaagcaataaagttaaccctaaatcacatagaccaatttgatactctcgttctaaactgaaatctatgtctattcaattttagcaaatccaaaatctcacttctcaaattttaattcaaatttataaatattatgtaaaagttacacaatcaattacataaacaataaacgcaaattgaataaattttagataaagaagaaaatagaaaaattatattattttataataaagcttcaagagattcaattaaaaattctaaatagaatttggtttatgttcatcactagaaaatctataaacatgaaattaacatcaactaaaagtaaaaa

SEQ ID NO: 355247 - DNA, 472 bp, Cannabis indica
aaaagaaacagcttcaaatgcggaaatagccacacactgctatggcagagccatcctcatgatgatggtggtagaccgatggtggtggaacagaaggggcgatatggtggttttggacaatgaattctaaaagttagaaagcttcagttatgttatgacatgaaaccctaggagaatttgttgggagatattataatgcgttacaattagtgacaaacttaaatgagagaaataaagtcttagagctaattaaataaggaaatagaataaaaaaactaattaaattagaaaattgagataattaggattaggaaaaaaagctcataaacttgccacatcacctctcttttaaccttcttttatatatctttatatattaaaagtgcctatctaacggcaattcttggtttaacgattcttttttttatttagccttatacgattaatgttaacgttaaacgttaacaaataa

SEQ ID NO: 355248 - DNA, 490 bp, Cannabis indica
tggagtaaatagttgagttagggtttaaggcaataagtgcataagtctcgtattggtgcttaactcgctgggcttgttgattacaggggtactagtaatgaaccctccgcaatcatctagaccacaaggtgagcaagtagagcctggggttgaccaaaccaatctaccggcaccgcctccacctccgtagaatctggggataatgcaagggttggcaatgctaatcctcctgctgactggcagcagatgtttcaagaaatgagaggtattatacttcattaagaagagtagttgcgatgattaaggcaaccgacaccggctgcccctattaaataagtgttaccaccagcacctgtgccagtggtgggtaactagcagtttataatgccgtatagggattctgtatttgagcggtttgtgaagttacaacctctgacttttttgggaggtactgacataataaaggccgagcagtggatgagtactatta

SEQ ID NO: 355249 - DNA, 1012 bp, Cannabis indica
actaattaacataacagaaagttagttaagttagttggtttaggtgagttggataaagagttagtttagaggatcaacttccacaataattatagctatatattcgctgaaacttttgtttaattgaaagttggcaaccaataaaaatcactttaatatcaactctctattgaaaatttccaatcgtgttgaaattctgaaaggtagtcacacggcggggcctttggtggttgcgacggagtttttggacggttgcgggaaggagctagtacagaatcaatgttttcgattctgtaagttgcttccgtacgagacaaggatatttttgtacttaattttaagttgtaaaactacattataagaagggggtctcgaatttttatgtcatgaagttagaaaagactcttagaagcaaaagaagaagattcttggtgcgagcgtggcgatccgatcaagttctccacctaatttctttctctttctttaaatttctttatgttaaattttgtctttaatttaaacatagatttgaatgttgaacttatgaattaatttttcaacttaattaagatatgatgaatgttgaatgggtttattctaaaagttaatgtgatttgttatttgttatttttgtttttttttttttttagttggtttgttcattatttgttttaatacatgttttaaattgatcacttttaacatgattcatgatcctaacataaaatctaaaaagtaaatattaagaatgctttaattgaatattattcttataagtaaatattatgaatgttgaatgagtttattctaaaagttaatgtgatttgttatttttttcttgattcttgtgatttgttcatattcattttaatacatgttctaaattgatcacctttaacttgattcataatcctaatgaaatctgaaaagtaaatattaagaatgctctaattgaaaattatgctttaatctgaagaataaataatagcattaataattgagtaattaaaac

SEQ ID NO: 355250 - DNA, 968 bp, Cannabis indica
ttttttgagagtaccgtgttaatataccaagaaaacatgattattcaatttactttttgtaataatctcacattatttagaaagtatagtgggacattacatatatattataaataattttttctcatggtattttaatttgtcccaaaatatgtatttgaacttaagatgcatcttctttttcagtgtgagtgtagtagtactaacttatgtctatgaccactgttaaatgataatttagaccatatgttttacaacatgaaatataataatatcataagcttaatattagtgaaaacaattacaattaagatagattaaaaatcggtaacaatttttaatgagggttaggaagaaatttttttaagattagagtaaaatatttgattacaattagactcagtgtatcgttatattttattttgtaaatattgagaaatatggcttcttagtaactttttttttctttgtaattaaaatcccacatagattaaaaaatacataagtagtatatgttatagtgagatttctctcacctagaaactcgagaccagacccccactaaaaggacacgtatactcagattttccacagaaagctgggatgtccctgagggactcctcgaagttttaaacctcgcttaggatataaccagcgagaggtggcgagcatgaccaaagtctaatcacatccaagacaagagagtagatcgaatgtatcgaatatatgcgatcatcctctccttgtccttgtataaaccaggcgaacgattctctgtaggaatgagttgatcttaagaaccctgcagcctttataatgcaatatagactcgcatgtctaggttttatcagctcaacacgcaatgtctacaagaagcgactatctaaagacgcagacgtcctaaacataatgataaccctgcgagttgtacgtcggaatatgaacagtcaactcgcaggtatggaaga

SEQ ID NO: 355251 - DNA, 452 bp, Cannabis indica
agctctcaagtatacttggacggcacacgcaaataaagctatgagctatgggatctttgaagattttaggaaaaaaagtttcttatgctctggtataatttagagaaaatggctaaaagagtataaggaaatttttgaaacattatatatatgcaacttaaggggtattttggtaatccaaagttcaaattttgggtttctccccaaaaaagtgtaatcatcacatatgttaggagtcacatacgacatcatgcagcatacaataactgttagtacaccaatcgaggtctaaatatcaagaaagtattaaatgccctaaatatcaaagaggcaatcaaatatttattgagtaacattggataaagatagggttcgaagaccgaacacatgtcacccattcgacctgcctagcagccgtataagtccatgtgcgagcaagaagttcccacgcg

SEQ ID NO: 355252 - DNA, 662 bp, Cannabis indica
aaaaagctctttttattaaaaaagaactatttaaggggcaattattatactcaaaattcggtgagcacatcagaggaagacacgtgttgagctgggaagaacaaagggctcaaacacacaattgtaagtacacttgccatggaacaactcgttataaacataatttgtagagtatgtttataactcggctggctgaatggtcttctgcgagacagaaacgtacaaactgctaacttatgtatcgacgtgaaaccatgtgagtgcaagtgttcatgacgaggcttcaacctcgctgcgtgaaagagaaacgataacgataaaaatacttagcgtggattacatggtatacaaactaagtataaacagtatggtgaattaagatgacaaatagcgaggcgtctatctcgctgtaagatggcatacatgcgagcaagattatctcgacaccagaaaatatagttatcagagttaaaataatattaatctctgatagtctgatgacaagcaactgctcgccatcaaagttaacccggctcctagcgaggcatccccacgagataaggcttaccatatatccttaaatgtgcgttcatctcggccccataaaagcgggatacttacagctgtgtgaattataaataaaaacttcatttacttagcgt

SEQ ID NO: 355253 - DNA, 598 bp, Cannabis indica
gataatctaggttttatgtgaaaagaatgtatttgcataacctgtgtgatatttagattattgcttaaggctgattacatgttaatctagtcagagattgattagagaacatgtgatttatggcccgaaagatctaaaaagatttaggttaatttgtttaatcagtcattcacatcaagtaaaagggtagtaattatcattaacaattgcgtaaataaatcaaccggattctcttccctattttatcatcttgattaaatcttttgctattaattttagtttcttgatactctttgttttgtttttcaatcataaaattattggtttgccaaatagaatcataaatttaatctagtggtattcagtccaattccctgtggttcgacctcacctttgtgagtttactacttgattacacgtgcacttgcgtattattcatattttttgtaacaataactaagttgaacctaactaggattaagatacatagaccttaaatcaaccattgatattgacttagaaagatataacggtaagtttatgatatcttatccaagattaatatcggtcccttccaatgtatactccagacattcga

SEQ ID NO: 355254 - DNA, 965 bp, Cannabis indica
atcccagcaactcctcaggaaatacgtcgagaaaatctttaacaatttgactacctcgggcccaaatgtttcaggtctgctggagtcaatcacaactgctaaaaatcatacacatccactgtgtagtagatccctagctcttaacattgaaataatcaggtaccgagacccctgaaccgattcaacataaacaaatggatcttcaccttctggttgaaaagtcaccatttttcgcttgcaatctgtactggccgaatacttggacagaaaatccatcccaagtataatttcaaactctgttaattccaactttataaggtcagcacttaactccctatcttcgatcctaattggcatagacgtaatacgcctgttggagataaccaactccctgctaggcattagggttccaaaccatctatcaagaaaagcatagggcctacccaaaagatcaattacctgtgtagccacatatgagtgtgtagctcccgaatcaaataacacaatataaaaagagttcttgataggaagctgacctgtcaccacagaagggctagttgcagcatcagcttgagtgatggaaaacacctgaccacgtacgggtttggcgtctggcttctgctcttctttctttggctgagggcaatctttcttgaaattccccaccatgccaaactgaaagcatgtaccctagttggactctccaggatgatgtttcttacaatgcttgctcagccccgagccaccagatgctggggtaacttttctcttctagttagtggtggaataaccaccatccctaccataaatagaagtaggaagagtgggggtcataccaacactcggagtcacacgggacttctaaagaaacttaactacaccttcagctcgcagagccttttcaaccatctccacataagatgttgcctcacttgtagtaatcaccagatcatgtctaattttta

SEQ ID NO: 355255 - DNA, 883 bp, Cannabis indica
ggttattcgccaccctcaacaatcatttctagttcttattaaataaacaatgtaattttcagtttccaataaaacgattaatcccacagataacgctaaaccagtcaattatcccaatctccctattgtatgtaatcaaggcgaagcgctcaataattaactcttttacctaaagcagtaaatccatgaagcatgtaatttatttaacttagataaagcattgagatttatggagatagactaatctaggcaacaaatcaatgaagcatataattcatttaacctaggttctattcttcatcacaaataaaaattgtaatttgtcacaaacacttagaatcctagactattaggtgaatagtaatcctaagatgacggtagattaaagtaaaacctaatttagtggccatctaaacaagattaaaacaataatcatgacattgaacatagaagaatagaagcaatttgatataatggaaactaaaaattaacattcaataatgaaattaagaattcatattttgggttttgaaataacccttaactaaaagaaaactactcagaactagacattataaccaaaatcataatatttagtaaaagtagaaggagaagaaaagaattatgatgaagaacacttcgaagccgatctccgtctcttccttgctctctctctgattttctctctctaatttgtagcttttagaattatttcattggtagcctaagaggtcttatttatagtgataggaaagttagatgaatcctattagaattaggattctatttataatagtattagaaaatatctcactaaaagaaaagataactcatcttttgaaaaaaaaaaagataaaaaaaaaatcgcaactctactcgaaaa

SEQ ID NO: 355256 - DNA, 680 bp, Cannabis indica
ctaattatattgaaatgggttttatttagggcacaaaactaaacacatatattggagcataggatactgaagaaaataacttagattcaaattttattattttcctattactattaaaaatagagcagtagaatagtatttaggaaaatatgataaagaaatgaaagaaaataatagtaaaactagggctgaagatgagttgggttggccgggttgagggtatttcaatgacccatttcaataacatcggcttagaaatttataacccatttacatacagaaatttatctaactcaacccattttttcttttatgaattgggttggtttgggttgggttgggttataacccttatttcataccaaaaaaaaaaaaaatcagatgtgaatgtaaccaaattcatactgaaaaaattaaaatttcaaatataaacaaattcatcaaaagtaacataatatcaaggatcaaatattatagtcatccaatgtcttaaaactattaaagttatccgtaacaaacttaaataaaactaaatcgatttccatatcggcctcaatcaacaatctcaaatctcaacgtcaataatctttgcttttggtgatgattccttcaccttgagtttattttctacaattataaaaaataaaattagtaaaattattataaacaaataaccatga

SEQ ID NO: 355257 - DNA, 602 bp, Cannabis indica
tccaattattttagtataattgttagtaagggacgataccgcgaggactatgtttattcaattattcacaacttagtaactagaattagagaaggagttttgatgattaaaataaaatagcaataataaaaataaaaataaaaaaaataaaacaagttgaaagagagactacgatatgagaaactgttaaaggttattcgccaccctcgacaatccttcctaattccaattaataaatgtaatttcagtttccaatcaaactattaatctcgcagataaatctgaagcaatcaattaccacaatcttcctattgtatgtaattaaggcgaagcgctcaataattaactcttttacctaagcaataaatctacgaataatgcaatttatttaacttagataaagctttgagagttatggagattcactaatctaggtagcaaatcaatgaagcatataattcatttaatctaggctctattgttcgtcacaattaaaattgcaatttgtcacaaatgttagaaatttattggggtcacaattgtatatatataaaatgtgtgttgggtcatcaaataaataagtcaaatttatgtggtctatt

SEQ ID NO: 355258 - DNA, 502 bp, Cannabis indica
ctaagaataaagaaaatagtagctgtaatatatattattgcaacctcaacatgattctttgaagtgataattcccaaccaaccactagaaaagaaagcataataaattagatgagatcaattaattaattattcccatttaaaccattaatattgaaacagatcaagtaacaaaaaacagagtatgacttctatattcaaatcaaaagtacataccttgttgttgtggagttcgaacttgactttgagcttgagtacgagttggccttttcggaagtcggattgtagaggtctccaattaatttttgtcaccaagtttcagaatttcgtaacccttttctcatctcatcaatgatgaaaagggttatgaaattctaaaacttcgtaacaaaaataacaatgctttactagatccgtacgtttttaaatgttgaaaatgcttattactaacctctcctctattatttacgaatagagataattagggatttggaaaagcaaat

SEQ ID NO: 355259 - DNA, 1127 bp, Cannabis indica
actaagatcaagactgagctagtctgcagcatattatgggcatgttttgtgtttatggggacactggtgttgtatgagacactgtaagccaaatggttcagagagcatatgctgatgggagataagggattgggatgatttcaagtcttaagagtaagacttcgtgttattaagattttcaaaagttagcgagtcatcagaggatgcagggttaattttgggagatggacttgtgacacagtttggagagccgacacaagcaggagctcagaggagcatatgcagtggttcagtggggccttttgcatgaagccgtgggtgtaaggtagggttggagggccaatgttatgaacattatgaagagaatctgtgcaagagtgcacttggtgctgcattgggtgcagttggcctgcgagcctcgtccaggtgggacacactaaactttatcctgcatgagagtgtcttgctcgattgacatcaggaggatggtgcgcaatagagtttgcgtgtgaagtttttggagggacatgtccagagggacttaacttcagtggaagcgtcttctgtaggtgtcgttgggaacggttggtttgcgaacctcaccccaaggggtgtaccatacttagtacttgtcagaaggagtatgcattagacgattggcgagtgagctactatcagaggatgtggtagcttcaaggtcaatgttgcaagggctacttggttgactggagggacgttgtgatggactcagaggagttcatgttggggaaagtattctagtgcggtggtactactccatgggtgtttctaaatagcgacagtggcacaagttctttgatcgagtccaagagtgggcgagcgagatcgtcaccaagagggtggttctacggaggtagagggacaagtgcagacttaggattcaagagaagcttggggtaagcttaggagtcgagatcaggaagatttgcctgtggtccgtcgatcagggcatcgacatgttgaagtgggggagagtgttacatgcattccaagatggcacgttacaagctaagtgatgcccacaagttggccaagtggtggtcaagtagtggcgcctgttgtggcgcatgttggtggcatgctgatgc

SEQ ID NO: 355260 - DNA, 846 bp, Cannabis indica
agaaaatttttgacttcttgaattctgacttttctttaaacattcttgttctttaaatctgttgagtactcctggtcggcatatttgcttgtttatcattcgatattccgaccaaacactcatcttgtgtgttgtcttttgtagatgaactcaggtgagtcttgggaaaacgaacatcggatcgaccaggacctacttcaacttttgcacgagcatcatcctcgtctttgttctagcccaccttcctctagcgaacgactttctccaaaacctgtactcagccatagaatgatggttcgtacaaagaaaaccacgcgtctggctgacgcatctgaccctcaagtggcttggtacgccactttgcccagcgccgagcaggatccagccgtccatatggagggggatcatgaaggggacgctgaggtccatcagatagagggttaggacgatgtacgtcctggcagttcctcctccgaggaggaagaggcagatgttgaacccccaaactacggggagaaaaacgaggctggggagccagtcgatgctgatggagacgtcctggttgagagcgtggattacgtcagtgaggaacttgctgctgcggttcctcatagaaggtaaggttccttgggcgctaggtgggtaagccctccatccaaggttactaaggcgggccttcggtctctcgactaggacggatacctgggcgacttggattgctacattcccgcctacaacattcgtgccacaaaccctgaaaagggaatgtgcgcctggtcgggtgcccatgatcagtaaggggcgattgatgcctttgtcatcaatacttcaagaatagtggcagac

SEQ ID NO: 355261 - DNA, 706 bp, Cannabis indica
gagattagagatggagaagatttaaaaattaatttttttagaaactcgcaaaaagaaaattttataagaaatttatcacaaaatattagataataaatgttgcccttaatttcgcccaaaatacgtggaccaatatgacaacgacacgtggatctaagaagcacgactattagataaatcgactaagtctttttgcatcaagagtgtcaacgagaatatgcctcccggaggagaggtgaaggctccacatactcccggaaaccaagggaacgctaaggtatctccgggaggtactggaccttatttgaacagtcacctctcatttaatgccgcatgggagaaaacgtattggaactgccataagcaatatgtctgacggcgtaacccctcttttgcagctattacgctatgattaataaggctagtgacgactactttatgagggatcacatcaatcaagaagggataaaggattatatccacctaacccctaagatacctacagtataggccatgtatttcctattttgcatcgactaggaatatgtgcccctatcaaacctgcacagaaagacaagtgattcagttctagggatcaccccagaaaaaacactataaatacccccaaatgcactgagatgggggtcgagaatctgggttcataagaattaaagagagcaactaagaggaatatctaccaagaaca

SEQ ID NO: 355262 - DNA, 813 bp, Cannabis indica
ttaaacaacatacttgtgagtagatctaagatcctggtaaaataaattccaacattcccttcctccggtgcctacccaggtggtgactctgggcaggtcatcttccagtgcccccttgggcacaatcgttttgattgacgaggatggggaggccgaggaggaggaggaaggcgaaattgcggctctgctggatcggaagcgcaaaggccaaatggtggaggctgagtcttccaagaagcctagaagaaaggacactccggccgtcagctcagactcggggattctgcctgaggcagaggaatacattgtaccccccggcatcatccttactctggttcccaccgatgaggagaggcagcagcttcgagttgccaaacataactatgccatggatgaatatagcatggggaatgccgaggtggaagcgttgaagaaggtcttgcgagaggctcaacaaaattctctgtgcgaggaggccttcaagaatgcctgggacctaaacatggaccccctgacggactggttcaacggctttgtcggccctgcccttgctcccttcacctctgaactgactagccaattcgtttcccatctgacccaactcccggccaaaagatacgtagcatgcgcttccacgaacaccatttatcaggttcaggatatcagcgctttcatgaccgcagtgagtctttgttattggtttttccttttcatttgtgctctaccctgtggcatttgatctctcatacttaactcgtttgcttttccagatcgctgctgagactggttgcctctcaaagactttgatagatc

SEQ ID NO: 355263 - DNA, 546 bp, Cannabis indica
aaaatatatggatgcaaatatgttgaaggtaagaattagtcaatcaaacaattaaaaaaattaaaaataaagaaacaaacaatttaaagccaaaatattttagctaaataattccgaaatgatgaaatgatactcttctattgaaactgtaagtttttcttacaagtaattttcccatctcccttcaatcttccaaatgagctataatacttattgaagctctaaaatatatgtggtttctgatgcgtgtcgtttcccacaacaaatttattaatttttatttttatattactaattatttaatgataaatacaagtcgatcccataaggactattatcatacaaaaaatagctacttttagtgacaatttttaagcaaaaaaaaaaatttttgggaactaaatgtgacttttagttcacaacaaaatgttacttgttactaaacatatcatttagttacaagttgtcactaattttgttttagtcacaataagtaatgtgactaaaaacacgtttagtcacaacaaattgtaattttttgtgact

SEQ ID NO: 355264 - DNA, 604 bp, Cannabis indica
attctaccacttcatcatcatgttcaggtgaggtaacatatttatagacatatcgtcttagttaagtagggtcataagtagggtcggccctgagatttgtttgtgttggatctttacttaaaaaggaaaaacaaaattggatctctcgactaggagagccctaggtgcaggacctagctcgcgttaatcataaacttctgttactaaataaggtaagaaatcagttagtacaaatttcaaaccgaaactacaatcaggatacaatataaaagttctagtaaaactatattaactgatcgtttaacaaataacaaagagacatttctcaactcaacaagcaagaatttaaaacatgactagtgttacattatgaaattagtgtagggacttattagtaatttgaaagtggtgtgaaatcctataaatatgtaattgtgtagttattatgagatatgaattcagaaaataaaattttagttcaattggtagattaacactgtctagaagagtgcatctagagatttatcctgtctcaaagaggacttattactctatcattgatgctttcattgagaacatcaatatcaagtaataggttctcttc

SEQ ID NO: 355265 - DNA, 816 bp, Cannabis indica
acgcagggaacggagaaccaacctgttggacctgaaccatccaacgtcgagggatcaatccgcaaggtatccaaaccaaagcacacaagttgatgaagaccctgaacggcgtaatcctcgcagtcgaccatcaagagacaacgacgcagaatcagcctcttcgtcatcgcatggtcgcactccaagcaggtacacaaggtccggctctgtacagacgcaacagggaggacattaccaggtacatcgaggtgatctgcgtgatcacctcaacgcagtttttagggcacgctctcgcgtcccacgtaatactgagacactccgtgatccccatgcggacgatcagggtgccaacacttataataacccgcctaccgcgccgatcgcgaccactgggatcaatgtcccagcaaatctcgccgcagtagttgcgagtcccgcagtcgtagcagccccggctcctgcgactggagggattgaccaaagcatgcttctgcaggctttgaaaatgctcgagcagcaacggaagcccatatacaagttgcatggtacctcgcccttcactacagaagtgcgacaggctcaacttccaaaggggtttcgtctatccgaatccctcaaatataaaggtacttctaacccgatagattatcttgaaaaatttaatactataatggaagtggatcaggtaccacagctcgcaaagtgccgcattcttgcggcaacactcgaggaaaatgcccatgattggtttacccaattacctgaggcgtcgatatcgacgtgggaaaccttcgtcgacttattcctcacacattt

SEQ ID NO: 355266 - DNA, 776 bp, Cannabis indica
ttttttcgattttaaagtaatccaatctttccaagttcttctgaaccttctctaaatactttgccattttcaagcctttggcctggtattcccggaggacttggtttacgatcaattgtgaatcactatgacagatgagatttttgactttcaaggcctcacctatctttaagtcaccgatcaaggcttcatactcagcctcgttattagatgtatcaaattggaatctcagagcatagtgaaacttaaagtcttctagtgatattaatatcacccctgcacccgaaccctgctcgttggatgcaccatccacatataacttctaggtttccacatctcgctgattagatgggatttcttttagggttataccttctatcaagaagtcagctaaagcttgatccttgatggatgttcggggatggtatgttatgtcaaactgccccagttcaatagaccactttatcaatcttccagaagcatctggttttgataaaacttgtcccaagggcttatcggttaacacttttatggggtgagcctggaagtatggccgtagtttgcgagacgcgtggactaggcataacacgatttttctagaggggatacctagattctgcccctagtaaccttttacttacgtagtaaataggttgctggttcttaccctcttctcgcattatagttgcactaatcgcatcttccgagacggctaaataaagaaataacgtctctccagttattgattttgctaaaattagaggcgttgcgagatg

SEQ ID NO: 355267 - DNA, 985 bp, Cannabis indica
tcgactgagttgttcgaagagcttcaatggtggagattcgaacaatgcaaaattctagtttgagattgtttaaatttgtttgatttcagagaattaaagcttttgagtagctttaatggtggatttagttgccaagttccacagacatgattggagggctttgacaatcgatcgagttatgatttcgaagcttcgacgatagagtttggatttggttgatcgaacctttttttttttttttttttttgggatgaatatacattgctcggtaagggtgtgatgagcaccgttttgggcaaacgatagttgcctgaaaattctgggttgctttcggtaagcatatacgtatataggatgttttatttttttatcgttatatgtaagatatttttgataatttacgtatataactaaaaattacccaatttaaaattagcttcagtttggttatatttggctaattatgatttttgtctcttaaactttgacatatataaaattatgcccttcaaacttttaaactgttaaaaattctctctaaactattaagattgttggattcaaggacttttgtctaattctattcaattttattaacatgacgattgtttatatgtactaaatcatgtctttttcattcacgtcaaactaattggacaaaagtctttgaatccaataatctcaatagtttagtgaatttttaatgacctgaaaagttaggggatataatttagtatatgttaaaattcaaggggtaaaaatcctattagccttaaaaaaattgatgaaaattgagtttagaatattattccattttaaaaaatacaaagtcttatttcgtatataataaaatagaaagtgtaatcaataaattttacaaaatattaaatttaaaataataatatttaagttgtttgttatttgattatatattaattttgttataaataatcaaaatcaagttttttttttttttaggtaaaat

SEQ ID NO: 355268 - DNA, 717 bp, Cannabis indica
ccttggacttggcagacttgggggtagaggggtttgcagcagtcagctcctcggaaagatcaatgacctctccagaaggtctcttttcctttgaagaggacccctcaccgcccttggacttcttggccggaggagaggcgctagagcttccgcccattctcttcctcagagcatcgatcatctgccgagacatgtctgcacagaacaaaaatagtatggttagaaaacagccatcagaaaacacaaggcatgaaagtcaagaagctcaaaagtaaagtaaaaggcaaggtgacagcccgcacagagactcagaagtccatcatcacctgacattgatcttatctcagacatgacagccttcccttttccggcaaaggggggagatggccgaacaggtgaagtgggctcccttatgcgaattgcatgttcaacaggcctgggcgtggccgggagtttcttcttcctcttcaatggggtcacctgctcgtcctcggcctcatcttcaggattcaaaggctcctgagcatactgcttggccctggcacctcccttcaacttagcctcgcgcttaagttgaatgagctcatcctccttattagctcgttcaggccgcccagcatcagacttcctcttcttccccgccacggacttaggagaaaagtcctcgtgataaagcccgtacttcaccagattgtcatcggaggtcaactggataat

SEQ ID NO: 355269 - DNA, 777 bp, Cannabis indica
atagatatatgcaacttccttgcacttggctctaaagtgacttttagtgataattttatttttattagaattaaaacttttagtcacaaattttttagtcacaacgtcaaaaaaaaaaaataactaaaacttttggtcacaacatctttcacttgcagtccaaattatttttgtaactaaaattcaagtttttttgtagtgaagtagtggaggtgcttgtaacagtatcacctgatacctaaccaacaatatctccatcctagtaccacttgtcattataatagtacgtggtctctataaagatcacttacaactcattttatgaacaaggtcaatatagcccaactataaataccctttcactccattaaaagggtattgagaacctagtaattttagagtcattttttaaataaaaaaacatcttacatcttttctgtaacatttttacgttaagatcattttgccatttttatgtgtcattactcaaaatttttcattacaatgtatttgacgagttgtcaccgtcaacacttataaggaaattgagaaaaatgcaccaaaccaaccgaaccaacctacaacactactacgcactacaaaaaactgctacttttagtgataattttttagtcacaacataccatttttatgactaaatgtgacttttagtcacaacaaaatattacttgtgactaaaacatagtatttagttacaagttatcactaattagttttaatctacaataactattgtgactaaaaatacatttagtc

SEQ ID NO: 355270 - DNA, 608 bp, Cannabis indica
gacttaggagaaaagtcctcgtgataaagcctacttcaccagattgtcatcggaggtcaactggataatattcctgtcttcccccggaaaccgggcaagttatcgagctctatccctaagagcaagagtaaggggaggacaatgatatgtcagaagttgctgaaaccgagtccgagtaatgctcggatccttcaccatgaagtactcatcagcaaaatgccctattttgctaatggccttgtcatccatgccggtcaaccacttgaagcctagctgagaaaagtagaagtaccccgacctgccttgtttgggggtagacttcagatcaaagaaccaagccacctcgtggggagaaggagcatcccatccttgggaagcgtaaaggacgaagagggcggataaatacttgatgcccttaggagtgatctgggctgggtagagaccaaagaagtcagccacatccctgaagtacttgtgcaagggcatcagcgcccccttctggccgtgagcccccgactaggcacacatccccttatcagggtttgtggcacgattgtcgtgggcgagaatgtagcagtccagctcgcccaggtacccgtcttggtcga

SEQ ID NO: 355271 - DNA, 534 bp, Cannabis indica
aaaaaataaaaaaaattatttaggcttttatttaagtaaaatttaagtgtattataagcaacaaatattcatagcttagttggttgaggtggatggcataatgtctaagctcatgggttttaatcccataacactcttcttttaattatttttttatatatttttgagggccccaaaatttaattcgtcttgggcccatatattttcagggccggccctggaaagaatatattaagagtttgagtccataaatattaataaaaatacaaaaggctctatttaatgttttccattatcatcgagatcaggaagaaatagaaatattaggagtaacctgcaaactttcttaaacaattctaattgcagatatatagagtaagaaaaacagcttgatcagaaaaattaatatgggaaaaattatttttgaagaaaagaaaaattaattaacctttttttctttttgctaattaaaaaatactaaatttgataaaaaaaaaaaattacataaagtaaatgtataatttttgtcaagaa

SEQ ID NO: 355272 - DNA, 682 bp, Cannabis indica
agcctccatccttgcttagctaacagagctaagttgaagtcccttaaatctcgaaatcccataccaccattgctcttatgtttcgtgagcctgtctcagctgagctagtgtatgcctttattcttgttcgacctccaccaaaacttggtaatagcacgctcaatgtcctgacaaatgagaaacacattcattgtataggccggaagagattgaacaactaatttaataagaacttcctttcctgcacgagaaagaaatttattgtcccaagactggatccgcttctgaactttgtcccgcaaatagccaaagatgacatttttatttctgccaacagcactcgggagccccaaatacatactgttctcagtcgcttcctgaatgcccagagtagcacagatggccctccgcaaatcagatgaagtattagaactaaagaagacagaagacttcccaaaattaacatgttgtctcgttgcagtagcaaacatcctaagcaaatgaagaacccgattcatctcgccattggttgccttacaatacagaaagctgtcattcgcaaatagcatatgagagacactaggcgctccatgagccactttacaaccatgcaaccactttctctcttcaaacttgcgaataagagcagaaaaagcttcagcacataccaaaaaaagataag

SEQ ID NO: 355273 - DNA, 539 bp, Cannabis indica
ttaataaattacataaatgacaattttatttaataattaattattattattaaataaatagttttggcatttgtaggattgaatttgaaaatatggtattattgaaaataggaataagtggctgaaataaagtggcaaaaatctaactagagaatggtccatatactgtacgaccataagtggatttttgcccaaaactttattgttttttaatccatataattcagccctaagccctagttgaaacactatgaaaggaacatgatactctcactcatctaattaatgtcaacttagctattcaaccaacctagatgagagagttccgttcttagtgatttcaaacatcctttattgttcttcacattcgaaactttttgtgaaagagcgccgtgcccacacatagcaagttaagtactcaataatagtgagtaagacggtggtaaccaaacccaaaggagagaaagagatccaggttcagatcttgataatgctctacgacagaaaggaatcaagggctagagatcttgaacggaagg

SEQ ID NO: 355274 - DNA, 1060 bp, Cannabis indica
ccaatagctacatgtgattatttattgtgcttaattttatgctccctataactgctacatttaagttgaaattctgtatggatacttgatatttagataattaatgagatcggtcatcaataaggctaccatactttgaacataattttgtgagtttgtccatattcataactctaacctatctttctctcccacacagaaaaaaaaagtttgaattctctgttacttgacatcggttttgttcgtctcgatattctgatctaattgatttcttacaatattttaaattgaatctcctactgatgttgcttctataaagaatctcctactgataactaataatctcacctaaactataataataatctcacctaataactaataatattttttctttaatttttaattgtatcactttcaaataacataacaaattaaaaactaaaatttagtatacgtgcctcgcacgtaacttttcgcttgtctatatatatgtatatgtattattatacatagaatcgctaatttaaaatctaatattattaaatatctattagatataaaattaattaatattaattaaataccttaaatatttattagatatttataatattaaataataattagatatttataataattaaatatttataatattaattatatatgtgtaaatacttacatagtctagagtatataattaaatataattaattaatttaataatatttataaacttaataaaaaattaaaaaaacagagagaattaaggggagaatagatggaggtatgtgaaatgattttagggcgtcatgccaccgcgttatacttctctcctttatatctattctatataaagtgtgtctatataacaaaattcttggtttatgagaaattcatgggtgactttctatttatattaaaaataaaatggtttattattaaaaataaaatggtttatgagaaattcaaataatagaaacttttcattttttttatcaattttttttttctttttgaataaagataaatatgaaattttaatcgtatagagttt

SEQ ID NO: 355275 - DNA, 923 bp, Cannabis indica
agattcatcaagggatcaacaactccagaccctattccaaagacgtcttcaaaagtccaaagtcaaaagtcaaagtcaaagtcaactcttgagaaaagtcaacttgggatcaaaaacatggaaatgaagctaggaggctcatctatatcaagactacccaaaataaaatggttgaaatttactttagtcttgttaaagtgatttgcatagcacactatgatttataaattcaaattttggcccattcactaaattgtgcaacaagttttctcacccgatagttcaaaattttttttgattggatttctaaatcacatttcatttaactaagagaacaaaattggaatttctgaaatcggataatcaagtagagcgctatggccgttttagtgcaaaaaaattaaactatttcccactgcctcgaattaggttaaccggtttcaaagaggataactggttcacaaaaaatcggttaactggtttggaaatcagtgaaccagtttgcccagtgcagtctcgttttttgcgtccaacagctataaatgactatttttcaccccaacactatataaactcgattttcactcaaaaaattaagttggttgagcatttatgtcatacacctaacatatctaagtgagattaatgagcttccaagtttaaaatccaacaaacacttttcacacactttgagccaaaatttgtgtttattcatcttgagtgtgcttgcttatcactctaggtttccattgtattatcataactctagagtgattttgcttgtaatatcaaacacattttcatattgtgattgaggtgaagttggcaccggtattgtaaacaacccggttatagtgagattggcacttcaacaatccgagaaagaggttaatagtcctcgatggtgcaaaactattgtaaga

SEQ ID NO: 355276 - DNA, 713 bp, Cannabis indica
actctctatagagtcattgcttaagtgcataaagttaagtgtttttcaacttgaacttaaccatagtgtaatcatcacaaatggttttttagaagaaaaaatgtatacgggcataatcgatatcgcatgcagttacaatttgttaaattaattttatcaaaagttggacaaccaaatagtctagaattatctcttctttttatttttcaactacatagaaaaataccaaaattgttcatcaagagtttcatatgaataaccaattagtagattttttttttttttagtttattacaatttgttcaaaaatgacgaatcaactaactgattcagagtgtgatccaaacataattttctgttagtggaaactagtgatggaaatttgacatgcggggacaggtatccatctcgggggcagggattaccctccttaatggggtaatgggggtggggcggggatacgaattttatatacggtgaagcgagtttgtgcagaggcaatactactcatcccatatttttgcatatagttttctaattattacctattaaagctatgggctatacttacaaaattgactattaatttgttctaatttactgtataataaagattttttaataagtacaatatttaattattttaaattcaatatcttgtttttatgtttatttggaattacattgtacattattttcttcttcttcttctt

SEQ ID NO: 355277 - DNA, 654 bp, Cannabis indica
atttttgcactctgacgtggcatcacatgatggtgacacgtggaatcgacttcgagtatcttctccgagaatacagtccgaataggatgcctcatacgcatgcctaaagcaaagcgatcagcaatctgcgcagagcgaccaacacttagcgaattcagctttcacatcgtgagtcatcaaagaactccctataacttggggatcagattgcagagatatggaaagctgtccaaatcccacgatcaatgtattctgtatttattatgcaatctttctgcttatatccgttgtaacaagaagggaaatacttcttccccaagctcatagccctataaattgtgatgcatactcactgggcaaagggtcgaaacatactggtagagagatattatctaagaattcatattcagagatacctttgtaagagctataagaaaaggaaccgttctccttgttcttgagtcaatacaaataacgaggactaggctattaccgaactgttcggggctgtccctctataaaattcttgtgtctttacattgctttattatatatctatcgttataaattacttatcgcttattaaataagactcactgttgttggctaaaagcgaggtcaacagtctaattaataaattacataaatgacaat

SEQ ID NO: 355278 - DNA, 796 bp, Cannabis indica
tgaatccagacatctgatccttgagtaagttctcgatttcctttatgcttatttttgcatgtttattttttttgaatgcaccttcgactttgccgtagaaaattcataggaaaccctaggtttagaaactctgcgattcctttttatcatcgtttcatgtgattttacagtccataatgcttgctttctgaacttcataatgccggtctttcatcttgcttattctaagcttgataaaatttttgccctaactcgaaaaaatgtcaaactccttgagttttgacttttctttgatcattttcgttctttaatctgttgagtactcctggtcggcatatttgcttgtttatcgctcgatattccggccaaacactcatcttgtgtgttgtcttttgtagctgaacccaggtgatttttgggagaccgaacatcaaatcgaccaagacctgcttcaacttttgcacgaggatcatcctcgtctttgctctagttcacctgcttccagtgaagtatatctccctcaaatcttttatccagccatagaatgatggctcgtaccaagaaaacaacacgtatggccggcacgtctgatcctcaagtggctcggcacgccactttgcccagcgctgaacgggatccaaccatccaggaggagggggatcatgaaggtgatgctgaggtctaggagattgagggggaggacgacattcatcctagcagtttttctgaggcagaggaagaggaggaggttgaactcccgaaactatggggagtacaatgaggctggggagcaagt

SEQ ID NO: 355279 - DNA, 756 bp, Cannabis indica
cttcctagaccgtgccaatgaaggtcacgaaagaagtcaagatgaactataatctcgttaagtgtcacgagaaagctccacccgtacatgttagattgcagacatgacatctatactttttcaagtacaaagccaggctttgtcccacattatgctgtagtatagagcatgcgcacccagttgtaccttcccgacgtgatccaattaatgactatcgataagggaaagttacaaaaggaaaagaaccttgaagcgacacatataagatgatcgaacagtacaagctgacatctttaaaagtaccatgtgacaaatacagccacctaccaaatcaacggtcaaatttaactctagcaagatctgcccaactaagcatgtgaagggaaaaatggcctataaataacctctgcattccaagaataaggggtaacgtctttgaaattaaaaacaactgtattttacttataaaaactactaaaaaaattactaataaagcttcttcttctataagaggagcgagagaaatatagagttccagtccatagtgtaactactggtgatgttcaccacctgccgatattactaataaaatagactcgtggactaaggataattaatgcctgagctatgtaaaaatcttggatatattttttatcaattttttttctttcttatgctctaaatatttggtttctaaaaatcttggtaaacactatatttatttagtcatcaattgatattgttttggttggaaaa

SEQ ID NO: 355280 - DNA, 591 bp, Cannabis indica
cttgcgaataaagttgtgaagtacacaacatgctaatacaatccaaccttattttttgatgattgatagaaaaaggaaaagtcaatacattaaaaataattaaaatatcatatcaattaagtaaaataatttgaatttatttttggtatgtaattacacagtgtaattacacccaattctcattggggtatgagaattggagagagtaattgaggcctcccaattacctctaattacacagttactatgtaattacgtggccacacaaatacgtcaaactgtgtaattacctctaattacatccaattccaattctctagtggctttccgaacgcgcccttagtttttatggtaaatttaaatgcagttctcaataaaagagttggccgatatatgctataatataagcgtgtaataacatgcaagtaatatacagttttgggtgtcatcattactaaaattaaggagatatttattattagaattttggatagataacaattaaagagggcattttttttatttttacactttatatatatatatatatttttgcatttttacggaattctacatagaaattcttattgc

SEQ ID NO: 355281 - DNA, 705 bp, Cannabis indica
cgccctaatgctaaggcacgctacagtgatttttcaattaaagtgttatctttactaatcaaatattttttcttctcggaaaacgtgccaaattaaaacttttataataaatattaaactttataatttacataataatttacaaatatcgggatcccgattctaaacttttatacaaaatatgccaaaatacaatatccaagtcacacaacgactacaaaatgtaaccccagatgtcctgacaccgaacactccaggtcacgctgccacgacatgtacaatcccatcctagccaggctcactcctgtttaccccaaaatttccatttcttgctcaatcctccaccaaatgcaaccaaaccttccaaagcacctaatgagggtatacacaatattttccaaccagtaattcacagaaaatctcactaactcataatatgccattaaagatcaaagtttaggtttttaaacccaaacttccataaatccaacattatacactaaaaccagttgaaagaacttgaaaccaactcaaatgaactctataattcgaactacgactcaacgtaaccctaacaaccactaattctcaaaatcacatattcaaaccaagtaaaaacttcaagaactaagaggtagagatgctagggcttaccttggcttgatttcccttgaattccttgcagaaaataccaaagattagcag

SEQ ID NO: 355282 - DNA, 554 bp, Cannabis indica
ccctctcttatttatgttttgttaatctcttttttttttctgcaatcgacccctctatcgaaagattacttaacatatgggacagttttcgttcccacattctgcgtctttcactttccctatgctttcgctgcttttgagatatttgcacccgatgtttgcttagaaaaatcctttgaatttccatctttggcaaacattcggagggggcctctttccagtggttaggggacccccattccctcttttaacactagggtttggttcgggggctaactgctggatttttccttttacggaaccaaatgtctacttctgcatctggaaccaaatcttcccacaagggggcagttactctggctaccctggaggaagtgatgaagggtcctgtcgtccacaagaactatacttgccgatccaatggttgggaggcggatgagcttcgctcaaccttgacctgtgcccaccagttggaaaagatcgtgactgtggctgacatcaagccgtccgcttttggggtttttcaccgcttgcctcgagacgaagagacgccc

SEQ ID NO: 355283 - DNA, 589 bp, Cannabis indica
ctctctaacactgtgtcacaagtccatcttttaaaattaaccctgcatcctctgatgactcgcaaaattttgacaaaattaataacgtaaagtcttactcttaagactcgaagtcatcccaatctgctatctcccattgacatatactctctgaactatttggcttacagtgtcccatacaacaccagtgttaccataaacacaaagcatgcccataacatgtcgcaaactagctcagtctcgatcttatcctatgcccatgcataaaatctatctgtagcttgcagcaatcatgcaagtccttacacttaacaagccatctgttgtagtgtttccctctggattcacacactaaaactgaacaagtaccctgattcttcaaacatatgaattagtgggctcccccacttcaacttgggaagaacttctctcttagaagaatacttctcaaggtatagctcgtaagctaatcgcatactcgtacacggtctctccaatccaaatgtcactttgatgaagatgttaaactaatgcctcagtcattctgactctttccccctcgacatttctatgttgccttagtacctta

SEQ ID NO: 355284 - DNA, 1066 bp, Cannabis indica
tgctcgctctttgtctaatagccttcactttgttgaactcgtcgggagttgggatcaatatttaggacgtgcaaaatgatacaaggatcaattctgaccatatcctcatgtgaccaggaaaaaacgtccaggtttgctctcagtaattttattaatgctgattttactttgagcaacaaaccttttccgatttttagctttctcaccgggatatttggatcgatctcaatctcttctaattcttccacaggtccaatattgctgcttgggtccccaagtcgagaatccacatcttcatccccgccttgtgaaactctctacttgtaaatgactttttccttgtttgtgctcttgctggaggatacttccttcttagtagtctgcttgtttcttctcagacaccctaccccattcttcgttggaaacttcaggcatgagtggaatattgacgtgacagcctttaagtcatcgttaaagcctgaaggaacatctaatacaaaaaattgtgcaataatagtcatgctcatcggagcttgtccaacagtgaggagtaggcgaatttgtcttagaggtaagaatccttggcctgagaaaccatatacaggcaggagacagggggttagatctttgagttggagcccatcttttcataggcagtctcgaataagagattggaagaggctccattatctatcatggttctggccaccatcttgttagctatgtggacctctatgaccaacgggtcgttgtgcagaaacctaattttgacagcatcttcatcgttgaaggttatagtgggccctcctgcccgtgggattttaggcttcctttcttctacgacgaggatcacttcttcttgatcatgctatgttgttcgtgttgggttttgtgcccgaaataaaacccattacaatcttattagttatcaatttagttttttgaagtggtttatgctaacatgtattttacatgcttatggtttaatatatatatatgtatttaatatatacacaaaatcagttaagtccaaaacatatatttattcacaattacagtattgtga

SEQ ID NO: 355285 - DNA, 1149 bp, Cannabis indica
ataaggtatacttacaccttacatgagtgttatgtaatctccaaggcattgccaaagtttaccaataccagatgtatggagtatacatttgaagggaacgatattgaacttagacaagatatcataaacttactgttatatctttctaagtcaacatcaatggttgatcgtaggtctatggatcttaatcctaatatggttaagttcaacttaattatattattcatgtgcttcaagtagttcgtggaagctaacaaatggttttgatagatatttacatcttgagaacatggtagttcaattgagtgggagctagcgctaatcatagatatggaatctagcttctataagtatttaatagtgaaacgatgatttccttcgagcttggctgaatagagaaaaatgactgagatctcatttcagtaattatattagcttactaaaatatcatttataggtagctaagtgttttggattaaatatactgaagggtcgaacagtaaatttgtccctattaattgtagatcatttatataggatctttgactattagcattgtaacaacggataataataacgtatctatatcgtggtacatatagagctttctataaaattaagagcgatattcaattctaaatctattgtggcacaaggtagagttaataagttaggaaatttacttggtaaattctggatctacttattgaaagctcagttatataggcccatggtcccctcactagtttagataatactattgtaggctcagtcaatagattttaattaatcaattataattctaaaattagactatgtcttatttatgaattttcactaagtaaggacttaattgtgaagaaaagaagttttagcgttaattaattaattaagagactttgtatggtctaattcataaataatataaatgacaattttatttgataattagttataattaataaataaatagttttagcatttataggattgaattggaagaatatggtattattgaaagaagaataactggttaaaaaaatggtaaaattgtaactagagaatggtccactctacggccggccttagtgtgttattttttatcaatattttattcttttttcagtccatataattcagccataagcc

SEQ ID NO: 355286 - DNA, 523 bp, Cannabis indica
attcgggtctaggtctgatttggactccgtgtcctggtccggttacggttctggatctagatccaatttcagttatgattccaagtccgaatcctaattccagtttcggtaaacattcagttttggttccaattttgggtcataaggtacgggttcgggtccacttttgtgttttcgactgggttcttgtcttggtgtgggttcgtgtactagtaagggttccagtccaatgttgggtcccaaatccagacaccaactacgggtttggtccaagcccttggtctagatctggatcccaatctggcgtcccagtctgtttccatttttggtgccgggtcacgagcttggtcctaggttcaatttcgggtctgggtccgtaactaggttctggtactagttctgtttcccaggtccatatcctgattctgggtccaagtctgtgtcttggtcaagatctccgtcccggtctatgttcgggttcgagtcctagtctcggttcgggtttatgtctctgtctgtgttt

SEQ ID NO: 355287 - DNA, 418 bp, Cannabis indica
agggcacaaaacccaacaagtctgtcatacatgggtagtgaggcttttgtggaaagaactttggcccatgggaaggaacttttggagagccggatggacacggaccaggttgctgcctatcgagaggggtcatcatcagagactcgtgatgaggggctagctgacccacctatggacgaggtggacggccaagacactaaccaccaggccgaccaacatgttaatgctggggtaacctagacactggcgatcttgacctcgcaacttcaaatttagctcctcttgcccctgcacacatttagacaagttttttcattagtagctttaagcattatgtctgtgtaacatagacaatattttcatgttctgtatagcctgtggctctttatggtcagtgggcctattgttgggttttatg

SEQ ID NO: 355288 - DNA, 792 bp, Cannabis indica
aacagatcatgtattttgctcagatatgctatcatcttttctacccgagcttcgtattcttcggatgcatgatttaccaccagttgtgaatcactgcagatttcaatgtgttcggccttcatctcctaggctagtcttagcccagcaattagagcctcgtactcagtttcgttgtgagatgctttgaatccgaacttgactggagcgtgcaggcgttgccccccaggcgtgacaagggcaattcctgcacccgatagctgatctatactgacccatctacatgtagtttccaaattggcttatcttcattgttacttggctgaggtgtttgtaccggctcggggttgctttctggtatgatttctttcttgcctatgcattctaccacaaactctggtaatgcttggcctttgattacagttcggggttggaaagtgatttcatactggcccaactctaccgcccaattgagtaaccgtccagaagcatctggcttttgcagtatttggcgtaatggctggtcagtgtatacctgaacaatatgagcttagaaatgaggccttaactttcttgttgctaaaatatggcagtaagcgagtttttctatcaacgggtatcagcccttggcctcaatgagtcttttactgatgtagtagactgggtgttgtacattgttctcttctctgattagcacagcactcacggcatgttccgtgacagctaagttattcccagttcttcttcgtttagaggttttgagagtacgggaggttttgcaagttgtgcttttag

SEQ ID NO: 355289 - DNA, 410 bp, Cannabis indica
cccgaatctccagcaatatgcgggcctccaacgataacttgcagatgcccatccaccgatcgaggtagcaaatctttgttattgtccttccttttaccctgatcggtcttgatatatttttgcaggtgtgggttctttttccttatcaagaatttaatttcccgcttcaagttgttgcattgattagtgtcgtggccgtagtctccgttaaatcaacaaaactttgtcatgtccctctttttgacatctttattcatgggctcaggcttcttatatggggccagcgactgagttgccatgtaaacactttttatatcttttgtcaagatagtgaaggcagtgtacttggcttgattctcccggggagcttgttcagatttaccggtgaactttcctttcttcccattccc

SEQ ID NO: 355290 - DNA, 917 bp, Cannabis indica
tttttttttgaggtaggctctggagaattgggatcacatatggccatgccacagtccatgagttcaagaattggcaattgtattgtggtaaattgaatgataaccttaaaagatattctaatatatatatatatatatatatattacacaataaatcagatattaacataagaaatgaccttaaaagatattctaatatatatagatataatttaggagaatgtcactaacataactcaagaggtctccaccaccgtgtgattcattgaaaaaattatttctcttgccactgagaattcctagaagcaacccaccttattaaattttggtagttaatgatgttgtagaaagcataggattgttgtcatattaagtgtagcctccgcaaagattccagatctagcctacccctgtttaaacattcattaaaaattgttgattactgtcaaagtttaagtcacaggtaatttaattaaataaataataactttaaaaaataacaaaatatttaatataaataataataataataataataaaaaagcaattacttgatggtcaatatcaatcgttcttgttctttaggtagcacaacagtaattaatgatttaatatgtaatcatggattgatacacattgttgtaacacaacaagccccaaaggacgccaaagctcacactctcaccatgtcttgttgacacggtggtcgcaggtgtcgcatagattaacctcattgacaatgcaagcatcattggtacatatacatcaccctatattcttcattttttatttcttgggtggttttcaatcagagattttgagagaaaaataaagaaaggaagatggattcagttctgattttcgatctttaaatttttaccaaagctacataacaagaattgaatatggatttgttt

SEQ ID NO: 355291 - DNA, 1039 bp, Cannabis indica
attattcttttgattgtactaagtcactaccactgtacaactcttgtcgagccctcttagattaccacaactaagaacagtacatcataacaacaataactagtaatttgtagaatgtgaaaacatggtgtgaacaagcaactctaagtagaataagttgcacgctagtaattgaagtatcaacattgattgcaacatcctatactgaaagttgtacaaaattactataactgaatctttctaacaagtcaacttatcaattttagtagcctgagctgaggaaaagaaattgaagcttgattccaaacatagatgcccaatatggtagcctaaagaatagaagcaagaataaggtctggaaagttaaaataaatctcatgatcattagaaaacgattactctgacaggtgagagtatgaattttctagagcacaaagaatttgtcttccccaaagtgaaaacaaaacaaaattgttttgagctagaccataccattctgcaagagaatacacacacagagagaaagaagtggaagaaacaacagaaataaaacaatcaaggatgcctaagcattactatatgaacaaaataatttcattttcaatggaccatcactccccaactttgcatcatagaaaacagttactaatttctttactcattcccttgaaaagaaaaacacaattctgtcactggagtttctatttataattatcaataaaaagataaaaagaacataaaaaaaaacattccacacatgttataatacagtagaaacctaggaggaaactaattgcataccaaagagcatatgcaagacatgatatatcataatgaattaaggcattccacatagcatataccacaaatacaaatcaacaaacataaatcagaagaactgaaaaaaaaaatgagaagttactataaaaataaattttatggtgtcaaatcacatgttctataagtgcataggctgagaaaaatggatcatacctttcactcttaccaaaaccaaagcgggcaccaaaataaaacgcaa

SEQ ID NO: 355292 - DNA, 810 bp, Cannabis indica
agaaaagttgagatgtccatgagagactcctcgagtttaaacctcgccagagctagaatcaacgagatgatgcgaatatgaccaaagtctaatcgcattcgtgtaactcgcattatgtaggaccaaagaacggatttaactcgcatgtactaggatagatgcgagtatcctttcgatcttccagcgaaaacatagagatgaactctctataatgcgagctggtcccaatgacccaacagcttcgataaaccgatatacactcgtgtgtctaggttctatcagctcgttataagatgtccgtaagcgcgattatacaagaacgcagacatcctagacttaactaaatgttaggtatatcctaagcccgcaagcttacgccggaatatgaacagccaactcgaacattaaaagttgcatacgttgttgtatttagtgaatagaaactgctattcatatattgatgtttaggttttagtttaattcctgtaaatcaatgtataaagggattcacaatgaatgcaatcctggtgtaactaactagacacttgctttgtatataaaggagtgatccaccatgaaatgacacctacgaaacccttgcaacagtggactaaacagaccctaatctgactgaaacactatactcctttgtcttcttgatatttccagtttttactaagtacttacgttcccaattcgagtactcgccgtttaaggttgaatactcgcaattgttcctcatataatttcttattactattattattattattattattcatttttggtgttgcgaaatttgctcgacaa

SEQ ID NO: 355293 - DNA, 806 bp, Cannabis indica
tccatgtagtcgaactatattgtctacataaagtcgagctagcttggtaagcttgtaatcctccctgattggaataaaatgagcagacttagtcacgatcaccaatcacccaaacagcgtcatgcttcaaaggtgtcaatggcaacgcagtaacaaagtccatggtaatcttgtcccacttccattctggtataggcaaaggttgaagtaaacctgagggtctctgatgctcagccttaacttgatgacatactatacacttagctacaaagctggctacatctcttttcatactttcccaccaatattgtctctttaaatcttggtaggtcttcgtacttccagcatgtacatcaaatttggatctatgggcctcaatcaaaatggtctccctaagatcggggatatctgcaacagctagtcttcccatatgatatagatacccttcactattaactgtccacccatctagttgctcaccatcttggattcggttccaaataagtcttagcttttcatcttgccactgacgttgcttaacttgttgaagtagcactggtgtagccactatgttagagatacaagctacttcttccccttcatagtattgcaagttataatcacccattgtgattgtccttttccagtcctcaagagccaaacatgccaaagtaccatgaggctttctacttagtgcatcagctactacattagctttcccaggatggtactagcaaagtgaaatcatagtcctccatctactcaacccatcttctttgcctcaagttcaagtccctttgagtaaa

SEQ ID NO: 355294 - DNA, 999 bp, Cannabis indica
tcatcgttggccagaagtagccttgccttagaattttctttgataagctctacccggctgcgtgatttccacagaatctgtcctgaacttcagagagaagtcgtgcaacttcatcttgtgtgacacatctgagtaatggcatcgagaatcctcttctgtacatgaccccttctactatgatgtaccgtgctgcctttcttcctcatttttttgagcttcgtttcggtttcttaggagttccccagagttgaggtaggttgctattggcgtcatccagtttggggatgtgttgatcatttcaatttcttccgtgccagtgatgctaggctcttcaaggaactggatagggaccaagtttgccttgtcatttacattactgcttgccaatcgagccaacccgtccgcagttgtattttcttatcttggaatttttctgagaccgtagctttggaattgtgtgagcaggtcgtgtattttactcagatacgctatcatgttttcttctcgagccacgtattcaccggatacatgatttaccaccagctgtgaatcactgtagatctcaatgttttcagccttcattgccttggctagcttaagtccagcgattagagcttcctctccggcttcgttgttagaggccttgaatccaaacttgactacagtgtgcaggtgttgccccccaggtgtgacaagggcaattcctgcgccagatagttgatctgttgccgacccatccacatgtagtttccaggttggtttgtcttcattattacttagctatggtactggctcgggatttctttccggtatgccttcttttttgcatgtgcattctcccacaaagtcgaccaaggcttggcccttgattcttgttcggggttggaagttgatttcgtactgacccaattctaccacccacttgagtaactgcccagaggcatctggcttttgcagtatttgtcgtagtggttgttcggtgtatacccgaacaggatg

SEQ ID NO: 355295 - DNA, 959 bp, Cannabis indica
acattctcctcggtgttatttcaccagctgatgctccacaaaatgaaggttgatgctcaggaggagttgaggatgcggttttacattggtcggaaggaggtcagattcggagtgcttgagtttgcactcattacaggcctggacttctcctcggggccaacagaagaggagaaggctgcgcaggttgctcgctcagggtcagaccgattgatcaacaaatatttcaaccggtctggtagtgtgaagacagaagcactccaagataggttcacaaactgtcagaacccggaagacttgtacaagcttggcttgtgcttgtttgtggagtcagtgcttctgggtcgcgaggctaacgcgctgattacgcctgacatacttagatatgtcgaagacctcgagttcttcttccggattccttgggggaagcactcattcgccagactcatgcactcgcttcaaaaagacatgttgaaacagaaggccaactacgagaagaagctgagttcggatgttcagcatgagtgcaaatacacagcttatggcttcgcacctgcagtacaatattgggcgtatgaggccattttggaggttgggaagaggtatggcacgaatcatgggattcggtttcccaggatgcttagctggacgagcaagggtgatattgggaagaaagaagtcagttcgatattttctagacgggtatgagtttcacttatgttcagagtaattatttaacataaatgcttgtgataaatgctaaatggttttactctgatattttttgaaccataaacagaatcttgaagtggtgaaggggctacttccacggacagaagaggaggcatttgtgaggaccatctcttacgatggtgtggatgacacagaggctgaggcagatactcaggtaccagacactcaggtaccaatttttggaactttttttttatgattgtataact

SEQ ID NO: 355296 - DNA, 562 bp, Cannabis indica
tagcggggcagtttatttagacattgggaacatggaacgcggtgtatggctcagtagaatcaaactctctctttctctatttcggccatcctagaaccagctagggttcttgtgtttgcttcctcaattccttgtttccagtagtttattgtataatccaagccaaggtatgatttataacaacctcctcttttagtttcttgagttttaagaagcagaaattttgcatgcttggtgtttttgttgttttaatggctgtggttagttgttgttgcatttagaggattatatatgtttatttgagtgaattcaaactgattttgtcgttatatagttggatttaaccttatgtaaagctttgaactcaaaatcttgaatttcaatggtgaaattgaagtagctgctgtggttgttgtttgtgttgggtttgttttctggggttatattatggttatgtatcgtgaattgagcaggttttgatagctagtttgtgggatgagcaagctttgagtttttgaactcaagcttgactcatcaatggtgattttgttggaaattattt

SEQ ID NO: 355297 - DNA, 534 bp, Cannabis indica
tatgtacttacaaatggcagcttagttctaagcttagttctaaagttcaatattcttgattcccaatccacctgcagcctttgattgacacacattactccatgctactgagcctccaccttggagaagggcttgtcctttcctcagaaaagccctgcaaatggcttcaattgatctcaatacttttttaggcaaaatcatcatttgactccaataagcctgtatagcagttaaaacggagttgattagagtgattctcgtagcaaaagagagattcttggaactccaacttttaattttagcagtcattcgctcagctaataaatcacattctttcccagatatctttttcccacatataggaatcctcaagtaggtaaaaggcatgtcctgctttgtgaaaccagaaagctgaataatttggtttacaacctcagattgcatgttactacaatatatggaagttttacttgcattaggatgcaaaccagatgtgagtgagaaaatctttagtgcctgcaacatgtagagaat

SEQ ID NO: 355298 - DNA, 729 bp, Cannabis indica
agagagagagagaatgagacgtgggttagagagagagagagaaggttggaaaatccagtcatattttcaaacctaaaactggtctctctaaagtcacatattttttcaatttgttagttattctaatacatatcattatatatacataatgttataaataaatactttatctaatcttataaaataaaagataatatttcttttaaatttaaattcaaatataaatatcatataattgattaacgtaaattagttatagccttctatttaatattaacttttaaatacattatttaataatatatttaatataataattaaaagataataattaatttaatttgatttattttaataataaaattctcatgggcattcatatgtcaccctacatgtgtgggccatattttaaggttcaaattgatttttaaattttaccacaaataagatttattatttattttatcaataaataacgatttattaattatcattaatctcatatttcactaggattaaaatgaatattattttgacaaaaataatatatttctttttttaatattatttaagaataatattatatttaactaattaatatagttttaaacatataaaattaaatagttaaatactaattatataattcataattgatataattattcaaaatgataatttccataaaattacaatttttccttaagaattatttctcatagaaattaa

SEQ ID NO: 355299 - DNA, 1217 bp, Cannabis indica
tcagtagtgctaggcaagttacccctgttagtgttttgagaagccaactgccccaccttagttttcaagaccttaatggaatgaattgcaaaaatgtgtctatttgagaatagactttccattagagtcttgttgttgttgatactgttggctttgctgagattgatttttctgaggataaaacccttgttgttgttgattaggaaacttattttggaagttctgcagacaacccccttggttgaacccacaattattctgatagtttccaatggcttggacttactccattggcaaactgtctacatctatagggcagatttcaatagtaagaggtcctccacacagctcgcagataacttgagcttgtttggcttgtgcagtcactaacttcgttaatgcctccacttgggttgtcaacttggttatggcatcgacttcatgcatacctataacctttttagagtggcctctctctgttgaccattgttgattagttatggccatctcttcaagtagttcaaaggcctcattagcacttttcctcataaaagccccaccaactgcaacatctatgagtgttcgggtgttgttgaccaatccattatagaagttatgcacttgcaaccatttttcaatcccatggttagggtacttcctcaataagtccttgaatctctcccaggcttcataaagagattcgttgtcatgctaggtgaagtggttgatttcagctctcagcttgtcaatcttcgtaggaggaaagaatttggaaagctaattcctcccaagtgttgatagaattaggtggcagagataccaaccaactcttggctcgctcccttagtgagaatgggaacaacctcagcttgatggcgtcatcgctaactccattcatcttgaatgtctgacaaagctcttcgaagttagaggtgcatgtttgggtcttctgatggcagcccccccaaactattggatcatctacagtatggtcggcttgatcataaaattgttggtatcaacggcaggtgaacttatacaagatctgacccatgtcaagttaggcagcaaatagtccctcaagctacggtcattgttgttgcgaccattagcctggtcttctacaactcctccattgttgccattattggcattgtcatcctgttggaaatattttactaggatctagatttactaccaagtatgtttcattaaca

SEQ ID NO: 355300 - DNA, 745 bp, Cannabis indica
actaaaaggacattttgttaatttttttttaaaaaaggaacatttattaacttaattgttagatttagggccattttgtcaaacggggatcatcgagaatcaatcaattcaagacatcagactccaagagtctaaccagaaattttcgtggaaaaaaaaaaggaaccattgtctttgtctccaatttgtgtatttgtttctggtttccattgtttctttactttcgtacaattcgctttttgggctgagctagctaatgcagcccaagaaagggggtaaaatacataatgggcttggagcagaataggctttaaatataggaggaaattagactatataccctttttatatgggaaatttacaaaattactagaatttgggttaacttttacaaaaatactgtcacgtggaaatcttttccaaaatactgtatttttataaaataacagtaaaacacaaaacagaacaactaaaaacaacaatggaaggataaagtaaagcattgcaacgagattttgtttacatggggtaaagattattcaggtaacttccaagagagattaaacaagtgcaaatctgagttgagaaaatggaagaaggttcaagacccgttggcgatgcaaaattacaaagcagctgagttagagcttagtaatgtgttacttcaaaagaaatttttttgaaaacaaagaagtaagcaactttggttgagagaaggtgatcaaaattcgaagtatttccatgc

SEQ ID NO: 355301 - DNA, 797 bp, Cannabis indica
cctattttggtgcgctgaatttttctttttcaagtgtaatctagtgcatgaacgaggaagaagaagaccttgaacttgcttctattgaccccgaaattgaactcactttcagataaagaaggaaggaacaaaaggctaaaaaacactgcaatatggccgatgggtttgaagttgggggtgctcataatggtgctaatcctattgctttggctgatgatagagcccgagcaataagagagtatgcaacccctatgctcaatgagctaaatccgggtattgtgagacccgaaatccaagcacctcactttgagctcaagcttatcatgtttcaaatgctccagacggtgtttatgagggaaggaccattcagccatcaaatatttaatttccaagaaagatgcaaagccaagactaattcgttgggtgttacttctccaagagtttgatttaaaaatccaagatagaaaagggacggagaaccaagtggttgatcacttatctcggctagaaacaggtgttgagcaggaagacaaaatgcaaattcaagaaactttcccggatgagcaactgcttgttgtaacccaagcaaacactccttggtatactaattttgtaaattacttagtgagtgggttgcagcctcctgatctgaataggcagcaactaaaaaaattctttcatgatgtgagattctactattgggatgagccttacttgtacaggcagtgtgcggatcgaataatgcagcgttgtgtgccggaagaggaagttgcaagcatcctagagcattgtcattc

SEQ ID NO: 355302 - DNA, 632 bp, Cannabis indica
aaaactgggtaatcttatgaaaaatgacctgtaatttggaataaccgcatactgtgtaagaaatatttaaatagacgctgtttcatactttgaatactcgcgggtattcggatgaacagttcgaatactcgcacactgacagaacttatttacctctgattattagctagatcttttaggattttatatgctgtgggttgaattgcgagagtattaatcgctattccaaatggtgggtgtgtcacagtattctaatggtcatatatgcgattatatgccccttgagatactgagatacacccagccatttgcgacatgcgttaatattcaaatgagcgtactccttggctgataggtagtctcggaacggtgggagtaactcagtaatttcagggtcatgcttgagaacgcatgccccttgagtaactgagtttctcccagccgtttctggagatatatcacttggcccaggatgcgcgacttactcgcatttcaactcgcatacaaatggggtggtcagcattcgtaaggatgctgactattctggcaactgcgattttatagttttaatgcgggtgagatcacttatttttgtttttcacacattcatcacgctgaaaagatcttctatc

SEQ ID NO: 355303 - DNA, 1462 bp, Cannabis indica
cctttttggaatgagctacaacaggatggagctaccagcctacaagacttccaaaaaagggactaaaaatacatcaacttggaagaggcgcagatagtggcctacggcgggtattatccaactagtggaccaggatacatgccaggaacgtaatttcctagagctgtcctccccgttacaccacagacaaatgaagtacagttttcgacgaccccaggatatactcaaaacctcactcttgctctagctcaatctaaccttggagcgccaacgaataatcccacctccgagatgactgcacaactcccaactcaatttgcaccagccacacgtatggtgggagcccccccaaagctcccggagtaagagatccttaaaaggtaacactcgacctaaggataagagacaaaggagaggttacaccccctagtatacacaatatacggaactcgtggatactcaagaacgagtgtacttcataacctaggaaaacactcattactggaagcctccccctttgtactgaggtagctcccggagagaccccaacaaaaaggtgcgattaccacaacgatattggtcacaacactaacgaatgcaagaatttaaaggatgaaatcgagagctcaattcgattaggccatttatatgaatggatcaaaaacaggttaccacacctaaatcttggacaaatcgaagtccaaatacctcaaggggggccagcaattgcaccagaaggacgaatacctcttgggggtatgccccatcagcaggtgcccggacaacctccttggacaaatggaagggttgctatgatctcaggaggtcctcacataggagggaccacgagaaatgagttgaagtgttatgtcaaggctctaaagcatgatggggagatatgggaagttagtcaacttctggcccaaagactgagacctatggatcaacccatcaccttcacggaggaagatgctaagctagtacgtttcctgcatcctgaccccttagtcattgaaaccctaattgcgaacaaaattgtacccagaatattggtggacaacgagagtttggtgaacctattgtttaaggaggctttcacggccatcgggctcactgatcgagacctctccccaagcggttcaaaactcacgagatttaacaggactacactcgttcctatgggaaaggttagactccccgttactctatgtctggacactccacaaagtacgttcaagtattgtacctttgtggtagtagattgccccactgcttacaacgctcttctaggccgtctagccttagttgactttagagcggtcacttccatcaagcacttgtgccttaagtttcccactcagacggctggaatagaacggtctagggtaaccaaggagaggtaagacatgttggaattattttaccaggatctagattttactaccaagtatgtttgattaac

SEQ ID NO: 355304 - DNA, 560 bp, Cannabis indica
gttattatattaaactatatgaggtcttatacttagttggaccaatagcgatattgacacataggagggagctaagcaccactgatgccccttagcatttctctttttttattgtatttttacgaaattccatatagaaccatagaaattaacggagcaacctaaatcgcaactaaaattcgtatagcaatttacatagaaaccaccagaaaaactaccagagaaatcaatatttaaaaataaaaaaaaagtaaaaaatagtatatagaataattttctttattatgatatattactacttaaagaaaaataataagcatttttcttgttcaaccacaagttagatgatataatatttattatttttttaatttatgcacattcatgcatgccgataaacggtttgttatgtgatctcgatgccaatgtcaatataattttgagactaattgtattttttttttaggaaccacaagttcattaactaaaaaaatagataggaatcacaagagaaattccctccccttgatacaaaacggcttgatcattagcgactctag

SEQ ID NO: 355305 - DNA, 513 bp, Cannabis indica
atacttttttgggtttagcttcatgttatacttttttaatattataaagccttccacgaggtctgaggtatgatccttactttttatcgattttaacaacatatcatcaacgtaaacctccatgtttcgccctatttggtttgcaaacatttcgtttacaagtcgctgatacgttgccccagcgttcttcagtccgaacgacatgactttataacaatagagtcccatgttggttatgaagcttgtatgttcttgatctgggacgtacatttttatctggttatattcagaatatgcgcccataaatgacttaagctcgtgcccagcagttgcatccactaactggtcaatcctgggaagtgggaaacaatcctttggacacgccttatttagatcagagaagtcaatacaagttctccaagttccgtttggcttcgagacgagagcaggattggctatccacgagggataaaacacctcacgtataaaattgttgactaacaacttgtcaac

SEQ ID NO: 355306 - DNA, 691 bp, Cannabis indica
tttatttatttttgtacaacataggaaaaaaaaaatgtttaggaaaattctacaatataatccacttcacatctctatttatttccctatctaaaataatattgggaaattctaccactccttaaaattgatatattgatccactcttatctatttttacaaccgaaataattttttagtgaaatttttttttatggtcctgcaaaattttaagaaatttagaaaagtttagcacgctgaaaaatacgttcaaacagtgtgttgtacgagtgactattttattttatacgcgtgtaaaatagactatttaaacattattttctatattgtaaattatagaaggagcaaacctaaccaatagaaggagcctaacaaggtttgtgttaactgctcttggggactgcatcagctggaaatctaaccaacagaaagtaggggtgtacatcaaaccgctcaaaccgctcaaaccgcccgcaccgcaccgcaccgcaaaaaaaatgcggtttgaaattcttcgcggtgcggttgcggtttgaatttttcccaaaccgcgcggtgcggtgcggtttgcggttttgaattattaaaccgcgattcaaaccgcaccgcaccgcatcttttaaaatttcaatttttatatttattttattaagcccatacatatgagcccaacccaagcctataaatctta

SEQ ID NO: 355307 - DNA, 1662 bp, Cannabis indica
catttatagccttctcctttgcatacaactctaattctcaacctatcattattaatatatttgtactgcctgtcaatgctgatgaaatgctcatttaatgcttcactcaagtgctcaacagtagggaattccattcccaactcaaacttgatagttctcaggcttgaagtagtggatcgaaactcaatgtgtttctttttaagcactggtccatcatcttcatacactaaccaagctgaccaaatcatcatcctcttcatatcctccaccatcatcatcatcttggtaagcttgattgcataaataattgagtgacccctaccactggctagggtcagttgttcatttttcagctaattgtggatcttgagtttctggagcatattcctcttccacaaaaatctggatcttctaactgattggttttttttcctcccaattggtgttttggatggtgtttctcttagtctctttttggttaggggtggtctttgggacacactttgagatctggtttatggtggtgttttggatggtgtttctcttactcttttcctaatttggggtggtgttcgagatacacttctagatctggtgcagggtggtgactgttttgacgtgttgtagaaggtgtttcagatttggtttgtggtgttttgaaacatccttcccctttcctggtttagagtgttgtttgagatctgttttggggtgatttgttgagatctggctggcctttgttttttcttgtttgggtggtgttttggatggagttttagacctggtttggggtgattggaatagttttgtctgggaactttttttcttggtttggggtggtgttttggttgttatttgggacatggttttgggtgatgggcagggatttaactggccagttgttttcttcggctggggtggtgttttggatgttgtttgaaaactggttttgggtgatggacatggatttaagtggcctattttttcttggtttggggtggtgttttggatgttctttgacacctggttttgggtgatgggcagagatttaattggctagttttgccttgtgtttgggatccggtttgtgctgatgttttgctactttgggctttctctggtttagatggtgtttgaaagctattttgggcatttggttgggtattgtgctctgatattggccttgcttgaagtggcatgggctatatgggtatgttagggtgtaaatgggcctcacttgaattggtatgggcctcatctattgggccttcatctacagcttcacctccataaatttctccaatttcatccaatgtctcaataatttggacactagaatcactatcatcatcacttcctccaccaacatcttccatgtcaaattatggcatgtacataacaaacttatcataccaataagtagatcaacaatttaccaagcaaattttagaacttattaattccttctgactccactataaatttagaattgcactcttaattatatagaacgctttatatgttccaagacattgatacgctattaagtatctattgttataatctaaataatcaaagatcatttatagatgacttacatcgagtagggacaaatttaccgttctacccttcaatgtttttttttccttaaaacacttaact

SEQ ID NO: 355308 - DNA, 718 bp, Cannabis indica
tttttttaatttttataaattgttttttttttaatttttaaattatttttagtatatttaaaattaaaattacgtggaccactaaaaatttgccacgtgtacaagtgtgtacacgtggacagtccactgtggcacttaacggtgatttttggacggaggtgtgcagagcaaaacggaaccagagtttaggtagtttagccgccaaaaattcagttttggtggttaagtgttacaaaccgtaaagtttaggtggtttagccgccaatatccctacattttatataatgaaaaaatagttgacaaaaatttagtagagtggttttgatctatttttttcataatttctattaaaggaataaaacatataatactttttatataatgaaaggtattttaagtattaaaaagtaaaaaatgacatttgttttattattttaaaaaaaggacattaactatctataaaattaaaaatagggtcatttacttgtatttttcttttaaaaaaattagtgttatctataacctatataaaagtgagaatagctttttgggctttcactaattgaattacaaaattagcctttactatatattcaagcataaaaaattttaactaagcaattgaaacatgtacactatttatttatttatttatttatttatttttctaaactaagcttctccctaattaacattttattttttgtaaatatttgtg

SEQ ID NO: 355309 - DNA, 919 bp, Cannabis indica
ttgctaaaacatcctaggtgactattttattgtttctgtttttgtattctgctttttgtttgtaattttatttttattttttgcaactatttgatttcaatattttttttgttgtttgtttgttaatttaggcatttcaattgttatgttgatggtgcgaagaaattttccccagtgtttagattaggtgttgattatgttgaagataaaacctggttttatcatttggctacctgtgacatgtttatcaatgactcggtaaagtttctgttatcttttaaaatttatgatagttgtttttcagttgttttatcattattttttagtttagttgctatatttaagttttttaaatagtttttaactttctattttgtgtttcatgtattgttttgtttcagcatatgcacactatattctattaccttaggaaaacaggttaatattcttttgttgttacactgaattttgcaacaactgattgccttttcgatgattccattcaagcgttataccacaagttcaacaaagccaaggaaatgaaaacaaagatgtcgcacatacatgctgctcacccaatagcgcattacatacgaggtttgcgaattccgtgttctaagccttggtatgaagccgatcatgtcttattcatcataaatcttagcaaggaaagtcattgggtttttggtcgtcttgacttgaatgaggggattttgtttctttataattccttgaggactgccaaaatgaattctgcaactaggaatgcaatgaaggcttattcagttttactgcctttgttttttgtatctacttgaattttggaagaataggtcccatgtcctgatttaggttctgaccctaaagctcctctaagagttgtggagattgctggtcttccatctctgcagaaaaagtg

SEQ ID NO: 355310 - DNA, 896 bp, Cannabis indica
gaaccaaactcggacctagaataaaaacttgaaattatgactaggacccagacctaagacgataacaaaacccaaaccataactcaaacgcagaccaaaacttggaccgagaccttgactaggactgggacctgagacctaagacttgaacatggacgaggaccgggaacgggacctggacctgacccggtcctaagccctcatcggatcctgacactcgcaatccagaccaggatctagacccttaaaaggacccaaacctaaacccacacaaagatagggatcgagacctggacctgaacacggaccgcgaccaggactataaccaagactaacccgaaattggaaccagactaggacctacgaaccggacttggatggggcacctaggccccgtgacccagaccatgatgtaaattttagaattgaacctgaaccacgacgtgacctggacccgggaatctgaagtcagatccagagccagacatgaaacctgccccagacctcaactaggacaggaacctggacacgaacacataccaggacaaaacccgaacccggaccaaaactcagacacagaccaagaatcagacccaaacatagacctgaaccaggacccaagctcgaacccagaccaggatcagaacacaggacttagacccagaactaacctcagactcagattgagatcaaaacctaggactcggaccagaaccttgacccagaccaaggaccccaacccacacccagagcctgattcagacctagaccgagatctggacccaaacacaaactcgaactagaactcgaaccccgacctgaactcgaacccaaactcgaactccgaaacgcaattggaactggaactggactaggactaggaccaggaccaggac

SEQ ID NO: 355311 - DNA, 825 bp, Cannabis indica
atacaaataacccgggttataacctggcacccatacacccgatcataaccctaatccccgtgtcccacacggtattgagtctagaacgttcatacgacaatactatcgaccataatgtcagcctatactcaatatgctagtcatactctagccatattgatgtgacagcatcgataagtatttcagccaacatacatttatcagtaatcagtacaactctatgtatactattactgctatcaatgtaatctaacaagcataaacaacatgtacgctaaacatgtaataacatatgcatgacattatactaatcttacctcaattctgaattcaggtgtgccggtcaacctgagtggaacaactgctcggtgaattataggctcctaaatcacatcaataacaacacgcataagtgactcgctaaatcacaaccgggacttaggttttaagccaaaaacctatctactgcaacttaaaatggcaataccttacactagcagggaatcaaccaaccagaaaccttaaactgacgcgaaaggacaagctgaatttttgggtttccctgctgtaaaatcctgataaccggttttacaagcagtgtaaaaccagttagccagttttacccagaaaaaccaaaaagttccaaacccaaaccaaattttatccaaactcaatcaaactttcgagacctgcatattataccccaataaactatttccaagcaataaaacaataacccaagctcagaattcaaaatcaccattaatgagccaagcttgagttcaaaaactcaaagcttgctcaatcaacaaactacctatcaaa

SEQ ID NO: 355312 - DNA, 564 bp, Cannabis indica
atatttgtgtttggtaattaatttgaatgcaattcaaaatttgattagatattgaatccaagtgatttgctgagggaattgtgattgagcatgaatatgtggaatgcacttcttcagcaatccaagcactttttttgtttaagagtttatatccaaaccacaagaaatatgaaattcaaaattttataacaaaggctgtacatttcattgagcactcacagcttcctgatggttcatggtaataatattccccttaattttcctacctaaatatagttatatatagtcattatattattaattaagaaacaataaaaaaaattacaaaaaatacgttctatacatggttatcaatattttttttacagtttttatgaatgtcagtagtcctgtgattcgtaaggggaaataccgggtaagttatgcaatcccacaccgcatggggatggtcaagtgggatgattctaagactgtgtaggtataagacttcacagttgaagaaagcttaaatagattgattggtactatatcaacaaggtgtagcttgtttttcggtagcccatc

SEQ ID NO: 355313 - DNA, 530 bp, Cannabis indica
gatgaatataaatcagatgattattaattagaattagttaagaataaattaccaggaggacaagaaggagacaccaaaaattcaatcccatatctttttaagtatatatcttttatcacttcttcttctgctcttcaatcattcaccatataattattatataggaagaagaaagatataggttgacattataatatctgtcacaatggtcattatttattaatttattttatgttattggaaatgatatatatccatcgattgtgacccttcctaatttttaataaatttctctattttatataagggagctaatgtacaattggtatttgtaacactccaatattttgccttattttacaaaatactaattttgatgcattaattaaaaagattcaaagctgtttggaaatacacagtgagttttacaataaatatgcaaaaaaaagtgaatgatcattcataataaaaacaaaataagtagttaagtccatttttttaaaaaataaattgtaacatcccactgagct

SEQ ID NO: 355314 - DNA, 700 bp, Cannabis indica
aaatcaatttatgccattaaagctcaaagctttgaactcactattcaaagttgcataaaaccaatcaataacctcaaaaccagctgctatgggctaaattcaactcaacctaaccctagaattcgaaccaaaccaatattaaactcaaacagctcctaaaaccaagaattacatattcaacctaactcaaaagcttgaaaactaaaaagggtttcattagaacttaccttaggttgatcccccccttggattacttgctgaaaactcagaaaaatggaagagaggattgatccttgcccttgcttgtcccagccgaaagaaagagagagagaatttcaagaaaagtctaaatttctaattttctttctttccttaaatgaaaaaggacttttccccaaattaattcatgctgaataaatcacttggctaggtgtcaatcacctagggcagccacctatcctcatcaaggaaaagactaaaatgccctttaagttataacttaggtatttctaaagctaggggtaaaatagtcaaattccataaccccgctcaatcccgataattatttccttttaaaatatttcccactaagaaataaggttctaaacttacccatgtgatcaatctagccatccatcgcattttccgttgtcgccgaacaaaaattacaaaaatattatatttcacatataaactaaat

SEQ ID NO: 355315 - DNA, 936 bp, Cannabis indica
gagttactgaggctatgatttgcaatgagaaaacacaagaatggtgggcaacatttgatgggtcgtcaaccactaaaggaggaggtgcaggaatagtattaactgatcctatgggtaagaatcatattcaagcttataagttatcgtttgactgtactaacaatgaagctgagtatgaggcacttattctgggaatcacggtcgcgctaaaaatggaagccagcaaagttgtgattagaggagactccaaacttgttatccagcaagtcaaaggggattttgctgtgaaagagccatcattggcaatatatcgaacaatggtccaagagctagcaaagaattttgaggaatgtcaattcgagcatatgcctcgaacacaaaataggtacgccgatgctttggctactatggcttcaaaaattgaggtatcagaaatccaaaacttgacatttaaaatagtcaatcaaaagtgttcaatcacctcggggtatggaaaagagtctgccagcaagaagtggacacaacaaatgattgataagctcgcgaaattgaaaaagactcatctcaaagaaatgcaacgctttgttgttataggtgggacactttattaccgatcatcggatggggtgttagcaagatgtttagaccaagaggaaatctctactcagatggaagaaattcataatgctgcctgtggagtcgaaggtcccaaattatcaagaagattacaaagggccggttatttttggctagaaatggaggaagatgctgcaagattgcaaaaagattgtccgcaatgtcaactcttatttaataaccatgaggcaattttgataaccgaagattacgattggaggagaccatataaagaatatttacgggacaaaataacaccatgtgataagaaagaaaaagaaaaactactcagacacatta

SEQ ID NO: 355316 - DNA, 490 bp, Cannabis indica
acccaaacccgaacatggacccaaactgagacctaagacccggacctggacctacgcctcggaacccagacccagatcagaactcgagactcaaacctgaacctggaccaagaatcgaacccaaatcgggacccataccgagatcggaacttgaacccaaactcggaccaggaattgaaccccgaccggctcttagactcgaaccgggacctaggagctggacccagatgagggacctagacttgggaaacgggcatcagaactgggactgagacctaagacccaatcccggacccagaccctgaccttggactcggactgggacctgggacccgaagtggaactagactaggagccggggcttggacctgactcatagttagtgtttggatctgggacccatagatggactcaaacccagatccaaactcggacctagaaccaaacccaaacccagacccgtacccagacctaggtccaagtctgagtc

SEQ ID NO: 355317 - DNA, 1123 bp, Cannabis indica
gtttaactcccctgggtgaaaaagtactttaaactctaatgacgccaaatttttagtgcaaaaaccactgcggctaactctaggtcatgtgtcgggtatctctgttcgtattcttttaattgccttgaagcgtaagcaattaccttcccttcttgcattagaacacaacccaacccttgtttagatgcatcacaatataccgcaaattgtccctcttctgttggtaaactgaggattggtgctgagataagtctattcttcaactcttggaagctttgctcacacttgtctgaccaggaaaattttagattcttcctagttaattctgttaagggtgtggctatctttgagaacccctcaacaaaccttctataatagcctgctaaacccaaaaagcttcgaacctctgaggcggtctttggtctaggccattctttcactgcagcaaccttggcaggatctacttttattcccccgttagtgacaatgtggcccaaaaatgcaacctcggacaaccagaactcacattttttgtacttggcatacaattgatgttctctcagtcgctgcaaggtcaagcgtaagtgctcctcatgttcctcctctgtcttagaataaatcatctatgaatacaatgacaaactgatccagatattccttgaagactcggttcatgaggtccataaaagctgctggggcatttgtaagtccaaatgacatcaccatgaactcataatgcccgtatctcgttctgaaggctgtcttcggtatatcttcatttttgattcttagctgatgataccctgaacgaagatcaatcttagaaaacacctttttcccttgaagctggtcaaacaagtcgtcaatcctcggtagtgggtaccgattctttatagtcaccttgttcaattctcggtaatctatgcacattctcatagtaccgtctttctttttaacaaatagaactggtgcgccccacggagagtagctaggtctgataaaccctaacttaagcaattcttccaactgtattttgagttctttcaattcagatggtgccatcctatatggtgcgcgggaaactggtgctgttccgggcactaattctatcacaaattcgatt

SEQ ID NO: 355318 - DNA, 370 bp, Cannabis indica
aattaacttgtctactacgtcgtgggggtcttgggtttttgaaaactaggaaatgaaccttgctttctggctaagtgggggtggtaaatattgaatgggtgtcaatctctgtgctgcaagatcttggaggccaagtatctaaaggggaaggattttctcagctgtagctacagggactctgattcttggttttggaaaaatgttgtgaaagccattacaattctgagaaaagggcctgtaaagtggtcgctaatggaagggatactagtatttggagggatccttggattcctcattgcaaaggtttcgttccgaaaccaaagggtgcggtcttaacggatcacactagggtgatcgatctcttgttatc

SEQ ID NO: 355319 - DNA, 866 bp, Cannabis indica
acccgacccagacccgaacttgaacctaggacatagctcgtgacctggcaccagaaatcgaaccagacggggacccgagattgggatcaggatctggacccagggcttggagaaaacccgtagtcggtgtctagatttgggacccagcccaggacctgaaccctgacaaggacccgaacccacactcggacaagaacccagtcccaaacccaaaattggaacctaaacttgaagttgactgagattggaattaggacttagagttggaatcataattgaaatttgatctagatccggactccaaatcaggcctggacccgacttgggagccgcaccccgatcccaacccaatcatggactcgggacccgaactcgaacctgaactcaaacccaaacatggaaccagactagggacatagaaccagggtcgggacctagaaccgcaccccagtcttgatcccgaacgcaaactcagaaatgggacctgggacctgaaccagaatcacatcgagacccgtcatagtgatccaaatcttgactcgggattccggtaatgggacatggaacagaccagtggtcggtgtctagatttggggctcagactaggactagaacccagacgaagaaccaaacccgaacaaagacctagacctgggaccaaaaattagaacatgaacaagaatcgtcgaactaggaccctacaacaagactaggaccggaccaggacccggacccaaacctagaaccaaacacagacctagcctcaaacccaaactgagactggaactcggacccggacacagtcgtgtaccctgaccggaactgagacccggacctggacctaaatctgggacccgatcccaaac

SEQ ID NO: 355320 - DNA, 580 bp, Cannabis indica
tgtctgggtcctagtttgagttcgagtttgggtttgggttctggtctaagtcttagatccagacactgactacgggtcgggtccaagcatcgagtccgaatcccaggtcccgaggtgggtccttagtccaggttttggtctggggtcgagtcccggatcccgatccaagatctgaggcccaagttctggtcctagtttgtgggcccgattcccagctctgggttccccataatttgggtctgggttcaagtctcgagtccaagtctgggtggggatccgagttcgggtcgcggtttgggtctaggtgtaagtttgagtcttggtcttggtctggttatagttttgggtctaggtgtaggttcgtttacagctctaggtccaagtcctggttctggtcccatttcttggtcaaggtcaacttctgatttcggttccaatttcgggtcacaaggtacggcttcgggtccaggtttgggtctttgattgggttctggtttgagttttggttcgggtgctagtctgggttcgggtccggggttgtgtcccaaatccatacaccgactatgggttcgatccaagc

SEQ ID NO: 355321 - DNA, 853 bp, Cannabis indica
aaaaaaaaaaacctattttaaaatgtagaaaaaaaaaaaactctttattttattctctaaattagtataaatagtttcagttttgagtttgtagcactccaatatttattttttaaaatacattattaaaattctattttatctattttatatatcaaacttttacattatattaaaatattaagaaaataatattgaaatatgtttaattcaatgaatagttatttctatatttagttaagcactattcattgagctaaaaaatatataaaatagctaaaatttaagattgagctattttaactcatatattaggagtgctctagtaaatttaatatctttttgagtagttgtgttcattggattacttccaatggatttgtacccaaccaatcaaatccaattatttattgaatattgaattttgtcatccgatccaatccaattgaattgagtcatctgatctgatctgatccagtgaatgtattagattggatcggttctaaccattggatgcattgactaattttttattagattggattggatccatccaatccattttagctaccatttaagttaatttcattaaaaaaatatatataaatattaaaaaaaaacattatttaaaacttaataatccaacatatataataaacattagtttagtctaacctaattctcatgatcttataataaaactgttaaaaaataaattttattcaatacgtattgataattttattagcgtttaggaagataaaaattaatattttaaatctaagattttttttctttaatctaatgtgttaaatgtatattaaatcaattaatatatatttttaaataaata

SEQ ID NO: 355322 - DNA, 786 bp, Cannabis indica
aattgttcaagtttttatatacagtcgcacaactattgagaaactattatccaactgaatacaaacaatgtagttatatttttaaattgtgctatgaatgtatttttattccctatttttccattgctcttttttcctttatttagttatgttttatcaattcttacctcactgcttttaaaactgtaaagaagaagttattcctatacttaatatttacgaagtgtcgcaactgtaagaaaacgatgttgcaactattaaaaaactgttttaaattttataaaaatgaaatctcatgtatttagaacataacacatcaacttgtttgaacaagccatgttcttgtggtgtaataacctgaacagtagttgtaaacattcaagttcatctcttttataacagcaagcgcatgagcacacggtaactcgtcaagttggaatctgttgcaactgcatgttttctccttgaggttgatgacccatgatctggttagttcaacgacttcgaacatggtctcgtttattggttttacctgcggattaagtaaatttataaaattgttattatgtataacaacggcaaacaaactattaagaaactataatgcaactaaaatattaaacagtttcttacattttctgtcaatgagtccacaaagttgtcgactaatttcttctctgctgtaggtgttaaaaatgttgttgttttctgtgcttttttcctgtttgtgtatgtccattgttgtatcaaagctctcaatgactccatcagtgttgtgattggtag

SEQ ID NO: 355323 - DNA, 563 bp, Cannabis indica
taaagaaattaataaatttaaaaaatctaaacataatttaaaaataaaataatcaatttttaaatttaaacctcaaaatatcaaaaaattaataataatctattgaaaattaaatattattaatataaaattgatatttaagtttaaatatattaaaaataatattttattttgaaattttggatttgaaattgggaaaattggaaattttgggaaaaaattccacaaaaaatcgggttggaggagtggctgcacatgtagcccaggaaggctgtacacagtcctggacgcaggcagaagggaggtctccagctgagaaaacttggcgtgtgcagcatgtccctgggtgagctgcagggtgcacacgggcgtgagacatggtatcgtctccgaaggcatgcgcttcagacagggtcacgagctcgcggattcccctccttgtccccactcccctcgtgcattcgatgcaccattgaacccccaaaatttcaaaatttaataactttgtcaattaatatcgaaattgagttccatcaaaaccaaagttgctgaatttttcacaa

SEQ ID NO: 355324 - DNA, 393 bp, Cannabis indica
attttcaaaacccagaaataagccaaactggtgtataatcgggcacaccatcgggctggccatcgggccccatcgaactgaccatcgggcctttgtcttcaacccagattcaattttttgtatcatgatgcatcaggcctgcatcggacctgcatcgggcttgcctaaaaaatgagttttctaacccagaaattacagattcaaaaacactaacttttgatattgggtctatgggtcgcgatggtcgtggagaaaggggtcggcggtgtaggcgataggcagtgagaagtggtcggttttgatttgggagagggccggcattgttggcggtggtgaggggccgacgttgtaggcggtggtgaggggggttttgatttggtgaagggttcggtt

SEQ ID NO: 355325 - DNA, 703 bp, Cannabis indica
tattattttattcttaaaatattgattgcctaaccacatcttttttaaaattggtttattttgttattttttaattttattaaattataagattagaaaatgatattaaaaatagttatttagttattttcaaatcatttatcttattagatatttaatttaatttgataaaaaataattcaaataaacctagatattttaaattagtttcttttttttttttaattttaaattttgatgagacaattaaggttggttttaacaaccctaaattctgcaaccggaattccggttctgggaattcctgaaccttccagaccttttctaaataccccaaagaacatttctaaagcatcaacacagcccagaaaacacagaatcgaaaatcaccattaaagctccaagctttgagttcaaaagtcaaacttggttaaatctaactaacatgcatccaaatcagttcaaatctacttaaacatgcatattatatcctctgaaaactaaagcaagcatcaacaacaagtggaactgtaacaccctaactaccttaggcgtattacgtgatttttaaacgtactgtgcagctcgttgctaatcaacgaggtttatgcaaaaacgtgattaattaaaattttgctttttaattaaacttataaaacagtattacaaaagacttgggatcccgattataaaatatttacaa

SEQ ID NO: 355326 - DNA, 759 bp, Cannabis indica
acatttagtcacaacaaattgtaatttttgtgactaatacatttagccacagactttttagtcacgacataggaataataattaataattagttataacttttttacttttagtcacaaattttgatgtgactaaaagtaaaattttttgtagtggattttttaacatgaaatatatagaagaaattgcattgtatacccattttattatatttattttgatttttacctttatttacatattttttaaattagtatcttttccccataaactttaacatgtaccaaatcacgccccctgaactttttggtcgttaaaaattccctttgaactattgagattgttggatttaaggacttttgtctaatttcatacaattttactattttagtgattgtttatgtactaacccatgctccccagacttcgatatctaccaaatcatgcccctcgaactttgacatgtactaaatcatgccctttaaactttcatccatcctataattttatacttaaattggacaaaaatccttaaattcaacaatctcaataattcatggggcatttttaacgaccttaatacatgtcaaagttcaaggggaaaaaaacctaattagcctattttttaaaatatacccgcttttatagatgatgttcccattatgcccttaggttaatgtaaaatatgtgctagacttaagtgaagagtgatagtatattggtcaatccactcaaaaaagttggtatattttaataaaa

SEQ ID NO: 355327 - DNA, 785 bp, Cannabis indica
ttttatttttcattttaataccatgctctattctgcctttcaaagaattaatagtcaactcaaacgactcgctaccccaacaatactcatcccatcgattgctgtcaatgacatctaaatcaaacttagatgtattgtttgtattatatatgaaatatgcattttttataacttttgcttggcgacggcggaaaatgtaatggatatccatttgagtcacatgggtaagtctagaacctttttcttattgggataaatattagagataaattgaatactgggtttgagcgaggttatggtttttgaccattttactcttatactttaaattgcttaagttataagctagaagggtattttggtaatttgggaaggggattaggtggctgcatgggagagtatgattgagtgggagtgctagaagggtattagagataaattgaatactgggtttgagcgaggttatggttatttatttcaacaaggaattcacccatttagaagtaaaaaacaaaaaatcaagagaaactcatttctccttcattctacttgcctgaccaccacaaaaaccagaaggaaatcagtaatcctcatccctttttctagaatttagcaagaaatctaggagtttccaagtggatgtaagccttagcaccataattctatagtttcttaagcttgaagtttagcttgattatggaattttgaagtatgagggttgttagggtttgagtgtgttgggttttgtgccctaaataaaactctttacaatctgattagttatc

SEQ ID NO: 355328 - DNA, 645 bp, Cannabis indica
tcaatgaaagattagaagtcatttatgtttacatgtattttttatgtttgtggtttaatatacaatttctgttaaatccaaaacatatagttattcacaattacagtgatgtcaacacagtggaggcaattgtgattatatgcttcaaaagttaatgtcccatgattcatcagtgcactagatttacacaaatgtgatagtcagcgataaaatttacttacacattgaataaatattatgttctttccaagacattggcaaagtatgctagtatcagatgtatagagtatacattggactgagaccgatattgatcttgataaagatattataatcttaccgttatatatttctaagtcaatatcactggttgatcttagatcaaaagatcttaatcctgatatggttaggttcgatctcaagagtgttatgtatgttctttgagttattcgttgaaactcatacgggtgaacacttacatcttgagaacatgctagtacaattgagtgggtgcgctaatcatagatatggactctataacttccatctagacatagaagtaaaatgatgattgccttcaagcttggcttaatagagataaatggaagagctcttatttcaataattatattagtttactgatat

SEQ ID NO: 355329 - DNA, 891 bp, Cannabis indica
ctttttctttttctttttctttttcttttcttcttctttttctttctttttctatctgttcatctcagctctctctatcaatccaccactttcactgtaaacaccaccaccaacaaaccttcactgtaaacaccaccaccaacacaaccgaaaccaccgtaaacaccaccaccatccataaccatcgtaaacaccaccacccaccattactgaaactaccaccacaacctatttttcaaatccatatcacacaaaaaaaattaaatactaaaaccaaatttaaacaaattcaaatccaacaaacaaataaacacacacaaatatatacacaaaatttcagtccaaaactcaaatctgaaaaccctaactttattttccccacaacaattatcttttctcatatctgaaaataatgaacacaataatacccaaatatttgcagctatacacagatcttgataattgcaaaaaaaaattagtagaaatccctagatctaaagagagagaaagagagagaggagggcagatagagagagagagagagatagggtcgggttttacctggcttggtggtctcgacgacggcgatggcatgggtctgttgtcctcgacgacgacggcgacagcgacggcatgggttcgtggtcctcgacgacgacgacaacggctcggtggtcctgaggagagaaagagaagatggctgagagagagagggggggatcgagaaagagaagatggctgagagagagagagagaggggatcgagagagatagctgagatcgagagagagagaggatcgagaacctgggtttggctggtgcttgctgttacctgcgagcaagagagagaaagagaaagggcattagaaaaagaaagaaaagaaaaagaga

SEQ ID NO: 355330 - DNA, 724 bp, Cannabis indica
aagctcgtgagactgggctttgactgatttattatcggtcatttgaaacttcaagtagcggctcacagcatatttctttgttcccgcctcctcggtatcatattttttctgtaatacttcccatatctccttggtagatttgtcaaaattataataatcatacaaatcatcagacataccgttcaaaataaaattcttatacagaaaatcattctctacccaggagtccctttccttaacctgcgattcgtacttctcgacttcatccttcttctcggcaggaggtggagtctcagacacaactggtttcaaaacagtaagcacaaacacaacttttttcatggtcagaaaaaacagcatcttctgtctccaacgtttaaagtgcaaaccctcaaaacaaaaaaggcttgttaatgtcagcagtagaaccagaacattcatcggtagtagtcatagcagaaagaacgtcttaaaattgttgagtaaactgctagcaaaataaaagaggaacgatattaccgaatgaagaattctgggttgagtcgcggactaagtcgctctctttaagacgttcgcggcactgcccaggagtgtgcaagcagtcagaaattgccggtcgtccccagaataaaacagcccagtcgttccactgtattggaaccccactgcactgtagagcaccgtcgaatacacccaaaaaatttgatatcgcagatggaatttt

SEQ ID NO: 355331 - DNA, 2553 bp, Cannabis indica
ttttgaaaagacacatgtcctctaattttgccggttgtgcggtttcgagatacattagaattaaatgaccatcttttccacttctgctttgaattatgtctgtaggatcaaacctttctttgatctaacgaagctaatatcatgggtataaagtaagaaaaaaggaaccacctttgcattatttcctccattttagaaagtctgaaaaactcttaagcttcttcgtcaagaatcaccattgagtttgtctgaggacttgcacgccatctctgtccttcaccttttttctacgagttttctccgacttcatcctctcaatcgatccttgctacgttcgaaaatttgcagatgtagtaaccagtcattcccccaagccctaactccaaatagtaagttgctttcttctttctcatgcttgttacattgtgtggatttgctacttagtttgtttgtatcattatcatctcatctggttttggtagtttttagggttaaactgcatctaggtccatactagggttcaggcaatatgtaggttattttaagatctcaaactcattacctttgggtttgataaaattctctccagggattgggattgccttttgcctgtagcaatgtcccactctggtttaggactttatcgtccagaagttttagaatttgagtttcctacagaatcaaccatcccgtataaacccaacccttgaaaacccacttccaaattagagttgaacgatgctagggttagggaacacgtagtaagaacccaccaggaagatattgctagttgctacaggtaattcttgcaagaaatctccgaaggcaaacaccgattcttgcgagaggcagcctggtcagaaccttccagcgtgtcctttattcctgtagcaaagcctctgtttttacccaacgtcacgatttcttttgaaccaggtgacttggattttgaaattatgcctcccaagccacgtacatcaaagactcccaggaccccaacgtcacctttgaggctgagttgatagaatcgaaggtgcgatctatctaaggctacacgggcgatatgttgaacatctgtgggatcgaacttgggcaatcatgccaagttagatcagtacgagagggtgagttcatctgtttccatcctgcgtgattttcaagcagtaacccggggacaagtggtgaaactagtaccagtggtttgactggtatgggcgcttggagccttgagcatattagtgcaggggccacacttcctcttcgagactacttcaaggactacataaagcaccttggagtttccccattccagctgactcccatctcctacaagattctcgctagtttgaaagtcttgtacaaaattctgaactgggggtgtcccacaccagtagagattgagtatctttactcagttaaggccgttccgtcaaggaagaatgctacagtgagcttctactacctcggtactcattctagcgagcctaaaatcattattgaatttccaaatgaagtatccttcaaggacaacttcttttggacatctggtcttcccccatcggcacaaccacttttcgcaaactttttgagtgattgttttcttcttgctcatttatctcaatctttgtttttcaagtttctgaccaatgttttatttgtttttatagctctcttgacgaggcctgctcctacccccgagatggtcagtcggcacaggcgcttgataactcttccctacagtctttggtcatgcaagttccttttgaatgaggccaacttgcgattggtgggccttctcgctcacaaagaatatacttgtgattacaagattcccaagtattcttcttagcagcaaattacagttcaaaacaaggataagtcctgagatcgcttggctaaagcacaatatcttcaaaacacttcccccccgggaagctggtgaggcagcgtcttgaggtaatcaatgtggttggtctcccacagtacttagggctgaacgttgtatattagttactttccaagactcccgtcttaatttttatatttgggattcccttcccgtagattgaatttctcataagtttgacagctggtatcctagattccatgtccagattaactgtcacgagtcatattattgtataacagagcaatacgacactatggaagatagggcaggtcatatagatgcgagctgggatatagaaccaatcgagccttttgatatattcaagattataggctgtaggaactttagtggatattatggtccttcaaccccttcgtctagtgatagcttgccttctagtgactttggtaaatccattaggtggaaaattgtattcctccctttttcatcgggctttttaataattgtaacgctttttcttgttttgcagacatgggttatcaagatatcatagatcgaaaagggaagaagagggtaaccatgtagggttttatgccctaaataaaactcatttcaatataatcagatttagttatcaatatagatcagaaataacatttaacgttgcatggttcacatgattt

SEQ ID NO: 355332 - DNA, 706 bp, Cannabis indica
tgcctgttagcactgttgcatcagaatctacattcagcactggtggtagacacgtgagtcctcatcgatcgagacttcatccttctacattagaagcattagtatgcacacagaattggttgatgactgacaaaaaaggtaaatatcattaaataaataattatatatatttgtgtatatgtttcataattagtattgattttgttttgttttttttacagtaacaataaatgatgaagatgttgatgttgatccaacaatggtaactagtttagttttcgtaatttatcaaaaaaaattatcaatttttattattaatatttttctttgttttttttttcaggagccttacgttgttgatcttgatgattagaatatatgttgttttattgttagtttttattattaatgtactttgttattagtaatatgaatgtaattgatatttcaactctattcaaattataattaggaaatttgtttagaactttattttttttttttgggtattgtttaattttaatatgaacatctttagaaatttgtgttacttaaaatcttgtttagaaatctatttttaagcatattttaatgaatccatggaaaataagcaactaggttaagatggataatagtaattaaataaaaaaattcttatagaagccaacataacaagagatgtttctcataaaaaaaaaaaaaacca

SEQ ID NO: 355333 - DNA, 790 bp, Cannabis indica
gagtagtaggggctcgagggggcatcgggccctgttctgtccatccacttcggcctatagtgcaggcagttgatcctggatcgcagtatattggtcggtggtgagttggatgattccctcagataccaccgccggagtgacaggtgggaagtgcgtggttgctggtagtgtggacgtttccccgacttgaggaccaactgtttcagggaatagattgagaggtctaatgttacctctccctactccgcaattaacgacacctacaggtggtgtcctagctccagataatggcacgttcatcatttcgatgttgatggactcgttgttggcacctccgtttgtttggtttccagccatgatggtattcttacttgaaatgaatgaaattttaattcgcgtttcccatagacggcgccaaatgttgtcgagcaaaattcgcaacaccaaatgtatatgatattattaataacaagaaaaaaattatatgaagaacattgcgactattcaacccagagtggcgagtactcaaactgggaatggaaaatgcttaacagaaaactggaaataacaataagacagagaattatagtggttcagtcagatcacggtctgctaagtccactgtagcaagagtttcgtagagctcatttcacggtggatcaccccttaatatacaaagcaggtgtccaattagttatacagggattgcattcattgtcaatccgtttttacacattgaattacaataactaaactaaacaacgttaacatcaataaatgaataacagtt

SEQ ID NO: 355334 - DNA, 767 bp, Cannabis indica
ttctttaattttcttgtttttctttatttcaaaatctatcaaaattgtatatctaccaaatagaatcataagtctaatttagtggtattcagttcaattccctggtggttcgacctcacctgcgtgagtttactacttgattacgtgcacttgcgtattgttaacactggtttctgcaatttttttcgtccggcccgatggggtccgatgctggcgcgatggtggcccgatataggggtgtaaaacaactgacaggggtaaagttccgatggggtccgatggggtccgatggtacccctataaagtttttttttttttgtgtttttggccacagtccgatggggtccgatggagcccgatagggtccgatggtacccctataaattttttttttgtttttttggccacagtccaatggggtccgatgggacccaatagtgggtccgatggtacccctaaaaagtcaattttttagttttttggggccgagtatgatggggtccgatggaccccaatagtggtccgatggaccccaatagtggtccgatggaccccaatagtggtccgatggcaccccataaaatgtcatttttcttgttttttgtggcctagtccgatgggcgttcgatgggtccgatttgggtccgatcgggcccccaaaaaattgattttttggtttttatttttgggatcgagcccgattttattttcatatttattgcattgaaagattttttttttcgctgagatttttgttgtaaattata

SEQ ID NO: 355335 - DNA, 734 bp, Cannabis indica
atgatagcccgatcggagatcaatcttagagaagaccgtcttccttggagttgatcgaaaagatcatcgatcctaggtaatggatatttattcttaactgttagcttgtttaactcctgatagtcgatgcacattctcatagacccatccttcttcttgacaaataataccggagctccctagggttacacactaggccggataaaccctatgtcaagtaacccttgaagctgaattttcaattctttaagctcttcggagccattctataaggagccttggagaccggttttactccaagtgctaaatctattgtaaaatcaatttcccgttgaggtggtaaacccagaagttctttgggaaaaatatctagagattcccgaaccaccttgatatcttctggccgaacagagtctggctgagtggtgtctaacaccatggccagaaaccctaggcatccattacacaataattctttacctgacagggccaaaatcaccgagatctgagatccctgaaccgaaccgacaaaaacaaatggttcttctccttcgtgttggaagattaccatcttcctcttacagtcaatactgaccgaatacttggataggaaatccatcccaagtatgatatcaaaatctgctaagctcatctctattaggtcagcacttaactccctatcgtcaatcctgatcggcatagacctaatccaccttttagagataactaactct

SEQ ID NO: 355336 - DNA, 511 bp, Cannabis indica
gagaatagttcccaaaatcaacctgaccttgaagaaagagatacacgaggcaaaccttgtgacttgcaaaccaggggggaggagacaacccaaaggtatccccagaactctcaagagagacaacctgaggaaattgagggataccttgaaggtgagatgccctataatcaaccaggaaccaagaaactggaaattccccataggaataagggaaatctgggaacacagcctgggatacatggatcatcagtcggggatcgccaacattctctccaagctcataggaaaggagctcgcacaaatcccaatagggggaacgagacgaatcaaaccttaggaagaagagcaggacgtgaagaggcgagggctaccgcgaggtacatggtaactcataattgatcaatgcgaggagaagagaatgctcgttgcagcgatgatcaaaaaggaaaaatacggttgttggaatttattttaccaggatcttagatctactcacaagtatgttatttaa

SEQ ID NO: 355337 - DNA, 979 bp, Cannabis indica
tccaccactgatgccccaggatcagcttggtcttctggaaattctccgtcgtgaccaatcccccgacgtcaaggtccttcttgtcatatgtggcgaaggtcttggcccgttggaggaagagctgagtaggcacagtccgctcataaggagggatcctaacccactccgtgagaagcttcgggtgttccacagccaggaacccagaggagaagaagaagcggtgacggtactccttgacgtgtttctactggttggaggggatcgggccctcattcaaagggtgggcccggaagccataaaagccgtccttaagtttttcccccttcttggggacagaaacgagttcatacaaatacaatatctctgccggactgggagagccccagccccgggcagagtaaaaaataaacaagcctaaaagcaggcggtaagcttaaggaataagttggtatggcgcaaggccgacaaatacaaggaaattaatgaaataaccctgaaggggaagcataacctccgtcatcaaatgcgtttggctccaagctccgaagcctccataattgtgatggcgtctccgcgtggcggccggtggtacgtcccgaaagtcgcaggcttgatgccggccacgaccacaatgtgctccagatgatgagggcacgttaaggtagagtgaagctcggccgcttcccacctcgtggcatgaggcttatacccctcccgggcgacgggacccatcatcacctcttccagggtggccaggcgttttcctcctttcttggaagatttggaaccgggtgtagacattttggttctgaaaaagatttaaaattcctgcagtcaggccccataccaaaccctaagtcaaaaaagggggatgggggtcccctaaccgctggaaagaggccccctccggacgattgtcaacaagaaagccttagaaggttttcctggacaaaagtcgggtgcaagaatcttacagata

SEQ ID NO: 355338 - DNA, 596 bp, Cannabis indica
tctctctctctctctctattttgaaatatatctccctctatttgttcatcaatttcgaaatccctatagtgatagagtaccttgcacatcaagtgagtacttataagatagaatgaccttgactctcgcctaaacgggtcaacgtcgaattctcatcttgatcgaataaaaaattgctaaaataatgtctattttagatgagctcacaactctatttaactagtgagatatttaactctcgcctaaatgggacacttatgtcatgagttgaaaagcttgaacattatttaggatatgtttgtttttgtattttcacatgttattcctactttctaaacgcttactaatttctgaatgtatgattttatattgaaccttgtttgatttctatttattaatatttgtagtttccaatatgattataaacaaccctgttacatcactgttgactgacaacaagctctctggagctaactttgctaaatggagagagaatattaatatttctctcattggtaaaaactcactgtttgtgttaacactgaagaagcttttgagcaaccaggtgagaatgcaaccaaggcagtcaagaaaaa

SEQ ID NO: 355339 - DNA, 1047 bp, Cannabis indica
tatcctcaagtatctggatagtcctctcagattgaccatcggtttgaggatgaaaagttgtactgaaatttaacttggtacccattgctcgctataggctttcgcagaacttggatgtaagttttggatctcgatcagaaactatcgacttcggggcaccatgaagccgaactatttccttgatatataaattagcatactgttctactgtatacggtttctgcagtggaaaaaaaaatgttcagactttgtgtttcgatccacaaccacccaaatagagtcataataccctaatttccttggtaatgccaccaaaaaatccatggtgatgtctttccacttccactctggaatcttcagaggctgaagcaaacccgccggcctctgatgttctgccttgatttgctgaaggttaagtatcttaacacatactcaacaatatctctcttcgtacccagccaccaatatagagctttcacatcatgatacattttggttgttcccgggtgtaaggaatacggtgtggtatgagactcatcaagaatctcgtgtctgataattttatctgttggcacacaaaccctgttcttgtatcgcaataacccatcagacaaaagtgaaaattcttttaccgatccggcctctaacttctccttatgcccctgtaactcagaatcgtttttctgggccattttaattctttctactaaattagactacagggtaatgttagcaagttttcctatcacaaattcaatccctgcttgataactctatgaaaatagagttatttatatctttttgggcattaaattagctttgttctcaagtatttttagtttattgtagtgactttttaattattttatttagttttgcataagtattagttttaatatttttagattaatttttgtaatattttatcaattttatttagtttcccatgttaaagtattattcttaatattgtgtatttttgtaagagcttaaatatataatttggactttattatgtgcataatgtctcaaaagtcatagagtaaa

SEQ ID NO: 355340 - DNA, 616 bp, Cannabis indica
atgggttttatttaggacacaaaacccaacagaccatcctatggtcattaagataagaaagtgtttgtttcaataaatactacttttttaagaaaatgactaagtccaaaaacaaagtagcaaagtagaagagatattttttcttgattccaaattattctatcttctcattctatataagatggtcccaatgcctatgttgtcttgatacaatagatgaggataataccacttatgttcttagacagaaagtcacagtaccttgtcgtagtgggaaggttttaaagaactcgccctgttatgacttggaagacacttgtgatgaaatccattgttagtttaaacaagtaatggattgccagaataagaaactaagaagcaaagctaagagaactatggttaaaaccattcatatggaataaccaaaagttttctattataaggacaagaaaagaaattttgaaaataattctattcaatggacttaacaaaattcctaatcctagtattataggtttgatattatctaaggaacttactctagtgcaagcaacttactttagtaagatgctggtgcatttttttaaaggctgtatctatagaagcttttcgactt

SEQ ID NO: 355341 - DNA, 759 bp, Cannabis indica
tctcctcgtactccttgcaaatctatttgcattttgaaatacttgagatgtggtaagggatcctctttccctgtatacagggaagatgtatgcaaggaaagtggatcccttataacatctctagtatttcaaaatgcaaatggacttgcaatgagtacgaggagatgcacgttgcagagtcttccctgctacacttttagaagccgcccaataatggtacgtcaagttgacaccaggaaggttcagctcttggaaggccttctcctcggagtttcatgcacaattctcttcttcttgccaactccaactacatttagaagacctgctccaagtaaagcaaagaccaggagagcctctccgcgcttacataagtagattcatgacggaggcaacaaaagtagtgtgattaactgaagaagggaaattagccgccatactagggggcctcgagatcctcggagaattgtggaaagacattaagaaaagtggtccagtagattctatgagtgatttctcgactgcgcagatggtttcatcaagcttgaagaagccatccagcgagaagatggcgagcctagacctggccaaccacaagctccttcagctggaacgtctgtccagaatccccagtaccttggtagttcaaattcagacagtaaaagatctaacaacaacaaataaggcaattgaaaaagggacagttcgcaggcaaagccaaatagacccctagagagaatccttccaagttcactgctttct

SEQ ID NO: 355342 - DNA, 729 bp, Cannabis indica
tgattatacactacattgaatattattaatttaaaattaatgatattaaaaaaactaaaaactaaaaataaaattaatatacgtgacttacatttatctagtatatatatatatatatatatatatatgaaaataaaaataaaaatgcaaaataataaaacaggagcagtagtatagtacttattattcgataccaattatatccatataatatactttctttttcagcttggaattatccattacatatattcgatttccaaatcacttgtaaaatgtctgtgagtcacaaaaattatattttaattattttaacaccaaatatacatttttagtcagtgcaaaaaatttataattataactaaaatattatattttcactactacaaaaaaatataattttcgtcggtttttaagtgtcatttaaagaatttacgtcaatttaaaaaaccgacgtatatatcgtagtcgcaaatagtaaatttttgagttatcaaacagaaaattaatgaacaccgaattaatacgtacgttaatcagtactttagacaaataatatttgatataataataatatcttaatattttaatattgtttgaatatatattttttctgaattaatggaccttatataaattcatgtaaattggaaaagaagggtcagcatgcaaaaaaaaaataataataataataataataataattggaataattttggatgaaaagtg

SEQ ID NO: 355343 - DNA, 543 bp, Cannabis indica
tgaatatgttgaagttgatctgaaatgtcttcaattttcttatgaaatctatcaaagagttcatcaataatctcactaccaaaatgtttggtcaatagaacctccactgctgctcttaggtgcatagtagttgtctgtgtagaaattatttgagattgatcaaacatagactttgttagctccattttctcaatgctaaaacacccatttacttctatcaattctttcatctcattttgagacacaaggtacactggtatgttgaaagaatttacttgatcttcattgacaagcccctgcagtaacaaatcaaagacaattttagtttttttttaatctcaattaacattttttccctattatttagaaataataaattacactataaaacattaacaaattaaaacataagttatggtagtatacgcaaggccggccctaggcataggcgggctaggcctagggcccacactttttgggggcctaaaataaaaaataaaaaaaattattaggcttttatttaagtaaaatttaagtgtatta

SEQ ID NO: 355344 - DNA, 557 bp, Cannabis indica
ataaacttacttttagaaaaatacttcgatgtgacccacttatatctatttactaaattatttaaaattttgcttctatttatttttctctaattcatttattttatttcctctaacttttctctactagcaaacatagagtaaagttcaaaaaaactatcacatgccactaataaacatgaaaataattatagcacgcactaaaatataatatatattaaacatatactaatgtcgaggagaacatataaattaataagcatatacaaaattttactagtatcaacaaaattgttttacatagaaaccaaattaaccatatataatgaaatgtgagttgttaggggcataacctgaggtgaggaaaaatatgagtttgtataagggaaatttaattttttatacttaaaaaacttaaatttttttttttgaaaccaatacattttacactacaaaaaatatgaccactttactaattttcctaaactacccctcacatttcaaaacatcaccctctctcttcctctctctcaaccgaaccacaaaacccagccccc

SEQ ID NO: 355345 - DNA, 650 bp, Cannabis indica
tgcaatttatttaacttagataaagcattgagatttatggagatagactaatctaggcaacaaatcaatgaagcatataattcatttaacctaggttctattcttcatcacaaattgtaatttgtcacaaacacttagaatcctagactattaggtgaatagtaatcctaagatgacggtagattaaagtaaaacctaatttagcggccgtctaaacaagattaaaacaataatcataacattgaacatagaagaatagaagcaatttgatataatggaaactaaaaattaacattcaataataaaattaagaattcatgtttcgggttttgaaataacccttaactaaaagaaaactactcagaactagacattaataaaaatcataatatttaatttgtagtttttggattctcctccatttgtagtctaagaggtcttatttatagtaatgagaaagttagttgaatcctattagaattaggattctatttatagtggatagataaatcctcttagaattaggattctatttataatagtattaggaaatatctcggataaagataactcatcttttaaacaaaagataaaaaatcgcaactcttcttgaaaatttatctttattttcgctatctttttttttttag

SEQ ID NO: 355346 - DNA, 620 bp, Cannabis indica
attatatttagagatttatggccaaggcaaccaaagtcaaaggccttactgaagaaggccaatatacaaccatactgggggcatactcccactaagcgacttttggaaggatatcaagaggatatccaacaacaacatgaaggagttcttgataaagcagacaactttatcaaacttgaagaagccatacatcaggcccaggtggggcatatcaataacaggcagtcacgagacacctagcaacctcatgacttaccaggcgtacaggcagaacaacaatgctgcctagacctgtagttgtaaaaaacactagaaataagtgcaacaccaacaactctaggaggaacaatggcaaaaaggggaagtttaacacttctcccacgccctagaagagcaaggaggagaagtacgcttgcttcaccctcctaatagagaagcatgataccatcttcatggccactcaaggaacagtcccataccgaaagccctttccaatcagaaggagatgggcaagagggacatgtcgaagttcggcagatatcataacgacttcggccatgacactaatgagtgtaaaaatttgaagaggcagatggagtacctaataaggcataacaatc

SEQ ID NO: 355347 - DNA, 840 bp, Cannabis indica
atgatagaaattatagttttaaaacatatgttgctgctactgaggatcagaagtgttgttgggtgactcccacaccactatagttgctggtactggaaatgtggaattgaacttcacctctggaagaactgtgattctaaaagatgtgatgcacactccagagatgaggaagaatttggtctcgggctaccttctcaacaaggcggggttcactcagactataggagctgatttgtttactttaactaagaatgggatatttgtagggaaggggtatgcaactgagggaatgtttaaattgaatgttcaagtcaataaagttaatgcttctgcttatatgttgtgttcttttaatacttggcatgctagactttgtcacgtaaataaacgcataatcaagaacatgagtagtttaggcctaattcctaaattatctttaaatgactttgaaaaatgcgaattttgtagccaagccaagattactaaaacaccacataaatctgtgttagaaaaagaaaccgagcctctagatttaatccattctgatatttgtgaacttgatggaactttgactagaaatggtaaacgctactttatcacttttattgatgattgttctgactttacctatgtgtatttaatgaaaaataaaagtgaagctcttgatatgtttaagatatttgtggctgaaattgaaaatcaacttagtagaaaaatcaagaagtttcgtagcgatagaggcactgaatatgattctactgcttttattgaattttataactcacatggaatcatacacgataagactgcaccttattcacctgaaatgaatggcaaagc

SEQ ID NO: 355348 - DNA, 1140 bp, Cannabis indica
aagatttttttaatgcatctcttgtgccctctacaagatcaacaaagttccaaggacacaatgattctttgggtttcgacttaccccaaaaaaaaacatccagtagctactaccacaccaaatgacactgccacatcttctccgcgtgtccaaaccaccaaatttggccgaaaatctcagcccccatctcacttgaatgattatgtttggactcttgatggttcctctacttccatggctcaccctttgtgcaattttttgggttatgacaggatatcctctcagttttgtgctggcattttggctgccaatgtcatcgttgcacctactagctataaagaggcagccactattcgcgaatggaatcaagccatggacaccaaaatcattgctcttgtggctatcaagacttgggatgtcgttcctcttcctcccggtgaacatgctataggatgtaagtgggtctataactataaatataataaaaaaggggaggttgttaggtgtaaagcccggttggttgccaaaggctataccaaaaatacgggatagactaccttgatacttttgcccccgttgcaaaatttaatacaatcaaagtattacttgctatttcggtaatcaaaaattggtccttatatcaattggacataacgccttcttgcatggtgatttgcatgaaactatctacatgcaactccccaaaggctatacaccttcaggcattgtccccaaaaatttcgtttgcaagctaaacaaaagtctatatggtttgaaacaagcctctagacaatggtatactaaacttagtcaataccttttagctaatggttttaaacaatctcctaatgatcatatttgtttatcaagaatactaacaatactttcttagctattcttgtgtatgttgaggatattgtcattgcttctaacaatgatgttgctgtccagaattttaagaagcaattacactcgacttttcagctaaaagaccattggtcctctccgattttttttggggttggaaataggtcgttgctcggctggaatttccatttctcagcggccttttacacttcaacttcttcatgatataggttttttgggagccaaagttgcctccactcccatggaacctaa

SEQ ID NO: 355349 - DNA, 1096 bp, Cannabis indica
ggggccttttgcatgaagccatgggtgtatggtagggccagagggccaatattgagaacttcgcgaatagatttttggcaagagttcacttggtactgtattgggtgtagttggcttgcaagcctcgtccaggtgggacacatcaaattttaccctgggttaggagttcttgctcgatttccatcaggaggatggtgcgccatggatttggcttgtgaagtttccagagggacttgtccatagagacttggcttcaatggaagcgtgttctgtaggtgtcgttgggtacggttggtttccgaacctcaccccgaggggtgcaccatacttattccttgtccaaaggtgtatgcattggtcaattggcgggtgagctactatcagaggatgtgctagcttcaaaggttagtgttgcaagggctacttagatgactggaggaacgttgtgatggacttggaggagttcatgttgggggaagtattcaagtgcggaggcactactccatgggtgagtctgaatagagacagtggcacaggttatttgatcgagtccaagtgtaggtgagggagatcttcaccaagagagtgattctacgaaggtagagggataagtgtagacttaggatatggatgaagcttggagtaagcttaggagttgagatcagaaagatttgcctacagtccgtcgatgagggcatcaacatgttgaagtgggggagaatataatgtgcatgccaagatggcacgttacaagctagcggatgcccacaagttggccaagtggtggtcaagtggtggcacatattgttgtgcatgctggtggcatgttgacgcttagtttgtatggtagttgcattttcgtaaatatcttcaatattgtccggaacgggatggcacttggtatttgccatttatttgggtctacgaatactatggtataatcaaatttgagaaactatgtgatttggtataaggttttaccatatatctacagagccaaaatcatgtatgtgttgggttttgtgccctaaataaaacccatttcaatataattatatttacttattaataaagatcagaaataacattttatgtt

SEQ ID NO: 355350 - DNA, 808 bp, Cannabis indica
aaataataataatctattaaaattaaatattatcctaaaaaaatgaaacgtcaagatccactactggaagcgtcagtgatttcctcttagtcctcgaagacatatctccacaacaaacacaaggattaggacaagcataacactacaaaatttttattctacatgtcgggcatttatggagtgaacaaggaatggaaacaccaggaactttagaagattgcatcgagacaaaggtaggttggggaaggatttcgtgaaagactctaggcaatggagggaggaataaggaaaaccaacatcaaagcctggatgttccttcaccagagacgttggagaaatgactggcaacaaaggcatagacctttataaggcccccaccctcactttgcgaatccagtgtgaggaccgaagttgttctaactacagtaagacatcaataaaggtcgagggaccattcaactccagggagattatctcagcttgggttcgcttgagtttccctcaactcacatagttgctttaagtgagctatgagtgcttcccttatcctatgatatacgatgaaacgatcctccacttgattttttgagtcaaataacaaaatgttaatcgggatcactcccttaggagttacgccactggctttagaagacataaggaaggggacaaagagacctcaaaatcctacaccccacggggcaaaagaaaaatctaggagtaagtaaaaaatcaactcaatatactgtcaactacaacccttctcactacccgagaaaatgagcctaagggaagatgttggaaattattt

SEQ ID NO: 355351 - DNA, 729 bp, Cannabis indica
tttttaaaaaataaatttatttaaaataatgtaaattatttataattttttaatatttttatatattatatataaaatatcgtaactacaataaataatgagataaagtaaataaaaattattcaacacgtttgggaacaattattataagaaaaatgttgaaatagtatgttgtgtaattcaccattttgagaaacaatcacatttagaaaataaatataaaactggacattatacttatagtgttattttttaaaaatattttatttaccattttataagataacaataaagaaaataatgagaaaattacactgtatacccactttattttatatattttaatttttacctttattttttatattttttaagatatactcacttttatagataatgtcctcattatgccccttaagttaaataaattatgtgttaaatttaagtgaaaagtaaagatatattgggtaatctatttataaaagtaggtatatttttataaaatataatataatagtattttttattaatataaacaaaaaaaaaaaagtattttttaaaatggttttttaaaaaaattaacgagacatacatcaaagcaagaaatattattattattattattattattattattattaatgatttgtgtagtcaaataatgtccaataattattggaataagaaataatgtttctcttaaactacaatgaaatgaatatatttttt

SEQ ID NO: 355352 - DNA, 640 bp, Cannabis indica
aaaataatttccaacaagaacttctccaatgtcgaccagatctgattcgatgtctcacatccaaccatacgcgtgaggagattctcagacattaaagacaggagcgaggacatgagaagctgatcttggacttcccaatccagataagcagggttatacttctcagattcacgatctgcatcagacagaaattttgcagggggattggaattgattatcgttgtaacctgttgccacgaatcgcagctaaaacatgttgtttccacaacaggaagttgtgatcatttaaacggattgaaagattgtgagtaaaatagacaggagagaactcatcgtgatctcgtgttcttccttgattgagagatggttgacgattggcaggttcagcagagccacctccattgtcgccgtcaccagagttggttcttgaaccattcagaccagctcctctagaaactacattcgccattaatggcggaaattgctctgataccatgttgaatctattagccataccagaaaacaaggaagaaagaagaaaagaaagaaaggcagagaaagacagagaaagagagattgaagattgaaaaagaaaaatctcattgatgaatgaatcaatacaagcttatatagacaatac

SEQ ID NO: 355353 - DNA, 619 bp, Cannabis indica
tttcaaggtactatctatatccatttcatgctctaagaaacctacttagagtcagaaaatttgcatttccagcaattagcataaagtttaaactcctaaaatattacaataccatccaaaatacctctcaaattccttctttgaattggaggaaatcagaatatccttaatgataacatttacaaagtcatcaagtacgaaaaattgctttggaaatacccttctcttaaatcttcaactggtaataaccagatcgaagaccgacctcagagaagatggtacttccctaaaattaatcatcactatttctattcttgacaaaagaatacttactcttcatcatgagtttatttaatttccaacgatcaatacacttttgtaaagtttcattctttctcttcataaataaaactgacgtactccaagaagggatacacagtccaacaatttcaagtccaacatccagcataactgaaccttcaaccatctcaaataccattcgatacgaagtttaagatataactctgcccaagtaccagatctatttcaaagtcaatctcccacttaatagtaactccagtaactcccctggaaagacattcagaaattctcataccac

SEQ ID NO: 355354 - DNA, 688 bp, Cannabis indica
tctaattctttgaactattttttcaatcaaagtttcacaattagggacagggagctttttagtacaaataggaattctgaaatatgtaaacaagagattgcttctaccaaaatccaaatgactcaatcacacaagtcacctctgcttaaaccatacaacaacaataaacgctttcattgttccttacttggttgtaaaccaaaagtttgagaaaatagattcagtccttgaagcattaagtacaactttatcagaagacgtcagtcccctctttatactttcttcttcttcaccgttgatttatttttccccattgtctcatccttacgcgacctccctcgacccgcgatagccccagtcgtaagctaaaaggccaaaagcctagcaaagcatcaaaaagggggaaagtattatgttataagttttagtcactcttaaaataatcataattaaattaatgatatccttttttatttttttactaaaaaaaatataataatgaattatagtttgtgtgtttcttaaataaactaatattttaatttgattaatcatttgcagatggaattcctgggattttacgactgttggaacggtacgaattcaaaaaaaaattatagtttaattaaaaataagaagaattcaaaaaaaaaattatattattttttataaaattggaaataataat

SEQ ID NO: 355355 - DNA, 1052 bp, Cannabis indica
ttagactaaggaaaggtcaaaattgaccttggacactgatattacttgttttgttggtgtaggtcaaagtggtaaaatcctacagtggtatcagagcctggtttggctaaggaggatcaacaatactcacaaggaaaataatcaggaaggaatcttggcaagaaatcttgaaagaaagattgacaatcaagaacacacttaaaccagaaaaaagatcaaagttctgaattaaattcagactcggaaacagaaacatcacaaactgagatttctaaactctatctgtttttcaaattttattaatatgagtaacataaaggttgatattgataaatttgatggtacaggggattacaaaaatctggagaaggaacattaggtctctcctagctcaacaaaaattgctaagggtgctagaagaacctattgaatggctagaaggaacctcaaagattcagcaggaagaataaggaggaaaccccattaaagatctggaaaaagctagaggagcagtttcaacaaaaatctttgacaaacaagatttatctcaaggaaaagatttttgggttcaagatgaaccaatccaaaaccttagatcaaaatcttgatgaattcttgagaatgcatattgagcttgcaaactcaggggaaaatgaggcacttagtgatgaaaaccaagccatcatcatacttaattcactaccagaaacttacagagaagtaaaaacaacaattaagtatggaagaacctctatcactcttgatgaggttatctctgccttaaaatcaaaggacttagagatgaagtctgaaagaaatggtggctctaatggtaaactaaacctaagtagaggcagacctactcaaagaaaaccttggcatggaaaagggaggagtcaaagtcacagcaggggtcccaacaaaggacaaaacaaaggaagacctaactctaaagggccacaagacacaaaaggatgctatagctgtgggaaacctggacacttcaagaaagactgtatttcttgaacaaaacagaaagaacaaatcaatgg

SEQ ID NO: 355356 - DNA, 1029 bp, Cannabis indica
ctatagcttggggatcagattgcggagatatgtcaagctgtctaaatcccacgatcagtgtattctgcatttactatgcaatctttctgcttatatccattgtgacaagaagggaaatacttccactccaagctcatagtcctataaatagtgatgcatgttcattggtcaaagggtcgaaagattttacttaagagatattatataagaattcatattcagagatattgttgtaagagttataagaaaaggaaccttttgttggaaatattttacaaggaactagatttattaacaagtatgtttcatttacattctaatatgaattctaaatttaaatgttactgtttggtttcttttttaggacaagattaaggtttgtgaatctcctaaatcaaagagggctcataagcctagtgtggttttacagagtccttacagaaatgattttgggtcttctggtagtaatgaaaagaagaagaaaaagaatgttaaaggtctatatccgtttaattctgggttgtttgatcctccgcacgaacttcaacaaaaggcatttgatgagtggttctgtgttgggttcaaggatgagaataagtatgttttattgtttttattatgttatttgggttaatttttaaatttttgcatatttgatattaagtatattggttggttgctttttttaggaagaagaagtttgttcaagggaagaatctttttagtcctgctttagatttctgcattgatagtgttcaggacaagtggtggttttatgatcttttgacccctgggaggtgccttagtgactcggtatagttagtattttttttcattttagttatgttgtttttagttatcttttatttactcagattctaatctcttttttctacagcatatggatgtaatattttactacttgcgaaagaagttgaagtatgatcctaatgttgcagtgtctgcaacaaccacagattatcatttctgttttaaggtggttgaattgtatgataagtttgtcaagtc

SEQ ID NO: 355357 - DNA, 571 bp, Cannabis indica
ttagctccatttcatgagaagcaaaattgccaattattggtttggccaaggcagcacgaacaacccctgcagaatcacgaacaactgccccaataccagtaattttgcgagtagcatcaaccgcggcatccacatttagtttcaagtcaccggcagcaggcggttgccatggaggagttgcttcaggtggtctcggttggtgatgaatgagaggatcagcaacatgatatttgttccttgctgctctgtagattgtcaagtagttgtcagcaaaagatgcgagaacaactgctggtttggccttggaaccatggacaatgcgatttctttccatccagatagaccaaagagtacaaatgataagttccatttcttgctgtgtatatacggttgatagatgcaccaagtaatcacctttttacatcgatgatgcccttttccagtcaaagaacaaattcatttttttccaaacagcattggcgtatctgcagctgaacaaggcgtggcctattgattcccaggcagatttacaaaccgagcatgttgaatccgtgataatctttcgtctgac

SEQ ID NO: 355358 - DNA, 569 bp, Cannabis indica
gctgctgtgtttggcagctggttcgttaatgtttgtcgggtgcagcttgtggatcgtattgagaggcttgctatgcttctttggagagtttggggagctcgtaatgatttggtctggaataataaggctttgtcggtagagagagtggtgaatgctacaattacttaccttgattcttggaaaaatgctcagttggaaagaagagttgtgtcgccaatttctggttcgaatacttccaggtgtgagcaatgggctaaaccttgttttggtgagattaaggttaattgtgatgctggtgtctttgaggatgacaatagtctgggtttggggtggatagcttgggatcataatggtttattcattgatgcactggcggttaaaacttatggtcaacccgacccgtttttggctgaagctatggcgttgaaggaggcgctcagttgggtgaagggaaggtgggttgaggggggtgtgtaacgccccgatttcccgagacgtcacactagctagtccgtttaaaactatttaagataaagacaataaagacttctttaatgaaaaataactaa

SEQ ID NO: 355359 - DNA, 608 bp, Cannabis indica
aaatattaaagaaattaacaaattttaaaatctaaccataatttaaaaaataaaataatctattttaaatttaaacctcaaaatatcaaaattaattataatctattgaaaaataaatattattaatttaaaaaatgatatttaatttcaaatatatttaaaaataatattttattttaaatttgggtttgaaaattggaaaaaaatcgaattttggggaaaaatcccacaaaaattgcaaaaaagtgtaggctacccagtaagctgcagacacagccatgagaggctgcaaaagagcctgatgcgcgcgcgagagagggagtgacgccgagaaatctcagcgcctgcagggtcatcctcggcggacatgcagggtcctgggcgaggcagtcttgtccgaagacgtgtgtgcgtgcacttcagacaaggaattgtctaggtcacgcgcgcggaagaacttccttctccgagatgctggtgcgtggagcacccaatcgacatcctttcaacccgatttttccaaaaattataactttctctttttatgggaatcgagttccgtaaaaaataaaattgcttaatttttcacaagaaatccaaataaaata

SEQ ID NO: 355360 - DNA, 804 bp, Cannabis indica
tcatactctagcctgtgccgatgtgatacgtcaaatagtatagaaccaccaaccctaatatcagcctatactcggtacactggtcatactccagctgctagtcatactctagcctgtaccgatgtgatacagtgtcagcctatactcggtacactggtcatactccagctgctagtcatactctagcctgtaccgatgtgacacagtcggatggttcgaagccaacatacatatctaatgtaatctaacatgcttcctacatgcacgctaaacccaaacccaaacccatatcaaaacccagacagagacctaaacctgaacggagactaggaatcgaacctgaacctagactgggacacaaacccacacaataatcgggacctggatccataatctggctagggacctgggaaacagaactaggatcgagacatagtacccgacccagacccaaattgaacctaggacccagctcgtgacccggggcctggaacagaccagtagtcggtgtctagatctggactcagactaggaccagaaccccgacgaagaaccaaaaccgaacccagacctagatctgggacccaaaattagaacctgaacaagaatcgctgaatcaagaccctagaacaacaccaggaccgtgactaggacccggacccagacatcgaaccgaacatagacctagcctcagacccaaactgagactagaactcgggcccggacaaggtcgtgtacccagaccggaactaagacccgtacctggacctaaattgggacccgatcccaaacacagacttggac

SEQ ID NO: 355361 - DNA, 943 bp, Cannabis indica
ctctctctctctctctatttcgttccacccttggagcagctgaggttcattttgttcttcaattattcaaggaaattcaacagggttttaagtgatcttaaccaaggtaaaggttcttagctcttctcttcatgttttctttaattgtaagaaaagaaattttgcatgaaattatgttttggctactgtagttgttgttggtgttgattattattttctgcagtttagatatgttagattatgttgttttaagcatgaattggtagttgtttgaaggtttagccaagttttgagttttagaactcaagcttgaagctttaatggtgaaaattgattctgagctttgattgttgtttggttgcttggaatatgtttattggggtataatatgcaggtctggaaagtttggttgagtttggaatcgatttggttaggggtttgaattttgttggttttctgggtaaaaccggctaaccgattttacactgcttgtaaaaccggttacccggattttgcagcagtgggtgaaaactggtttttcagcttgtcgtttcgtgtcagtttcaggtttctagttagttgattccatgctagattgggacattattatattaagttgcagtagatagggttttggttttaaaccttagtcccggttgtaatttagcaagtcacttatgtgtgttgatatcgatgtgatttaggagcctataattcgccgagcagttgttccactcagattgaccagcacccctgaatttagaattaaggtaagattagtataatatcatgcatatattattacatgtttagcgtacatgtgttattgcctgttagattacattgatagcaataatagtatacatagagttgtactgattattgataaatgtatgttggctagaatactgatcgatgctgtcacatcaatatggctagagta

SEQ ID NO: 355362 - DNA, 858 bp, Cannabis indica
ttttctaatccatataattcagtcctaagacctaattgaaacactataaaaggaacatgatgctctcactcatccactttatgccttcaaccaaatcaaacctagttttctctgtcaggcaactagtagatgagagagtcccttctaaagtgatttcacctcctttattattcttcctatttcggcctatagtgaaagagtgccatgcccaaacatagcaagtcaaatactcaatcatagttagtaggacggtggtaaccgaacccgaaggagagaaagagatccaggctcaaatcttgataatactctacgacagaaaggaacaagggttagagatctgagtagaaagagtcattatatttcgctccaaccaatgtaaggttttctaaactcttatgtgtttaatttcattgttttacagatattcatatttaggatgttaattaacatacttgttagtaaatctagatcctgataaaatattctcaacaggttcctctttgggagtttgtgaaggagcattggaagtctcaccaatatcaagatttggaaactcatctcccaaaccaacaacatcatcatcatctaaaattttccttgtaggcgggttagtctcatcaaaagcaacatgaatagattcttcaacagtattggttcttttgttatatatgctacaagtgttactatgtgttgaataccttgaaaattctaacattggatttggcatcaaattttccaaggttttccttggtgtttaaaatatagcatttgcatccaaaaaccctaaaatagccaatgttaggttttctccctttccaaagctcataaggagttttattcatgttgggcctaatgaaa

SEQ ID NO: 355363 - DNA, 524 bp, Cannabis indica
aattttaattaattggtaatctactttgattaatttttttacaatctttagattgatgaagatgatttcaacgaggagcgaaaatagttaacaataattaattttatagttgttattactatttttttacttaattttttatttttacaaaagaaaaaaaaaataaataacttgaatcaatcttggactgacacactaatttgactcttaaaagtgttaaaaaaatacaattaaacgtaaaattacctctaattaaaggtcattcatactattttttattaattaagattatgtgtataataactttaaattataaggagttttgttgcaatgattttaattatttaagttataaaaataattgctaaaaaaatctttacttattaacaaaatgtataaaattaattaataaatattaataatttaattttaaatataattaattttaattaagttattataaaggaaataaagtatatcaagttacaaattatttattatttatttttcttttaatttttaaa

SEQ ID NO: 355364 - DNA, 645 bp, Cannabis indica
aataagaagaattcatgaagcaaaatttatgtttgaggagcaaaaacatatggactagtttgtatgtcaatctgggcatagggcccaacacccatgtcaatctaggcactgaggccctattttgactctcaaaagatctcgtttgatctcgagagcacttatagtatgttattctgaaaacaaaaaagatgcgcgtaacatttttttggagagaacacttggaattgacccaggttgacaaaatgtcaacccaggcgctgggtcctagttttgcccactatattctttgtttgatttcaaaaaatactcgtatctcaattattagtgaaaatggagaatatgcccgaaagaattctcgggagaaatgtttaaaaatgacctagttgacaatatgtcaacttgagtgcttgatcctagcaccaggtcaacctaggcgttgggtcctagttgtgactcctagatggcttcctttattccccaaaagcacccatatcataattgttgatgaaaacagagaatatgcctaagagaattgatcttaatcgttgttggaaactgttgggttttatgccctaataaaactcatttcaatataatcatatttgcttattaatatagataaataacatttaatgttgcatggtt

SEQ ID NO: 355365 - DNA, 752 bp, Cannabis indica
aaaaaaaaatcaatttgagaggtagaatatttgtaagaagtcctgatgatattttattatatatttttttattttagtttgtgttgatatgtgatcaacttttaattagttttttttttttttgtcttttctatagtatgtaattggttgatttttagttgacttatttattttttggaagtttataataatatttttttttaatttgatttacaataataattttattattattattattattgacgtgttttgttagttaaatttgatgtatatgacgttttttagttttttttttttttttctacgtttttaaataattttttaattactaatagtgttgataagaaattaattagttacctttttataaaaaattttatttttatattatataatttgagatatattttgattacctctaaaatttatttgtataaatcttagagcattgtgaatagataagctaaatagctccttaggtaaaatttaaaaaatttagcaaaattgcacctccaataagttaaataagttaagtagtgagctaaaatagctcatatttattttttcaccacacgtacctcaataaatatttattctctttctctctcgttcttttaattattttttttattatttcattactctttttgtcttttttatgtgattaataaaatacatgtaagaatattaaaatttcgtattttaatattcctagtttaattatttaattaaatgattaattaaatgcg

SEQ ID NO: 355366 - DNA, 751 bp, Cannabis indica
gctcaaattgattctccaatttcaaggatgaagcttggctttgaattaaggcatcatttttcgccatgaactccatcatcaatgcctcaagtgagcttggttgaaccatttgatgaggctcttcttctatgttgaactcttgaaaatccttcaatttctcatcatttggtacttgagtgtaagtgtcaaaatttggctccaaattgttgtagttgtcctcccaaacatggtcattgtttggacaattacaacaccactcattgtactccgccatgtcttccaacatccaataggcttcatcaattgatagttggtagaaattggtggtaccatttcctctttctacccattttcgtgtgcttggattcaacccatttaggaagatttctaattgacactctttggacaacccatgatatggaaacctcattagaagtgccttgtatctccaccatgcttcatacaagaactccaagtcatgttgaacaaaattcataaggacttgtcgatgagacatcccaagtaccttgaaaaaggaaccaagacaaacaaacaaagcgtaaaatagaacaaggaaaataaaacgaaacaaatgaaaaactaaaaaaaaccaaattgatagtaattaagttccacaaacaaaatttcactaaatcaatccccggcaacggcgccaaaaacttgttgtgaaaattgtgtacgcaagtatacgcaatcgtaacaagtaataaagtgataaatcgagtatcgt

SEQ ID NO: 355367 - DNA, 1056 bp, Cannabis indica
atttgtggtcaagaggtaaacttccaccttgataaaaattagctttgactaatttttttcaagctcaaggcactactcttcaagagcttaagaaatttgggaacttggatctatatgagattaaatcaattggaggtgacattggggttcctactacctcggaggttaatgaacgaactactccgttcaagaagagaaagtttgatgaggccactgcatcgctttgttcacgtccttggacgcttcttcgtcctcatccctgggctatccgtgatttcccttgggatccggagggtcgcgctaatgatactaaggtgacggaagaggagccctcagaggaggtctccctttctaataacgattttactggcccggacgagtggaagactaaaggaaagaatgtgatctcatcaagaccaatggagggcacttttgtgattgaagattctggttcctttgggtcggctcactctcatacccctgtggaggagaatactactcctccacaggagccatgagaggtatcgcttggaactgtagagggttagggcagacctctacaattcatgagctgaagtccctgattcggtcgcgctctccggatttcatctttctgaccgagctaaaagttgatgctacttctttggtacgtattctaaaatcccttcatttttattttcatattattgttccggctgtgggtacagcgggaggtattattttagcttggaaatttggttttgagtttgaatgtattgagtgctccctcaatcacatctccggtttagtattttcggaccccctctcacacccttggctcctatcctgtgtttatggtccctcgtattttcatgcaaaaaaagcgttttgggagaatctaatgaaggtaggggataggttcggtggttcgtggcttattttgggggacactaactttgtccttagtagttctgaacgagagggatcaaaaggtagagaccagtttatccctgtaatctcaaatctggtgaatgcccgggggcttatttctcttcccatccagggagacaggttgac

SEQ ID NO: 355368 - DNA, 630 bp, Cannabis indica
tattggtgtcatccagtttggggatgtatcgatcatttcgacttcttctgtgcaagtgatgctaggctcttcgaggaaccggatagaaaccaagtttgccttgtcacttacattgctgcttgccaatcaagctaacgcgtctccagttgtattttcttctcttggaattggtctgagaccgtagcttttgaattgtgcaagcagatcatgtaattttctcagatatgctatcatcttttctccccgagcctcgtattctccggatacatgatttactaccagctgtgaataactacagatttcaatttgttcggccttcatctccttggctagtcttagcccagcgattagagcttcatactgggcttcgttgttagatgctttgaatccgaacttgactgcagcatgcagctgttgccccacaggcgtgacaagggaaattctgttgggttttatgccctaaataaaacgccatctcaatgtaatattattaaaaaattctcaatcttggttggttgtgggaacactttggcaaatttgaaattagaagaagcttgctggatatttttgtgcttatgatatcttcagccaaaattattttttcttcctttttccaaatatctaagccat

SEQ ID NO: 355369 - DNA, 620 bp, Cannabis indica
aaaaaaaaaattgacattcaataaaattaattcagtacaaaggaaatgtcattatcaagctgaatagcacaaggggaggaatcccaattgttgaggaaagtttaatatgcaagtgcacttgtagtttatatgggagcaatacttgaaatgacaatctataaaaaaacaccaatattcagagatgctaaaataaggtgagatccaaaaaaaactactgagtttagaacgttcatacgacaataccatcgaccataatgttagtctatactcaatatgctagtcatactctagccatattgatgtgacatcatcgattagtattttagctaacatacatttatcagtaatcagtacaactctatgtataatattactgctatcaatgtaatctaacaggcaataacacatgtacgctaaacatgtaataatatatgcatgatattatactaatcttacctcaatttcgaattcaggtgtgccggtcagcctgagtggaacaactgctcggtgaattatagactccctaaatgacatcgataaaaacgcgcataagtgacccactaatatcacaaccgggacttaggtttcaaaccaaaaacctatctacagcaacttaatat

SEQ ID NO: 355370 - DNA, 749 bp, Cannabis indica
cttgtaagagaagaaattctcttatggaaagttgtctaattttgggaaacttgactttccctttttctaattgatgatttcgattttgcctttattagaacaaatcaaattatctttatttggcaggtttgaagtccaaattcgtgatcttggttcaatttggaaagtttctttctggtcctgatctgctactgcgaaacccgattctgatgctgcaaatcaggaatttttttaagaaagttttgtacagctgggaaatcgtttttgtggctgtctctagggttgctatgttctataaataggacctagagagcagccaaacgatttcatctcttctagtctcatattttcatatctttctttgtgagaagagtgtttcatttgtaaaaacctagagtgttcaactaggttttggttttcttattatgatctcatactattcatagaataggttgaagagaagctttgaacaagcgtgggtcttcgggagaagacttttccaagtctcatttcgggaggaagtgagcatatatcttcgggagaagatttgtttaagccttacttcgggaggaagtaagcacacatcaatagctgaagggagttcaccacttggtgtgtttcaaagatcatattagaaaggtggattacaaagcattgcgacaaatcactagagggattctaaatttgtttaagtcaattgcttttgtaatctttgatactttactaattgatttcattctctgggcgtg

SEQ ID NO: 355371 - DNA, 785 bp, Cannabis indica
atatttcaactctatatataatcacaactataactctaaaaattaaaaatatatatatatataaaataatcgtccattttatttatattatttagaataattcattgtggttcaagatcacaatgaacagaaaaagtggcaaaaacacaaatgtagttcaaaatcatagtaaactaagaaagaatgagaagagattattaagcattaaatattctcagtaaacacactcaaagaatcgcattgagagaggaaaaaaaaaaagaataccaattgtgatatatataaataaataaaagcgaagaatattatataattatttatattctatataaagtatgcctatataacagaattcttagtttatgagaaattgactttttatttatattaaaaataaaatgatttattaataaaaataaaatggtttattaattttgaaaatgcaattttaaaactaccaaccaatcaaaaattttcgtgtggactcatcttttaaattttcagaaacataaaacttttttgaattttaaactaatcaagcctttgtatatatgtacagtttgataatagatatatatggggtggatttttaaataaatttaattttgtaggtgaaaaaaatgacaaaattggttgtaaatcacaaagagataattgaggttgaaaggatgagtagggaaccgaatatagtttatgatcgtagatgtatatttatattaaaaataaaatgatttattaataaaaataaaatggtttatgagaaattcatggtttaaaatatttaa

SEQ ID NO: 355372 - DNA, 819 bp, Cannabis indica
acccgctctgggtaagttgtagcttaaatttataactccctttgggtgaaatttggagccagtaacttcaaaattgtgattgaattgtgtgacatgacttgtataaatcatttaaatatcttcaaaatgcaagttgaatcactttaatcagatcaatattgagtgagttatgaccattttactgaaggctatcctaggtccaacgcccaggttaacatgtgatgtcaacctggatgctgggtaagtgggtaaacgtgtcaatgatatattttttgatgcctaagtatttttcgacatcacttagtccatttctgtgttctggcaaaagtggtcaccagttctcggagatgttgatgttctgcagaaaagggagactagaaactacctggtttctgatccttgtcagaaatgtgaaaatatgaagttatgaagttgactgttctaacttcatgactcttagttattgtaaaacactagatgaatggtctagacaaaataagattcggataagcagaacccagcgcacaaggctatttgtcaacctaggcgttgggtgcttatttcggaacttttggggtgtcgttttgatacttctaaagaattataacttatggacgaggtctcttaccccatttttaaccatttcggagagaatactcagagcaaaattatcattttagtgatcgaaaccagcgtaccaggttgattgtcaacttgggctctaggcctaacaccaggtcaacttgggtgttgggctcaatttctagcccttaggtttagggttttcttcccaagtttgcttgtatcttcattatttct

SEQ ID NO: 355373 - DNA, 873 bp, Cannabis indica
tcaaaatctgtcatatcattcaatatcatggattctaacaaaggctctccagttacctctgatccataatcaacccagcttcttgtttcatcattaagtctgttataaaagaacaaagtgaaacacccacttgagaaattgagataacatctctctccgagctccttaaatcttcatcaagcagaatagaatgactcattgtgttgttggacaaaattcacaaggtacaacatcgagatttactttgcaggtcaaacacattcagtaaaacattagtaaaattaaataaaaagaaaccaaattacaatagaattcaactatattgatattaactaaaacagtctctgacaacggcgccaaaaatttattgtgataaatttaacatccaagtatacgtatcattttaacaagtaatactcacgtaagtgagttgtttctatgaggactgtagctaagtaccaatcaattgaattgttgtttctatttggcaatcgaataaatggattttgaaactaaataaactaagaaaaaaaattaaataaaacaaacaaataaaaagtagtttaacaatagatgtatagttttaattgctttgattacccaattattaatactaattaactattcttcttcctcctatatgatgacagatgataattaacctaaactctttttagatcataagattcttaaattgcatgtcaactactgcatctctgagatagtacaataaacaattcgcattaagcaataatctaaaggtcccacaagctatgtgaatactctcgtttcacttcaaaatctatgtttgtttatttaaagtattctcaatactcacttttcagattttgtattgagatcatagatcatgca

SEQ ID NO: 355374 - DNA, 889 bp, Cannabis indica
aattctataaatgtagaatatgagtagtgaattttaaagaaaatttaaaatataaaaagagtttaaattttaatgtatctgatgtaaggtatttttagttaaaatcactaatgtgattttctattttaaaaacactaatgtgagtgctttggctagttatttgttcgattaattgtattttattaaaatgaaataataaaatatatcttgatttcattatagttttcatgtaccttctatacaaaacaaaagctcctaaagatcactcccaataattattgtcattttctgcaatattcttcatattgtattgtcatttctttgcattgcattgcacccacaataattattattttttacttcatttaaatattatatatttttaatcatttcttgggagatgatacattattttttttttgttttgttttttttttctgagataagatgatacattatttgaaaagacaaagatttggagaataaataaaagaatatttattcttcacattatattgtcatttctttgcatagcactgcacccacaataattattattattttttacttcatttaaatattatatattttaatcatttgatataaaataatgtggaaaagaggttaaaatgggagatgatacattatttgaaaagatagaggttagaatgggagatgatacattattttttcttaaaatttttatactatttgatcatgccccttaaatatacggcttgtaaaaaaatttaaatataacaattacataatatgtcccgtctgttaagtttgtttcttctaccattaaaaactaatatttttatcccctgaacattgaccacaaaattctatctcttttattaaaaaattaactttaaaaaatcatgat

SEQ ID NO: 355375 - DNA, 641 bp, Cannabis indica
aattgtcataattctgtcgtcaatgatcttgttatgtgtattaggaactcgttgttgttcagtcctaatctggttgtaacccatgttccccgtgagctcaataaaactgctcatgtgtgtgctagggtggggttaggattagacaatgagtgtatttggaatggtgctttaccttcctttgtaacctgatactttgttttgtttttaataaaagttcaggtttttctcaaaaaaaaaaaaaacaaaataggagaagaatgaaaaagaaatagtgtattaatttgaataagaaacgtttgacatattaatattttaaaaaatatataaagtgactattaatctgcttaggaagaagtttatatattaattttaaagtgattattaatttattattattttttaaaatatacaaatactgtaatgtttctaattgattgataaaaaaaagcaacaactttactatggaaattgaaataatcaatattaatagtgtaaaaaaaatctatagcattattacttggagagagaataaaattctgcttaaaaagagaacattaatggtgcaaataaaattttattcacacttcactttggaacttttcacttattcacactttaactactttttttcgggacacttt

SEQ ID NO: 355376 - DNA, 1056 bp, Cannabis indica
aatgcgaggaggcttttcaagcattaaaaacacatttgggtcagcccccaatcctatcaaagcccatgaccggcgaggtcttatccatttacctagcagtattagaatatgcgattagttcggtactaatttgcgaagaccaaggataacaataaccgatatactatgtcagtaaacgctgtttggatgctgagaccttataaatggaaaaattagcgttcgccttgataatatcgtcaagaaagttgcgaccttactttcaggctcatagtattgaagttttaaccaactaccctttaaggaaactcttggcaaaaccagagacataggggagattgttgaaatggtcagtagagttaagccaattcgaccaggtataaaccgagaactgcgatcaagggacaggccttggcagattttattctccagttcccaagcaccgaagtggcactcataaacaacaagatcgacactgctgtaccaaatggagaaggatggatattgtacattgatggggcttcgaatagcgagggttccagcggcggaatcttactaatcagtcccaacaatttttaaggtacacgctgctttacgttttgaattttctgcatctaacaacgaagtcgaatatgaggctttaatcgcaggattgaaactcgctcttgagatgagaatcgagtatttacaggctttcagcgattcccaaatcgtcgtatgccaggtgaatggagaatatctggccagaggcgggagattggttaagtatctagccatagtatgcaaactgatgcataaattcaagaaagtagtcctgtcccgagtaccgcgtgctcataactcacatgcagacgcattggcccgtttggcctcaactagggaagctgaattactcgatgtaattcctgttgatgtattggctcacccaacgataaatcaggaagcgataatggaaatagatacggcccaagaagtcacctggatgaccccgataatcgcatatctagagaagggtatcttacctggtgacaagatggaagcaaggaagctgcggcagcg

SEQ ID NO: 355377 - DNA, 851 bp, Cannabis indica
attgaactgctgcagcctttcctagttttgagacgattttgtacagccaaccaaagaataaaactatgctttggtgtgttgaatctccccccaaacctcattactccatgcaactcggtactgtgcaggacaaatcaagttatagccacctgaaattttgtatttctcacgagcaaattgttgtacatctgtaaggcatttgatttggttcttgcctgcaactatttacttccaataccaacttgcttggcttggtgcttgatactcctaccaattctcttcttcagtgtacactgcatgcacccatttgacccagataatatttttattatatatattataaataattatcttgtatattaagttatatatgataaataactatattatcatgataattaataaaaaaatcaaattattttactaattttctttaattattgatcaagtttatacttaaattataatgtatgcctgtaaataatttctattcattaatacaaacataattattaaagtaatttgttatgtgactattatctaatatataattattcataaaaagtgattaaaacaatatattattatacttatataagggattagaatattttaataattttttttgttaattataatgtttatagataaattataatgtatgcatagtatttcataacaatgattatttatatttatttgttgtataattattaactaatatatgattaaaaattaaaaatatcactcacaaaagttcttacttgtaaaagtataatagttaccaaaataatttaatttgtattaaattataaaagattttaatggaagaaaaaagataagagtaaagt

SEQ ID NO: 355378 - DNA, 783 bp, Cannabis indica
tcagatggagcgttatgttttcatgcacagaaacgacaggatttacattatcaacctcagaaagatgtggaaagagctccagcttgctgccagggttattgttgctattgtaccaagcgagatagcccggcaggatatactttgcagcataccttattccacgtcagcgttgactcttttaaaagcggcttaattcacagctgtatgttttcaaataataaccgtatttattacgtggagcatgattatagtccacaattttaggaaaatatattgtgagactcgaatttgaatgtaattaactgccaacctatgttattataaataggggcagaatgtacgaaaaaaaaaatccttgagaaaaaaaaagactcctagttctgtattagaaaaatctgaataagattgactcgtggactatgcagagttaactgcaaaaacacgtaaaaaaaacttggtgttattgttgcttcttttattttctatactttttgtgttaaatttatcacgaaattaggttcattatcgctaacaaaaatttgcgttaacagtttggtactttcattgagagcctacgtgaaaaaagctaagattaaatcccttgtaatcacttaaaaatgaattatgacaaatatacccctggtaatcatttaaaaagtaccttttattaaaaagggacattttaaggggtagttgttatacccaaaatttggctggtacttcagaagatgacattgttgggttttgtgccctaaataaaacgcatttcaatataatcagatt

SEQ ID NO: 355379 - DNA, 524 bp, Cannabis indica
ggccattactttggggatggtatggtaaaggtgttcgatgtcggacaccatatcttgaaaggagtgcttcaaactgtttattgtagaagtgactcccttcatcgcttactattgctcgaggagtaccaaaccgagtaaaaatgttcttttgtagaaagcagagaactttcttaccatcattttatggtgtagctgcagcttcaacccatttagacacatagtcgacagccaatagaatatactgattgctaaaggatgaaggaaaagggcccatgaagtctatcccccacacatcaaacaattccacttctaatatccctgttaaaggaatctcatttcttcttgagatattacctgtccgttgacaacgatcacatgccttcacaaaggtagtagcatccttgaatagcgctggccaaaagaatccactttgcaacaccttagcagccgttctggttccactgaaatttcctccacatggtaaagcatggcaatgatttaggatagaatacatctcctcttca

SEQ ID NO: 355380 - DNA, 617 bp, Cannabis indica
aatagttcataattaacgctataaatatactaataaaataaaaaagtggcacacaaaaataaataataaaagttgtgcatttatcatgaagtaaattgtgtgttataataaatatttgtcaaattttgctcaatattcactatgtgccaaatttgcatcaacttttggcacactattagaggacaatttgtgctatgtgagctatattttaactttgagtaaataccattttggaccttgtgttttgcaaaagttacagattggaccctgtatttcgttaaataataaaatgaaccctgtattttctaaaattgtaaaaataagacctcgagcttaattttcgacacctttttttttaatataaccaacttgaagacaattctttacatgaacagatatagaaaatgtaaatagttttgtcataaacatatttagattggattattattaaattttaggctaattagtaatttttctccctgaactttgacatgtaccaaattgtgccccctgaacttttttggccgttaaaaattctctccgaactattgagattgttaaatttaaggacttttgcctaatttcattcaattttactgtttcagtgattgtttatg

SEQ ID NO: 355381 - DNA, 810 bp, Cannabis indica
gttttagttcattatggtatatacaggtattctggaaggttttggaaagtttgggattgaattgaggtgtgggggtcggtttttgggttcccagcacagaaccggtcgaccggttttgcgggacctgtagcaaccggtcgaccggttggtacctaggaaccgggcttctggttgggaaccggtctgtcggttggggctttttcccgaacactagttttctcgtttttaagttgtttgggatattagcatcccattcatcgatagggttatccttagtttcaattttaaatccccgatagatgttttagagtgtctctctccgagttttgaatattgtggtttagggccctgtaaagcgtcgagctgcacttccactcaggctgaccggcacacctgagcacggagcgaggtaagatagcatgaatattacatatatatgaatgaatgcttgttttggatgtttgcactactaacactaatatgtatgtgatttaaagggtgttagtaaagtgtaggatatcactatggttacggtgttaccaacacgagtacccaggggtacgtcgtgtatgtggtacaacacttagtaattcttgggagtacaatagtggctctaccaacacgagtacagggttggtactttagtgcatttggtacagtggtcgtacttcctttaagaacgttcttaaccatttggtgagctcgttgttgagctcagggcggcttaagcataaagccagattagcattgattttatatattttttgcatatcttactgagtctgttgactcatcagtttactaccttgt

SEQ ID NO: 355382 - DNA, 627 bp, Cannabis indica
ccacaatccggtcttgttgtccatacctccaaaaaacgaaacggatacttgagtttagcttgatccccccaaacattctaaacaatgggagcgtgatccgatccaaggatagggaagcttgaaacacgagccctcaagaaatccatgcaccaatttgcatccgttatggcacgatccagcctcttgcgaactctattacaagccacccgagagttttgccaagtaaaactccccccgtcacacctgagatccaccctcccgtttcaaacaaaagttatcgagcaattccccttcattcctactgtagcgcctaccaccagccttctcagagtcatttaagataacatttaggtctcccatcacaacccagggagaatggcaatccgccaccttctccgtcagccattgcaatgttcttctgtgcctgatatggggtgccataaatacagaagagactccaaggattttccaagttaacttcaattttgaatccagcttcaaaggtttcaacaacatgtcattgaacgcccaaattccaagcaacacaaaaccctcttgtgatccccaaagatgggatacaacaaacatttgcaaagcccagtcgattactaatctcagtcatcctat

SEQ ID NO: 355383 - DNA, 527 bp, Cannabis indica
gagaagtatgtcgcaccagttattcagccaggggtccctgctcaaaatctcactcaaagagatcctgatgtgaccctgatcagccaagaggctgaataagttaatccattcgtgcaggcatagttaatgaactaaaaaatatgttccaaggcctggccggttagaagaataatgacctcgagttggaccgagcacgtggatcccctttcttcccagagatcaatatcctagagttgtctcacaagttcaagatgctgacctggaagatgtatactgggaaggaagatcccttatcacatcttaagtattttgaagtgcaaatggacttacaaggagtacgaggagatgtatgttgcagagttttcccagccacacactcagaagccgctcagcaatggtatttcaagttgacccccggaaggttcaactcttggaaagctttctcctcgaaattccatgcacaattctcttcttctcgccagctcccattgcatttagaagacctggtcgaagtgaagcaaaggcca

SEQ ID NO: 355384 - DNA, 505 bp, Cannabis indica
ctcttgaaatttgatttcatgccatatgcaatacacatatgcatgtaatacaatcaatttcttcaagaaattttttacaacaaagccattaatctaaatttatgacgcctgccaattatcatactgttttatcaaaattaaaattttggaaataattttgacagcataatatttttttttatttaaaatttctatctttctctttaaccatgcatcccatattgacttattttctgaagtctagggaatcaaagagaaacataaaaattctatgataatttgacagcataacctttctctcttttttaaaatttctatctttctctttgattatgcaaccccacatcgacttattttctgaagtcgagggaatcaaagagaaacataaaaatttatgaagaattgggcagcataacagcatggagacattaaattctcttatttttcctttggctatatctcactcttgaagatcttttgtggcttagaaagcctagatcaaagt

SEQ ID NO: 355385 - DNA, 644 bp, Cannabis indica
atatcacagtcgtcgtcttcatcagtggtcgatagcagttggggcggcgggaagacaaggtaacgccccttgttcacagttcatccattcaagtttcaatatacttttaattattatttatgttttcgtcgaaataccaaacttaaaactttgatttttagaaaattataaaaagaccacgaaatttaaaaagggaaaaaaaaaaaatattaggactgttcaacaaaatttacaaatcgtccaacccgaataaactatccaaatcaaattgaataaactgacaaaaaacacaactcgaataactttacgaaaaattcaaaccgtccaataaatatattggagaggttgaatattattctaacccgcccgaataacccgaatataccgaatgaaccgatttatatattttttactaaaattgtctataatataatatataaattgcgtttaatagttaaactacatttaaaatttgtattttatagtgttcaatttgaaatttaaaatttatagttgataattttgactagggttgttcatcaaactacttaaaccgctcaaaccgcccgcaccgcaccgtactgtcaaaaaaatacggtttgaaattctttgcggtgcagtttcggtttgaatttttcctaaac

SEQ ID NO: 355386 - DNA, 626 bp, Cannabis indica
aatctagcactaccatcaaaactgatgcatgtgcttaaatttcttaaaacctccctataataacaaccaagttaagaatgaggtctttataaacatcaagcatactaactatataggaaaacaatcaaaaaatgataaaagaaaaataatcaacttagtatagatctcaaagggatatatgtgtctccctttggcaacacaaactctattaaagaacctctcaaaatgtgatgtgggactatagtagacaactttagacttgtcaactattagagtaatttttttaaagagaattgctaaaaagtactactggtgcctatgacccttctcggtgttatactgcttagggatgtcaattatacctgcgggttcaggtacccgcgggtacccgctcctaatggggtgggtacggggtagactttcggggacgggagcgggtatgggtttaaagattcatacccgagttggaaacggagcgggggcgggggaatggatacccgccccgatataatatatgtatatatttaaattttaaaatcataattactacaattaaaataacttcatgctttaggctttttattgattatacattttttttttactatatacactattccacttaa

SEQ ID NO: 355387 - DNA, 1286 bp, Cannabis indica
tggttgtatccttggccctgtctcttcacatactgtttaaaatggcctcgagcgatgagactttctatctcatctttcaattggtgacattcattagtcgtatgcccaatatctttttggaatttacaatatttgttaggatctcttttgctcctcgaattcctgataggctcgggcttgccgaaggctaccttctgctcatgtgcgaggtaaatattttctcgagtttcattaagctcggtgtaaatagtatacactgactcgtaattcgtcatgcttcttttgtttctttctatctttcgacgattccctaattctttcttttcttttcggaccgttgcccccgagttatcaattctcgtggaagcagtccatgttgaaacattgctgagtttacctcatgagcttgttttcaacaagttcatttccttttaggcttcttcctttcggacaaacacctgagccctctcgttgaactcagtgatggttcttaccggaggtccttgtaaatcatcccataactcgcccccggcgcttaatggatcagtggagatcctcgcctgaagggctgtaagttgcgtgctgtcatccaaatttctaaccctagtggcagccgtgctaaaatgacttaagtacgccttaagtgtttctccaagctgctgctttatattggttagcgaggtcgcttcgggttgcctatccctagcgacctgaatatgcttcttgaaatccctggacagctgttcctaggaagttattgaaagatgagtaaacttgttaaactagctactcgcttctccaacaagcgaggtgggaaacaaaatacagcgtaaattgtttatcacgttactcgctcgcattatcgtgttaaagttattcaaatgccagaccggatatgtggttccgtcataggcgagacatggggtttttgaatcctgaaggaaaaggggtattcataatatctgggtgatacggctcaagctcctcatcagattcgtattcaaataatttccctaattcccccacttgatatctccagaacttgtcctccagctcgtttatccacaattggattggatcctcttgctttggaccaagatgttggtgaaggtcaggtttcctctgattcaagtgctctcgcagagttggttgggagtaattgctggaagacatcgtcttactcatagaccacgtcctactcatagaccgcgtcctactcatagactttgtttttaaaaggctcgtagatttactagttcccatactttctcgatcattagctcgtt

SEQ ID NO: 355388 - DNA, 487 bp, Cannabis indica
ttttacttaaggtttttttttttttgattattttttttatgcatcatttttttttttcaaaaatatatatgtaatgggtacccgatggggatccttcccccgtcgggtaatacccgccccgcccccgctttaatttaaacgggtactgggacgggtatggggtgaatttaagaagcgggtatgggggtgggagagcaatccccgcacccgccccgctttgtttacatccctaatactgctattggtataattaaatataaggtctcaaataacttaaaaaaataatttttaggaatatcgctaactaatcataagacaccatttataaaaagtgtttggcactactgttgtatagtaacaatatttttcttttgtaaaagaagatgacaaattttatgtggatgagataaaataaaaaaaaaataatattttagaatagggtaaataccattttggaccctgtgttttgcaaaaattacagattgga

SEQ ID NO: 355389 - DNA, 1084 bp, Cannabis indica
tgctacaacaaaagaaaaaaggcaagtgttagaacatccatggaaaacaataaacactcagatatagcaatcaagctagtcctaccctgactctctaattcggccctagcaaagttctgaatcttaacgctagcagcatcgtctccgagatagatgtctgaaggccgcaaccagttggaagaaatgtaagccgaagggtctaagggaatgggctccggaggaccaaaacccatccgggaccgacctaggaaatctcctaagttggaaaaataatattccttcatatggtctccccaccgagtcgagggcatcctaaacctatggagacgctcatcgaaccctacaggcctaagattggcatattcgccaacggaaggaatgtaatgtactgctaaaggagacttacccgagccagaagtgctggcgccaggagccccagtgtttggcacttgagccgaaggctttggcctgggagcccttctttcagctgagtctccaatgggaaagggcttcccagcaatcgcctggcttctcctctcgatcgggctccccacgcgaaggggcctcccggaagctgcctgggccttggaataagccttctcctgggccttccgatagagatattcctggtacttcttctcggtggtggcgatgatttcgtcccggaaggtcttctccgcggcaggcaccctcacgttcggacaaataaccttagaaaggttagagtcctccactgattggtgcggcaggatgagcttggccttccggcaattctccgtcgtgaccaggcccccgacgtcaagttccgcccggtcgtaagttgcaaagacctgggccctccggagaaagacctgagtaggcgcggtccgctcataggggggatcctgacccactctgtgagaagctccgggtgctccactgctcggaacccagaggagaagaaaaagcggtggcgatactccttaacatgagtttgcctattataagggaccaccccatcattggaagggtgggcccggaatccataaaaaccatctttaaatttgtcccccttcttggggacagaaacgagttcataaaaata

SEQ ID NO: 355390 - DNA, 1100 bp, Cannabis indica
cctaagtttttcaatgagttgaaacattgtactttttttgtttttgaaaaaaaataagttaagaaaataaggaaatttaataaatgggtagttggtcctatgtaaatccattgggcttatattaatgggtctataccgacatcttttaatgaattcaaccattcttgtactttacaaaaatatcacagtactattaacaaaaccccctacgtgtacacgtgtattaaatttggaattcatagtttttatcacccatttttttttacacatcaaatgtggccaatggagtacaactaagttaaaaacgtactttaacttatccttgggacattatataacacacttgagaggtgttgcaatccatcattaattttatttagcaaaataacttgtaatttaacaaaatatgagttatggtcctcactgggttgttttcaatggcccgaatgaaggtatttatagtagttatgaagatgctacgaagaaaaaccctaattcagattccacaaatcaaaatatgtcgatatgattctttcatagaagccttttctgctgcatgtctacatggacagacgggacaatgcttcactgggcaacaagttagagaactttgttgtgttaatgatttcccatgcatgtgggattcagatgatgatgaagatgaggaagcaatacttaattgtgttcgctcattgtttgatgagggtgagagctctggtgttaaaaaatcacccgaagaagagaacgtcaaagatttcagtgagaaaggcaaggagccaaatggagatgacattgaagggggagacaaaggaggaatggatccttctcccaaaaacagtaactgatgtactctgttggtttccattttatgtatttgttcatggttttatgtattgtacgtgtttgtggtaaaatcttgaatttggtttattttgaagtagtaaagtcactttccttattaattaattttggaagcaaaacttaagtaaataatttcgacataacaactaagttgaaaatgaaaatagacttcttatattaaactgctataataacatttacattgacctaataataaattcaaaatagagcaaagttgt

SEQ ID NO: 355391 - DNA, 839 bp, Cannabis indica
gcattgtagatttttaagtaattaatgttagaatttataaaacactccaaaaatacaaataattacatatctaattatattttaaacagtgtattaatattgaaaactttaaatcatattttatagaatctttgctaaatcaaagaagaaaatgatgataaaaaagatgagcggaagtactaactaaaagtcattattggagattgcacagaaggttataattttccaagaatacaccatttctctaaagttatctgataggaatgagagaatacaagaatccttgtgtttcttggggaacactacctatttatagacacatcttagaatgagtttttggtatttataatttgagccctcaacaaattataaattaacttatggtatctacacattatttccatcacaatttaatacctttttgatacacataacataattggtcacttaaatttgtatcactctttataatagcatatacattatacatatgttttatttgagcatggttacaagaagaaaatatgctaatataattcaatttttatgttttatttcttctttagaaccaaaatctataaaagaagcgctaatggatgaagattggtttcttgctatgcaggatgagctacatcagtttgttcgaaacaaagtctggaaaatgattccaagaccaccgtttgtgaacatcattggaaccaagtggatcttcaaaaataagagtgatgagtttggcactatcattcgaaacaaggaaaggttggttgcccaaggatacactcaagttgagggtattgattttgatgaaacatttgctccagtagctagactggaatcga

SEQ ID NO: 355392 - DNA, 684 bp, Cannabis indica
atcattaaataatcacataaaccacatgaacacagtcaaatcaacatacaaacaatattcaacgttttaaatccatatttcatgaaagttaaatcattaccatggctcttaggctagttgttgggaatattttacgaggatctagatttactaacaagtatgttgatttacatcttaaatatgaattctctaaaataatgaaataaacacataagggtttaagaaaaccttacattcattgcagcagaatataaggactcctttcgttcaagatctctagcccttgattcctttctgtcgcaaagcatcatcaagatctgaacttgaatctatttcgctctttcgggcttggttaccaccgtcttactcactatgattgagtacttgacttgctatgtgtgggcacgttactcactcactatgggttcgaattaggaagaacaatgaaggaggtgaaatctctaaaaaaggaactctctcatctaggtttggatgaatagtcaagttgataaaagttaagcggatgaaatgagagcatcatgttccttttatagtgtttcaacaagggcttatggttgaattatatggattaaaaaagaataaaatattgggcaaaaatccacacttggccgtatacttatgtaatgactgctttagtaatttagattagtaaaggcaattagc

SEQ ID NO: 355393 - DNA, 541 bp, Cannabis indica
atgattatataatttgttggaagtgggtttctctgtagtgaatagaaacatttttttcttgtatcatttccaacaaggttgacaaactaggtggatacgtaaatatattctttttggtgcctagtatcctctttggtgtcatatagtgtaattaagtatcaggtctcatatagcttaagataataaattttaggttatatgacttattataagacgctacctataaaaggtattgtacaccactagtactttgctcttaaataaggaggtgcacatattttctctctcttcactactacaaaaatgggttatcccaacgtttttaaatagtcgtttaaagtattcctgtcagtttctataaccgccgcctatacgaccgtcgtaaaatgggcataataagcgacggttcaaaatcgtcgctaatgtgggtttcccaacggtttaaaaccgtcgcctataactgggtataggcgacggtttataaccgtgccttataaaaaaacaaagaaaaaaaatacaataatggcagaaaaatctatat

SEQ ID NO: 355394 - DNA, 984 bp, Cannabis indica
taaatctgagcctcggtattatgatggttatcaggtgcgactactttgtttaggatgtaatttttctatgattggcattgagagctaggggtctagtggacagtgtgatatgcatttgacacttgattttgtgattctttgtggtctctctattttgtttctatattttgataatggtgatgagatattttattttaaaagctaaccatgcaggaatttgtattaaagcaatgggtcctttgatattagttattttcctactgggctttataagctcatcccctattttctcccattccaaaaactcagtttgatgctagtggatgaaaatggtaccgttgaggaagaaaattattatttgtttagtcttattctacttattaaactgctaatgaaactgctttttttttgtatttaagttggaattgatggtctggataatttaaattagctatgtaccagttagaaataaggaacgaatggatgctagatattattttggtattttattaatttattaaatctatctatatggtgattatataactgtggaaatattattgttcttttatattaatgagtgatcttgattttattactaatatttttttaatgatataagagttaattcattattttaagataagtattttgtgatataaattaaatgatcatttaataattttatctccatataagggtccaaatgtgacatttgactacctaaattataaatattacattttattccactattgcaatccactatcctctctcttcttcttactcttacctctcacaacacttcaaccttcatatttcttcatcattgttcgtgatcgcatccccagtacttgcttctccatcgttctgatcctccaacaaactatcacggtaaatatctctctttgtttttctttttttctttttcgtagtctgaattcattccattttatatagccgtatttcaatattatgtgaatt

SEQ ID NO: 355395 - DNA, 780 bp, Cannabis indica
cagtcttacatttacctaatttatcctttaattttctttctgttagtcaactcactcgtaatttgaattgttgtatctctttctttcccggtcattatttatttcaggatcttatgacgaaaaagattattggtagagaatatgaatttggaggcttgtatgctcttgatcctctttccacaacccctattgcttgtccaagtgtcgcttctgcttttgaggctcattgtcatttgggctatccatcaattcatatgctcaagatgctttgtcctcaatatagtaagatgtcttcattagattgtgactcatgtaaatttttcaaacatcaccatgttagtttgagtcatcaagtcaataaatgtggtagtgttccttttgagttagttcattatgatgtatggggtccttctcttattttgtctaaatctggatacaggtatttattagttttgtggatgattattcttgtgtaacttggtcatatttaatgaaaaatcgttctgagttattttctatattttgtgcttttggtgttgagattcaaaatcaatttaatgtgtttattcatactttgcgaagtgataatgccaaggaatacacatctgctctatttcaatcttctatggtctctaatggcatgcttcgtgaaacttcttgcgttgatacttcaccccaaaattgcgtagtataacacaaaaataaatatcttcttgaaactgcacatgccctcttttttcgaatgaaagctcctaaacctttttgggccgatgcagtttc

SEQ ID NO: 355396 - DNA, 1292 bp, Cannabis indica
tatgaccaagaaggatgcaaagccaagattgattcgatcaggagttcgacatagaaataaaggacaagaagggcactgaaaatcaggtagcagatcatctgtcaagactagagttggaagagagccagaatgcaaaagaggtacagataaatgaggaatttcctgatgaacaactctttagtgtgagggaaaatctaatggtaccgtggtatgctgattatgtcaacttcttggctgcaaaaataactcctcctgagctttctcgtcaataattaaagaagttcttttctgaagtgaaacattattattgggaagaaccaatcctctacaagcactgtgctgatcagataattagaagatgtgtgcctgaagaggagatgtactctattctcaatcacttccatgctttaccatgtgggggacatttcagtgggacaagaactgctgccaaggtgttgcagagcggattcttttggccaacacttttcaaagatgctagtactttgtgaaggcatgtgatggttgtcagcataccggtaatatctcaaggaggaacgaaatgcctgacaggaatcttggaagtggaattgtttgatgtgtgggggatagacttcatgggtccttttccttcatcttttagcaatctatacatcttattagctgtggactgtgtcaaaatgggttgaagctgcagcaacaccagccaatgacggtaaaacagttcttcggttccttcaaaagaacatattcactcggtttggtactccccgagcaatcataagcgatgaagggagtcacttctgcaacaaacagtttgaagcactcctttcgagatatggtgttcgtcatagaactgctctaccgtatcatccgcaaagtaatggccaagctgaaatttctaaccgggaaataaagatgattctggagaaaacagtgcagagatcaaggaaagactggtcaagaaagttagatgatgcactgtgggcctatagaacagcattcaagacgccaatcgggatgtcaccatatcggttggtgtttggaaaggcttgtcatctaccggtggaattagaacacaaggcgtattgggctatgaagactctcaacatggatttaaaggctgcaggagagaaaagattactgcaattggatgaattggaggagtttcggaatgaggcttacgagaacgccaagatctacaaggagagaaccaaaaagtggcatgaccgaagcttagtcaggaaggaatttcaacctgggcaacaagttttactttttaattcaaggttgaa

SEQ ID NO: 355397 - DNA, 1498 bp, Cannabis indica
tgtctattttgtcatttaataaaacacagggtccaatctgtaacttttgcaaaacacaaggtctaaaatagtatttaccctaataataataataataatatttaatacctcaaacatcttaaatagtgacatttttgaaaggtgtcatcaaaaatgtctaattctacctacttttggacagtttttattttaaattatttcgatggtaaatagtatttagaaaaattattaaaataatattatattattatttaatatatattaaataattatttcgttgaagatgcttttaagttgtttaatactattgatgtggcatcttataattacgagcattgctattaggtaccagtggtatttagtactttttcaacatatcgagttacaattagccagcgatattcactaaaaactattatattaaattatatgggactcgatatttagttggaccaatagcgatattgacacataggagagtgctaagcaccactagtgccctttaacatttctctataattacttaataattttttactatcattcattaaaagaatattatggggcaccgatgtccctagcataactatagagtgatattctataattgattaacagttttctataattattattaaagtaaaataaatatgataagacattaaattatactcaataatgatattaattattagataccatatgtgccctttaatattttctctttattatatttaaagagtattttttattgggttatactagtggtacccaacatcttctgcaggtgacgcttcacgattgattaatgaaatttcttgaaagttattttctttgagtaatatgagactcaatactcaataacattaataacagtatgatactgaggaagatgctagatactaatagcgacttttagctattctttatattaatatatgtggtagccaatatagaaaaaaaaaaatcaccaataacatcaataaaagtgtattgaaagtgttttggagggagaattaagaaagagaaatgttataatgcactaatattgtactgtctagtactttcaataggagatgtaaaagttgagttattattgtacaaaaagtagtttaatttgtgatatttttatatcaaattttattattgtactccaataaatataaatcttgatgtaaaatttaatatattatttaatgcctatttaataatttattaaaaatataaaataataataatgcaaagttaaatgtaaaatttaattataaaataataataatgcaagtcatttaatacaaatgagtatgttaactaaaatttaataataaaatattaaaaatgatataataataaatataaaagcaataacatttaattgttgatgtaaataaaagatacactttttgatcatgtaaaaattttttagtcatcataatttaagtcacatcatcagagtaaaaactttttaaactaaaaagtgaagctaatatttttaata

SEQ ID NO: 355398 - DNA, 545 bp, Cannabis indica
attttgaagaacataatctgccaaatcggacttccgtacaagatagttttagataatggcaagcagttcgacagccaatccttcactgacatttgtgcgaaccatggtatcatcaaaagtttctccgcagtggcacatcctcaagcgaatggtcaagttgaagcagtcaacaacaccttgaaggatacactgaagaaaaaactcgaagatgccaacggaaattggccaaaagagcttcctgaagttctatggtcatatcggacatctgagagaacggcaaccggacaaacaccattcgctatggcgtatggatatgaagctatgctgcctgtagaactcgagccaccatagatacccatcacatactcctagccaaatcacttgataaaatcaaagagagatgagccactgcaaacttgaagttgatggcccatcaacaaaaagtagcttgatatttcaacaaacaagtgacggctcgaaaactctttgtgggagatatggtcctaagaagggtattcttaaacaccaaagacagtacgacaggt

SEQ ID NO: 355399 - DNA, 856 bp, Cannabis indica
cagctcattgctaatcaacgaggttattggaaaacgtgattaattaaaattttgctttttaattaaaacataacatattacattaataaaatatcgggatcccgtttacaaaatactttacaaaagtttgctatacaatacaaaatgtttgtcgcccagcgactaattacaaaagccctgatgtcccgaggatcgtacgctccaggcctaaccgccccgacatgtacaacctccatctgctcgttctcacgattcctcagctttggctttgcccttacctacacataaacatagcactgtgagtcgacggactcagtaagaaaagcataatataaacataaaaataacccgggttataatctggcgcccatacacccgatcataaccctaatccccgtgtcccacacggtactgagtctagaacgttcataagacaatactatcgaccataatgtcagcctatactcaatatgctagtcatactctagccatattgatgtgacagcatcgatcagtattctagccaacatacatttatcaataatcagtacaactctatgtatactattattgctatcaatgtaatctaacaggcaataacacatgtacgctaaacatgtaataacatatgcatgatattatactaatcttaccttaattctgaattcaggtgtgccggtcaacctgagtggaacaaccgatcggcgaattataggctcctaaatcacatcgattccaaaacatataagtgatccactaaatcacaactgggacaaaggtttaaaaccaaaacttaacctactgtaacctaatacaaaaatatcccaaactagcagggaataaactgcctgaaaac

SEQ ID NO: 355400 - DNA, 761 bp, Cannabis indica
ttcatttccagctggttccaccttatttatatcaggttcttcatgatcatctagcttccatagaatagggtcaaactgtattgtacctgcatggttagtttctactgtacctgcagggttagtcttaagtaaacaaggaaattcattttcttcaaaaataatatccctgctaataatagttttaaatccacccttttctcttaaccaaattctatagcccttaactccttcaggatagcctagaaaaactcctttaatagctctaggttcaagcttaccaacactttggtgcacaaaagcactacaaccaaatacccttaagtttgagatatcatgtggtttaccagaccacctttcctcaggtgttttgaattcaataacacttgagggacatctatttattagataagcatatgtcatgactgcctctccccagaaaccatgggacaaaccagattgtattaaatacatctggctttgttcagaatggttctgttcattctttctgcaacaccattctattgtggtgttaatcttactgttttgtgcctttgaatacctgtttctctgcaaaatatatcaaattcattgttgcaaaattccagaccattgtatgtccttaggtttttaacccttctgttagtaagatttttaacaagtgttttcccgtgtttaaacctttgaaaagcatcatttttatttttaagtagaaaaatccatacttttttagaaaaatcatcaactatagacataaagtaggt

SEQ ID NO: 355401 - DNA, 657 bp, Cannabis indica
ggtcattacaaaagatattatctggtatcaatgaaaagctctaccacccataacattgttggcaaacacccatctgaccaaattatgggtcgcaaaattatagtttctaggaatacaagaaaaattataatgtcataaaaatagagaggagcttgcaatgtcgcacatatttctcaatcctccaaaatgagtcgtcctcctttaaattcttgataatagtcactaagtcactctctaccaaaacaaaaagatgatgcactgacagctgtctctatggctaaatgacaggctgcagcttctccaacgagtgggttcgagaagtgtagtctttctgccgccacccacagaactgattccttatggtccctcgcaatcgccacagcgcacatagtttcacctccgactttgacatcgtagttaattttgacccaatcttctggcggtaaagaccaagcaggagtcccaacagactgtggaggggagataagacaggagccataatctgcgtaacaaaaataaatagagtcaatatagtatttaatgttacccattgaattgttatgtaccttgtcgttgcaggccctccaaatggtatcaaccacaatcgaggcataaaagaacaacttattagtatcaactcctctggatttaagattc

SEQ ID NO: 355402 - DNA, 462 bp, Cannabis indica
aagaataaaacacaaaaaaaaaaaaaatacttgaaaatataaaaacaaataaaaatactataaaaacaaataaaaacattaaatatgggctttgaaaatctaatttacatatatatgacatatcaaatactataaaaatacctaaaaataaaaaaatgctatataaattagtcaaacttaaaagtgccatatttaagtaaacaacttttaaaattcttaattgagtgtaaattcctctaattataacaacaaaaaaccaattagactacaatccaatttaatgtatcaatatttataggggatatgacattatatgcctattttattttatttatttaaatttttatttttattttcatattttttaaatataccaacttttatagatgatgtcttcaccccttaagttaatgtaaattatgtactagacttaggtaaagagtgagggtatattggacaact

SEQ ID NO: 355403 - DNA, 529 bp, Cannabis indica
ttctggttgaaccacataactttgtcataataacaatttaatccatttgatataacacaagaccataatgagaaattagtgccatgctttcctgaaatagtctggttgagcatgctccacggccagacttctggggcccctttgcccaaagactagcgtggaggtgaagtcctcctcaatggaggatctacaatcattgacggaccagccagtgcaagccccgaaagaggagaaggtagtgaggaccctattgttgggctttgtgtcctaaataaaattttatttcaatataatcttttatattcatttatcagtaaagaaacatatttattttcattacttatttaatgtgttatttggttcatgtgatcatttatttatttgatttataaattaatctaaatccttatcacattgatattcttgtttattgtgttgtcaacacattagaaagtaatcaagattgtgtaattaaatgtattcctatgatttatcagtacacaaggtttaactgataggataatctaca

SEQ ID NO: 355404 - DNA, 716 bp, Cannabis indica
gctgagtttgaaggtttacctatttttgagggtgaaatctgcattgaagccttctttgcacgatttgacagtcaccggcttcataagtactggaaggaaaccccaccacaccgccactgagatggaaggatccaggacggacgaccacgctgatgaacagcgacgacgacgagatctgacgaaccatggtgaaccctagagcttcgcgtttcagagagagagagagaggaactatccaaaagtttttaatttcattatattcacaattattgttttgtcaaatatatatatggatcatttttcaatcccaataactctaaatttatttttgttttgataactcatatattctctttctcttctagtctttttcttatgtcagttttttaacttatagtcaaatttactccctactaattaaaagcatcactatcacttgagctaggctcaagtggctataagagggtgcgtgtgtgttggatctagggtcaaataaaaatgttcaaaaactgtgtgatcaagctccattggatgaatagagctacctatctcaatgtgtgaaagccgtctctgagtaagttggaactatgtaattaggagttatgtagaagatacgctaccattgaaaagggctaccattgaggtggtgtgacagcatcttctatggttacaatttatcagaaaaagtctttttgacaaattggacaatgtttcct

SEQ ID NO: 355405 - DNA, 778 bp, Cannabis indica
ggggaattagggaaatcatctggatatgactctgacgaggagcttgagccgtatcacccatatattatgaataccccttttccttcaggattcaaaaaccctcatgtctcgtcctatgacggaaccacagatctggtctcgcatttgaataactttaacacgataatgcgagcaagtaacgtgacgaacaatttatgttgtatttttccccacctcgcttattggagcagtgagtagctggtttaacaagtttactcatcattcaataacttcctaggagcagttgtccagggataggtgacccgaagtggcctcgctaaccaatataaagcagcagcctggaaaaacacttaaggcttacttaattcgttctagcatggctgttgctaggattagaaatttggatgacagcaagcaacttacagcccttcaggcggggatctccactaatccattaaccgtgggggcgggttgtgtgatgatttacaaggacatccggtaagaaacatcactgacttcaacgagagggctcaggtgtttgttcaaaaggaaaaagcccgaaaggaaatgaacttttgaagacaagctcaggaggtaaacccagcaatgtttcaacaggaactgcttcctcgagaattgataactcgggggcttctggtctgaaaagaaaggatagaattaaggaaccgtcgaaggatagaaagaaacaaaagaagcatgacaaatacgtgccagtgtatactatttacaccgagcttaatgaaactcgagaaaatat

SEQ ID NO: 355406 - DNA, 552 bp, Cannabis indica
taataatattataaaattaatatagaatattctattaagtaatattatattttgttaaagttaacaataaaaaatcaaaaaatacagttaaattaaaaattctattgcatatccacattttatatagaataaatatatattagaaaaaaaaacatagttaagaataaccaattcttatactatttttttttattaaaaaaaatcacatttttacaaacttatactttaacacctagaaaaataaaacacaaataggaccaaatagtgttttgtttgccaccaaattttctagagaacactatgtctaaacacaatctaataaaaaaaaaactattttacaatttggccaaacaccctgaataacttgtgcgagagcttttaattttgattctttcacatgaatttgcatacgacaaaaaaaaagttttactctaaactttcttgatcatgtgcaaaggtccaaccatgtatacatgaattaggagaattattccatgtactattttttttaatttatttttttttaatttacagtttgaatttctaaagtgg

SEQ ID NO: 355407 - DNA, 578 bp, Cannabis indica
cattgaacacagtgttgcaactgtacagtagcatcaatatgattgaaagaaaacccctgaattatcacatcactagaatccttccataataaggccaagcctccactatgcccacgggcctccactacaaaacaactatcaaagcccaattggactctaataaactccatacttgtcttgttacacaaagtatcacaaagaaataacaaattgggcttcttttggaacacaaggtccgctaagaattgtttggcccgcaggttcccaagcccacagcaattccaacttaagcaactcatggctctgggcgggcctggaaaccagagcccgccaaagatccattttttggaatttccacaatgtcatgatccataacatctatagcattattaaattatttttccaaggagcccacgtgtccccccatgctatcaggccttcttcttttagaatcaattatgttggtaatataggaatcaaagaaatttcctttattggtaacatttaatgttgactcatctccattagctaccatattctccttaatgttaccacatccctctttttgtggctgatta

SEQ ID NO: 355408 - DNA, 532 bp, Cannabis indica
cacttctatcaatagctattcagatctttcttggtaacgctccctagaggtggtgttgagataccatgtctgtgtgttatgctatgtaggattggacaccttgtagccgtcctcctaatccctactctgtggcaaagtctttgtttggaggtatgttgctgtaggtgtatccatgttgattgtctagcatgtctattccttttgaaacagagggacatagttctttgaggaaatgagcaagtaccaagtttaccttagttgttaaggcacaactgggtagttgagcgagtgtgttggttgttgtgtcgcctttgggggcttgccttttagtgtagcctttgagctgtgttattaacagctccggtatgccatcatcttattgtattgagctgtacattaggacataacctacgaatagctgagagtcgtggtgcatgtctaggtggtcagcctgtgttttgtgtgctagcctggggccagcatttggagcttcatattcaacctcattattagaagctttgtaactaacctt

SEQ ID NO: 355409 - DNA, 793 bp, Cannabis indica
tcaggggcaacatttacccccaagccttgtttggtgaggaagtgaacaaggcttgcttagatgcctccggttgccttatcagcttcctggcacgtgctttgggcgcgtggggatatattaatgaccatcattactgtagttatttgctttttgcaagcgtcgattcgtttcttgtccatttattgatacggcgcattaaatgggtgtcagacgggtactcaagtgttttctaccgccttgatgagtgtttaattgaaccgttggatttgtggaattcgaatcaattaccatcctgaccgtacgatggtggctgatcacagctgtcccacgtctgttctggcctataaaagccagccttcttacctcatttggttactttcagcatttcaccaaaatttctcagagttttccagagagaaaagaaacttcaaacaccattgatttcctgctcttattccttcggcgctgccagtctacgttttaccggcgatcaacaccaacccccagtcttcaaacttcatgtaagttcttcatatctcgtatacttgttcactgttggtttacatagcatgctttactgtttctgggttggatgttgaacttctgggaaaagtcttgttcgaatttctgaatgatgtattaaattactcctttttgcatttagatcatttcttcttactgcgtttttattgaggaaccatctttatcccacgtaatgacaattttagggcttagagtagactttgcctttttggttttacccttttttttctttctctctttacttttttgc

SEQ ID NO: 355410 - DNA, 980 bp, Cannabis indica
attcaacaagactctcacttgcacgtagttttttgttttgtgtgtgaaagaatcagtggtgatatgatacgtcttcaaccctcgttctcgaaagagaaggactccttggagtctttcacacgaatagtcatgtttcaccctttggtcatttaaagtgaagtcatcgcttaaatttttattcagctttagccattcctcacagaagtcgaagtctaccacataataattcaacatgactcttccatgaatgtagttttttttagcgtgaaagatcactagggttatgatacgtcttcaaccctccttcccggaaaaactactagaagtctgtcacacgcctagtgatgtttcaccctttggttttttgaagcatagtcatcgcttgaatttttatgcaactttagccttttctcacggaacccaaagtctgccacataagaattcaacatgactctcgtgcgtgaaagatcactaggaatatgatacgtcttcaaccatccttcccagaagggaaggactgtttaaagtctgccacacgcccagtgatgttttaccctttagtctttttaagcgaagtcatcgtttgattttttttgcaaatttagtctttccccgtgaaagttgaagtatgccacatgaaaattcaacatgactcttgcatgcacgtaatatttcgtgcttgaaagatcactagcaatatgatacgttttcaaccctcattcccggaacagaaggactgcttgaagtctatcacgcccccagtgatgtctcacctttttgccttttgaagtgaagtgatcgctagaatttttatgcaactataatttttcctcggagaagccgaagtgtgctacatataaattcaacaagactctcgcatggaagtagtttttttgtgtgtgaaagatcagttgggtatgatacatctttaaccgtctttcgttgtaacaccctaactagcataggcgtattacgtgatt

SEQ ID NO: 355411 - DNA, 501 bp, Cannabis indica
caaaaaccaatcaaacctccaccaaacctgctcaaaccttccaaaacagtataataacataaatataacataacccaagcttcaaaacacaaaaattcaatctctaactcaaaatcacatgttcaagtgaagaaattcatattttagcttcaaccaacacacttcaatccaagcagccaaagaaacctctcaaaaccattctcaacatacacaaaaacataacctaaacataactcaaactcaacctaatccctacagccacagaaacacaaaactctaaccttaaaccaaccaaaatccattaaaaatcacaacccataaggtgtaaacttacctcaatcacttctaggttgagcttaggttgaataatatgctccaaagacaaaagaaaatggtgaggagagcctctcttgctggctggttggtttgcacgaaggggagaagaagaatgaagtgttgtttcttgccttggaagctattaccttaaatagggtttttttt

SEQ ID NO: 355412 - DNA, 702 bp, Cannabis indica
ataccaacaccctgcatcatgatgaggaggaactccgtgctgaggtaaatcttgcatttaaagaacagaggcgcatgttcgttgagtggagggacaaagagatggaaacgttgagggctccgtaggcatccattgcctactagaccaaacaagccaccgtgttaatacgaaaagcctatcaggctaccggacaacaacctgtaaccgtcatccccctaggcgagacagacgaagatccagcgatgaacacctctcagactataaatggttagccgtccaatccccggtcacaggttccacctgtgggccaagtggtaggcggacaaaccttgtctagcaattcatcaggagaagtcatacctaataattccaaccaagttaatggtatcgaccagctaattggccaaaccaaccagtcactgagacagccaggtgtttctatatttaatcgattaggaacggttcatgatcttagagatgatctgaacagaaagagagggttggacgaccagcacgacgcaccagtcgttcagtttggaacccgcgctcaaagtcccgctcaaagatatgctgacgcgactctggtcaggaaagaggccaaacaagttagtccagccgtggaggcacagttggatgaactaaaaaatatgttccaaggcctggccggtcagaggaacaatgacctcgagttggatcgagcac

SEQ ID NO: 355413 - DNA, 1345 bp, Cannabis indica
aatcctgaagatgaagctaaggaagagcaggggactcaactcaaaaggaggaagaaacttgcggcccagcccagccccgttgaacatgcaattcgcattagggagcccagttcacctgctcgaccatcttctcccgtgctaggaaaagggacttgtcaggtgatgatggactttcgagtctttctcagataatcgtcttgcaggctactccgtcttgtttttaaacttcttgactattatgctttatgcttctgatgtctttttcctctaaccatgttgtttttgttccgttcagaaatgtcttagaagatgctcgatgctctgaagaagagagttggaggaagctcatctcctccggccatgaaatctaggggcggtgaggcgacccgtttgaaggaaaaggcaccggctggggaagttattgacctttccgaggagctaactatttcaaacccctctactccaaaagttactaagtccaaagattcttgaggaggaagctcggacaggcctgagcaatcaaagggtggctccgagctggctaagagaagatctgagcagatgcggctcctactccaccctttccagtgcatccagaggccaagaaaggtaaggacatgctcgcccattacatgaattggttgatcctgaggtgagtgagcagttggccggcgctgacaatgaatcttccctagagctgctgatgggaggaatcttgagggaattcacaagggtaagtctttcttgacaatttcctttaatcctttttacttggcttaaactttaaagtctgttctctatataggctggtctaaagttggcttacacctattcccgagctaagtctgccgcctccaacaacgctgccatgtccaacaccatgagggcgtaggtggacttggccaggaaggatgttgatgacgccagggtggaactcgaagctgtccgaacggagctgggtgaggtcaacaagaagaggaaatagtcgagttgactaaggacctcgaagcctccgaccaacttgaagttacgatcggccccctgttggtagaagtgaatagccttcaagaggaaaggggagttcttcggtctgtcttccgtcggctggaagaagagaagaagactaatgaggaggagcttactgttggaattattttaccaggatcttagatctactcacaagtatgttgtttaacaccctaaatatgaactttctaaaacgataaaataaacacatataaagttaagaaaaccttacattgatgcagcggaattaatgtctccttcaactcagatctctaacccttgtatcttttctgccgcaaagtattatcaagatctaagc

SEQ ID NO: 355414 - DNA, 1118 bp, Cannabis indica
acatagaataaatggtagagaagtgagccatatataagacatggctactccactcattgccaattggttttgagatggaaccccatgattctcaacaacgtcctatttcagttatgattccaagtccaagtcctagttcaagtcccgatcaacttccgaatttttattccaagttttgggtcacgagggtaggggttcaggtccacgttttgggtttgggactgggttgaggtcctggtgtgggttcgggtccttgtcagggtttgggtccaggggtgggtcccaaatccagacaccgactataggttttgtcctagccctgggtccatatccgaattccaatctcgggccccagtttggttccaattctggtgccgggtcacgagctgggtcctaggttctagtacgggtctgggtcgggtattaggtcccggtcctagttctgtttcccaggtccctatcctgattcttggtccaggtcccggttattgtgtgggtttttgtcccggtctaagttcaggttcgagtcttagtctcagttcgtgttaaggtctctgtctcggttttgatctgggtttgggtttgggtttaggtccttgtcctggtcctagtcctagtttttttgaaaaggtcctagtcctaattcggctcttgttccatttgtgattctgagtttgagtttgggtttgagttcgggtcagagttcgagtactggtctgagtttgggttcgggtccggatttcagtctaggtccagatcaagctctgagtgtgggtgcgcgtccttggtcttggtcttggtcttggtctaagtccttggttttgattgtggtctgggttcgagtttgggtccgtgtctgggtctagctttaggtctcattctaggtgtgggtgtttgagttcgggcccgagtctgcgtccgggtttgtgtccaggtctggaccctgatctaggtctaggttcgggcctacgtccaaagtgctggtctatgtttgggtctgggtcaggatctcgatccaaatctaggtctagcattttgatcccagtgtgggtcttggtcctagtctaggttcgtatttggatccttatctaactccaagtctgtgtttgggatcgggt

SEQ ID NO: 355415 - DNA, 612 bp, Cannabis indica
gccacccacatagtgtttcaaactatttttattgcaccaagaacccccatggtgcatattttcactaaagtacaaacctaccagcaacaaaacaataataatttataataaagttgatgacataaagcctaaaactatgtgcaaagatgctcacatgctagtcaaagcctataccccacaaaaaattaaaaaatagtttcataccaactttatcatgccccaacaaaaataatatagatgggattttttctattttgggttaaaattaccttaaataaacatttatactaccataagcaaaaataaacatttatattgtttattaatttcaaatatactattttcaaagtttcttatttacaaaaatacacttgaaaaactcccccagatgcgcaaggagatgtgtggcacacatgtggctatgtgggcgagtgagggacaaagcattcagacttgcctgacgctcacaaactgtagcgtcagaacgcagcagtggttgtcacgtggcgaattcggacaaaatgaattttaacgtataaggcttcttttctcggtgcaaaacaactaaacaacaacacaaaacaactagaaaacaacttaaccatagcatat

SEQ ID NO: 355416 - DNA, 551 bp, Cannabis indica
attatttattaagtctcatcaactaaataatcccttgtttaccatggacctataattctaagctctaataaactagattatttattcagtctcatcaactaaataatctcttgtttattaattacatgattactccactataaatatggaattgcactcttagtaactaaaaaattatatttactgagtttaactgaagtgtccattgatataatcaattccagtgattagtcctccatatattggttcgtaattagttttggtcaaattaccattttaccattctaattacttatttatcctttagttccattaattcactagtggaagtattgttatccaagtttttacagatgagacatgtggcatgatcagagggaagaatacagtagcgacaagaattagtcgaagttgtcaagaaagggaacgtccccccaacctaggaagcaataggagcatatgactcctgaaaataactgtaataccctaagactaaggaaatagattagaaaaccctaactagttaaatatgtattaatatggaattatat

SEQ ID NO: 355417 - DNA, 826 bp, Cannabis indica
cacgcatgccctcaattttaacgactccatagtttcgagggtcattattagtattcatgaatcaccttttcatcttctacctcatacgcaaccattagatttctcaacctttggccttaccgttactaggttctaagtataaaatggtggctcagtctagccatattccataaactcatggcttttggtgagttttatccaggatttagattgttactctcctgcaaagatgtcccatccagattctgaaatttatcgttcaaaacttgtaacgctggaatataccaaccatttttcctctccatatgttccccaaaacttcaaaccttagtttaaattggaaacgaaagattccaagattgaggatcgtccgattaatccaaaccaagtagatacagtcaatcattacagacgatccccataagagatttctgagggtaagcatcatcctttgcgaatggtggtctgatctgaattcgtcgtttttttaaccacaattgcttcattgatcttttatctttgtctctacaagaattgacgtagattttgagagcaagttcaaaggtcctcctcaggctgacaaggaatccaagaagaagtgaaaacctctgacacttatcacacttatgacaaactcatgggtgtccttattgatcgttggccagtaatatccttgtctaatgatctttttagatagaatctgccaacctgcatgatccccacaaaagccttcatgaatttctctgatgatcttgtttgcttctgcagggagaacacaccgaagtagaggcatcgaataacctcttatgtatagtttgccttcaat

SEQ ID NO: 355418 - DNA, 1241 bp, Cannabis indica
aggtgttggcctccaatatcggggtactggtataaggttcatgttagagtcataccggccgagcctatacgtgccggggggtacaacttctgtaacctcgtatggaccttcccaatttggccccaatactcctgctgttgggtctttagtgttggccaagactctgcgtagtactagatctcctaccttgaagcttctttccttaactttggaattaaagtatctggctactttttgttggtatgctgctaaccgtatttgtgaggcctccctacgactttccaataggtccaacgattcattcatcagctggtgattactgacttggttgtatgtcgctcgtcggtgggagggtgggtctagctcgaccggtatcatcgcatcatacccataagcaagggcaaagggggtatcaccagtagctgttctttccgtcgtcctatatgaccacaaaacttcgggtaattgctctggccagcttcctttcgcttcttcgagtcttttcttcaaggtgtcttttaaggtcttattcaccgcctctacctgcccgtttgactgggggtgcgagaccgccgagaagctctttactatgccatgcttaatgcagaaatttgtgaacaggacactgtcaaactgggtaccgttgtcagataccaatttatggggtaatccaaacctacatataatgttcttgaccacaaagtcaagcaccttcttggatgttatagttgctagtggttcggcttctgtccactttgtgaaataatcgactgctactgcatatggcactcctcctttgcccttaggcagctgactgattaagtctataccccaaatagcgaagggccatggactctgcatttgcgttagctcattgggtggagcccttggtatttttgcaaacttttgacatttttcacaccttccaacatactccatagagtcttctatcatggttggccagaagaatccttgccttagtaccttcttggataagctttgccccccagcgtgattaccgcaaaaaaccttcatggacttcttccattagtcgttgggcttggtcttgatgtacacattgtagtaggggcattgagtaccctcgccgatacatgacaccatcaatgattaggtacccggggttggccgttccttcttcattttctttgctcgttttgtgtgggcatgtcctgtctagtaagcggctatgggggtcagtccacgattgagtcgtatcgagt

SEQ ID NO: 355419 - DNA, 1267 bp, Cannabis indica
tattgatacaaaatttatggtatttttttaatctttgaaaagagataataccacataaacacttgattttttaaaattcaatgtttatgaataattctcatttcttaagcaattattaagattttatttgataaaaaaaacttttgatctgataggggtggaagaagttaagaagacatatatgcagttcaaagatcttttatatctattgaactccagactatattcaaaactccacagaatctctataacacttaggggtggaagaagttattgatacatgtagttcaaacacttttaactttgaactctagtgtaacgccctaacatttaggcacgctacccaagaagattaagaaaccctaatcctcaaaacaggattactaataaaataagcgtggaaattaaacttttaacgaaaacggaatgaaaataaacttgtaataattttaaccttacaaataaaagttacatgtttcgggatcccaaaaattattttacaaaatagagttacaaaagtttcaacactggtagaccctaacccgcttggtctagtgtggcccgaacatgtacatttatcgcccagcacccacacttatggctgattagaaacaaagttaccctttcctgcatagtagagcacccgtgagccaagcccaacaagacagtaaaatatatcgataatcataaatacacatcatataaatattaatgccatttcatagacctatttatgtctatgtgggatagacctacgtgttacgcctatttatgtctatgtgttacgctcacacgtctatttacattaaggccttagaacgatttatctcagttctagttaccgagtctaacccgattatgtcttgaacacataaccctttacttcaatatacatttatatatcatggcataacaattagatattaataatttacttgggtaataaccctaagccaataaaccgctcaaattagtgtaataactctaatcccgatttctagtttctcatatatatatatcacattttatataagcgccattgcgcatatctctacgtgataactattatcttacctgatgttccaccaatatggagattctaaatccttgggtgctcctgaccaagtgccggtaatcctagtcacaattccgggatacacaagtgtagggttaatgttgggttttatgccctaaataaaactcatttcaatataatcagatttgcttattaatatagatcagaaataacatttaatgttgcatggtt

SEQ ID NO: 355420 - DNA, 996 bp, Cannabis indica
gtagggctgtactccacctgtactctatctttggcttacggggacatgccacgtcaggtggacaaaatttgggataacatttgtcccccaagtccctgttcaaatatctggtcgatagggactttctagctctcatattatttgtagtagtctctgttgagtaaccttgtctagctaagtgttgctggcatgcttttggatctttgacttctctctctatatacgtctcatcttctctccttgggtatctcttctttgtacatgccattaacaagtttcaagctttttaagcttttggaaactttttgattctcatgttagtttgtaatctctttggtatattgatcctcctgagagttttagaacgtgtaatgtgtgctttttttttttatagaaaagattcgatttgggcctttgctatgattcttgactctttgagtcataaagaatacgaggctcatattcgagttttgaaagaaaaacacatattaggattcaaaacttaccttgaccggcctaggaggtcttgtgtgagacctggtcggccctaaagcttaatcatgggagttggctagctttagggttttaccctatgaagcaagcctgttcatgcttgggtttagtgaccctggccagtccttggctaagtcatgggaccctagccgaccctttcaagactttagaaccctagcaggaatgggccttggttccaagtgggtagccagttttctgtcctcttgtgacttcagaaagaatttggctctgtaggcatatacaaccttagcctcatacatggtttccctagaaactttgtatgaagcttaacggtgagtctgttatagtcgaatgttcaacttacgactcaacatggtttggatcctgtaaggaatttcgccatagctgtagcccggtacatggcccttattggagctctatctagttcttttctggctatatggttcttgcagggccttggcctcatgcatgtgaacagat

SEQ ID NO: 355421 - DNA, 782 bp, Cannabis indica
taaaacaaaaccaatccaacaagacttaaacaaatcagatactcttaaacaacattacacaacaatctccaatctctattcaaatctaagaacgaaaactgctcaaatctcttagtcttgtaaacccaaacagctgtccaaaatttgactttttcccacaaatcttcaactgaggcttcaatcccttcaaaaattttgttattcctttcgagccaaataacccaaatgattgctaggacagctgtcctccataggtatgatctacccttactccccccaccttgctcacaatcattagagggactgaacctggcagtacccattgggtctcaaagacgttcaacaactttatccaaagtctttgggccatatagcaccccaaaaacaaatatgccacttcttcactacttttcttacaacaaacacaccatcccggggacaagcagataaatggacgccttttttgcatcataaaatgcacattaatttttcctagtgccaccaaccatccaaagacttttactttagaaggacacctgcttttccataaggtcttcgtccagaacaactcgccagaattgtggtttgaagtaaaccagctaaatgatgacttacaagagaaaatcccaccaggatctggtttccataatctgatatcctctgatatgttgagcaatcgaatgtgttccaatagttgcagtaaaacaataagattaggcatttccctctccatcaagttccttctaaacttaaaattccagcttgcaacacaatttcctacc

SEQ ID NO: 355422 - DNA, 1129 bp, Cannabis indica
aaaactcaacaaagcaacccgcaaagatcattttcccttgcccttcattcatcagatgctttacagattggcggggcaagagtattattgttttcttgatggctactctggataccaccaaatagccatagcaccggaggatcaggaaaaaacgaccttcacatgtccttatggtacttttgcttttagaagattgccattcagattatgcaatgctcctgctacttttcaaaggtgtatgatggctatcttttcggatttaattgaatcttgcattgagatctttatggatgacttctaggtctttggttcttcatttgatcattgcctagagaatctggagaaggtgctaattagatgcgaaaagtcaaatttggttctaaactcggagaagtgccactttatggtgaaagaagggatagttaagcagggattgaagtggacaaggctaaagtgtcaacaatagagaatttgccatccccagtttctgtgaaaggagtaaggagtttcttgggtcatgccggtttctatcgacgatttattaagaacttttcaaagatttttaaaccatggtccagtttacttgttaatggtgtaccttcgagtttggagatgaatgtttaaaggcatttcaagttcttaaagagaaattgatttcagcaccaatagttacttcaccaaattgggagttgcccttcgaattgatgtgtgatgcaagtgactatgcaattggagcggtcttgggtcaaagggttgatagggtgtttcacacaatctactatgctagtagaaccctgaatgatgctcaactgaattatgccacaacggaaaaagagatgctgacaattgtctttgcatgtgatgagttccgcccctatctgattgggaataaggttgtagtctacacagatcattctgcaattaaataccttatgaccaagaaggatgctaagccaagattgattcgatgggtacttctactccgggagtttgacatagagataaaggacaagaagggcactaaaaatctggtagcagatcatctgtcaagactagagttggaagagagccagaatacaaaagaagtacagataaatgagaaatttcctgatgaacaactctttagtgt

SEQ ID NO: 355423 - DNA, 976 bp, Cannabis indica
tgatgcaagattatcaccttggaaaagtatgatttgtagatggtatatgaatatgtttatttaccttgtatgacccgtgggaaattggtgcttcatttatgttctctaggtctagatttctatagttaatttaatcttaagagcccataacatataggtttagaaaaatcacatgttcgtttatatttccagttgataaaatttaattactaatgcattcatctatgacatttacattgaatttgcattctaagtggatttgattgttctagctcttcactttgctcattttcatttctcattttatttattttcttgtttattttttagcctagttcaaatcatcatcacttcttgtttgttttacccaaattgtttagtattgatttttgcataattaatttctaatcaatccctgtggagacgatactcttttacttatcattgtattacttgtttgtgactacgtgcacttgcgtatatctaattttagcacaacaagtttttggcgccgttgccggggattgatttaaagaattttttcttgttaaaatcaattgcttttcaatttggtcttttatttttcttgtttgcttttacgtttgcttgttttgtttgagtttttcttgcaaggtactttagatgtctcatcaacaagtacttactaatttcattcaacatgactcggagcctttacatagagcattgtggagatataaggatttgctaatgtggtttcctaaccatggtttatctaaagagtgtgtacttgaagtcttcttaaatgggttgcatccaagcataagagaatgggtagaaggaggagatggtactaccaatttctaccaacaatctatcgatgaagcctattggatgttagaggacatggcggagtatgatgagtgttgttggaattcttcatcaaccaaccaagtttaggagaacacctctagccatatggagcaaacttttgata

SEQ ID NO: 355424 - DNA, 510 bp, Cannabis indica
aaaaatggaaaagtgaaaagtgacatccatcaatcaagtctaatcaaccgtcgtactcctccactcctccacttcttcactttcattttcttttatttttcaattttgtcattcgtttttccattttcgtctctgctagggcaaagttcttccttttccattttctttttcattttccattttgtttttccattttctattttcgtttgaggttgtagaacccatattgtaaattttgttcactgtggtgtacattactcggagttccattgttggagttgttacaggggggtgtcgacggtgggttgtacattactccgttctactttacatacattttcttattcacagaaaaagaaatatatttttgaaggaaatgtggtgtttttccattttcgtgtacttaatagttctattttgtctcaggtgtggagggtgaggtggtgaagggagtttgcatatctttgtcgaggtatttctttgtctctctctctctctctctctctctct

SEQ ID NO: 355425 - DNA, 757 bp, Cannabis indica
ctaaatattggggtccacaattaaataaattcataaataattataaaataacagaaattagtgctaattgccttttctaatccaatttactaaggcggtcattacaccgcgtctcgcccttgttcagacacgatcacgctcgagtgatcaccctgcaggcgctgagtgagatgttgcagttgatcgataaaactcggtctaggaggctgcaaggctctcatttacgcgcgcggaatggctaccagcagccttcctcgacaacccttattttttgacccaaagattgatttttgggtgattttttctcccaattttaattttttctcttcaaaaccccaaatttcaaaataaaatattaaatttaaaatttaaacttgaatatcataatttaaaattaagaatatttaattttttaatagtttattattaatttttttgatattttgaggtttaaatttaaaaactgattatttgtttaaattattgccagattttaatattttattaatttctttaatatttatatattatttaattataaagttattagatgttaacacaaattttcgttaactaaatttaagcctatttcgtgatgtatttgcacaaaaataatattaataaaaggaaaagaaataacataaagcttttttacgtggttctgcaattaaaattctgcatagtccactagtctatcttattagatttttgatacaaaactagggctttttccttaaaggatttttcgtcccttttt

SEQ ID NO: 355426 - DNA, 505 bp, Cannabis indica
cttattattgctttattatatatatcgtttatcgctcataaaatagactcattatcgttggctaaaagcaaagtcaacacatatataaatatatatacatatatatatcgaaaatattatagtgtatgtatatataaatatgaatgaaatgtatatatgtatatatttgtatataacatttatatataaacaaatatgtataatgaatatattaacatatatatatatatacttaatgaaatggaaaatatatatataaaaatatatatagaaccgaatatataaataaaaacagaatatgaatatatatatatatgaatgaaactcaaatacaatcaatgcagagataaaaaccactctgataccaattgttagactataatatagtatatatatacgatatgtaatgcggaaaataaactataaacatatcgaaatgtatatgcaatgaatgattgaaatacctccagtcattgatatttgagcttcaatccctgcgatagct

SEQ ID NO: 355427 - DNA, 615 bp, Cannabis indica
ttctattaagcacgtaattaaattaatttcgttattttacccttctcgggtaataattactaaaatgcccctagctcaccaacggggtcttaccatgttataattcatattaattcacatatattgaactatataataatataattcctcaattattcataattatctaattagagtttcgctaatctacttctcaattctagggtattacattttgctactatgcataactaaggatttgatgctttattggactatttgtgatctaatctgatgtaggaatgcattgttgagattatgaatggtttattgcaagttttggaaaaagcttgctggtatttttttgaaatctgttctctgtcacgattgctgagtcattgctgggttattgttgtatcaactgggacatacaagtggaaatcaatcacccaagtctattttcaaaatctgaaattatcaccactctaatcacttttagcttcttatttttagtttatttagtttaaaaaattgtttctcaagtcgagaattaaggttataaatttttctcttaaattagtttgttactttgttttatttttatttgaaattcttggaattgcttttagttgattt

SEQ ID NO: 355428 - DNA, 778 bp, Cannabis indica
ttttgaacttttttacaaaatcccatatttcatgtaattttcacataaaataattatgttatactatctatctatacctattgttatactcaaaattcaactgtcatttcagaggatgacacgtgtcaatcttgaaaaacacagcaaatataatgacaattacattaaaagaatattaaatggaaaactcattaaatacagaatcaatagagtatattcataactcgcggactgcacagttttcagcgagacaaggatgtacgaactattaattcacgtgttgacgagaaaccatttcacgtcaaaagacatgattgaaaggacgacatcgataatacataagtgagacatcaacctcgctatgtgtaaaaaggtgttatatcatttcaaattctaattgagaattcaaataaacaaaaataataaaataattatgttatattatttatctatatctatctatatatataaagcaaagatataaggcagtgacatgatattcgaacatctttttaattagtattatttactttttttcttaattttctcatttctttaattttttattagctttataaatgttaatgaatataaaatatacacctctatttattttctctttatttttttcatttattttcatttatttttttaaaaaaataccatcacattttattacctttttaggttgttggtgttattattattttttttaaaaaaaaaaactttagtagatatttaaaaatgatatttgtataattatatctatctatatata

SEQ ID NO: 355429 - DNA, 843 bp, Cannabis indica
attttatgtaaataaaatcaaaaaaatcgtaaaaatgtttaaaattctgtaaaaccgtatttttgttgtttttgtgcatttgtgaaattaacccttcaatcaattctccttttgaaggtgtcttccaatgaggttatattattagatctaataggtctttgttatttatctttttgggtatatcttcaacatgtgatgcgaaaatattaatattgcagtacatgggttagcaagatatgcattacaagtgaaagacaaagtttcttggttggaagaaattccttattatataatgaccaatgtattattttacttacagcaataaaattagttatttaaaaaaaatatatatatctatatatatatatattttagagaagggtaaaacacaataataatactttatttcaaaaagtttccaaaaaaaattgaagactaagataagtacttaaatgttatcaataatttaatatatgtatttatatatactgatgttatatacaattcacgtataattaatattttttaattaggttaaattagatgatattatttttttaaatttttgaaataaaatttgaaattttgatctttgaggattttttttaactattgctgctacattaatatgtcatttatatattttcaaaaaaaaaaaaaatatgtcatttatatgtgattatatatataggtattttataggtacaataaatattttgtatataatatgctcaattaaattataaacttaattaatctgtctagaaaatatcggtgatggcgctgagttatggactaaatccgcataaaacactatcaagattaatgtagatgcaacactct

SEQ ID NO: 355430 - DNA, 570 bp, Cannabis indica
atattaaataagaagaaaatataataaatattgtttggtgtagtggtaaagggtcttagtttaagccaagaggtcaagagatcaatccctaatctctacttttccaatttttttttttaaaaaaatattaaatatgtagctataaaggattgaacctgagctttaagagtttttaaaaattttaccattacattaaaactatcattttaataataatttaattatatataggccccaaaatttaattttgccttaggccccatataccttaggatcgaccctgttggacgtttaccctttccacgcatcgctcggctaggcaaggcttggagagaaagggttcacttcttccatgacagcgtcgaggccaccatcttgatgagtcttattgtgtttactattttttgagtaaacatgtaacaccctaactaacataggcgtattacgtgatttttaaacatgctgtgcagctcgttgctaatcaacgagatttatggaaaacatgattaattaaaatttttcctttttaattaaacttataaaatatttatacaaaagactcgggatccc

SEQ ID NO: 355431 - DNA, 541 bp, Cannabis indica
gtattaacccgtttttgaaaaattgcatgccttgaatttttggcggtttagagcttcgagggacatcattagcatttaatgtcttaattattcccatttgcaatgttcccatccgttagatcagatttcttttgatccgacgattatcagtaattaggtataaaagtggaagtgaaagctcattttgccatctttgcatttcaaaccttcaaactttttatgtaaattttttttccaattgctctttctcaactttgtatgccctcgtgtcctttatattttttttgtgtatctcaatcgatctcaactactgtcctagagaccttcgaaactcattcacgactttcagaatctcaatcgttaggctcttctttgcccagaaaccccaacctacacagtaagtaataccttcttattttcttaatggttttctttttctaaacttatagttttgctttcttgattgacatctctttatttgtactgtttggttatttttaggtaatttcgttttggttgtttgtgttggaatatgttttac

SEQ ID NO: 355432 - DNA, 498 bp, Cannabis indica
taaagtgtatataaagttcttgttgaattctcaacacatgagctagaattaatctatagtgatgatggagagaaaagattaattagattaatcttttttaggctttctaaaaaaatatacatttatttttggtttatacggtatattaaaataaaaattaataaaagttttatttaattattgatttaaattcaaattatttattaaattatatttaattatttgaataaatattataatcgaattttattagatatttatttcatataatcgattgatggaatctctcaaccacttgagggaatctctcaactacattgaaaaaattataggcgtctatcactgtgttaggacagtgatagtggcgctacctatgtcttaaagagacattagtggtgtcttttgtccaaaaaaaatttgtattttttccaatttatttaattaataaatttaaaaaataatcattattacaaaataaataattactattttaacaaa

SEQ ID NO: 355433 - DNA, 736 bp, Cannabis indica
tttaatttacacgttttttaagaaaattctttgtttagcgaagacaacactgtaattgaaaaagtactgtagcgtgccttaacattagggcgttacacctccactcttaattaatagttatgctctgttgttggcactacacaccactaggggtgttcatccgatctaatccctacttttttggtcaaacaacatccaatccgcaccaagtgcggatttcatatttgggatccaatccgatccgcataacaatttaaatacaatccaatataatccgcaatagtgcggattggatcggttgtttttctaatgataaattatttaatatttcatagaaatttttttttttaaaaaaatactattatttattaatctccaataataatttatttccatctccatttatatacaaataaaaccaatacacacatatatgtcaatagatatgtactcatctttaaatttatactaaaatatataagctagtatatatatttaaatttatttgttcttgtgttttctattataaaacaaataaaatgcaccaactcaatatattacttaaaaaattaaaaaattagaagtttgtgtcttatttttaataatactcgaaaattaatatatattatatattataatttcttaaaactatatatataattaagtgcggattggattggatcggttactttttggggtcaaacaacatccaatccgcacaagtgcggattttaaa

SEQ ID NO: 355434 - DNA, 764 bp, Cannabis indica
attacttctttattctttagtatcgttaatttactaatataaatattatttagatccaatctaaatttgtgcacaactttttcagttctagaattaacacttaaagagaaataatattcaattcgttaggaaagtcaagatcatatttccagtcatccatattattagatttccaaaacagaagttgtaagagtcatcttctttgagaaactttaacgggtaaatcaatgaaattattaacatgaacaagttcatgattactcaagattcaggcccatatactattgatcatcattatggtatgaattaggtctttatagtaaacgacgtgtttgataaagataacttaattacatattggtccttgtcatatataatatatattatatacaacaccttcacttagatttcatactacatcagcaatctgaattaagatttcttacactgaataatgggcatcggtgaaccgtaccagcaattattgattaaggattccataactttaatatgttgttaactattttattcagtgctaagtgatcttaattcttcgtacaatacaagtcacagcttcatgtatgaatgagaaatgttctaatatttatgtataaattattcaatattaaatattaataatttaacatttaagtatatatgaaaatattcaacttatatttataaaaagaaatatctttacaggctttttaagacataaaccctaacaatctcccacttttcctaaaagtaaattgggtatctcc

SEQ ID NO: 355435 - DNA, 572 bp, Cannabis indica
tgattagacaataaggggaagcagatcccagatttaagaggacaacaagctcgtcttgtatctattcttgtactattgacacttcctattgtaccactggatgtggtgaaatatatgaaccaaacttacaagcagattagtaagtgaaaattaaatgaaccaataattatgggatagaacaaaaggttctaaggtgatcagaatattggtcaaagtgagaagaagaaatgacaaccttattctaagtgttcaagatgcaaaaaggtgccatttgagctaatgtagagtcatatcttattattgcgaggtagtgggtcatctgaaaagaacctgcccacagttatgaaagattgatgttaaagaagaaaaatgtacgggtcctatccaagtattggttacaactctaaaggacttggatatcggttctttgaccgacttaggtaaaaaatttatgggcaatgttatacttgttatttcgatttacattggtattaaacattgtacactcaatgaggggatttcaaaagatcagaatggactatgctggtatgttatttagtggtagttcattt

SEQ ID NO: 355436 - DNA, 868 bp, Cannabis indica
ggggccgaacaacatgctcaagaatattctgagcagtaggatgaggctgaagaagagcaagaaagaccgctcaaaaagaaaaagaaacttttggccgggcgcaggcccatcgaacatacgatttagatcagggagcccggtctacctgttcggccatccacccctgtagaaggaaaggggaaagccgtcctggagatgccccatcagtacttgttcgggcagatgcccctgccaagtgtatactccatcttgtttttaactttcttagttatcatgccttcatatttctcatgcttttttctaaccatgttactttcatttcgtgtagacatgtctcaaaaaatgcttgaggctctaaagaagagagtgggaggaagctcaggcttatctcctcgggctaagaagtctaagggcggtgagacgaccccgtccagagagaaggcaccagctgaagtggtcattgacctttccgaggaacaaaccgttgtagaccctcctatcccaaaaatgactaagtccaaggattctcgaggaggtagctcggacaggccagagcaggcgaggggcagatccgagctggtcagaagcggatccgagcagatcaaggtttatgccccaccttcggtattgcacctagagaccaaaaggggcagagaaatgctcactcactatgtgactcggtcggtctctgaggtgaacgagcagctggttggggcagacaatgacctttctctggagctggtgatgggaggagttctgaaggagctttcaagggtaagtcctttctgatagtttcttttttgtccttcttcacttagttcagatttcaatattctttctctgtacagaccggtctgaagatggctta

SEQ ID NO: 355437 - DNA, 522 bp, Cannabis indica
tccaatatggggtcctcctgagattatggccactccattgggtcttggtggcagaccagggatgtgttgcgcatcttcggtgggagcaactggagccaatactcctgctgcaccccctggtgttccctgcggtacaacccctgtcgcctgacccggattgaggtgaggcagccaattcttgatccactcatagaggtggcccaaggcctggtcctgactatattcgggagtagcagagaactgtatgccgcttattggcggagccgcggtcgggacactacccgagggcggtgcttcgggcatataccctgctatcccagtgggatagtatcctccataggccactatttgggcctcttcaaggttgatatacttttggactcttttctggaagtcctgaaggcttgcagctccttcctgctgtagttcgttccagaagggagtccctgtacggatgcctgcctggagaagggcaagttgttgtccgtcatcaactttcttggtcttcgaggcttcctctcg

SEQ ID NO: 355438 - DNA, 840 bp, Cannabis indica
ggttttactgttacatatacagtggtcatccagttgatatttaacggtaatgtttaaccggcgtgtcaaatttgcaaagaaaaataaacataagggggttttgccactaaaaaaatatataaggggggttaagtgtataaaaattaaaacataagggggtttgggcacaaaaaaaaagataagagggttaagtgtataaaaattaaaacataagtaggtttcaccacaaaaaaaaaaagggttaagtgtataaaaattaaaacataaggggatttcaccgcaaattgctcaaaatattaatatattatttataacattattatttttataatattgagaagtatgtttaattttgatattcttaaactttctatttattttcttcaaatttttaaaattttaaatatttttttttaaaaaaaaaattaaaaaattaatttgtttccatcaataacctagtattacaacctctatccaagaatacacttgggactaagtaaattatattctaattgggaggttataaccaaatagatttacactagaaaaaaaaaattaataaaccaaaaaagtattaatgtaacaataataacaataaataatcattaatactatatcataatagaaatattttagagtaaatataatttcatacatgtattttaatttagaataaaattattaattttacataaataaatttacaaaatacatgtatatattttattaagatataattattcttatatagaggtatactttgttaatacgggactaagaaaatgtataattaattacaatttagatgttattcttatttataactgacccaaatcggga

SEQ ID NO: 355439 - DNA, 667 bp, Cannabis indica
actgcacacacttatgtctgacaagtgtgttcaaatttgtaagtctcctctactaaaataaattaaaaatcctggttcacaattgttagtaacatgcatatctttttcctcgacatcaattaagtatgatttgttcttgaaatactaattaattattctcttttgaaagcataacatgtatttttggtcatttgtaatgatttttgattaaattgtttggtttcgaatttcttatatttattgtacatattttattttattttcggtttttaaaaataaaaaaaataaaaaaaaaaaataaaaaaaaaaataaagagagggaggcgttgatgacttgattcatgggctaaggaaatttgtgcttaattggtaagtatcaatatttattcttccttgatttattttgatatgtttacatttaaagattgatctcttatatggtaatatgtttttaaccttgaaagtttgtcttaaatggattttttttggaaataatattggtttttttattttcttttatttttttttttagtaaaaaagggaaaggagaaaattttaatttttgtcaagagagagtggcggtttcctttttgctcatgagctagcagttatttttcaaaaactcaaaattagtttccttttttcttcatgcttccatgtttattta

SEQ ID NO: 355440 - DNA, 418 bp, Cannabis indica
ttcgagccccattttctttagagtctccttataaatgatatttaccaagctcccattatctattaacactctcttgatcctcttattggcgagttgaatggttatgaccaatggatcgacgtgagggtatctcacgttcttctcgtcttcctctgtgaacataatggggggttcctcggttttcaccttcttggaaggttctggggcaaagaccaactgcttgttctttatctccttaacatctcttctgagcgatattgctttcccctgcaatatgcagccctgccgaaataaccaggaagtcctctccttccacaggaataggttgttacccctagttgtttgggttattaggctgacggggttggttgtatccctggccctgtcttttcacatattgtttaaaatggcctcgagc

SEQ ID NO: 355441 - DNA, 560 bp, Cannabis indica
tccgggagtaccttgtactccgggtgcctcctccgggacctatgcccagggtgcttccttgtggcatacaaagacttatcacatatttacaagttatctgatccacgtgtccctacttgactggtccacgtattttgggcgaatttaggggcaacagaagctatactgaggattgaagctaaaaaatcaatagcagaaggtatttcagtcctttcattgcatgtacaattttgatatgtttagagtttatattgagaattgaagctcaaaaatcaatagctgaaggtatttcagtcctcttattgcatatacaattttgatatgtttacagtttattctgttttttattttattttattttatcttaaaaaaataaggcgtttcatagataaggaaaattagacctcgcagtcattacaaatgatagaaacaggtatagagaatgactccatagcacctgtaaaattctaggcaaaagcccacctagccacattatgggcagcaaaattacaaacacgggacataaaagaaaagttacaagaaagaaaataattagagag

SEQ ID NO: 355442 - DNA, 494 bp, Cannabis indica
tctaggtttgatctagatgttgtggatagcggtcggtgggacgagtattgttggggtagggaatcctttgaattgactattgattcattcaaaggtagaattcagcatgggattataatgaaaaataagaaggcagagaagggaggccagtatgatggttggtatagggctttgggatgtccgtgggtttttactgtttggttttatgaatgttgtcctgctatggtcaacactttctgtaaaagagtttcatctacgattccaaggattctgaattggagcaacaccattgtgaccaaaaatccaactcttcgagacttgaagggcaagatttttgatttgccgttgaacaaggtaaaatacagtttctttactatttttttcagctttatgctgttgttaataatttgattatttaattgttttttttttcatttttatattctgtttgattatgctgttcagttaaaaatcaaaaacatatgtcctactaa

SEQ ID NO: 355443 - DNA, 483 bp, Cannabis indica
tctaattcttaaaaaataaaaaaataaaaaaaaaaattgaaataaggacatttactaacatagtcttatgatttagggccatttgctatatttttttgaaaagaggacataaactaacatactcccatgatttggggtcatttactataatttcccttttttctttttctaattaaaagaaaggcccttgaaatcaagggaatattttgagaaaattacatcactttactttatttgttttaatttttacttttatttttattaatttgtttttagtatataccaacttttatgaataatgtctccattaaaccccttaagttatgtgtattatatgctagacttaaatagacaataaaggtatattagacaattcacttaaaaagttggtataatttaaataaaaaaataatacaagggtacttgtagttaataaatacaaaaaaaaaaagaagaaattacactctataccctttttatatt

SEQ ID NO: 355444 - DNA, 658 bp, Cannabis indica
gggtttaggtctctatctaggttttgatcagggttcgggtttgggtataggtcttggtcctggtcctagtccgagttcggttctagttccatttgcgattttgagttcgagtttgggtttgagttcgggtcgaagttcgagtcctgttctaagtttgtgtttgggtccgaattttagtctaggtccagatcagggtttgggtgtgggttcgcgtcctgggtattggtctaggttgggtccgagtcccaagttccaatccccatcttagtctggattcagttctggctctaagtccttttttctgatcctggtcttggttcgagtttgggtctgggttcgggttgagctttgggtctgattctcggtgtgcgttttagttcgggtccgagtttgtgtccgggtttgtgtccaggtctgcacttcaatctgggtcttagttcaggtcctggtccatttttgggtcccgagtgcgggtccaagtttgggtctcggtcaagatctcgatccagatctaggtctagcatttcgatcccagtctcggtctttgtccgagtctaggttcgtatccgtttccctatctaggtccaagtctgtgtttgggatagggtcctagatataggtcaaggtctaggtctcagttccggtctgggtacacgac

SEQ ID NO: 355445 - DNA, 679 bp, Cannabis indica
tattacacatttgtccaaaagcttatttctcctatctttaagcactaaggaaactctctaagaaatagctctcggaattatcaagccttttagggtttctagcaaagtgctttgttgatagaaactagttcatcccaaatgggcaccaaagactttttttatagtctttaggtgatcacacttagaattcaaacacaccacctcaattctctcatataaatgagtattaatatattttgtaactactatatttcataacatttgaatcatatcatcaattttatgtaacatctcttttattacacaaaaataggatcaaccaacgaagttaaaaaagcaattaaccttgtaacacctctctatgttacaaagtataggttaaaattttaggttaaataaatcatatgttatataatttatttaccaaatacttaatatatattattcacataataattaatatgtaacattttaatctatataatacattattaaataatataacaatccccactagattaaaatatatgacacacttgtaacatttatttaattaatcaaaatattatattcaaatataacattccttcactttgattgaataaatatataattttaagaagtcttacttaggtgcattaggtaaaatatctttcgacttgaattttaccttagtgta

SEQ ID NO: 355446 - DNA, 597 bp, Cannabis indica
acttctcggccaacgtcaggtaacatatcgcatgttataaactagtgccttgaaatttatttatacttatctttatttgtcctcgcagagatgacttttctgaagtccgcaccggtcctcacccgcaagccaaaatctggaacagcgacgacttctcctatcgttcctcagaagaggaagagcgacgtggttgtcacccttgtcgcggattcctccaagaggccaactaagggcacgtaagacaaggggaagaaagtcgtgatcgatccgactatccgagctcgcaacatcttgactctccaagagaagttcgtgggcgatgaatttatatcataggtcgacaagacccctgtggaagaactgcggccttgttctgtggagttggctttgcagtttattgcaatgttttcaagggcctttgtcactggatctaaggaagtcaaacttgtgaagagacagaatgttcagcttcaggaggacatcaagaagctgaaacaagatgcgacttccaaggataaagaggtcgaggaacttcgcaaggccaaggagcaagtcgagctcgaagccaagagcgctcagatgaaggtcaaggagatg

SEQ ID NO: 355447 - DNA, 1215 bp, Cannabis indica
agtttagttttattgtacttattttagtttttcgttttttttagttttttttttgtttttttttttttttattttttttttttaatttaattttttattgtatttatgtaatatattataatatagactatctcactagttctcttactaccctttattttctttttttttttccttaaggtttttctttttttactacttattttgtaaatttaatttctaattataaatttagagaaaaataaagatttctgtatatttcaaattatttgtttatattttttttattaatattgttatatggtatttttaatatatgtgttcaatattatattaatatgatacttaataattggttagtattggtgttcaataccatactatgtgtacacaataattttttttatgaataatcttttgtacaattttttttgcttatttatttattattattaataaaacattttttttttgatgaaattgataaaacattaatacatattatttactaaatcaaaatttgtgagactcgacattgaaatgaactaataacggtatgttaccatttatagtacttagtaactctcttagcattttcctaagggaaatttgattatatatgcatactaatggggaaaattattttcctaaacttatgcatttcaaaattaaaaaaatatgaccactttacattaaacccaaaaatacccctttcatttttcaaacctcaactctctctcttcctctatctctctcgttgttctctcatcatctcaccctcactaaatcaccaaatcaccaccaccgagcaccaaatcaccgcgtacccagaccaccgaccaccgtgagacgcgactccaaccctctaccactgagcttcgaacagagatatcgaaggcaagccttcgaatcttttttttttttttttcgggatgtgatttgggcaaaatctgggtttggggtttgatttcgtcggacccgatgcaacccgatgcaggtccgacaccggtccgatggtatcacaggaaaattgaggaagacaaaggcctgataggcttgatgggtccgatggtgggcccgatgcctgtgtaaaaaatagaatttgatatggcccgatgggccagatagtgggcacgatggtgggccccgatgtgggctcgatgcctgtgtaaaaaaatgaatttttgatatagcccgatgggcccgatagtgggc

SEQ ID NO: 355448 - DNA, 1049 bp, Cannabis indica
gtttttattaactaagttttgctgaaattaattgaagtaaaaaggtatgttatctcttcatttttcaaaaaaacaaagaaaaaggaaaaagcctcatttcttcctctctcaaactctatttctctctctcgaaaatcctagggctgcgagggtttgttttggttcatcaattcagcaagttttcatcaaatcttagagtaattcaagttgaggtaatctttgatcaagcttctctttgttttcttgaagtttaagaaaaatgaattgttgcatgtttgatgattttgtggctgtggctgttgttattgtttattgttgttttctaaagcttaaatatgtttaattgagtggattagaacaggttttgatgaatgttaggttattttaagcaagtatggagttttgaactcaaactttagttttatgagtgaaatgttatttagcttgctgtagttgttgtagttgtttgttgttatattcagaggcttagttatgagttattatgtggataagtgcatgaattagaggctgtgtgaagggttagtcaagttttgagttttgaactcaatcttgaacctttaatggtgaaattcatttctgtgtatgaagctttgttttatcacttggaatatgttcattggggtctaattagcaggtctggagagtttggtttgaattggggttgaattgcttgagttatgaaattttgaacttttcctgcactgaaccggaattccagttcagggaggcctgtaggaaccgatctaccggttggcttccaggaatttttcccagaactggaattccggttggggaaccggtctaccggttggggcaaatttgggaaccttagtttttcccatttttggggtaattaagggaatgccaaggtaattaaccaaaaggaaaactttagtttcaagtttaagtccccgagaagtgatttggcgtgtcacttatcagtgttgtgatcattagtctgatttaggagcctgcaattcgccgagcagattgttccactcaggttgaccgtgttgggttttgtgccc

SEQ ID NO: 355449 - DNA, 740 bp, Cannabis indica
tcagctggggcctttgagctgggagttgagtaacctcccaaacctcattatgtttcacggcccctgcgtatcgtttgagctccttgcgagtagttcctccgatatggggacctccggagatcatggctaccctcctattaggtcttggcggcaaaccggggatgtgctgggcgtcgcccgcgggagccgctggagctaacgctcctgctgtaccccccggtgttccctggggcacacccaccgtcgcctggcccggattgaggtgaggcagcctatttttgttccactcatagaggtggcccaaccggattaggttttcaatctcgtccttgagattcttgcattcattggtgctatgaccaatgtcgttgtggtactcgcatcttttgctcggatctctccgggagctatccttacaatggttgtggtctccggtagtgtgtattttgcctagtagcgaagtacacatgctcttgggagtacgacagctccgtgtattgggtgtactggggagtgtacccccttttctggcgcttctcccccgtccgggtgctgcccttggaggaccttttactcctcgagccctgggaagggcctgccaggctagcggtcggagcggagtgcgaaggagtttgtccattcgccccggatggattgccgaaatgggatgacgctggcgccaaggcctggctctgactatatccggggggggcggagaattgtatgccgcttgtctgtgg

SEQ ID NO: 355450 - DNA, 708 bp, Cannabis indica
ctttgctagggtcgaattagagggtcagggtaggactagcttgattaacttttttaagtgtttactgctttcacggatattctaacacttaactcttttctcctgttgcagcatctaatcccatggaggcgatcttggccactcttgctggagcctacatgatgctgcttcccttcctcccacttcttcccagatggtcacccccgtgaaggcttcttccagtgcccctccaaacactattgacttagtggatgaggaggaggtacttcttgaggaagccgaagaaggtcaagaagagcaatgggctcttcctgaggaagttgaagaaggtgaagaagagcaagaggttgctctggtgcgcaagcgcagaggcaagatgatagtggaggaatcttctaaatggccgcggagggtggacactccggccccgagtcatgattctgggatccctcctgaggcggagtagtttacagtgcctcacggcattgtactaactccggtccccggagatgaggcgaggcaagagcttcggatagccaagtataattatgcccttgaagagtacacccgggggcacgatgaggtggaggccttgaagaggtttttgcgagaggaggtgcaaaactctcttaacgaggagaactttcggaatccgttggatctaaacctggaccccctgacggactggttcaaccgtttccttgggcc

SEQ ID NO: 355451 - DNA, 760 bp, Cannabis indica
ccacgaattgcattcaaaggtaaggttttttttttgaaaaaaaatatatttttcatagttttggatgccaattattgcatgttgttgagattagtggattttttatagattttgtgctctttaggttgtagatgttggtgtttcaatggtatctgtgattgttacagggttatcgatgacatgtcgatagaatatcgataggatgtcgatagaattggtgtttgtttacattgcattgcaattattgtatgtcgttaggatgtcgatagaatatcgataggatgtcgatagaatttgtgtctgtttgcattgtattgctgttattgtatgtcgatagaatatcgtgtgtatgtcgataggatgttttgtcgacagtatgtcgagtgttgtcgataagattaggatgttgcttttaagttgtattatcgagtgcatatcaacaggatgtcgatatgttgtcgacatgttttaatttatattggctgtttgatgatgtcgacataatatcgacatgatgtcaatgtgttgtcgacaagattaggatgtcgcttttaagttgcattatcgagtacatatagacaggatgtggatatgttatcgacatgttttaatttatattgactgtttgatgatgtcgacataatgtcgacataatatcgagatcatatcgatattatgtcgaccatttgttaattttttgacagtaatatttttttggtttttgttttttcaaatggctcccagactcataattccagca

SEQ ID NO: 355452 - DNA, 591 bp, Cannabis indica
tggtttagtacataaacaattactgaaataaaaaaaattgaatttagataaaagtccttgaatctaacaatctcaataattcagagagaatttttaacgaccaaaaaagtttagaatgcataatttaatacatgttaaaatttaagggacaaaaatcattattattattattattattattattattattattattattattattataatagattggctattgtagtagttagttttggtcaatgcatatgtactcaaaatgtctcccacctaaccttgtttgatcttttccgggttagtttagtctttttcataattaatatataaaatttctatgtaaatttgaaaaaattgaccacataaataaattggtgagtttatttatcataattatatgcatatatatatatatatttaataataagtagtagtatgtaccaggtatgaattccaaatagacggcagaactatttaactttattaacctattaataattatatatagaatatatcatcttttgtgttgtattttaagatatatttcaaattagtttacttaatctatataatatagtataattatttttcttc

SEQ ID NO: 355453 - DNA, 529 bp, Cannabis indica
aaaaagtaaaaatattaaaaataaaagtaatataaatgttaaaaattggtcaaaatagttattttgtgtaaaaatacctaaaataatcacaaaatagaaaaagaaaatgattaagacacatttaaattacacatatttctcacacacaatgatgcatagctaatctcaaccatacaattaaaagtgatatgatctcacttaaaaatacaaatggctaatattattacacatcgctgtgtgtaataagtgtgtgaaatttaagtctgtatctcgcattactcaatagaaaattatgctttaagtctttttctctattgtgttgaacttccattaacgctatttaactctcgtcgtaattttcttctagtttcctcagtacagactccgttttaaacatattaaaagaacatttagaagtaactgatactacatacttctatctagcccaatgatcaaaatttaggccttatatgtgccctgtttaaagcaaataacagagcatgttatattatttataataatataatat

SEQ ID NO: 355454 - DNA, 543 bp, Cannabis indica
tagtttgactctgataccatgttgagaatcatggggttccatctcaaaaccaattagtgatgagtggagtagcccatgttcttatatatgactcaatactctaacatttattctatgtgggacaatgtccacaatattctccctcaagatgctggctatttttttcgctcaccaatcttgaaccgtatcaaagtggacatggtcactatctgtataggtgcatatcagatagaatcacttgcccgtaaggcataatgctctgataccatgttaaaatgcagaagtgtatggttaaggtagtagaataggtgagtgtatatggtgaggtgcatgagcttctatcttaaaattaattggcaatgagaggagcaactcatgcatcttatatatagtagtttcaacacattatcaatgtgggactctctaacaactactaacaaacacaatcaaaaattgtttatcaagttaattaaacatttttccttatttttaagcttagtatggttaagataaatcactatagctttaatgcttaacttgatc

SEQ ID NO: 355455 - DNA, 532 bp, Cannabis indica
tcctctgctaactgaggtgagatttgagtcatacaagctacctgcctgggacccttcctgcttagggcatcagcaatactttggccttcccaggatgataaaggatctcactatcataatcctttactaattccaaccaacgtgtctgtctcatattcaaatctttttggttaaagaaatatttgagacttttatggttggtataaatttcacatctttctccatacagataatgccgccaaattttcaaagcaaacactactgcggccaattctaggtcatgagtcggatatcgctgctcataatcttttaactaacaggaggcatatgtgataacccgatcggcttgcatcagcacgcatcccagaccttgtctggatgcatcgcaataaaccacgaacttttctttgtaagaaggcaaagctagcactggagctgtaatcaatctctgtttcagctcttgaaaactagcctcacatttgtctgaccatacaaaacgctgattctttttggtgagctcagttaagggtgt

SEQ ID NO: 355456 - DNA, 519 bp, Cannabis indica
ttttttcaatcattctactaattttactcctattacttcacgataatttttattcttctctaattaaaattttacccaaattttttcacaaatctcacatccatctacaaagaatacaaatctattatgtttaaaattagaataattagtaaattttacacctaaactttcgacaatattaattttaacccctaaaatatacggcttgttaagaatcccccttagacttttacatctatagaaatttagtccttctgttaggttctgtctcattattccgtttaaataatgatgtgtctttgtatattagtaattttgccccctaaattttgacaactatcaaatcgtacatcctcaaaataaatatgagaaagatttaacacgttttttagttaatcttaaaaaattaatttagatcttaagaaaaaattatttttaatgattaaaaaaattaaaaaataaattaaaatttcaaaactaattaagcgatttaaaaagttatttattttttattaaaaa

SEQ ID NO: 355457 - DNA, 191 bp, Cannabis indica
aatacgtatcaacgaatgtaatgggagatattaatttgtactctaagacttgaatatgaagattggtttcacgttaaatttggttaaaatggccccctaattcaaaaatttaaaatattcttatttacagggtaaatttcaacaagttctttctttactcttacactcgttagtgttctgttaaaatctca

SEQ ID NO: 355458 - DNA, 620 bp, Cannabis indica
aataaattaagagattcatattgatttcaagcatcgaaaacacgtaaaatatagactttaatttcataaaaattctttcgggtccgatcgtgttcttaagagaatttttcagttttcagatggtttttaaatccttttcattcataaaatcgatctaaaatattatatgaatatagtaatgaatagaggctttgaaataaatatcgaaaatgaaaacggaaaaattatagaccgaaaaataaaattttcatgtatatatatactcgtatacaatgtatatgtactgcataaaatcattattaatgtatggaagagagtattacatacaattttatgcaataaaaatatgaaagcattgagtattatatataaagatatatacataaaaattatatgtatatacacagattgaattaaaatgtatatatatgatcggaattatatatgaatatgaatatatatataaaaaaattgagtatgaatatatatataatcgggattatataatatgaaagtatatataatttatattataaatgaagaaccccctaaatgtatatatatattatatatatatgaaacttaaataaaatcaaaggcagagatatataatccgctct

SEQ ID NO: 355459 - DNA, 621 bp, Cannabis indica
tagggcaaaatagtgatttcttatgtaatgaactttttttttaaaaaaataaaagcaaccaaaaactaacattacaaaatagcaactagggaccattaaatggaactcaacgctgacgatttcctcccgcgtctcgattttgttcgagtgtctggcgcacccgtggtcggtacgtcaaatatcaaaacactcatcccacggtggccttgtggactgcgagaggtagagcctcagttggatggcagatttggctgtggtggaagtagttccacccagcctcatccacccattcgaagcctttgtcaacatttcctgaatatacatatagtacatacataaaaatttttagaaacaatttataataatatagcattgaaataaatagatataaagagttgagttattacccgaattttttatgagatgatttattggattgctaaaattcccttgatgcacctactacacacggttgtagtgcataccaatccttctgtttacacatcttcacttcagtgcaacaacaatacataatttaattttttatatattatccctatacatacgtctacagatagggagtgacttctctaggcaacaaaacaatactaaattgaggtg

SEQ ID NO: 355460 - DNA, 1367 bp, Cannabis indica
tcctcattttcatgaaggatttctcgttcattaatttccggttgtctcctttcttactgttcatcctgattctcagggggtgtctcattttccctgggttgttcttcccgggccttttcctgtctcctggttcgtgagccacgaggtctgcctcgtggtcttctcactccaggttcaggttgattttgagcatttgtcccctgcgccgccctggtcaaggctgcctctaattctaactcagcatttcgacgttgcgcctcttccagacggtgtctcaggcgatggctttctgtttcataagttctttctctcgcagattgggcacctccatggttgagctcttcatccctcgtctcaggactctgaccattcccacgctgagttctcctcgagtgcgttgtctacgttgtaggaccaatgtccggttgagttctctgaggacgtgtggtctgagcactgggaccatcctcaagttgagccctcctgtaacgggtggtccttctggactgcagattatacatcttctagagcccattgggctcttttccagaatgatggtcagtttcctcatgtggggtgttaatattctctggattttcagccataaaggataaggtttttctttaaaagaagggaaggttttttcttagctttttcacagaggctctcaatgaaagcaccaaactgttaacgcatatttttgttaactaaatttgagcctcacgatgataattcaacacagaaaaaataaaagctgtagaaaaataatatatgaacacagggttttttacgtggttttgcagttaaaattttgcatagtccacgagtcaatcttatttagatttctgagtattttcttagggtctcttgtataaaagttttttcgttcttttttaagattgtttgccactataacgatcttggcacgagaaaacgagaaaaaagatgaacatcttgatccccgagttcaagatgaaagaaacctgctaaaacctattaaagaattggaagaggttattctcgacacaagaaatcccaccaaatgtgtgtacattgtgaagaacctggatgaggagcgcaaatagcaattaataagcttttggaaggcgaaccaggatcaattcgcctggagtcatggggatatgataggaatcgaccctaagattatctgccatcatttaatgttgatccaaactacccggcgaagagacaaaaaggagggccctggattctgagaggcaaggggcactaaaacaggatgtttgacaagttgttagtcaacaattttatacgcaacgtgttttatccctcgtggatagccagtcctattctcgtcccaaaacctaacgaaacttggagaacttgta

SEQ ID NO: 355461 - DNA, 1437 bp, Cannabis indica
gtggccccagcattcagaccacatgttcacagagaacccaacccgacgttggtcctagtacgtggatagcacgcacgaagagaactaagcgtgggagggcccagaaccctaggacgagggatgaagagcccaatcatggaggtgcctagcctatgggagaaggtacttatgaaatggaaaaccgccgcctaagatgtcgtctggaagaggcgtagcggcggaacgctgaattagaacgtgatgcagctgcggccagggagacacaagggacggatgctcaaactcaaccagaacttggagtgagaagaccaggaggcagacctcgtggctcacaaactaggagacaggaaaatgctcgggaagaacaacttggggaaaatgagataccccctaaaaattagaatgatcagccagaaccctctcactgaaatgaagatgggaggcaactgaaaacggatgaatgagaaattcctcatgacaatgagaagaattttaagactcaaatgggagaacataggtcccttgcaagaaatcaccagagttcttcccaaatccatagaggactcgtacaaaccctaatgggggaaatacgacaaaccacacttaggggaaaagagcatagcgtgaagaagcaagcgtgacctcgaggaggtcaagaacagacattcgtccaactcaaaggggagaaagtactcaacgaggtaatgattgagagggtatgggaaccagtaaatccgcgagttactcaaagacaaagtgtatgagtgggacgcgatctgtgagtaaaacgaggtctgtaagcaatcactcttgttatcccaaaattggtactctgatgtggcgtgacatactggtgacacgtggaattgaattcacatgcctgctattgtgttattttgcacacgcaagtgtacgtatcgttacaagtagtaaactcactaagagtgaggtcgatcccacgaggattgtagttaagtacgttaaaattaaacttttacttctatttggttaaataaaaattaagaataggttaaaactagaaaaataataaaaacagtgataggagaaacaatttaagaaaattaacagttaataaaaactagggcttcgatttcaattgtttctattgattatggcctaatatgattattttcctaatgttaatttctatgcaatagcaggtttactaaggtaatttatagtcttctcagatatataaatctcaattacatgcaaactttctactctcgtgataaatttaacatgcaacaggcattaaacacagaaaccctataagctatctaaaccatataggtactctcgtcctatatcgaaattcagttctattttactatagcataattgacactcacttctcagatctcgcatcaaaatcatagacagttaattggtgatcaggcaattaaaagtaattaa

SEQ ID NO: 355462 - DNA, 833 bp, Cannabis indica
taacaagtatgtttcattaacatcctaatatgaatttctaaatcaatgaaattaaacacatataaagtttcagaaaaccttacattgggtgcaacggaatataatgtcttcttccgctcaaatttctaacccttgtatcctgtctgccgtagagtatcaccaagatctgagcccgaatgtccttctctttattatggattcttcacagtcttccacactatgattgagataccacttgatgtgtgtgggcactcactctatcactcaagggtgtgaaaatttttaagaagaaaagagaagaaaggtggttcagctatgggtatagaatagatggctcaaattttcctgaaggtaagaaatttcatcatcttttaagtgtgggccatcactatctatttataggtaaccactaggtttaggttaggaattattaggcgttaaaataatgaaaatattaagtagaaaatccctttaagtggccggccatggttagtgggccccgcttgggtatttttccagttttgacaattttcccttattttctcaaaaatgctactttttcaattctaactatttaaatgccaaaactaattatttaataattaatattaattatcaaataaaattaccatttaatatatgtattaattagacataataaagtctttcaattgaaatcattacattagtttttacttcaccaacattagattgcttcatctaaaattgtctagcatctttttccatgttactctcccccaaaccggtttgcatatgcccctttgaacattgaccttcaaaactatttattttatcaattgttgttcctaaac

SEQ ID NO: 355463 - DNA, 1343 bp, Cannabis indica
agcttgacctcctgaggaaacagaacatgcttcttcaggacggtataagaaaactgaagttggacgtgacctcgaaggacaaatacatcgaggatcttaggaaagccaacgagtaagcgaaggaaaaggtcaaacttttggaattgcgatttggcgaactcgttcacgaccttgaaaatcaaaaggagatcaggaagaaacaacatgatcaagccgtttctgattatatttatacgactttgtccaagcttcctgactttgacttcgcaattcttagagtgtaggcaattgaattagccaatatgcttttcgtgctatgtcgcctactgagacccaatgacttgggggaaatattttccctgaggacacttagaatgccaatgcagaggaagtcgcaaaatggtgctgcaagcaaggtggctgttgtgaaaattatatcaatttataattgcacaagtgtacacaatcacaaacaagtagtacaatgataagtaatcaaagttcgtatccacagggacttttacactaaataatgaaaaatcaactaaaagcaattcaaaagttacaagtaaaaagaaagcaaaataactaatcaattcaagagaaaaaattcttaaccttaattctagagtagagaaataatattttaagctaaataaactaaaattaagaagctaagagtgattaaagttgtgataatttcagatttagaaaatagacttgggtggttaaatttcccctggtatgctccagttgatacagcaatgacttagcaatcctatcagagttaacagatttcaacaaaaaattagcaagctttttccaaaacctgcaatataccattcataacctcaacaaagcattcctacactaaatcaggccacaaaaaatccaatgtagcatcaaatctttagttatgcacggtagcaaaatatgcatattctacttttaattaatacctataagagatgtgaaaatcatgcatcaattagaagggttcaactaggtcttacttttccaagtaagatctagcttactaaatgttaaatctggccaaaaattaacattcaatcaacatttcatcacatctaattgaacaaagataggattacttcaaccattgcaaatcaagcactagctcataaaagggttcataaccacccaaatctcaaagatcttatttcattgaaattaaaaacctaaaacaagaaactaacattttcatcgagctaaagagaatatcaaagagtagaaaatgatacaaaatggaagaggagagcaaaagaaatgagttggtgagctcaaatcttctctattgatggttgccttcttctccttcttct

SEQ ID NO: 355464 - DNA, 725 bp, Cannabis indica
ccaagtctaccactctcttatacagagtgtcatgggatgtggtaattttcaagtcccgactgatcgtagcatttagtcctcaaacatacttctgctttctggtgaaatgtaggcactagatctccagcaaatttagataattgatcgaattccagagtatactcggccacagacattttcccctgagtcaacttcacaaaatcttcttggtgtgaagtcctcactgcaacgttataaaacttttcttcaaaaagtttcttgaactcttcccatgtcatcacactgacatctcgagtctgattcactatatcccaccaaacgcgggcatgatcttgaacacataaaggccgcacaattcaccctctcagttcccgtcacccccatattatcgaggatacgggtaacagtgctcatccattgatcggccttaataatatcaatgcctcccagaaaagccggaggttgcagcttcacaaaccgctcgaacacagagtcccggtgcggcataatatacccttggttacccaccactggcactggagctggtggtaacccttgataaactgaggcagcttgtttccttaaaccttgcaactcttcctcttgacgaagtatgacacttcgcatttcatgaaacatctgctgccagtcagcagaaggattagcattaacagcccccgcattatcccccagattttgcggaggtggaggcggtgctggtggat

SEQ ID NO: 355465 - DNA, 662 bp, Cannabis indica
aattaatactcagaaaatatatataacaaaattatatataccactattaaaatatgagtacacaccaaaaaaattatatataataaaatctcatcttaaataaataatatacaatagacaacaaaaaccatataccatacaagaaaacgtacatacctacggtaaaaaataaaataaaataatataatattattaaaaaaaattatatatatctgttggaattattttaccaggatcttagatctactcacaagtatgttgattaacatcctaaatatgaacttctaaaacgattataaataaacacatataaagtatgagaaaccttacattgggtgcagcggaataatatgtctccttccactcagatctctaacccttgtatcctttctgtcgcagagtattatcaagatctgagcccgaatgtccttcttgttgaatctggattcttcacgatcttccacactatgattgaggtaccacttgctgtgtgtgggcactactctatcactaaggggttcgaaacaacaaagaagaagaaggaaagagaggtggcggctaggttagatagatggctcaggtttttctctgaaaggaataagatgcatcatctttttctgaagccatcactatctatttatagtatgccacatagggttagg

SEQ ID NO: 355466 - DNA, 642 bp, Cannabis indica
acacttcgcatttcatgaaacatctgctgccagtcagcaggaggattagcattaacagcccccgcattatcccccagattttgcggaggtggaggcggtgctggtggatcagttcggatagccacgggctctacttgctcaccctgtggtctggatgattgcagagggtccattactagtacccctgtaatcaacaaccccagcgagttaagcaccgataccacacttacgcacttatttccttaagccctaactcatctatttacctcataaatattcagataaacaaatagcattatatagcatggaatcacataacacatacatactctagatgcttgcatactacctaaaatggacaccggtaaacagatgatcacacatacagtcaagtatttactctcaatacttactgcaccatgagtcgagcttatctctgacgacgaatgttcatgttcggccggtctacaggaagtttaaaaaccttggcgctctgataccaaatcgtaacgccctaaataatcaggcacgctactcaaaatacttatgaaaccctaatcccctaatcgcgattactaattaaagtagcacagaatttaaaattttatattaaacagaatgaaaataaacttgtaatacttt

SEQ ID NO: 355467 - DNA, 625 bp, Cannabis indica
atttatatgggtttttttaatcatatttttgtaaaaaaaagtagaaatcctatatttgtaaaacaacaataagttttgcaggaaaattcgccggcaccggcaccggaaaagtcgccggaaaatcacggtcactggaaaaaatgtcggaaaagtcacaggaaaagtcgccagaaaagtcaacgtcgccggaaaagtcaacgtcgctagaaaagtcaccaaagtaaatgtctcagatataactaaaaatataatcggttatatgaataaaaattaataacttaaaccggttataattaaaatataaacggttatgtaacataataaacaaatacaaataacataaaataaatcaaaccagctataattaaaatataaccagttccaaaacagaattataatgcataaaaataaataacacaaaataactcaaatcggttataactaaaataaaactagttatataacataatgaatacaaacaagtaacacgcaataacgcaaactgattacaattaaaaacaaagaagaaatcagttcctaaaacactgaaatataaattaaaaacaaaactagttctacaataaaatatttcataatacataatacctcataaaaccggttataa

SEQ ID NO: 355468 - DNA, 865 bp, Cannabis indica
aattatttattataaacggtctggtccagtttaagcattaattatttattttgaactgcaaccgaaccattacgccataaacggtccggattgactaaattaccaaaaatagtttctccggttacggtttacaatggttcagattgtagtggtccgaatttaaactgcggtttttcggtttatatggacagccctaattatagttatcttctcatgagattgtattttagttgtttttaattattttatagctcatttatagttgattataattatcgtgaggttaatttctcattattttttaattgttttcttactctttgctgagtaagtgtatctttgcaatattaaaattttacaagcatattattgtaaataaaaattttttatcgtagaattataaataaaacattaacaaaatatatatttttaaaaattacctaaataatattgtaaaatagtatcaatgtgccaatactaccataagaaatttctgaaaaagtaagtgttgttagtatactttaataaaataattatagtaaccattaaccaattgtaattgtagtgccattttataatcatgggtggactcatatagaggtgagaggaggcagtcgtcacccttgaaaaaaaaaattaagaaaaatattgttgatctcgcttttagccaacgacaatgagtcaattaataagcgataagaaatataattaagatagagaaaaaaccaataagccataaggaacacaaggttttaaaggggtttaacccctttagtttggtaatagcctactccccttagattgtattaacttgagaacacaaaatacagtgtttcctctcccaaagctctcacaatgaaatctc

SEQ ID NO: 355469 - DNA, 895 bp, Cannabis indica
ctagtttgatcacatgggtaagtttagaaccttatttcttagtgggaaatattttagagaaaattaattatcgggattaagcggggttatggaatttgaccattttacccctagcttttgaattaccctagttttgggtcaaagggcaattttgtcatttggtaaaatagtgggttaggtggctgccttgtatagtgacacctagcatgataattcagcaagagttaagttgaattaactcatttcattttggaggaaaaaaaataaagaaaaaaaaaagaaattagaaaaagagaggcttttctcttgaattttctctctctctctctttcggctgaggcaaaaccagggaaatgacaaccttttccttcctaattctgtgtgatttagctagggattcaaggaggagcaagcaaaggtaaccctagaactattggttatgtgttttgaagctttttctttggttgagtatgtgatttttgagaataggggctgttaaggtttaaagcttgtgtaatctgattcctaggttagttttgagttgtttttaagctttggttattagttttgaaagatggtgatggaattgggtaagcttgagcattgaaactcaagtttaggtctttaatggcaagttggaatttattgtttcgttttgtgattttctgattgaattaggtggtaaatgcattgtataggtgtactggagagtttggttaagtttggttgagttttgagttcaaggggagattttttaggttcccagcacagaaccggaattccggttctgggggacctgtggcaaccggtcgaccggttggtgacccagaaccggacttccggttgggaaccggtctgccggttgggggagtttttggaaccctagtttttccca

SEQ ID NO: 355470 - DNA, 965 bp, Cannabis indica
gaagtgaaatgataattttctttgagcttggctaaacaaagataaatgaaagagctctcatttcagtaattatattagtttactgaaatatcatttataggaagctaagtattttaaggataaaatacattgaggggtagagtagtaaatttgtccatactcgatgtaaatcatctatagaggatctttgattatttagattataacagtagataattatagtgtgtctatatttggaacatatagagcattccatgcaataaggagtgcaatttcaaatctatagtggagtcataaggaattcataagatagaaaatttaatcggtaaattctagaactacttattgggagcttgatcatataggtccatggtccccgcactagttgagataatataagcttttagactcatttaattagttttaattaaccaattcgaattctaaactagactatgtattgtttataaattttcactaagcaatgaattaattgagaagaaagaagaatttagggttatttgttaattaagaaactttgtaaggtctaattaataaataagttaaatgagaattttatttgataattaattattaaataaatagatttaaaatttataggattgaaattaaaatatagtatttgtaaaagaaaagataagctcttaaataaatggcaaaattgaaacgtgtggggcccacatatatggttagccactgaaggtcaatttaagccattattttatcttctattaattctatataatttaaatcctaaccctataaggaatcttataaatagaaagagatggctcttatttccatatcctagttttctactttattaggcaactgaaaaaataaagagcctctctataggatttgaattcctctctcttctctcttcataatttggtggccctatagtgagtgagtgccttactcacacaattcaagtcaatact

SEQ ID NO: 355471 - DNA, 889 bp, Cannabis indica
  modified_base (843)..(843): a, c, t, g, unknown or other
  modified_base (862)..(862): a, c, t, g, unknown or other
tccacattactagagcggtcattacacatagtgaatgagtgcaatgcccacgcatagcaagtcaagtactcaatcatagagagtaagacgttggtaaacaaacccgaaggagaaaaagagatccaggttcagatcttgataatgctctgctacagaaaggaatcaagggctagagatcttgaacggaaggattcattatatttcgctttaatcaatgtaaggttttcttaaactcttatttgtttgtttcattattttagagaattcatatttaggaggttaatgaaacatacttgttagtaaatctagatcctggtaaaatattccaaacaactggcctcagagccatggtaatgatttaatttcatgaaatatggatttaaaacaatgaatattgtttgcatgttgatttggatatgttcatgttggtttatgcgttaattgatgattgtatgtgatttacaaaatttttccatgaaaatattttatttggattctttgtgaaaaattaagcaactttcgttttaacggaactcaattccgataaaaaatgagagagttatggtattttgaaatttttggtgcattgagtgtcgagcactcgaacaccatgcgagacagacccttggacaagccaatccgtgcgcggacaagggacaactttatgtttgaagcacagacgcacgcacacgttcagacacaatcccatgtctggaccctgtaattgcccgtgcgtgacactgcatccgtcgagctttcccacacgtcccccctgcatccgcacgcacatcatggattttgcaccctgtgttggttgcacgtgcaactttgtgccagccaacnccaaattttcgatttttangtgatttttccccaaattttgaatttt

SEQ ID NO: 355472 - DNA, 600 bp, Cannabis indica
atatatatatttatttgtaaatattcataaaactgtataaaattatgtaattatatatatatatatatattttttttgtatattttttgtaatattatgtatttacttgtatataaatgaaaattatcctttatataatttaatttaattattattataaaatattggtaactaatcgtaaggcatcactctcttctagatgatgctaagcacaagtagtaattataattctataagaacaacattcataataaaaagttagaccaacataatcactgctttttttttttggtaattaaaaattatattttgataataaaaacaactgtccttataaaagtagtaattattttgtgagtatatatatctggatgcactaattatatacaatttatattgatatctttttgttggaggcatttgattgtatgcgcacgttacatataaacttgtatttgttcctaaattggttttggaagaagacaaaaagttatataccaacttattaggttaattagcaattttatctcccgaactttgacatgtatcaaatcatgctctctaaatctttaaggtcgttaaaaatactccttaaactat

SEQ ID NO: 355473 - DNA, 564 bp, Cannabis indica
cattaaaagcctgtgatgtaatgcatagtctgggaattgtgcttgtaaatagattattagagcaaacaatcttgcaaatgctacattacgagtagataataagcaaacatgtgacaatctagttgaggcatctatcaataccataaaatattagaatggtccacatggtggacaaataggcccactatgtcgccctgaatatgttcaagaaatctaaaggattccatttcaacttttactggtgatggcttaatgattaactttccttgagaacaagcggtacatgagaactcattggataatagaatctttcggttcctcaatggatgaccatgtgagttctctattattctatgttcatgatagaactaggacggcctaaccgatcatgccaaacaataaatgaatttttctgatttgtgaacttcttgttcataataacatgagtttctattgtacttatacgagtaaagtacaaacctaaagacaaacaagataatttttttaatatgcacttttttcttgaaacaatagatgcaacgcaaagatactcaaattattttc

SEQ ID NO: 355474 - DNA, 473 bp, Cannabis indica
acaagcaatagaggctggtggaagtggatcaagaacatatagaccgccagattcatgtcttttactagtaatcttcttcgtcataagatcttgaaacaaacaatgattgggaaagaatgaggttgaatagtttagattactagtgagtttactagcaaaaaataaactaaatgacaaattaggtaaatgtaagactgatgacgaagtgagcgaaggtgtgggagcaatagtgctagatccaagaacagaagatggttatccatcatctaaagtaccagtagtgggactatgagattgaaaagtgaaaaagagactgaaattatctgttatatgatttgtggcgccagaattaatgacccatttttaggatgtggaaagaagatatgcattagagttactcgaatcagttattgcagtcactgaaggagatgaagacttaagtgattcttgataccttgagaacttggcaaatt

SEQ ID NO: 355475 - DNA, 1142 bp, Cannabis indica
ggatagaaataacttattagaacaaaaaggatcagataggaaattttgttaagtctttcgaatgacataggcaaaatacctaatccttatgaaatgtttaatggtatctataatgattacttaatcttaagaaagtattttacattaatgttaatactagattgctaagttgatgacagtctagaaggaacttatagtttcagacttagataaaatgtcacaacaagaggtccttgagaactaatagtaagaggttaagtgtacacttgggtacgaacttaaccagactcatactgttgagtgggagccatctaagatttaatcaaacaaggaacattgggagacaatcaagttatctataccaactcataacctattcgagatggtggttactctggtgtggaggaattattctagaaggatgtaaaaacccatctataataatttaagttccaccaatgaagctaaatgactttgttactttcaaaaagcactgaaagttattcaaactaaagaaagttcttaactgttttcatctttattccattttggacagaattagagatatgtcttctgttcattcagaagcgcttaaaagcagtaaagaattctgtttccctagaggagtaatgcatatcgaaaagtgatgttgcataatattttatgaacacgaaagaagtaatggtggtgaaagcaattccttaccacagacttacagttcctgtaatttgcgtttagtcaaatatattacacttgatctggacatcaagacaatagattgattgaaatgcacttcttttttttatgttagtgcaagtgggagtttgttgggatgttatgccctaaataaaagccatttttcaatttaatttgatttgttatcaatagaagattagaagtcatttgtgtttacatgcaattttcatgtttatggtttaatgtatacaatttttgtttatgtccagaacatataggtggcgtttggtaacacttttttaatcagttttctgtttttaaaagtagaaaagtgaaaatatttttataaaactgtttttacttttcaattttataattggaaatcaaaattttaaaaacaacaaaaatcactttcaatattttttaaacagtttttttttcttaat

SEQ ID NO: 355476 - DNA, 764 bp, Cannabis indica
taccaggattaaaagctgcccgatcagcctgttttctgtaaaatgaaaaataattccaagtttaaagaccgcttggccggtcatgatgtcttaaaaataggccttatgcctgaaattattaaaagaaggataaaggagaagtatttaaacagctggagtcccaggctctcggttcggatcttctgggccggtaggagctggaggatctgttgtctgaacgggaggtacatcaacattctggccagaggaagaagcagtcgcatccggttcaccataagccacttgagaagcacagtacttgagatacgtgtcttcggcctcgcccaggtaattgaaattttcctaggggttagccttccaaaagtcataaaaaatgttgagaccagctgtctctaaggcatgtacattttcttcctgcctcgccacttctgacttgtaatactcaatcttagttgtaagctccccctccttggtcttcttctcctcttctagccgacggaagacaatccgaagaactcccctttcctctttaaagcttcaattataaagttgttgcagcgcaacttttcaacttcatccaacaaccttcgtttttgttgaaatggccgaaagttgggatcgatattcaaaacatgtgagatgatacaagcatcgattctgaccatacaattgctgagcggcttatttgctgagcaatggtatttcaagttggcccctagaaagtttagttcgtggaaaaccttctcttcgaatttccatgcaca

SEQ ID NO: 355477 - DNA, 417 bp, Cannabis indica
aatatgtgtgtatatattgtgtgtatatatggtgtgtgtatatttttatgtaaatacaatttgtaattgtattgtatatattctatgtaatatatatatatatttattgtgaatgagaatgacattggaaggatttaattagtttagaaataaaaattttaaaattgaattagtgtgggatataattgattatatatatgtatgtataatttagtaactaagtaacttgttactattttttataactagttataagtaatgaaataattaattttgcaatttcgttgtatttctttatattgtaggttcgacataattttgtgttgatcgtatttgagcttgcatatataggtatatactttaactaactttttcttattatataattaattatcaatgcatgttagttgagtttga

SEQ ID NO: 355478 - DNA, 327 bp, Cannabis indica
acttgcctaagtttcctactttgattattgtaattatggaaatgaactagttatccaatttatttattattgatttaggaaaaccaattcatgtaattaatccctataaacagtgggctcatctcactattcagggacacgaattttattcagagagaacacgcaagagagaaacctcgatctaagagtgaatcactcagagaatattgtaagagctttcgagagagaataagtcattcttgttcgtcttctcacaagtcaatacaaccaaatgggagtaagctattaccaactaaatgttggggttattttaccaggatctagatt

SEQ ID NO: 355479 - DNA, 1262 bp, Cannabis indica
taaaatcatggggtttgattacacatcacatgtaatatcccgataagcctaatgataaatagttaaggtttatatttatattatgggttaattaggtaataagtgggattatgatcctactaatttatttcagtaaaaaatttaaatttggttataagtggatatataagcgtaatttgttaattatggagatttatttgaaatgtggatataatctgagttatttgtgaaataaaaatattttcaggttcaacaatcttggagacccgattggaggccaaaaaatgtcacaacagttttagttagaaatattgatagaatttttgagataagtagaaataccgaagtattttgggatactcgaagttggccaaatatcctagaaatagaaatttcttagagtggctaaaaaataataagataactattaataataaatttttattaatattatattatattattattttattattattaatattaatattattataatatattaactaaaacttatcagtttcaattggtatgtttatataatatatatatatatatattaagtttaatatatgaaacagtgaagaatgaacgaacgaattcttgttctccccctttcgataaaactttctctttttatatctactttcttcgattttcaatctgaaacctagcgatctaagctctggtagtagcaggatagcaaatccttaaagaagaaaagcttaaggtatggtttaatttcgttttaagtttaaaaataattagtttcgtataggggttttgtgaattagaatagttatagagattctgacttagtagaattgttcttcggtaagagactagtatcgatgtttacttgttgaatttgaggaggttttgagttagagatcgagttttgaactttttaaagcttagtccgaacgttaatggtatttttcatttaaggactcgattttaatttctattacgcaaggatagtaatatttatggtatatatacgccgtgtgaagtttggagtgatttggataagttttggtagtgtttcggtgagtgcgaaaaattaggatttttgagtttcatagttcttagaaattcctagaagatcagaaatcgtatttttgtcataatttttgactcggttgtccattttggacgttctatataccgtttcgaagcttgcgacgagctctacgatattatgtatattttagagccaaaatataagttttattttagtttatttataccgcggggtttgg

SEQ ID NO: 355480 - DNA, 753 bp, Cannabis indica
ccattttacccctagtcttaaaatgcttaagtgtaagttaggggaatttagtcttttgttaaatggagagttaggtggctgcctagacatgtgacatctagcaactaaatattcagtaaggttaattgaattaaccttagttttattttatggaaaatatagagaaattaagaaaaagtcaagagaaactctttctctttcttcctttctcttcgagcaacaccaaaccaaggaggaacaactattttttagctgttttctggaaattcagtagagattcaagggttcttgaagctaaggtaagccctagtaacaccctcctttagtttttgaattttatggttgattgagtatgagattttgttaattggtggttgttagggttagaaatacttagggtttggtttttatgatcattttaggttgattaaaggttctagtagctggttttaccactttgtgttgaatttatgcaagtttgagctttgaactcaaagctttgatctgtaatggcatgttgagtttcattaattttttctgtgaactactggttgagatttattgtgtataccctaattaggtactctggaaggtttggttgcattttgtggagttttgagcaagaaatagggtttttgggtgaactggtgtaaaccggctagccggttttaccagtacaactggctagccggttttggcagggtccctgaatgctccactttctcaattctcgtccattttagtgccttagtt

SEQ ID NO: 355481 - DNA, 511 bp, Cannabis indica
taaacatgtaaatagatatgtatacggttatactaatcttaccacaattccgaattcaggtgagccggtcaacctgagtggaacaatctgctcggcgaattataggctcctaaatcacatcaatcacaacactgataagcgatactataaatcacatcccagggacttaaactagagactaaaagtttccgtatcgatggataacatggcaataccctaaatacctcaaaaattggaaaaactagggttccaaaaactgccccaaccagaagaccggttccccaaccagaattccggttctgtcaggtttcctgggagccaaccgaaattccggttccggaattccaatttagtgcaggaatgagttaaaaaaaatcacagctcattcaaatcaaccccaaacttcatgaaaccttccagacctgctaattagacctcaatgaacataaaccaagcaccaaaccaactaacatgcacagatacaaaaaccaccattgatgagccaagcttg

SEQ ID NO: 355482 - DNA, 763 bp, Cannabis indica
tgttagaatttattggggtcacaattgtatatataaaatgtgtgttgggtcatcaaataaataagtcaaatttatgtggtctattttggaataaagtttatgacttaagggcatgattgttatgattttaatatgtggataccataaggacaatttctatattgatgaggggccaaatagaaatagtcaaaaatattgccaacaggtttgtctgttggtaatataacgggtaatggtccccatttgcatcgtatcttttcactcttgtatccccatcaccaagagcaaaaagtttacagagaaaggttttgatgcaaattggaagatcataccaataaagatcatttaaaggtcgattctatggactccggtacgcttccgctattctttaatcttattgtttaattctcatgaattaattagggctatattaagttttacagtattcctaacacaaccgacccttcactcctcttttctttgaacagcaagcaaaacccagcaacttcttctccttccttctttcttgctacagatcaacaagcccagccgaaccccttcttcttccttccttctctctttgctagaaaaacgcagcaactcaacaaggcaagaaaaatgttgctgcgttatttttccttcttcttcatttctccttttcttcaagctactgctgtagctttcatggcagccccttgttccctttcaaacctgcaacacacatacaaaaacacaacccgaaaacagtaacaacaaagatcta

SEQ ID NO: 355483 - DNA, 547 bp, Cannabis indica
tcttcatcaattattatttatttaaaaaaaaaatactactaattatatttatattaatataacatgtatttttatctaaaatttatataatttagcatttagttgaatatgttttagttcatttactttttataatttatatcgtgatggatttaacaaaaagaagaaaaagaaaattgaatacctcctacagattatttacagtatcgattaaatatataatatttttttaattttataattagcacataaataacaatgtatactaatataaaataaatgaaataattaagttttaataagaaattattttaatagctaagaattttaagaaaaacaactatattatcattaatcctcaaaataattaaaaacaattaagcttttaatacaatttttttattgggaagagtacatcatgtagataagtatgtattacttgattagcatccctacaaataaaattcaaaccaattacacaatcattggtaatattaattaattttaatatgaattaaaaaatgttattaatttatttttgagtaat

SEQ ID NO: 355484 - DNA, 1348 bp, Cannabis indica
aaatttgcctacccctcactattcgacaagctctgacaagcataactataatggcacaatttttggtattggacgtttcatgttaggccgaccagctttgtatgacttaaagcctgttacgtcgatatttcattcatgccttaaattcccgacaaagaatggggtatggtgtctaagaggaaactaacaagttgctcgggaatgttataaccttgccatagcaaaggctaagaaggaagtatcctctagccagagtttggacagcggaaaaaacatttctaagtagggaacttcccaaggcggggatgaagatgtggatcctcaacttggggacccaagcagcaatgttggacctgtggaagaactagaagagattgagatcgacccaaatattccagccagaaagcttaaaattggaaaaggtttgttgctcgaagtaaaattagcattgataaaatttctgagagcaaacctggacatttttgcctggtcacatgaggatatggtcagaattgatccttttgtaatttcgcacgtcctaaatattgatcccaatttccgaccagttcaacaaaagcgaaggctgttggacaaggagcgagctctagcccttaaggaagaggtagagaagttacgaaataacaatttcatgaagctttctacccgacttgagttgctaatcgcgtattggtacccaagccgaacaaaaaatggtgagtgtgtattgatttcacagacctcaacaaggcgttccctaaagactattttccacttccaagaatcgatcagcttgtggacgcaacagccaggcacggaatattgagcttcatggatgcctatttggggtaaaaccaaatcaaaatgcatccaccaaaccaagaacatacaagtttccgaacaaatatggctctatattgctataaaatcatgccatttggtctcaaaaacactggagcaacataccaaagattggtaaacaagatgttgaaagaccagatcggacgaaacatggaagtatatgtggatgacatgctcgtcaaatccaggaaggatgggggcacatagatgacctggacaaatgcttcaaagtcctcaggagatacaacatgaaactcagtcccttaaattgctgctttggagtcagctcgggtaagtttctgggctttattgtcaatgcccgaggaattgaagccaatccagagaagattcaagccctccttgatatgaaatcgccaacaagaaccaaggaagtgcaaagcttaactagtcggatcattgcactcaacaaattcgtttcaaaatcaacagacaagtctgttccgttcttaaacatcctgcaaggaaacaa

SEQ ID NO: 355485 - DNA, 527 bp, Cannabis indica
gaagagagagggagttgatgtaaatggcgagggtattttggagataacactaaagttgtcataagctaaaaatattggtaagtataagtttaggggaaattttttaaagtaatgtaagcatatttaatcaaatttcccatctaaaattcttggagaaagagaaatatgtacaataatatactagttaaaggaaaaatcttgaaagaaagaagaaaaatggtaaaaacatatttataatatgggtaaataccattttagatcttgtacaaatggtaaaaattactaattagaccctctattttgttaaaatgacaaaatgatcatatattttctaaaattgtacaaataggaccctgaactaattttttatcaaaataaaacttaataataatccaatctagagatgttacaataaaactagttgcattttctgtatctgttcgtgttagaagttgtatcaaagttggttatattaaaaagtaaaattgttaaaaattgagctctaggtcatatttttaccattttgg

SEQ ID NO: 355486 - DNA, 721 bp, Cannabis indica
tttctccttggacccttgtgattcgtccatgcactgctgatcatggtggtgacgaatgtagagagaatgatactcttctgaggaaatgtcaatggatagtcggcgcgtcgccgcctcagcatatggactgctgcatctatatgctgcatataaaggttagagaaagcagttagacaacaaaatatattaattgtagattagttgtaaagtaaagtaaaattataaattactttacttacgtcatctgtaagccactcctgtaatgtaaacagcttccaaaagaatgatggcccgtaatcgctacttttcaaatcccaaagtcggtggttgtgaatgagtccagaacaccactttcggaaagtatccaacaattggtcatccggtggcgccaggggatcaaacatcgaagaaggcctctatttcttcttcatctccatgtagtcacggaaccatacagggggatttctcttacggcctcttccgactcttaacccctgcaggttgtgcctctatcgccaaaattttaccctcggactcgctgtcatgtatatggataacacctacaccaataggagtagctggagctccctcataaggatcatacccgtcgggaaagacctcctcctcttgtagtgggggtgatgcagctggtagtaggggtgatgcagttggtagtggggtagatggatctgttggggcctccggtgctgaagctgtcgtt

SEQ ID NO: 355487 - DNA, 652 bp, Cannabis indica
gcccttagaaattttatcaaagccaattttacttcaagcagctaaccttttccaattttgagtttcctggtcgggacatttgggtcgatttctatctcctccaatacttccaccggcccaaaatttgtatttggttcctcaagtcggggatccacatctttgtccccgccttgggtggttccctatttggcaatgcttttccccctgttctaactctggcgaaaggattcttcctttttggccttggttagggcaaggttgtaatattcccgtgcaacttgttggtttccttttaggcatcctaccccattctttgttgggaacttgatgcacgaatagaaaattgatgtaacaacttttaagtcataaaggctggtcggcctaacataacgttaaaggctgatggaacatcaattgccaaaaattgtgccatcacagttatgctcctcggagcttgtccaacagtgaagggtagacgaatttgccccaaaagtgcaacactctggccggagaaaccatacactgtttgggtacaggtgatcagatctttgagttggagccccatcttctcgtacggttagccccatcttctcagatctttgttgaggctccattatctatcatagtttgggccactgttttgtttgctatc

SEQ ID NO: 355488 - DNA, 603 bp, Cannabis indica
ttaaataacatacttgtgagtagatataagatcctggtaaaataaattccaacatagtccactgctgcaaggattttcgtcttgtctcattcatgttggatcactcttttatatacaaagcaagtgacttttggttacacagaacttaattgattatcaaattgttttacattaaatattaacagtaaattgagaaaaacgtaaatggaataaatgaagaacagttgaaatctgtttcactaaatacagcaacgtatgcgacttccatagtatacaagttgtctatttatttactcgcacaagctcgcatgcttaggatgcgttctattaaaacgagactaacgggtctcgtacttaggtatttgcgtcctaatcgagtcgcatatgtggataccttgtcagcgtcgataacctaagacatgcgacgccttatcgagtcatcaagcatgctagtgttggaatattttaccaggatctagatttactaacaagtatgttgattaacatccttgttgaccgaggttttcagcaactaatataataataatatttaagaaagccgtaaggagttaatgcaagagatttttacgtggttggggaatt

SEQ ID NO: 355489 - DNA, 515 bp, Cannabis indica
tgacaaggattgtgccacgtaagccatttttacctttaaacggagccaaagtgacggaatagtgcggaccaaaacggaagtggagttcaggtagtttagccgccaaaatttgagttttggtggttaactgtcacaaacccaaaagtttggggggtttagccgccaatatccctattaaaaatataaattttacttaaaaatttaaattattcttaaaaaaatattttcaagttatattttatttataaacatatatatcaagaaatcaaatcaaaatgattggaaaattcaataaataatataaataaactaagattttgtgaatagtcttatttatatttacagactcatatcttaaattatttaaaaaatttaaagtaaactaaaaaaaatatatatttacttaaataaatttagatttttagtgaaaaaaaatgactcaaacttattctcgtaaaatttaatttttacaataatttttaatatacttttttatatatattaatagatttttt

SEQ ID NO: 355490 - DNA, 1115 bp, Cannabis indica
tgctgatgtacgcccggagtggcttgccaggtctttcttttacttcgaccaaatcttccaaatgcaatgggacctgacgtgaggaagagaattgcgcatggaattccgaagaaaaggttttccatgaactaaactttccaggagccaacttgaaataccattgctgtgcggcttctgacagagtggcggggaatattctgcagcatacatacccccgtactccttgtaaatccatttgcatctcaaagtacttgagatgggaaagaggatcttctctcccagtatacatcttccacgttggcatgttgaacttgtggggcagtggcaggagattgatctctggagagaagggagttctgcgagcacggtctaactcaagatcattgttacgctatccagccatgccatgaaacatatttttcaattcgtcaagctcggcctatacggctgagctgacctgctcgacattctgatcgttttggattacgtcagcgtctttctgagcggggatttgaatatgggctccaggctgcacgatcgttgtaatattctgctcgtctgttccccttcttctatttagatcgttccttaggtcataggttgttcccaacctatcgaacatacaagagcctggttgccttagcgattgattcgcttggttgacaggtggaataaaaccattattatggtcggaaccgtcaggtatggctcctcctgatgaattcacggacaaggtctgcccgcctacctcttagtccacgagcggaactcgtaaccggggattgggtggccgaccattagttgtttgggaagtattcatcgtcggctcatcttccgtttctcccaggagaatgatgttcggcgtttgctaacctacagtttggtaggctctttgtatcagcacggtagcttaccgactacgctctttgatctctgcatggtgagcccttaatgcctccatctctttgtctctccattcactaaacatacgcctttattcgttaaacgtgagatttactgctgcacgcagttcatcctaatcatgacgcagagtgttgctatgactcttcatgagtccgagcgcggcacgaagattttgcaattcagttgcgtct

SEQ ID NO: 355491 - DNA, 662 bp, Cannabis indica
attatacggttgaaacttatatttttttttcatatttacaatttcatccctaaactgtgagaattcacaaattagacatagtctaacttttagaattataattgattaatcataaatcaattatagagtcttacaaacagtatagtctcaactagaatggggaccatggatctatattctgagcttccaataagttgaaccgatttaccaagtaaatccctaacttattaattcctcgttgaatccactcttagaacttggaattgcactctcagacttatatagagcatatcatatgtttcacgatatcaatatgctatctcatttaaccattgttataatcttaatgtgatttagagatcctctatatagatgatttacatcgagatgggaccaatttaccgtttacacccctcaatgtattttgcccatttgaacacttagttacctgtaaatgatgttttagtgatctaatatatagtcactgaaacaagagctcatccatttacttctatttaactaagctcaaaaggaatcatcactttacttctatacaccagtagaagctatagatttccatatttatgtttagcactcccattcagttatgctatcatgttcccaaaatatatgtattatcctgactcaaaacaggctttaac

SEQ ID NO: 355492 - DNA, 582 bp, Cannabis indica
attaaaaaatcgtcttctacttctcgccacatttcccacatgcccacctaccttttttctatttcccacatgcccacctattttttctctatttcccataccctaaaacgaaaatcttaactctccaaaaccccacccacgcctccgcaccatcaccctcctctctcaccgtcttcctccctctctcgatctccctttcttcttgtctctctcgtccatcgatctccacccacccttcctcctgtcagtctccctctgctctacgttgcatacatcagaccaccaccatctcccatcggtgtccctctaatctccgtctcatacgtcggaccaccaccacctctcgtccgtctcactctctctctttctctttctcccagctcggtataaatacatttatttatatacttttttatttattatatatttatttttattgtgtaaatttaatgtgttttgaagttagttgttattgtaacaaaattaattagttattttattgtaatttagataaatttataaaactaatgcaggaaaaaatgggaaaaaatacagatttttctaccgttaatggcaaaaaaa

SEQ ID NO: 355493 - DNA, 501 bp, Cannabis indica
tgttttctcagttgtgtggtacgaccatagaacatcaagaagttcctccagccaatttcctttagcgtcctcaagtttcttctacagggtgtccttcaatgtcttattaactgcttcaacttgaccattttcttggggatgggccactttggagaaacttttgatgatcccatggtttgcacagaaattagtgaaggattgactgttaaatggtttgccattatccgagactatcttctacagtaatccgaaccaagaaattatgttcttcacaataaagtcttgcacttttttggacgtgatggttgtcagtggctcggcgtccgtccacttggtgaagtaatcaactgtaaccactgcgtattgtactccgcctttgcctttgggtaactgtccgatcagatcaattccccaaacggctaaaggccaaggactttacatctgagttagttcgttgggcggtgctcgaggtatcttcgaaaatctctggcatttatcaca

SEQ ID NO: 355494 - DNA, 623 bp, Cannabis indica
attaggttaattaaattgttgttgtgttgttttgttagaagttttgaaatggatagaagtttccaacgaagagatcaatgcaatacgggatgagtgggccgattttgtgaagcctttgattatagattaagtacaaggttactacttttgttataatacatgagtaacaagttttatgattgttgttaacttttacatgtgtaatttacgatatgcatggaatttaaattttaatatcgattttataattaacctcacgttaaaaaatcatgagcaacttttgttataaaatataatataattaaccctagtcattaatcatgaagttatatgttattataatctctattcaatagattcatgatatgctactttgaaagtatatatcatcatccattaccacatttaacacaatactagtcaagcattgctatgaatttttttgtattatgtaattagtttatagttagtttatataatacatgtgaatgcataaattttaggattgtttctattaacaattttgttattatgtaattagttaatagttagtattatcgttattaatcatagaattgattactgcttataaaaattttatatatgtttgataatcgttattt

SEQ ID NO: 355495 - DNA, 943 bp, Cannabis indica
gtactcgcagtatctcgctggttttatcctgggcgaggttaaaacatcgaggagtctctcattgacaattcagctttcattggaaatctgaatacacgtgtcctttaaataggagtctggtctcgagtttctaggtgagagaaatctcactataacacaagaatatgaacagccaactcgcactaaataaatcgcatacgttactgtatttagtgaattaaaatggaaactgtttttcatttattatgtttacattttttagcttaattattgtaaatcaatgtataaacggattgataatgaatgcaatccttgtgtatatgataggacacttgctttgtatataaaggagtgatccaccgtgaagtaaagggggacaaaatctttgcaacagtggactaagcagaccgtgatctaactgaaccactatacttctcttgtgttatttatttttccagtcttttactaagtatttgtgttctcggtttgagtactcgtccttctgggttgaatactcgcacttgttcaatatttcttattattattataattcattcttggtgttgtaaaattccttcaacaacatagcggctggctaaagaccagtaaaaaaaatgggatggacccgtttatttattaaagaccattggatttaaatcagtggttttgattttttcttaaatcctcagatattttttaaaagtaataaaatttgggtattaatgtcttttgtttagctatacctgtaatacccagaattaagaaaatgattagcaaaatcctaattagataattatgagttaattgaggaattatattattatttagttcaatatatgtgaaattagatgaaatttaacatgttaaagaccccgttggtgagccaggggcattttggtaattatgacccgagaagggtaaattgttgagattaatttaatta

SEQ ID NO: 355496 - DNA, 1388 bp, Cannabis indica
accacactgttttgttctgtgcagacatgtctcggcaaatgtttgaggctctgaagaagagaatgggcagaagctctagcgcctctcctccgaccaagaagtctaagggcggtgacaggtcctctactaaagaaaagaggccttccggggaggtcattgatcttttcgaggagctgactgctgtaaacccctctacccccaaatctgccaagttcaaggagtctggaccaccaatggttgggtctgaactggtcacgagtgatcttgaccgggtgcgggcacctactccacctttgccagtgcttccagaggctaaaaagggcaaggagatgctggcccattacatgaacccgctggttcttgaggtcagtgagcaactgactggtgctcacaatgactcttctttggatttgctggtgggcggagtcttgaaggagttcaccagggtaagcctttcttgatacttccctttaatcttccataattagctcaatatgataaagtttttctttttgtgcaggctagtctgaagttggcctacacttactcccgggctaagtctgctgctttcaagaacgcgactctgtcggacactctaagggcggaggcggacttggccaggaaggatgctgaggaagccagggcagaagttggagctgggtgaagccaaccaggagttgtttgctgctcggaagaaaatcactgtgctgactaaggatctcgaggctactgaccgttttgaggagaccatcgagaccttatctgctgaggtgaaccgtcttcaggacgagaggacttctcttcgagcagttcttcatcggatgaaggaggaaatggaagctaaggagggggagatttcggccgaggtggacaggttgaaggagaaggtcaatgccttggagacagttggtctcaagctcttctttgattttcggaaggctaatccgcgggccaacttcgactacttgggcgatgctaaggacatgtaccttgagtactgcgtgtcgcaagtggcttatggtggaaccgaggcggctgcttcaacctccggtcaggccgctgatgcacctcatgttcaaacaacagatcctcctgctctggttggcccagaagaaccgaaccacgaacctgggactccagctgcttaaacacttctctttcttatctttctatttgatatatcttattcggcctcagggccttttctaagacatcatgaccggccaaacggtctttaaacttggaattatttttcattttttagacaacgggctgaccgggcagcttttaatcccgttaatacgtgcttttgttatccttaatgaatttcattctctatttataattgtcgtacaattatgattgttttatttttaccaaatgctttg

SEQ ID NO: 355497 - DNA, 721 bp, Cannabis indica
tttataaggacccacgtaatttatcgatacgggattccttcaaaaattatctccgacaatgccctttatttcaagtgtaaggcaatggtcaagttgatgaacaagtacaaattcaagcacagtttctcggctagttacaacccgtcttcaaatggtcaagcagaagcatttaacaaagtgttatgcaaaatcatgaagaagacagcgacaaagaataagagggattggcatgaacgcctcctagaagctttgtgggcatatagaaccactgtgaggactgcgactggttgcacaccttataacttggtgtttgggtctgaggcagtgttacctttggaggttcaaataccttcactaaggattgctactcaactaacagacccagatgaaaatgtgcaagtccgtctagccgagcttgaagcattagatgaaaagcggcttgctattcaacaaaagctcgaaatttatcaagcccaggtagctggggcattcaacaagaaagttaaatttcgatctttttcggttggagatttagtgcttactgtgaaacgaccaattgtcataactagaaggatgaaaggcaaatttgaggcaaaatgggaaggaccttatgttgttactaaggtcttcctaagaggggcatatgaactttcaaattcagaaggccgacgcatttatccgtgtgttaatgggaagttcatcaaaaagttctacacttaaa

SEQ ID NO: 355498 - DNA, 502 bp, Cannabis indica
cagaaaaatccctccttacaaataaaatctatccatagctgatcataaaataaatgatcgtagtcgtcctaaggaaactacacatcgtcctgggaaaaaatcaatgggttctcaatgaccacccacttctggaacaacacattcaagaagaaaccattgtggtaataatcaaaacccataagggaggaatgaagaaactattactactacaagatatgtacccagaagtgaggatgcttataatcccattaggtatgtactgttatcctaatttttgcactatgacgtggaaatatgtgttggtgacatgtgttttttattctttatgcgtgacaggagaaatgttttgaacaaactttgagtaatacatttgcacgcacaaagtctgcctgaccgagcagggcaagagcaattgatctgaacaacaaatgaagtcatttctccgagctgtgcatcaagacttaactacttcaggattgattaggggtgttcacggattggt

SEQ ID NO: 355499 - DNA, 992 bp, Cannabis indica
cttccaaagagtattccaaaagatgaaattatcatcctgcgcacccaactctttgcttaattgtaagaacttataaactgattttactaagaaaaggcccgagctctcccaactccaataccaaacatcacataaacaacttgaagacaaggaaatactaagaattaagttagtatctctttcattaaacatatcatacaccaagtcaacatcccaagccaacgtatcaatttccataagtgctttaacattttggtcaataacagcaggattattcgaagttactcttggattatcttcattcggcagccacggatccaacactatattaattcgagaaccatcaccaactctgcatctcgccccttttcgaacgatctcttgagtttcataaatacttcgccacacaaaacttggattgctccccaactcagcatttaaaaaggtaccattacggtagtacctagctttaaaaatcttgctggcaagtgagtccgcacgactaaacaatctccatccttgtttacaaagcaaactcaagttaaagacatgcaagttgcaaaatcccataccacctttagacttatgtaccgtcaatctatcccactttttccaatggattcctttgttgttctttgacgatcgccaccaaaacttacacatcaattgctccatctcattgcaagtttccacaggtagcaaaaacacattcattgcataactaggaagagattgagccacagtttttattagcaactccttccctgctctagaaagcaatcttccttcccaaccttgaatccttttacgcattttatccttcaagaacccaagtaaggccgttttattacgacccacaatatttggcaaacccaaatatgtgctatcatcacctgcctcattcactcccaacatagaacacagatgttgcctcacctcattgacaatattagcgctgaaaaatatagaggacttctgtagattgacttgtt

SEQ ID NO: 355500 - DNA, 681 bp, Cannabis indica
accttacattacgacccggactaggatctggactcaaaccacgaactcgaacccagatctggacctgaaccgggattggaaaccggaacctgaactcggactaggacttgaaccatgatcgggtcctagactcagactgggacctaggacccagacctggatggggaacctagaaccgggacccgggcttcagaactggcgctgagaccctcgacttgaccccggacccacaccctgaactacgacctagaccagaacctttgacccaaagttgaactagactaggacccgagaccaggatcctaatttcgacccgaagcttggacctgacccataggcgatgttttgatctgggacccattcctagactcaaacccaaacccagactcggtcccaaacccagacccagaccgggacctgggaacaagactagaggactaggacccgatctcggtcccggaacttgaatgtatctaggacccagatccaaacacagactgggatgtggactcaaatcaaaaatcggatcgggactcgagacacgaacccgaacctagacacggacttggatctagactttgatgcaggacctggactgggattggagactcagacctggacccaggtcccagacctcgattggggacccaaacccaaaattagaaccagaatcaggaccca

SEQ ID NO: 355501 - DNA, 690 bp, Cannabis indica
cgagttagaccgagcacgtgaatcgtcgttcactcctgagatcaacgttcccctcaagttcaaaatgctaacctggaagatgtacacggggaaagaagatcccttatcacatctcaagtattttgaaatgcaaatggatttccaaggggtacgaggagatgtgcattgcagagtattccctgccacactttcaaaggcctcatagcaatggtacttcaagttaccacctagaaggttcaattcctagaaagccttctccttagagtttcatgcagagttctcctcttctcgccaacactcgctacatttagaagacctggtcgaagtgaagcaaataccaggagagcctctccaagcctacataagcagattcatgacagaggctacaaaagtagtacggttaactgaagaggggagactggccgcaatatttggggccatcaaagtgctcggagaactgtggaaagatattaagaaaagtggtcctgtagactctatggcagattttctcgaccgagcagacagtttcatcgaacttgaagaggtcattcaacgggaagatgtcgagcctagaccaggccaaccacagactccttcggcagggacatctacataaaacccccaataccctagtagttcaaattcgggtagcaaaaaatttaacaacaatggcagacaaggcaatggaaa

SEQ ID NO: 355502 - DNA, 1655 bp, Cannabis indica
ctcctacccctactgtgtaggcaagactagttgctgcagtgaaccgaatagaaccactatacgaaaggttccgcaagcaggcacctccagtcgttctgggaggtcccgatgtgattaaagtcgagcagtggctgacgattattacaaggatcttaaattttatgggtgttactggtaatgacagagtggcttgtgccacattccagttccagggggatgccctggtttggtgggacatggtgcccctgacttgtgatgttgccactatgacctgggaaaacttccaagaattatttaatgcaaagtactataatgaagtggtcagaagtgaaaaaaataaggaatttacccagttgacccagaaggaaaaatgagtgttactgaatacacaactcagtttgatcgattggctaggttggccttgggaattatgccaaccaatttcagtaacaaataaaaataccttgatggattaagcccgaagataagacatgatcttatgattaatactaacgataataccacatattgctgacatggtggggaaggcactgcaagctgagggcgcaattgggtgtactcaggttgttggtggagcccctactcctcatatgtctggttatggtaggggtggttgtggccttaccactgatcagaaacaaaaggcaccatttgcgcctagtgactcaagtcagaacaagaggttccgagggaaccagggtcgaggcaaccgtaagggtggttttaaaacctgatacacttacttggagtaccctagttgtaaaaagcatcatctgggtgagtgtagagggcaagggtgtttccagtgtgggtagccggggcattataaaagagattggccatagcctaagaaagaggaactaaagacagttgcttaacctgctctagtaagggtgtttgctttaactcatggagatgtagacgctagcccctcagttgtaacaggtcagctctcggtcaacaactcttatttctctgtactttttgactctagggccactctctctcatgtggcagccagaattattagtaaattggatagaccgcatcatagattcgataaggcgtttggaaccctactacctagcagagaattagttatctccaaaaggtggcttaggtcgatgccgatcagaattgaggatagggagttgagtgctgacttaatagaaatgggtttagtggatttcaatattatacttggagtggatttcttatccaagtactcaactagtattgactgtaaacggaagatggtgatcttccaacttgagggtgaggaccgtttgtttttgtgggatcggtttagggatcccgggttccaatgatttcagtattaacagctagagaattattacaagacggatgtatagggtttctatccatggtattggataccatacgacctgagatagtttagctagaggaaatcagggtggttcaggaatatttagatgtttttcttgatgaactttcgggtttaccaccatagagaaaaattgatttcatcatcgttctagcacctgaagcagaaccaatttctaaggcaccttatagaatggctccattagaacttaaagaattgaaattcaacttcagggattgcttaacctagggtttacacggcctagtgt

SEQ ID NO: 355503 - DNA, 590 bp, Cannabis indica
tgatccaacccgtatacgagactaaatcttttcactcatcttacgatctctaaagtgatcaatcaaactgaccacacaaataacgatctccctgattaattgggagacgagcgcttcacaagaggggtgagcggtcatgagtaatgccttttcatggatgcctataagagccactctcagttactgagagaggcacatcaatttcagtcatctcaatacttcttacttatcgttcactctctcattctctctaaaactacatacttatttctacaatcaagataggtggtaatttagttcgatcatttattctcatttttttattacattgttaatcccaaagtttctcggttattcttttctttgttctacaggttgtcggtgcccgcttacaatcatttacagggggttacactaggctatgtttaataggaaggaaagagagtagaatggatggagagtgtagaaaggatggagagtaggagggatggagaggatatttgttctcttttgtgttgtttggtgttaggagtatatggagaaggatggaaagtaaaatatatatattaaaattactattttatcatttt

SEQ ID NO: 355504 - DNA, 840 bp, Cannabis indica
ataacaaatgttctattttggtaattgtatatttaacagctattcaatcatctagcttacgaaatacttatatacaatttttccaattcacaactattttaaaattatatttaccaaacactcaatatttttttctcacagcacagctgtgccaaactgacccttgatctttcataataattagcattagatagaagtgacactttttttttttaacatagatagaagtgatattttgtacatagttagtgatattttataataactatttaatttaaaggtaaatactattttagattttatattttacgaacattattaattggaccatcttttttgttaaatgacaaaatagaccctatattttccaaaatggtaaaaacaggaccatgaactcaatttttaacaattttattttttaatataactaactttaagacaatttttaatacgaacaaatatagaaaatgtaaccagttttatcataacatctctagatcagattattattaagctttattttgacaaaaaatcagttcagagtcctatttatataattttagaaaatacaggatctattttatcatttaacaaagcagaaggtcaaattggtaacttttgcaaaacacagagtctattaccattaatttaattatgtgaaaccaatacaataataatatataacaccttccgtttagcagtttcaaataatgaaaattatgttttctaaggtgacgtttggtaacactttttttaatcagttttctgtttttaaaattagaaaagtgaaaatattttttaaaaacatgttctattaaactattttcactttttaatttt

SEQ ID NO: 355505 - DNA, 802 bp, Cannabis indica
aagtagatctagaatttaccaactaaattctctaacttatttattcatcctgactccactatagatttggaattgcactcttaattatatagaatgctctatatgctccaagatatagatacactattaattatctattgttgtaatccaaatagtcaaagatcctctatagatgatttacattgagtacagataaatttaccgttcaacccttcaatgtattttatctttaaaatacttagctagctataagtgatattttagtaaacgaatataattactaaaatgagatctcaatcatttatctctattaagcaaagctcaaaggaaatcatcgtttcacttctaaatacttatacaaagctatagattccatatttatgattagcgctcccaccccaacacttgttacaaattctgttatatgttacctttgtaattcacatacattcatcaaacaagcacataaaccaacatgaatacatccaaatcatcacaatcattgttttaaatctatatttcatgaaagtaaatcattacgatggccttgaggccagttgctggggattgttttaccaggatctagatttactaccatgtatgttgtttaacatcctaaatatgaatttctaaaacaatagaatttaaacacatataaagtttaagaaactttacattggttgcagcgaaattaaatgtctccttctactcagatctctaatccttattcctttttgtggtagagtattataaagctttgagcctgattctccttcaggtgttgtattcttcacagtcttac

SEQ ID NO: 355506 - DNA, 1099 bp, Cannabis indica
atataatttttgatttgatgaaggaccaaattataaatagttaataaatattactaactgttttaacagttggtaatataacaggtaatgataattgtatttttagactcctgaactctcatcatcaagaaaataatacttcaaaggttctttaatgcaaaattagaatatcataccctttttacaatcaatttaatggattccggtatgcttccgctactcctggattctactgttagatttcttgtgaattaattattgctaaattcaaattacaacattaaacaaaatattttgaaatataaacaagagaaatttgcggcaaaacccccttatgttttaatttttatactcttaacctccttattttttttttgggcaaaattcccttatgtttatagggagattatatttacacccccaaaatttataacttcaccccattactaagtttactccaattaaatattgtttttataatcacaccccatcacatttactaaatgggtattttttagtacaccccaagactttaaaaaaaaaaaacttactcaaagaacgggagaagaagttaggcttcaacataatcgacgtctttccctgagccaagacttcgcaccgaatccaccagtacttcattgtcgcacaagactttgcgatccactactctcgctctctgctccgccaaccattcgaagaaccaccgcaagttacaaaagccaccgccaattgacgactgctatttatctcaatcgtgcttcactcagtttccttcgtgtggttggtgtcgatgaatggtttggaacaaaatcgtttcattgctcacaagccataacccttttcttctttaaattttctcatctttacactaatggaattatacagatcagatttttgtttaaaatattaaaaaaaaatattaattctaattatatattattctcttagagaattaagtttgggaatttttggaatatattgtagcatgtatgaattttcataataaaagataagactttcttagtaaaattttgatttttattttgaatggttgagacatagatttcaatcaaatgcttgctgggaataatggtattta

SEQ ID NO: 355507 - DNA, 562 bp, Cannabis indica
tgaagaaccaatcaactgaaggagaatcggactcagattttggtgatactctgctacagaaagaatacaagagttagagatctgagcggaaggagtcatttaattctgctgcaaccaatgtaaggcttcttgaactttatatgtgttcaaattccattcttttagaaattcatatttaggatgttaaataacatacatggtagtaaatcgagatcctcgtaaaataattcccaacattaagaacgttctcataggaagtacgaccgctgtaccacatgcactaaagtaccgacttcatactcgtgttggtagggccattgttgtacttcctagagttactatgtgttataccacatgcactccgtacccgctagtactcgttttggtaacattgtaactaccctcaaataccctacactttactaacaccttcattactgcaactaatccattgttagtagtgtaaacaaataataacttccattcattcattcaataaatatatatatactttatgccaatcttacctcattttcgtgctcaggtgtgccggtcagcctga

SEQ ID NO: 355508 - DNA, 1066 bp, Cannabis indica
gaatttcgggccgaaccgggttcgggcccgaaatgcaaattgaattgatttaattggcattttacttgatgagtgataatctgaaatttatttggatataattgagtgcgaaatggcaatattgcccttgaaaatatgtatgcttgttatatggccctaagggcaaaatggtcttttgaccttatatgacttatgttgacaaaatgtaatttttgaagaaaaatcaaagcaatttctggtcttttctctatctcacccgaaccctctccctctcttttaccccttttgattttcaaagattaaatttgtgaagcactagtttgatttgaagcttgttggttgaaagaaaggtgttggaggattgaggcttaattgtgcaagtgtttgaggtagttttcttggttttaattttatgcttcccttgctgaatattgtggtagaaacatgcttaggttactttgattttgggtcttgcatgtgtggtgaaaaggatgttaatcttgtggaattgagcttctatttattgtgtgttttgtggttgagcttgggcagtgattacatgctatttctaggttggaatttcatatttaaattggtgttatgctgctgaattgtaataggtttgagttgggttgagttcatgctcttgaatttgagattttgatgagtttgaggcatgtgtttgtgtagcatgcaatttgaattattgagggtttaatgctgaattttgatgtttgatgctatgatttaaattccttgttgattgctagcatctatatttggttaattgaatgtttggttgagttttgggatggaaaagattgagttttaggttgaaaattcgagttgagcttgctggttttctgggttctgcacccagacgtcgcggcatgctctgggcatgccgcggcccgctcctctgagtggacctgggaattggtcccaggtgccgcggcatggtctgggcatgccgcggcccgcccttgtgtttttgggcagttttgaatgattttcgaaagttcgtaacttttgattctgaacttcgatttaggagttctttatatcg

SEQ ID NO: 355509 - DNA, 618 bp, Cannabis indica
ttcatattctgcacaactcccaacccttagatttctcaatctttggttttcttgtcaatgaacttcatgtataaaaggacgactcgagcttgtcatatttcataaacctctggcttctttagtgaaatccatattcagaatggattacttccttcctaccaaaatgtctcttttgagttcagaggttcgtccttccagactcataatacccagatgcaccaaccatttttcatttgtccctacagacttcaagcttcaactggagccagaaacgatggcttccaaggctgaggagcttctgaccaatccaaaccaggtgaaccccgtagcctgccatggccgatcctcacaagtgatcccagagggtacagatcttgtgagcaaattcaaaggtcctcctcaggctgatgaagaattccagtggaagattggcatggtttcaggttgatatgggcaggaagttggcgtggtttttatcagagaatccagccaacccaagaccctaacctgtgttaggagatctttgcgtcaacctctctccagtgttgagaaatttcctaaggcagggaaaaagatctcagcttcaagaaacgggatcttttgatgatgaggggaatg

SEQ ID NO: 355510 - DNA, 543 bp, Cannabis indica
ttgaagtccttggtgaactttggaaggacataagaaagaatggaccagtagatttgatgagtgactttcttgaccgtgcagaaggtttcattaagcttgaagaagccattcagcgaccagagggtgaacaaaaacctggccagccaaaagttccttctattgggacatccgtctagcttccccattacccaagcaattcaagctcgagtggtaaacggtttaatgacgaaaataggcaagggaatgggaaaaagggaaagttcactggcacgatcaaacaagcgcccagggagaatcctaccaagtatactacatttaccgtccggacggaagatatagaaagtgtgtacatggctactcagtcgttatccccatacaagaagcctgcacccattgaaaaagatgtcagcaagagagacatgaccaagttctacaattttcatggggattatggccatgacaccaatgaatgcaacaatctgaagcgggaaatcgaatttctgataagaaaaaataatctgcacgtgcagaagtatgtcaagg

SEQ ID NO: 355511 - DNA, 579 bp, Cannabis indica
aaaataatttccaacagccttcagatgagcccaccggtcaagtgagggccaaggtggccaggacctctcgcggtgcagatgctagtggaccatcactacctcctcctccaccaaggcctgcacctatcgagcagcctatagttcagcctaccggccacgctaccaggaggcccggtagaggagcgaggtcagctgctggtaggaaggctgctaagtctatcactcggtgtatagagagggctatccttttcttggattaggctttgcaagagttgggtgacggtgtgcctgataggttatactctggaaaacttcgagacctttctctggtgagtagtgctttcaactttattcttctttctagcactatataagtgttgggctttatgccctaaataaaactctatttcaatgtaatctctatcttttaattatcaataaagagacataagtattttcatcacttatttaatgtgtcatttggtttatgttatgatttatatgtttatttgatttataaattcatcccaacccttatcacattaatattcttgtttattgtgtcgtcagcacagtgga

SEQ ID NO: 355512 - DNA, 857 bp, Cannabis indica
ttaatttgatttttgaattatatccaaacttacctccccagaaatttcaattcgcatattgatgattaattactagtcattgcctaaatccttctatggtaatacaatttcagaatgatatagtcaaggccatgcctaagcccccgcatcttcccactttggaaatccctcggggataaatggacaagccccgtcgcatcccgctccggccgcaagcttagctggtccttctcaaggctctcggagcaagaggtcctctaaaggcagcagctggacagaggataagcggtagaaaagggggtatactccccaatatatccaatacacggagttaacgaactcccaagagcgtgtatattttgctacgaggaaaaatacgcactaccagagaccgcctcctctgtacaaagacagctcccgaagggaccccaacacgagatgtgagtaccacaatgacattgggcacaacaccaatgaatgcaaaaatctcaatgacgagatctaaaacttgatccgattgggacatctctacgagtggatcaaaaaccggttgccccatctcaatccggttcaggcggctgaagctttgcctcaaggagcgccagggggtgtagcaggagcattggccccagtccccccagagatgcccagcatattcctggcctgccgccaagacctaatgggagaattgttattatttcgggaggaccccacatcggaggaactacccgtaaggagctcaaacggtacggaggggctgtaaaaaccgattaggtttgggaggttactcaactcccagctcaaaggccctagctaatggaccagcccattacattcacagaagaagacgctaagac

SEQ ID NO: 355513 - DNA, 547 bp, Cannabis indica
agattcacaaatgggaagaacataatcgatttgctcggcgaacatcttaagttaccgattgatttcattccttcttttaaagatccttctactaaaggactcaaaattgtttatggtgttaatcatgcttctgcttcttctggcattttagatgacactggcatcattgcagtaagttttatataaatattataattatatatagaatacttaaattatatgagtaaaattgataaaattagactaattttataatgtttgtaaaatgaaaacttatttaattttataatttttcttttttgcaaaatgatatttgtttggaatttaaattgagtgtcaaattttcaaagagtgtttctattattttatgaaagaagtattgtcactttgtaaaaaattatagaaacaaaaatattgtgcaaaactatataaaattttttaaaaaaattatttaaatctaaaatacctctaatatttaatttagaagtgtaatattttaatatataatacagcaatattttttaagtgtataaagatatttttagta

SEQ ID NO: 355514 - DNA, 751 bp, Cannabis indica
tatatggccattagaatactgtgacacacccaccatttggaatagcaattaatacccgcacaactcagcccgcgacatataaaaatcctaaaagatctagctaacagttaagtggaaataagtcttggaaatatgcgattattcaagctgttcatctgaacacccgcgaacattcaaattgttcatccgaatatccgcgagtattcgagacgtgaaacagtgcctatgaattgtgtgcggttatgtcagtttacaggtcctattctatgaatgttacccagtttcacttacccaaaacacataacctcattaacacccactagcatacattcctaaaaaagcctttaaaacatccaaacccagaaaataaagcatattttctccaaaaacagaaaacgaaaatgcagtgatttagaaactaacctttagttttgattcctgcgattgctctcgatcacttctgagattgaaaatgttgtggaaaatggcagaaaatctgggaatggattttttcgaagtgtatgcactggagggaagttaagaataagagggaaaaatgggaaatttgattcgtatcaaagcgcttaaatacccatatcccttattaattgggattgtgacacgtggcagccagaatgcctaaggtcgcccaatctaacggccaactatggccacgcctacacgaaaaccgaagagttttgtgacgtggcaccctaaagataataaaaactaataattacagccgtcattt

SEQ ID NO: 355515 - DNA, 1148 bp, Cannabis indica
tatttgagtgagttattgatagatttttttatgaaattgtagaaatttttgctatgacaaaaaattaatatttacgtatatatacttagtttggaacttttgagttatagtaattttaatagtcttgacaatagaatggtaattgaaatacctagtaatataatgtaatgtaatgagtgataaaagttttagttagaaacgtttaatacttagtaagaatattcatgaactaacattattaattaagtgtttggtagttcattgtaatgtaatagaaattgtataggaatagtaatgtaatgtaataagaatatagagtaagaataaattaattatagtgttaaataatgtgtaattacataagtatgtagtcactagctagttatatatttattggttacttgttactattttaacttaattttaatttgaactttttttgaattgctagctaaaggtatattattgaccaacaaattttttactaattataaagctattagaggagtttgaatatgttagatattcatccgtagtgaagtaggttctgcgatataaatgtactgcggtcggatgggtggcaattattatattgttaaatgctattttgattattttttcttgttatctgatttacttgcgtgcattgttagatagttattaaattgggaaatgttgtagaaataggagaaacttggccaatttttttaggattcttaaattttaatatgttttttaatatttaattaataagcgtgcttaggatttttctagcaagtcttaagttttttacttcaatcttgtttgttaggaattttatttttatttttaaaattgataagtcatggatggaagagaagagagaaaccccacaattcgtagaaggatttaataacattttagagtttgccctaaagaattatggcgatcttgaaaaaattcgttgtccttgtatcgattgtggtaatatatcaaaaggaaatattaccatgttacagaatcatgtattttgtcatggaatcgataaaagttatactaaatggtattggcatggtcaatcgatgaagggtgtgttgggttttatgccctaaataaaactccaattcaatgtaatctattttattcaacatcaataaagaaaaagaagt

SEQ ID NO: 355516 - DNA, 963 bp, Cannabis indica
agaatctcgaaaggtcctgtaaatctagggcataacttgcctcttttccttaaacgcttgatcccctctattagagacactcggaggaatacatgatcccctacttgaaactctacatttctgcgtttcggatctgcataactcttttgcctgctctgagaggcaagcattctggctttaatcttctcaattgcttcattagtccgttgcactgattctagacctaagtatttcctctcccatgtctcatcccagtgagtgggagatctacactttctgccatataacagttcatagggagtcatccctactgtactttgataactgttattgtacgagaactctatcaacggtaggtacttactccaagagccctcgaaatccataacacaggctcgtaacatatcttccaatatctgaattgtcctttcgaactgtccatcagtctgaggatggaaagctgtactgaacttcagtttggtaaccatagccccttgcaaaatttgccagaatttagaggtaaactttggatctctatccgaaattataaactttggtacaccgtgcaatcttactatctctttaacgtataaatctgcatactgatccattaaaaaggttatcttaactggtagaaaatgtgcagacttcaaataaactcgtggttctagataacccaaccacaaagtccattgtgatatcttcccacttccactcaggtagggttaaaggttgcaacaaacctgcaggtctctgatgtttacccttgatctgctgacaggttaggcatctcgatacaaattctaccacattcttcttcattccgccccaccagaagtagggtttaagatcttgatacatcttggtggtgacgggatgcatggaatatggagtggtatgagcctcttcaagaatttcatttctaagttctgcactacttggaacacaaaccctggtcttgaa

SEQ ID NO: 355517 - DNA, 410 bp, Cannabis indica
gtttgtgaatttttatgaaaaataatggaattttcgttctaggaattatttttgttggattagtttggaaaaatttagtcaattatacttttttacagaattttgatttcaattttatttgaattagtgaagaatttttgaagttttgaaaaaagataggggtgatgacacaccctcacgcgcgcggacatcgagtttcactcggtcagacgcgtgttcagacacaaagtgtccgaagaaacacgctcggcttgtcctatgcccctcgttcgcacgcggaatggctgcttgcagcctccagcgccgagaattctcggctgtgtcctcccctcagggcgcgcagatggtatgcaatgcataccatccgtacaacttgcatttttttcgattttctttcattttttcatgct

SEQ ID NO: 355518 - DNA, 789 bp, Cannabis indica
atttatactagatggaaaatgaaaatattttttttttttcattttttagatcttcctagggtataattttataaatatttaattaaaatttatatttagagttatctaaattagtaattttaattaaataaatatatattgatataaataaattaaaataagtatcgaaagaaaaaatacaactctttaaaataatgagctttagttataaggatatttgatctttgttgttggttccacttagttcttgttttagtgagtaatcatccctaatggatgaacatcatttgcaatttaacaccgtagaatgttgaaaaataagtattatttgtaagtgttttattcgtagtaacgtccaccctaaagtggctgctaggagtaagacttacaaggtatgaaacaatggtagaagctcataagatagaatagccttgactctcgcctaaacgggacaacgccggattctagtcttgatagaataaaaggttgctagaatgatatccattttagatgagttcactactctattcaatgaatgatatttttgactctcgcctaaacgggacactgtatcagtttgttggaaaccttgaaaattatttaagatgtgtttgttttgtattttcacatgtctttcttacttgctgaatgtatgataattttttaatgtgtatgaatttatattgaaccatgttgttttctgttattaatgttgtagtattaattttgagttttcattgttggtctaacttagcttgttgtttttaatgggacaaatcccaaagcatt

SEQ ID NO: 355519 - DNA, 687 bp, Cannabis indica
gttttcgtgtaggcgtggcaattattggccattagattgggtgaccttaggcattctggttcccacgtgtcgtgatcccaattaatgagggatatgggtatttaaaccctctgattcgaatcaaaattcctcattttccctcactttcttaacttccctcttccctccttctcagtgacttcaaagagattttcacaccttgcctagatttctacctttctctctagaatttcctcagcctaaggagttatcgagagcaatcacatggacaacttaccaaagctaaaggttagtttcgagttttattgcattttcgttttctgttttggagaaaaaatgcttttttctgggttttgggtattttgagggtttttaggaatgtatgtttgtaggaaatacatataggactatgctttttagtatggaacccggtaatcttagaaaaaatgacctaaaatttgtataaccgtggactttaggaagaatgtttgaccagtcgcaactttatcttttgaatacacgtgagtattcggatgagcacttcgaatgctcgcatgtcagttcatcctagttttcacagagattttatcatttctagtcgttgcttaaagctttaggattttgtactctgcatgttttgttgtcggtgctgggttttatgccctaaataaactccatttcaatgta

SEQ ID NO: 355520 - DNA, 786 bp, Cannabis indica
agtttcttgaactttaagaaaatggatttatgcatgttttgtggtttttgttactgtagtttgtgttggtgtatgttttgtgtttctgaaattagattatggttaaatatgttgaattaaggtggatttaagggctgtagtgttgtttgagcaagctttaagttttagaactcaagcttggctatttaatggtgaatcttaattctgagcttgtttatttgttttgttggttgaaatatgtttattggggtataatatgcaagtttggaaggtttggtaaggtttggagtcaaattggttaggttttcaaaaaatttaggttacctggtgtaaaaccggttaaccggttttgcaggccctgtaaaaccagttaaacgaatttaaaattggtttcctgcacttttcgtgttagttttaaagctttagttggttaattccctattagtttagggtatttccatattaacttacagtaggtaggtttttggtttaaaacctaagtccccagttgtgatttagcgtgtcacttatctatgttttcatcgatgtgattgtaggggcctgtaattcgccgagctgttgttccactcaggttggccgacacacctaaattttgaaacaaggtaagattattataatgtcatgcatatgaatttacatgtttagcatacacgttgtttatgcctgttagagtacattgatggcagtaatagtatacgtagagttgtactgattactgataaatgtatgttggctgaaatactgatcgatgctgtcacatcaata

SEQ ID NO: 355521 - DNA, 538 bp, Cannabis indica
ccagtttgggagttgctaaaaaatttagctcaaacctttttttttcttatagttttcttcccactccagtcgcagcaggcagcaagcaccagcgctccagccgctcctcctgctccttccttctttcttttgatttttgtgttttgttggtgataacctagtagagagagaaaatgttgagttgaggagaggctgaaagtcagagagataaagcttaattattattgtgagtaattgattggtgaggtgtgggtggagtgaggtgagctggtgaggtaagtaggtgagagagaggagtgattgattgtaataaagtaacattatatatatatatatatatattatataatacatactaaaggtaaataaatgttagattaatcattaaacggtcggttatggttataaccgctagcttattggccaaaccgtaatcgaccgccagttacagcggtgtggtcgggttttttttaaacggtttcagttatgacgtggtgccattttctcaattttttaacagtcggtttactggtcggtg

SEQ ID NO: 355522 - DNA, 979 bp, Cannabis indica
catcctactagctgcttggtagtcaaaattaaaatctgaatgtctccaaacagttttagcatgtttacaactgaacatggcatgccctatagattcccaagcattagagcataggctacaagcagcagaggtgatgattttcctttgaaacaaagctgcagccacaggaattgaatgttgaatgaccctccaggcaaagattcttactttggatggcaaattaagaacccaaaaagtcttccaccatgactgttctgatgttgaagaagtagcaaagtgctggttttccaaggaaaaagcaaagtggtagccactttggacagtatagtcacccgtagtagtattgttccaactccatatatcagtagtagcagagattgacaaagggattttcaagatgttagccacatccacagatgaaaaatccctatgtaacaagtctaagttccaatctgcttcagctgctatgtagttggaaaccgtagtatgaggatgccttgaataaaaagttggtgtaaaaatagaagtacaccaagaatccatggatcagatgcacatctaatctgggtgccattgccaattagccttaatccatgtgcaagtagttctcgaccccaacaaataccctgccaggtcatggaagagaatcctcctttccttgctgacatgaaatcagaggttgagaaataccgagccttcaagattctggacagcaatgaggttgggttttggaaaatccgccaagcttgctttgctagtaaattggttaaaatggacataggaacgaaaacccatacccccttccatcttagttttgcaaaggaatttccattttttccaatgggtttttttcttatcagctgaagaaccctaccaaaactgagctatcattgtgtcaagttggttaaaaaactctttgaaagcttaaagcaactcatagcatatacgtggaaattaatggattgaacaacagctttca

SEQ ID NO: 355523 - DNA, 550 bp, Cannabis indica
aatgattccatagcagatgcccccaaccacatagatggttactctttttttttttttttttgaacaagaacgattctcatctaatcatcttaagtacaaagacattttaaaatcaatcctttgtttattttttacaaaaaaaaaagtataattcttcatataattaattaagtgatgtgatcttcattgcttcatcaaatatgtcatgaataatggcttgattaaaagctattcaggatcatcattgtcttgcctgagctctaataatattaatattgtcaaggtgtaccacctacttcaatatatatgttgtcattaaattcactagctttctccttcatctcgtgatcgagtacgtagttctttttttttttttaatttccacttaattttgacctttgtctccatatcagaaccctagcttctctaatatctctctgcaactgcatgcaattcttcccggatgatgattgctagcttctttctcacctttcgtacgtgatcatttatactttccgtaaaatatgcaaagggaaagttagatcatggc

SEQ ID NO: 355524 - DNA, 870 bp, Cannabis indica
ttggtgctaagtgagctactactagtcagtggggctagtaggtcgggcatatgaggaccacgaggggactcatatgtctccatgagttggagtactcatggacattatcaggccgacccagtagtgcgtcaaagaatgccgctagaggttcactagtacgtttcccttagcttgctggtatgccgctcgcacgggacgtggcctagatcctccaaaagacgttgtgttgtgccttggccacgagtctcaacacgagatgacacgggtagtcattcatgggccagttggcatacgcgaatgggacggatgcaccatgttggaaagggacagagttctaatgtatgcaactagtttggcggcttgtctcgagggcttgccaacatgcgtggaggcagggcaccttgaggattggtccatggacgtatgggagtccttgggcgatgagggagactgttcggacagtattgagtggggcatgatagaagcgttgccacgttgacttggtgttggcatattgccacacatgctaccttagtcatgtgtgacaaggtgagcgtcggtgttgggatttgccttatgatagtgggaacctatggacaatgcgagtatcttggctagagagcctcgatgcatggatgcactcatggatgcttgcgagcatgactcggcgggagttgttcgagagacggaagtgtgcacgaggcacacattcgcgcgaaaaatgagcgcattgttactcggatggttggtaggctaaccttggcttagagaagtcaaggtgccgcacgggtgtgttagactatttttagcctaagtttcgggtcacattttatagttgtttttcttctttattattatttttggaataga

SEQ ID NO: 355525 - DNA, 782 bp, Cannabis indica
ccctaaaatttctatgcaaacctgaactaactaatttttcaaatttcatgttattttttgcaaaattaattttattaaaaaaatatctaataagataaaatgttaaaactaacatattcctaatcttataattttaattaataaaatatatttgaaaaaaaaacaaatttgaaaaaaaatgtgatatggttagcaaatttgaaatttaaacaagattatttaaaaaacaatattttaataccaaaataagatcattcatatttaataaaaaatgtaatatctgatcttataattaaaataaataaaataatctaaaattttaaaatcaaccataaggctctttttgtgagaaatcaaatttccaaaaatttaaagcctactaatatctaaaactaattttaattaattaaaaaaattaaaaaaattaattttattctgacaattagatttttaattaaaaattcagattctacacaaaattctaccaaaacttgacttttgtttcaatgaaaaacgatttttgaatcaaaagatatgaagaaaacaaatttggtgcacaggggtatgcattgcatacccttgcgcgcgcggaatggagcatctggccaagagacaaggctgcatgcaacctacttggccgagggagctcgacgtgacatagttgcagacagcccgtgtctgagtttcctcggtcaggttgtccgaagacgtgtgggaaatgtcggctgtcccttcggtgcgcgcgcgtgagtgcaacccgatttcagatattttcatccaaa

SEQ ID NO: 355526 - DNA, 629 bp, Cannabis indica
agtataactaactcatgtagtaatcagtctaaaagctactcaaggaccaggcccgtaagtaattatgagcaaaggcatcgtgaacctgatctccacaagagattaaactgaaggcagccagccctttgcgagcacttgaatcgaaatgcacctgatttgcgtaaccaacttaatcaaaatgcaaattagcaacctgtggatcccattcaactgcgagtaatacaattagaggacaaatttaggaaatatcaatattgagaatatggcaaactgcaaggatatgactcgaacgaagaaactgagccattccaccttgacatcctaaattcaaaatttccttagggatttaaaaatccacatgtctcgaaatatgatggaacccctaatccagtcacccatttaaataattttaacaccataatgcgagcaagcaatgtttcaaacaacttacattgcatactattttgtaacttctataacaggagctgcaagaagttggtttgataaattcaccaaccattccataacatcttgcgaacagttgtcgagggatttcaaaaagcagttttaagctgcaagagattgtcgaccagaggcgtcatctttgacctgttggaattattttacca

SEQ ID NO: 355527 - DNA, 935 bp, Cannabis indica
agacttagttgatagtattgcactatcgaattgaagtaattgctatgaatcgaattgaggtaattgctatggatcaatcaggtacgcatacctaattattatatattattattgtgttctatgttatatacaaattgatcttgggtttattattaatttatctaacatgtggtatcagattgccaattgtatatgatttagaacctataatttgtataacaattaatatgtatatgttaattttcttcaattacatattaatttcgttattattttatgttgaattttttgtttttcaatcttaaaagtttaggggttttattcctcattaaattctctttcttttaatatattacttgcataaaattattgagtaaattaggagaattttaagattaaacttttagggtttatatatttctttatgaaattaattttgtgtttttcaattctattgattataatctgaaattgattatgcatatatcatcaataattgatttaaaatgtttctatacgtttaatttttcgaattggatgatacacatggtagaattgggttcttgtttgttttttatattttcggattatacacagaaatatgtgcttggatttagtccttttcaaaccaaattgaatcaattttaagagtgcaaattgattcccgatcaaaacccatcaaaaatcgccttttcatcgtgattttggccagaatttctctctgacccgacctgtctgcaactgggtcgcgtgacccgcctccaacccggctggaggaagaagatgcctagatccctgcgaagcccactctcagcagcggtgcgtgggggcgagtgcggccacttctgacgtcgtttttcgacgtttctttttttccagcgtgattagaatttaatttctagtttttctataatttttaaataattttttgactc

SEQ ID NO: 355528 - DNA, 661 bp, Cannabis indica
attattattattattatcatgaaaaaatgacttcattaatccaaaaaacaaatacaaacactaacaaacactcttttgtaatctaagcaaatagttactctcttgaatatacatctttctattgtaacttgtaatctatactttataatgttctttacattatttacgtaccatcccaaaaattgactttgagttaccattgaaaatacatctatttttattgaaacaaaggttttatagcaccgctaccaagataatggtgttgaacctttggattggatcttaccctttcgctacaacccaacctgaccaaccagaaaactcaagaggccagcctctgtatcccatccaactaaaaaccagaactaggactttttgatacatgacacaattgaaaaaaaatgtgttcatgagtctctacatcagcctcacacactggcacaaaaaagatctcagctcgatgtgaaaccaactcaacttgtcccttgtgagaaggtgggagttcgttactttccataagataaatctgtgtttaggcacaagtaatgaactccaaagagctttgtgataattgacttagttttggaccaaactactattgtataaccagttagtcttaaactggctagttgtgcctgctttaagaatctcagttctcaaa

SEQ ID NO: 355529 - DNA, 639 bp, Cannabis indica
  modified_base (606)..(606): a, c, t, g, unknown or other
aatttatatttgaaaaaaaaaattaaaaatatataaacaataaattattatataaaataaattttgtacaatatttgtaattataataaactagattatagcgttatcattatcattataatagatcttaacaactcacagtactttgaaatgtataatttaccaaacactcagctcaattttttttacagttttgctataattgttttttatcacaacacagttaaagttacttttttccacagtataattgtgccaaactgacatctaaaagtactagacatcactcgtgccaacaatactcatataattaagtcacatagaactagaaatgtagaaacccattaataaagaacatgaaaataaggaaagggagtaaaaaaggcttttcaataattggttcgattaggctaactaaaatgagtacgtaaatgtgtggtgttttagtgccaaataaaatcacgtgtaactataattatgggtgaatcgcaaagcctaaacttcctaaagcccagtaggaattatgagtaggatatatgtacacacattgaggcgtaaaattatacagtagttagaggcgtgcctttttgaattgggacgatattnttaaaaaaaaaaaaacgtagagctagttctaat

SEQ ID NO: 355530 - DNA, 643 bp, Cannabis indica
cttcgcaaatctttatatggattgaaacaaattccttgtgcttggtttggtaaatttaattaggctgtggagaaatttggtttgttgaaaagtaagttaaatcattatgttttctataaaagatcaactactggtatcattttattagttgtgtatgtggatggcatcattattattggaaatgatattagaggcatctcatcttttaagtctttcattcatacccagtttcacacaaatgatttagggttgttcaagtattttttaggagttggaagttactcagagtaaacaagatatttttctatcttaaaggaagtatgtacttgatttgttaaatgagacaggaaaattaagagtaaaaccttgtagtattccaataaatcaagtcgtgcatcttacatctgatcgggaaccatatgaagatcctaagaaatattgcagattggttggaaattgttgaattatctaactgtgacttgtccagatattgcattctcaattagtgttattagaacaaattttgtgttacttgaaaggagcataagaaaaaggtagtatttacaaggatcatggacacttccagattaagtgtttctctgatgcaaattggacaggctccaaggtagatagacgatccact

SEQ ID NO: 355531 - DNA, 714 bp, Cannabis indica
aatgatcctctatagatgacttacattgtattgggattaatttaccgttacacccttcaatgtattttatccttaaaatacttagcaacctataaatgatatttcagtgaactaatataattactaaaatgagcgctctatcatttatctctatttagccaagctcgaaggaaattattgtttcacttctatgtcgagatagaagctatagattccgtatctatgattagcactcccactcaattgaactaccatgttcttaacctatacatcacgggaagaaccatttggtcgactttaacaaatagattaaggaacacaaataatgcaactgaactagaacctaattatctcaggattaagatcgatctaggatcaactaggtgatattgagttgaatagatattaaggtaagtttatcatatctagttcaagttcaatatcggtcgcttccaatgcatactccatacatccaacccaagcttactttgaccaatgctctggaaaggacgtagaacttatccaaggtgcaagtaaactgcgttgtagaatatcatattagttaaccctgtgtaccgataaatcataggaatagatttaatcacacaatcttgattactttccacagtgttggcaacacaataaacaagaatatcagtgcgataaggatttggatgaaattataaatcaaataagtaaataaatgatcacatg

SEQ ID NO: 355532 - DNA, 1391 bp, Cannabis indica
gttaaacgccaatgtactttttcccattacttctttttgtgtctttataatcatctctcctcttctcttgtctttttattgcttctcttgatttcatcactattcctaaaactgttcgagaagcgatgtctcatcctggttggcttgctgcaatgatagaagagatgaatgctttggttgcgaatggtacttgggtcttggtttgatttaccttccggaaaacaggccatcgggtgtaaatgggtgttcacggttaaattcaatccagacggcacagttgctcgcttaaaggcccgtcttgttgccaagggttatgctcaaacctatggagtggactattgtgatactttttctcctgttgctaaactcacatctgttcgactgttcatttccatggcagctactcatcattggcctttgcatcagcttgatattaaaaatgcttttcttcatggagatcttgaggaagaagtatatatggagcaacctcctgggtttgttgctcagggggagttagggcgagtttgtcatcttcgcaaatctttatatggattgaaacaaagccctcgtgcttggtttggtaaatttagtcaggctgttgagaagtttggtttgttgaaaagtaagtcagatcattctgtgttttataaaagatcaactgttggtatcattttgttagtggtgtatgttgatgacatcgttattactggaaatgatactgaaggcatctcatcccttaagtctttcattcacacccagtttaacacgaaagatttaggggaactcaagtatttcttggggattgaagttactcggagtaaacaaggtatttttctgtctcaaagaaagtatgtacttgatttgctaactgagacagggaaattgggatcaaaaccttgcaatgctccaatgaatccagctgtgcatcttacacgtgatgggaaaccatttgaagatcctgagaaatatcgcaggttagttggaaagttgaattatttaactgtgactcgtccagatattgcatttccagttagtgttatcagtcagttcatgtcttccccaacaattcatcattgggcagcattagaacaaattttatgttacttaaaaggagcaccaggacgaggtatagtttacaaggatcatggacatacccagattgagtgtttttctgatgcagattgggcaggctccaaggtagatagacgatccacttaggatattgtgtatttgttggggcaatctggtctcttggaagagtaagaaacaaaatgttgtatctagatccagtgctgaatcagaatatagagctggcccagtctgtgtgaggtaatatggatttatcagcttttgactgaattcgggtttaagacttctattccagcaaaatt

SEQ ID NO: 355533 - DNA, 1019 bp, Cannabis indica
aaaacgggtcttgtacaaaccttaggtattcggaaggctgatgaagtgggcggtagaattgagcgagtttgacatagaatacctacctcggacggctattaagggacaggcgttagcagatttcctggtcgagataactccggagcctgtcccgtccgagaaagaatccgccggaagggactggctgctgaaggtagacggatcctcaaatgtcagagggagcgaagcggggatagtactgctatcgcccgacggagaaatgatagagcaatctataaagttaggtttccgagccaccaacaacgatgctgagtacgaggctctgatccacgggataaaattggttaaggaaatgggagccgaaagggtattagtccattcggactctcagttgatagttcaacaagttaaaggagatttcgaggctaaagaactaaaaatggctaggtatttagaagaattaaaaaagttgattacgactttcgagtacttccaaattagccaaatcccccgtgaagcaaatatgcgtgccgacgccttggccgtcttggggtcctcttccccctccacattacaaggacaataccgttcgactttatcccggaacctagtattttagcggaggaagaagttaagtgcgctgaaattctggtcgacacattcaaagacttaagacagctaatcctcgatacttgaaggatgataagttaccatcggaccccaagcaggcgagaaaaatcgtagtgagggcgtcaagatacactatacttcggaaccaattatatagaagatctaaccacgggccgtacttaaagtgcataacgaagcaggaggataaactaatcttagcagaggtccatgaaggagaatgtgggaaccactctggcggacgggtgaccgcctagagggtgcaaaggcaggggtactactggcacacagtctaggaggattcgtcaaatcactcacgtgttgggttttatgccctaaataaaactccatttcaatgtaatctattttat

SEQ ID NO: 355534 - DNA, 619 bp, Cannabis indica
tggtgaaggattatgattgtgaatcttttatcaccatagaaaggccaatttcgtggtcgatgccctgagccggaagggtcaaggacaaatgagtaacctgaagtagatttcaaagcagttggcaaatgagatgataaaggctaatattgagttagttgtgggacaactagctaactttaccttacagtctacattgctggaaagaatcagagaagctcagtataaagatttagagttgaataagattcgagataaagtattagttgacaaagttgaagatttcactatagatagcagtgttatgtgacagtttacgaaccgtgtatgtgttccaatagatgttgatatcagaaaggagattctagatgaatcctataccacttcttactctgttcatcctagtacgaccaagatgtagcaggacctgaaagccttgtattggtggccaggaatgaagaatgatatagtggaatatgtttcaaagtgtttgacttgtcagcaagtaaaggctgagcaacagaggcctgcagggttgctacagccgttgaacttacaagaatggaaatgggaagacattacaatggacttcttggttggattacctaagactacgggggag

SEQ ID NO: 355535 - DNA, 658 bp, Cannabis indica
cactctgacgtggcatcatacgatggtgacatgtgggatcaactttatgtatctgctcgtaagatatatgctgaacagagcaccacatatattcgctcgaacgaagctctcttagcctggcagtgagaaatccgcacagcatgccaacactttccgcttttgcatcatgagtcactgaagaaatccatataattttgggatcagatcacaaagatatggcaagctgtctgaatcccttaattggtgtattatgtgtttaatatgcaatctttccacttatatcaattgtaatcagaaggaaaattcttccctcgcaagcttatagccctataaatagtgattcatactcactgggcaaagggtcgaaaaacttatctaaaaatttatattcagagatactattgtaagagctctaagaaaagggattattttccttgttcttaagtgttggaaatattttaccaggatctagatttactaccacgtatgtttcattaacatcctaatatgaattctaaaacaatgaactaaacacatataaagtttaggaaaccttacaatgggtgcagcggaataaaatgactccttccattcagatctctagcccttgattcctttctgtagcagaacataattaagatctgaacctagatctctt

SEQ ID NO: 355536 - DNA, 620 bp, Cannabis indica
agttattctctagagagtccatggatttgaatttagtacatggccattaacagtgcaagagcaagatatgtggtctcaagtaagcattagcaagggtgcactactacaaaaaggaattttgtgttggtcaatgtgtctaatcaaacttgttgaccaatgcaaaagtcaacccttttgcttcagttatccatcgacgcaaataattattaattagcatcggttatctatccaatgctaaaacaaaaaccaaaggaaaagatgaaatataaaaaaaaatatgtatacactattagcgtcagtctacaactgacataaaaagtcattatatacactattggcgtcggtgtacaacagatgcaaaaaggtattaaaaaaatcagttatgggcttcaacccatttttaaaaaaaaatctaaccctaaaatataaatctaacttcaaaccctaattttcttctcaaccacccctctctcatctatctctctctaacctaattcccactcttcacccatcatcaccttcatcttcttcctttcttctcaacccaacataaagcatgaacctctcaaactctaactctctctttctcattttttttacaagtggcgttggagctcatc

SEQ ID NO: 355537 - DNA, 501 bp, Cannabis indica
aaatacgatagagagacttcttctgcaaaagaacgtctccttcttgcagagcaaaacaagtgagttgctctctatcgttggcaacacttcaccagaaaattaagggatggagatctaaaatcatcaacaaccaacgatgtagaaactttttgcgatctccatgaacgccggctaggaactttgggctgatctccattaacgccggtaagaagttttgcttagatgttctgccatggcaacaagatcaccgtggggagatatccatgaagccaacgaaaaagaatcaacaatctaaggggaagatctagtggaatcatcgaatatcatgcgactgagagaggtctccttgaattttcatacccacacattttgggttttctttcaaaaaaaaatctgatttttatgtagtttttggaataaaaaaaataaatttgatgttgtttagtgtgttttcttcaattattttgttaattattttttgttgtttggttgatttacata

SEQ ID NO: 355538 - DNA, 560 bp, Cannabis indica
aatttgcggtcaagcatgagattagtccctatcatgaaaaggctaaatattttcttggccaatttcaagatataaactctaaatcacatccccagatcaaaaaaatggtaaagctgatgcattagctaatttagctgcatcactaacacttcctgaataaagggatatccaaattaccataggtgtaacaccctaactattaggcacgttacccaagataattaagaaaccctaatcccctagagaagattactaaacagaaaagcgcgggaaaatttagactttaaacaaatatagaataaaaataaacacttgtaataactttaattttataaccaaaatgacatatttcgggatcgcaaaaatattttataaaatattattacaagtctctttctcaatagccgacctaagcgaaaaaacagaattatagaaaatcatccttggtagaccccaacctgcttagtctagtatgtctcaaacatgtacatacgtcgcccagctccagaactcatggctgatcagagacagatttaccctttcctgcacagtagagcacc

SEQ ID NO: 355539 - DNA, 711 bp, Cannabis indica
aaaacttgcctaaatcactttccaaacagaaatcaacaacagcttcgcttcaagagagtatgtcaaacaaattctattccatgtcaagccaatcattccacaatccaaatagaacaaaagtgatacgcgtcaaaaataaatgttttacatctaaatgaacaaccttctaacacacatccaatttaattcaaagagttatgactcaagcacacggttaagattccaatccattgcacaagtaaataacagtggttcaatcaatcttccaacttagctatcaacacatgacactaaagataacaaagactaactaaaaacggaaaaaagaaactgaaaaaaattaaatctctccccccaaactaaagatgcacattgtccccaatgtgttaaaataaaattgtggttgagagatacttacctgagcgccacatcaacaagcggttgacgcccgtaataagcgtcatgcaagacaacttgaaaattgttgttgtacttgccttcaagcttggcaagtgatgagtttgaactaaaatcagcaccaacaacataagactttggatgatgtgcttggggagaagcctttcgtagctcgtagaggatataatatgatgttgatgaaatatatggattcattggtggtttatcagtcaatatcattgatgaagtcgaatcaatgatgccatgttcttcttcatcctccaatgtcacagt

SEQ ID NO: 355540 - DNA, 617 bp, Cannabis indica
caagtatgtgaaaagggtttgagatgaattcatacattatgtacatataatcatgaaataaatcatgtgaaccatgcaactttaaatgttatttctgatctctattaataagtaaatatgattatattgaaatgagttttatttagggcataaaacccaaaagacctgcatttgctatgcagtaggaattgtgagcaggtaccagaccaacctaggagaggaacattggactacagttaagcatattctgaagtacttaaaaagtacaaggcaatacgtgttagtctacaaggttggtgctttgaatcccgtaggctaaactgattcagattttcaggcttgtcttgatgacagaaagtatgcatctgggatggtgtttacttttcggggtggagcagttgtttggagaagtgctaaacaaaccgcaacatcagactctaccatggaggtcgagtacatagctgcagccgaggctgctaaggaacttgactggcttagaaagttctgcacaggacttggtgttgttcttggaatggaaaagccactagttttactttgtgataacactggagccataacaaaaagtaaagagcctcgaagccacaagagaagcaaac

SEQ ID NO: 355541 - DNA, 523 bp, Cannabis indica
ttcaagtttaatatagtcaaatatcttgcgctgactactagtgttttaggcaaggagtagtagtgaacatcagcattgttattctttgacttgttcacccaaagatgtatttccttaactttcatctcagctatcaaagctaaccacttatctaggtgacaagcattgcttctttcataagtataatctatgcgaagcttaaaactagttatagccgaatcaggaagaaaatacatgcctctcttgcggtgttccaaataattatcaacataactgtaaaacttttttgggtcatttcccaaattagaatcttgaaaagagattttggggacacaataccacatgaatttccaacgcttcgatattaggcaagtggaaagaacatcctcagtggaaagaaatgagagaatatgtaggatgagtgaatcatgtagtttggaaagtctgtcttcctcctcatccaccatcaatgtcgtcttagctcttttttcagccataataactaacagcaaagggagaaaaa

SEQ ID NO: 355542 - DNA, 632 bp, Cannabis indica
ccgacccgagataatcgagccgggttaggcccgaccctttttttttttaaaaaaaaaaaatatatatatatatatatatatattgccaccattttatagttaatattaaattacataataaacaattgtttaattcatgagaaaattagagagcaaacaaataatctctgcatatttgtttttttagataaataatttaattcatttggtaataaaattattaaggtaaaaaatttctaataaaaatagaagaaatgtttaacaatttattaagttttgcattgtagaggatattgttgttaagttttttttttaaaagataaatagttagattcatttattagtaaaattcattaattaggtaaaaatctctttattttttatatgaaaatcagtgattctgtataatagatgaaagtttgagattgacttttgttcctgacaatatttaatacatcaataataactaccaaccataaactcaaatataataattagcaaccataaatactaaacactacattttgttctcattcatgtcctcactcatatactataaagaacaatgtactttctaatcatcaagatcaactatgtaaggctcttgcaaaaaaataaaaacaaaaaacaaa

SEQ ID NO: 355543 - DNA, 671 bp, Cannabis indica
acgcctaaattagttagggtgttacaatcattcagttgacctccgaggacaactttgtgaagtacgagctctatccgaaggatttcattcctaagccagtgagggggagaaagaggaaatctggtgttggacgggctaagggagctcataaggagaatgaactcatccaacttaagcgtgaggctaagtggaattgaggtgcaagggcaaaacagtatgctcaagagcccttgaatcctgaagatgaggctgaggaagaccaggtgactccgctcaaaaggacgaagaaacccccggcctagcccaggctcattgaacatgccattcaaattagggagcctagttcacctgctcgaccatcttctcccgtgctaggaaaagggaaaactgatatggcgaagataagagacttgtcaggcgacgatggactttcgagtcttgctcggataatcatcttgcaggctactatgtcttgttcttaaacttcttgactattatgctttatgcttctaatgtcttttttctctaaccatgttgcttttgttccgtgcaaacatgtctcagaagatggtcaaggctctgaagaagagagttggaggaagctcaagcgcatctcccccggccaagaaatccaagggcggtgaggtgacccctgttgggttttatgccct

SEQ ID NO: 355544 - DNA, 740 bp, Cannabis indica
tccttaaagtaatccctaagggaaagaaccgttccagccttgatgtgctcgaggctccaagcaccaatgcccaaggaattgctcgtgctaggtccactgtactcctcacaaattaccatttcagaaggaaaacaaatgaattcccctgagccatgaaccttatgatacaaccctttctctacttgatatcgcaggactttagtatgccgccaacgtaagccccaattgacctaaccttggattcgatgagtttagcctcaaaggtgacactaggatcctgtggggtctttgatttacgaggcttaggagacataatgtcgaactcaaggtcacctggctcaaaagcaacactaactttaggtaaaagtattggtctcgcgagtggaatagaagataatattgtaggttctggccaagctgcgtctcttaaaaaacgatgtttgccctcagaaatctcttgtagaaatcgcctataacgtctggcaacttctttctggttcgacataatcaaatggtctctaattttggcatcgtttatctccaatttggaccgaggttggaaattttagggtttgaatgggagggctaattgcttaggatattctgttttcaaggactctgaagaataaacttctgagccagattgggacatttttacaaaaaagaacaattccaattcctgaatgaaatttattaaaccagaggagtaaagaatatgataaacctaaatttatatcatg

SEQ ID NO: 355545 - DNA, 764 bp, Cannabis indica
tttcttccttcggttcagtggtggaagattgcaagaaaattcttgagagtttgtctaatgtttcgcttttgtttgttaagcgttctgcgaattgtgctgcgcattttgttgcccggcactctatttctctagctgaacgcatgttttctattaatagtgttcctatggagttgatgtctattcttgagagcgattgctcgatttaataaagaatactttttttttcaaaaaaaataataatataacatatcaagcaatacttaaaactaacagtttcttttagtataggaaaattttaattttgtatgcttacaaaaataccccaattaaaatttagatcttcaattaatttatacaaaaattcatttatttatatatttttttcattttacccttaattaattaaaaaaatatatataaagaaaaaacaaaattaatcacacacgcttttgcaaacatagctggacaaagtcaataagaaaaagattaaatacaatagttttttaggtgtataaagaatgacacgatcatctagctttggtcctctcatttatctctctctctctctaagctcactatttctcaatctcttcgctccctatctctcgatctatctcgatggatggtcgaacctcctcattgaaacgaattatacacatttacctcaatgattgataagtgttgttcaaagaatttcttaaacatttagattagtatgtagtttatttttttatagagctatgtgtggttgttgtttgtattgg

SEQ ID NO: 355546 - DNA, 672 bp, Cannabis indica
ggcggttgcgggggaagctcagcagaagcgtctcgctgcctgagtcttcgaatctccttttcttgttgctagattcttgcttgcatctcagcaaacctttgctcccaatcaaacgaagcctaaggtggttcctcctgaccacccctcagaacacaaccgcggcctctaccgcgtccacggggattttggggatttctaccaccccgaccacctcctatctcaaccatttcaccttgcctttggacttttcgcggggcgtccattattaggacttaacatgcgaacccacaaggcatgcaggttagacagtggacaaaatattttctagaccgcatttagggtttataacattcattaaatcatatatgcaatatatcttatatagtttgcaagaagtaaagcttacggaaccatgagttgagctcaacactggccttaattgtgcatatcttgacggtcttcaatgaacaccctggtggctctgataccaaactgtaatgcccatattttaaatttactaaactcaaaagataattttaatatattagaactttctaaacatatgggtcgggatcccgagtatcaaaatacgatttaaaagtattttactaatacaatatccactagtaatatttttttttaaaacatcaggcaactaaactatacttcaaa

SEQ ID NO: 355547 - DNA, 629 bp, Cannabis indica
aaaaagatgataattttttttttatcttagaacacttataatgatataatatgatgaatagaaactcaatcaaccttaaattttaagtgaaaaacgaatttacatggtgtgggaatgaaaactagctatttataaccattagcacgtttttcaaaaaacttacttgaaaaaacgatctgttggtttaaaaacagtaggtcgtaataagtgaggcagtggtgaaatgcaatttttttttttacttaaacgcgcataactcttatccagttgtgttctcttagttaaaagatgaataatcttaaaatctaatttgaaaatattatatgtcactttttaaaagtaaattgttgcataaattagtgattcaaacttttaacttataaactctaatttactatgcaaatcactttaacaagactaaagtaaacttataccatttgattgtgtgtagtcttgatgtagatgagattcctagtttgattcgcatgttttgatccaaaatttacttttctcgagagttgactttgacttttgagttgacttttaactttgagcttttgaagtcctctttttatagggtcttgaattattgatctcttgatgaaccttttgctcttatgaagtataaa

SEQ ID NO: 355548 - DNA, 864 bp, Cannabis indica
ttttaataatggttacatttgatctccaatcctctatgaatttggatacacatgttatttcggttttttcttggggtcttttgacaccttattttatggttcatcgacatttaatatcgggaattttgaacaggatatgtggaacccacaaggatagattattaaatttcactaattattatactttttagttttatactttaattaaagaattcaaagtaaataatgattgagaatgaaataataaaataactaaaaagtaaatagacaaacaataattttaataagaaagtaaagacctagagtattgatttcccattttaaactatgaatctcaatttaccgattatctcaagttattctataatttgtagtttcaaaaatcttaatgtaatttattaacctctctcaagtgatgatagaattaacttaattaactaacaagatatctatattcaatgttaatcaattaagcaataataaagcaatatgattctctttaaataaaactcatagaattacttcaatctcacccttttcgtgtgttatgtaattctaagtccaattttagattacttctctcaagtgtaaaacctaaaatctctatactaattaatggtgatcaaacattaataattaacacaaaattacataaacaaatagcaagaacaaatatgagaataatctaaaacctttaattcataatttaaaatagttccatcaacactctagaaagattatttagttcataatcacaaacataataaccacaataatcatgttcataattaaataactaaacaaaagaataaagaagaagaagaagaaatgatgatagttgatgatgattgcttgaaatctctt

SEQ ID NO: 355549 - DNA, 1061 bp, Cannabis indica
aatggttcagattaggccatatttacgcgtgttaccggcggaccccgccgctattggtccgccggtattaatcaataataccggcggatgtgtcagtccgccgctattaatgattaatagcgacgggttattaccggcggtttattaccagcggatccccgccgctaatgcacaataccggcggatttcaggattattaccagcggactgttccgcccctattaatggtgtttgttgtagtgagagagtagaatggcggttggagttttgattgcttgaatgcctgaaaagtagtatagagcacctaaatccttcaagaaaaattaattgctcaaggccgtaactagatcactcacttgagatggatcactgctattgatgagaatattatcaacataaacaaacacatccaaacaatagatggaggtgactttgatgaaaatgactaatctattttagcttgagaaaaagtgaaggctacagggagcagttgaaagttttcaaaccaagctcgaggaggttgtttaaggccatataaggttttgtttagtttgaatatttttttgtggatggtcaggatccacaaagcctagtggttacaccatttaaatctcttcatgcaaatctttattgagaaatacattgttaatgtcaatctattgaattagcgagttgttggtgattacaatacttagaatcacctttatattgggtaaaggtctcattgaagtcaaatccaacttcttggtggtaacccttgaccactaatcttacttttatgtagaaatggtgccatttggatctccttgattctatacacccatttgcaatcaacgggagttcttattggtggcagattaactaggatccatattttattcctcttcaaggcctgatgcttagtatccatggcattaaacaagttagggtcctttagagcactttgaacagttgttggttgtagagattccatgagaccttaggctttctgatgcctgacttagctcttgtttgtatatgctaatctttttttgtttgtagaccttcagtagtcttctttt

SEQ ID NO: 355550 - DNA, 613 bp, Cannabis indica
acttagtaaagtagtcaactgctaccactgcgtactgcactctggctttacctttaggtaattgcccgatcaggtcaattccccaaatggcaaagggccacatcctttgcatctgtgtcagcttgttaggcggtcctctgggaatctttgaaaatctctggcatttgtcgcacttcttaacataggctctcgaatcttcaatcatcgttagccagaagtaacattgccttagagttttcttggacaagcactgtctggcagtatgatttccacagaatccgtcgtgaaccttagataggagtcgtgcagcttcgtcttgagtgacacatctgagtaatggcatcgagaatcctcttctgtacatgactccctctactatgatatactgttcttccttccttctcatttttcgagcttcatttcggttatctgggagttcctcagagttgaggtaggctgctattggccgcaacccagtttggggatgtatcaatcatttcgatttctttcgtgccagtgatgttaggctcttcaaggaatcggatagggaccaagtgttcctgtcgacttacattgctgcttagacaatcgagctaacgcgtctgcagttgta

SEQ ID NO: 355551 - DNA, 792 bp, Cannabis indica
tcttggaattataagtggatgtataatttttaaaactaaaattatttttcataaaaactgatttgtttgagcatcattcattttatcattaaatgactcaaggacaagtaagagtcaagtgtgagagaattcaataagtcgatattttgtcttataaatatagtcaattcatgaattaatatttttaaattaattctttaaattattaattagtggaattataatttgttaggatattttaaagactaatcatacatttagaatcatttggagggatgttagcacattttggtagaaaaaagtagacgttggcgagctcgattttacaaggtagtacgtacttaatttcaaattttgacgatattgtaagtagtactacacttggagctcaacataaaagttgtagatcttgttcttagcttttcgaaagatcttgaatcatcaattttaagttgtattgaaaaaattatggccaaaatactaatcacgtgacataaattttttagcagcgagtcatggtcgcggcaagcaacctcatggccgcggcatggaggtgatttctgggcgaaatttgaattttatcttcttttttttaagtaaaatatttttaaggattataaataagacttttagggtacgagttttatcacttttgaactacgtttttgagagagaaacttagagagagagattttatcttttttttttaagtgaaatatttctaaggattataaataagacttttagtgtgataatcagtagtcccgtgatccgtaaggggaaacaccgggt

SEQ ID NO: 355552 - DNA, 576 bp, Cannabis indica
cgctttcgtagttgaattggatgcaaattctaccaattaaaagtagaacaaaaattagtagtgtatcacatcaaaaaaataaaaaaaaaaaaaaaactattatgtttttttttgcttttttatataagaatgctcaagatcagtttttcaattattttctactattcttttgttattcttccatactttgaccataaatatgctctcccaaagtcctggaaatcattgttagggctacacatccgacgggtttcggacttttcaggttcggatttttaaatttcgggtgttggaaaatataataccaaacccacccatttttggtgccaggtttcaagtttcaatcgggtttgatgggttacaaatagaaaattagtaaaaaaaaaaacaagtcttagtaaaagatgaacaaagagaaacaaaggtgaacaaagggaaagaaaaacaaagcaaatgaaagaatcattatgttgtattattccactggcacgtttactatacagtaatcagaattggaataaattaatggagaaatgtaacggaataaataaaaaataatcggaatcaatatttgta

SEQ ID NO: 355553 - DNA, 520 bp, Cannabis indica
gtaaagcttacgttccaaatctggactttatggtctgggaactccttgctaatgcacacgtcatctaggtattccatactgggttcatccggtgcaaaggtcggactagactgctgtagttgctataatgttgccgatgtctcttttagcgagttttgataacaatctcgagcagttttttgggctccccatatttctttcactccccacttggttgggagcctgatcacttggtggtacgtggatgacacaactttcatggaatggatccacggtcgacccaagattgcattattagctgatggagagtcaactacaaggaacttcgtctgtaggttgacctcgccgactgagtgtttctgctctccactgaacccaaccaatactgtggatttgcagatgatggtggcctcgtcgatccccatctccctaagagcattcaaaaataatatgttagcagagctaccgttatcgatcagtatacgtttagtaaaacaattcgaaataaataaagaaatga

SEQ ID NO: 355554 - DNA, 563 bp, Cannabis indica
ggacttatgccttcgagaagaaaaatatgttgatcttactgatatcagcactgttgcctagaatactcttcatgcacaatggaaaaatttaaatcatcttagtctcattgctatgaaaagttcaattcctggacattcatttagtggtttgccaaacaccacaaatgctaatgaatttttcaaagtagtagaaaaaattatttgacactagtgaaaacgccgcagctggacatcttatgaatgaaatgacaaccattcagtgtgataaatcaaaggagtgcgagatttattttgaaaattgtgaatgttcagtccaagttaaaagatcatactattcctcttcctaactcttacattattcatcgtcctcatcatgcactttctgcctcttttcgccttatcaagacaacctacaacacttataatataacatggagtgttagtgaccttatttcttagtatatagctgaggaaagcaagctgtgacaaaaggaatgcatcttcttactatgtctctcaacttaagctcaacaaaggataggaaaaattataaaagaagcaag

SEQ ID NO: 355555 - DNA, 641 bp, Cannabis indica
gatatacgtatatatggtatttttgtttttttcggtaactgtaacattaatatgttaatttggtatattagtaaaaattgcccatatttttaggttatattaatatttgggcctacttttttctcgaaagatattttaaatagtctaacttaaaagggttttataaaaatattaagttttggtcaaatgtttacaattttactatcacatagcaaaaaattacctttatattgttctgggcttttatttttcttttatacttaaacactgaatatcaagaacaatgcctccatattcttctacacccacgcacagaaccaccacagcaacacgaacatacccggaaaataactattaattccagcaagattgaacaaaaacagtgaaatcgacgtcaaataaataatcatggcaaaacaactgcaaaacaaatcataaaagaaaaggaaaaaagaattgaaaaaaactaaccatctttgtacaacctcaacactctatgtaatagcggctatattacaagcccagtcttaaaaaatcagaataaaaaaactactaaaacaaacctaaaccaacataaaaataaatgtaagacaatgaagcagaaataaccacttagaaaaatataaaagaaccacacacct

SEQ ID NO: 355556 - DNA, 668 bp, Cannabis indica
acgtgtatgaaaatgtgaaaaaaataaagaatattgaaaaataaataatacatatatttcattattaactatatatatatttttgaatgaaaataaactttattagacacaaatatccgctaaaataatggactgaagagcaaggagaacatcgctctcagtaaaacgacgacctgaccaataacaagcaccacgtgccatacagtgcgcgactttgttagcagaccgtttaacatgaccaatagaaacactacttaaagaagataaaatagattgacaatcttgaacaaatagaccaaaaatagaagacatagataccgaactaagaatagcttgaacaactaaaatgcaatccgcctctaaaatgacatttgacttgttattcctctttatctaactaagtgcctctttgatatacttagaatttctgcaatctcgggttggcaactgacagaagaaatagttgaaaacgcctcaactattcgaccatcacagccgcatgctacaaacccagtaccaatctcatttgtgtcttcaaaaaccgccccatccacattaatttttaactgtccagcatccggtttggaccagtggtctcttatgtcagcgcgattggaagctagagagaccgagtcccagccgcttagactgagcacactgccattgtc

SEQ ID NO: 355557 - DNA, 1118 bp, Cannabis indica
agttggataaaggttaggaaaataaatttccttgctaaaattaacttttctaggtgtcaaataattaggcagccacctaactctcccctttaacaaatgactaaaatgccctttaacttaaaactagggtattttcaagattagaggtaaaatggtcaaatttcataaccccgctcaactctgatattttattttctccaaaatatatcacactaagaaataaggttataaacttacccatgtaatcaaactagtcatccatcgcattttccgttgtcaaagagcaaaaattacaaaaatagcacaattcacatataagtcaaataatacccccagagtttaataaaatctctgaaattgagaaattataactctaatgccaatttcttacaatgaggcccacagataattcaattcataaataattataaaaataatagaaattattgtttattgcctttactaatctaaattattaaagcagtcattacatcgtgtcaccttaagtaattcagataatcttctttacctttgtgataccactattcttcctgatattcttttatactttaccccggtaacgtccccgcttcaagcctccattgggcccttacgcccacggaatgatggctcttatacacgagtgcatctgtctagctgtttcttcgactgacgactggtccacggaccaatccaagagtttctaacttgctttgctctgactcacacaatccaagtcaaggacactcgaccatggagttctttcattgtgagctaccaaaataagatgcttcttgctaacataggtgttggatatattttaccaggatctagatttattggcaagtatgtttcattaacatcctaatatgaattctaaaacaatgaaatagacacatataaagttcagtaaaccttacattaggtgcagcggaatataatgactccttccgttcaaatatctagcccttgattcctttctgtagcagagcattatcaatatctgaacttggatctctttctctccttcctttgatgccgattctccttgttgctggttgattttccacagtcttacacactatgattgagataccactcaattatactatcatatt

SEQ ID NO: 355558 - DNA, 538 bp, Cannabis indica
catttacaacaacagagaagatgacagagagaatttcctcgaaccacatacaatcattatccaacaccaatgcttgtttagccaagccatgagcagcttggtttgcatctctcttaacatgagatacacaaacagaggagagataggataaacaatgtttaatatccaaaattaaatcaccaaaataggaaatagtagcaaattgactattaatagcattaactaacaccagagaatcagattcaaaatacttgatagaccgattgtgtgaggcagcccaatctaatcctgttagtaatgccttagcctccatttcttgtggattgtacctaccagtgagagatttagagtaggcagtaataacttgacccgatgaattgcgaacaataatgccaacaccaatcttgttacaggagacatcataagctacatctatgttcatttttaattcatgagaaggaggacgtttccatttagaaatagttgctgcaccagtagagactttaattgaattatgggaagaagcatgttgctgata

SEQ ID NO: 355559 - DNA, 1689 bp, Cannabis indica
gatgatccatggttcgcacaaaaatcagtgaaggaatggctgtcaaactgcttgccattatccgaaactattttgcatggcaatctgaactgacagattatgttcttcagaataaattcttaaactttcaagcactaccactgcatactgtactcctccttttccttttggtaattgtccgatcaggtcaattccccaaatggcaaagggccacggactttgcatctgagttaactcgttgggcggagctcgaggtatctttcaaaatctctggcatttgtcacatttcttaacataggcctttgaatcttcaatcattgttcgccagaaataaccttgccttagaattttcttagataaactctgcccgttagcatgatttccacagaatccgttgtgcaccttagataggagtcgtgcaacttcttcttgagtaacacatctgagcaacatcatagagaatcctcttctgtacataattccctctactatgatataccatgcaaccttccttgtcatttttcgagcttcattctgattatctgcgagttccccagtgttgaggtaagcggctatcggtgtcatccagtttggggaagtatcaatcatttcaatctcttccgtgccagtgatgctaggctcttcgaggaactggataggagccaagttcaccttatcacttacattaccgcttgccaatcgagctaatgcctctatagttgtgttttcttcacttggaatttgtttgagaccgtagcttttgaattgtgcgagcaggtcatgtattttgctcagatatgctatcatcatttctccccgagcttcgtattctccgaatacgtgatttaccaccaggtgtgaatcaccgcagattttaatgtgctcggctctcatctctcgggctaactttaggccagagattagagcttcatactcagcttcgttattagatactttgaatccaaacttgactacagcgtgcaggtgttgcccccaggcgtgacaagtgcaattcttgcaccaaatagctaattttagccgacccgtctacgtgtagtttccaagtcggcttatcttcactgttatttcattgcggtgtttgtaccggctcggggtcgcattctggtatgctttcttctttgcctgtgcattctacaacaaagttcgctaaggcctggcctttgattgttgtttggggttggaaagtaatctcgtactggcccaactccactgcccacttgactagccgaccagaggcatctggcttttgtaatatttggcgtaatggttggtcagtgtgcacctaaacaggatgagcttgaaaatagggccttaactttctagttgctagaataaggcagtaagcgagtttctctatcaatgggtattagccttaggcctcaatgagtcttttactgatgtaatagacagggtgttgtatgttgttctcttctttgtttagcacggcactcacaacgtgctctgtgacagctaagtatactccaagttcttctccgtccaaaggttttgagagcacgggaggctttgcaagttgtgcttttagctctcgaaaatctttatcacattcctccgtccaatcgaattgcttgtttcctcgcaggatattgaagaatgggacacacttgtctgttgatttcgaaagaaatctgctgagtgcggtgatctgac

SEQ ID NO: 355560 - DNA, 745 bp, Cannabis indica
caagtggtagtattcctggtcctttatgttgacgacattttgatatggcaacaatacagaaatgactgacatcaaggaatgccttgacactcaattcgaaatgaaggatttgggtgaagttgcttatgttcttggtattcaaatcatcagaaactggaagaatagatcccttgctttctctcaaacaacttacattgataaagtgttagagagattctcaatgaaaaatgccaaaggggcagtgatgccttctagacctggtatccgtccatctaaggaacaatctcccactgatcctcaagagatagaggacatgagaagggttccttatgcttcaacagttggaagtctaatgtatgcaatgttatgcactaaacctaacatttgctatgcagtaggaattgtgagcaggtatcagataaacctaggagaggaaaattggaatgcagttaagcatattctaaagtacttgaaaagtgcaaggcattatgtgttagtctactagggtggtgttttaaatcctgtaggctataccgactcaaatttctaggcttgtcttgatgacaagaagtctacatctgggatggtatttactcttgggcgtggagcagttgtttggagaagtgttaagcaaactgtaatgtcaaactctaccatggaggcggagtacatagataacgccgaggctgctaaggaacttgtctggcttagaaagttcttctcagaacttggtgttgttcctgga

SEQ ID NO: 355561 - DNA, 569 bp, Cannabis indica
cctacccattcttcgttggaaacctcaggcacgagtcgaatatcgatgtgacagcccttaagtcatacaaagctggacgacctagcattacgttaaaggttgaaggaacatctaatactagaaattgtgccataatagtcatgctcgtcggagcttggccaacagtgaggggtagacgaatttgtcctagaggtgtgactccttggccagagaaaccatatacaggcagtagatagggggttagatctttaagctggagccccatcttttcataggcagtttataataagatgttggaagaggctcaattatcaatcatgtttttggccaccatcttgttagctatctagacctccacaaccaacaggtcgttgtgcggaaacctaattttgacagcgtcttcatcgttgaaggttatggtaggccatcctgcccgtgggattttaggattcctttcttctacggccaggatcacttcttcttgctcatgctgtgctgttcaggcatacctctcccgagctttgcctgaatctccagctatgtgccggcctccaatgatgacttgcaga

SEQ ID NO: 355562 - DNA, 619 bp, Cannabis indica
gtatatgctatattacatacactatattatagtctaacataaatgtatggataaaattcttaaactagaaagatctagagacaacaattctagcctcaaatgcttgaaggctagcaactataaatacccatcaagggttccaaattgtaactaagcttgagtaagccaaatcaattcttttactactaacttactacattgtctcctctcttactacacacataacaattaaacacataactcttccttgtcccaccaatcatccaacttatcaacttatcaacatcatcatactacactacctaatatccatcatcatactacacttccttttctcttctttttaattgcaaattacaaatgatgtttctttcaatgttaattacagatattgttgcagttgtattaagtgttgatccaataaaaaaaaaatccacacaaggtctggacctgcaaatattcaagaattcctccttgttgatcaaaggtctaaaattaatatgttttatattttcaagaattactgcatatgttatgttaatatttaacaaaatatatgtaacatccccgcttcaagcctccattgggcccttacacccacggaatgaatgactcttat

SEQ ID NO: 355563 - DNA, 971 bp, Cannabis indica
gatcctggtaaaataacttccaacaatgacaccaatgaatgcaacaatctgaagcgggaacttaaattcttgataaggaaaataatatgcacgtgcagaagtatgacaaggtcgatcggaatcagaggggtgataacaaccaagacttgctaccaccaccagcagatggacatctgcaagtcattatcggaggaccgcacatagctgtagattctggcaaagcccgggaaaggtatgcacgagtagtacagcatgagcagaaagaagtagtcctggtcatagaagaaaggaagccaaagatcccacgggcaggagaacccaccataacattttattatgaagattccatattaggttttcgcacaacaacccgttggtcgtggaagtccagataaccaacaagattgtggcacaaaccatgatagacaatggagcctcttccaacatcttattcaagacaacgtatgaaaagatggggctccaactcaaagatttaatccctgtctccagcccgtatatgtttactccggccaaggagtcacacctctagggaaaattcgcctacccctcactgttggacaagctccgatgagcataactataatggcacaatttttagtattggacgttccatcagcttttagcgtcatgttaggccgaccggctttgtatgacttaaaggttgtcacattgatattctattcatgcgttaagttcccaacaaagaatggggtaggatgcctaagaggaagctagcaagttgctcgggaatgttataaccttgctgtaatattctgataagcctgatggtaaataattagagtttatatttatactatgggttaatcaggtaattagtgggattatgatcttactaatctatttcagtatgaaatttaaattttgctataagtgagtaaataacgtaatttgtaattatggaaatttatatagcatgtgtgaatgtaata

SEQ ID NO: 355564 - DNA, 318 bp, Cannabis indica
gatgttaatgaaacatacatggtagttagatcctggtaaaatatttccaacatatatatcttttctgtgatatgatatattaaggaataggtaataaagaataaactcttgctactacaatattagagtaagattttagtgtttttattttgcactatggtatatatttattctgtgataggatatattaagaaataggaaataaagaataaactcctgctactataatattatattaagattttggtatatttatatagctcagaggtatatctttttaatgggttatcgtatatacaaacaatttaattttattac

SEQ ID NO: 355565 - DNA, 822 bp, Cannabis indica
ttcgtggtggtagactgcccaatcgcatacaacgccatccttggccgaccaactttggttgaattcaggcgatcacatccatacgacacttgtgcctaaaattccccatttaggaggctggagtagggaccgtaaggggcaatcagggagaggccaggtagtgttataacgttgcagcacatttgccagtactgatggtttgtgagggtatcgagccagagttggcagaagaagatgagttagatccccgtgtgggatctgaaaaaactgtagaacctatggaggacgccgaagaagtacaagtgtgcgacctcgaccctaccaagacccttcgcttaggaaaaaacctagagccagaggagagagacaaaattattgaagcattaaggttagccacaaatgttttcgcgtggtgccaaagagacatgaccggcataagcttgcatgtgattacccatgtcctaaatgttaacccagacatgccgccaatacaacagaagcggcatccccttgatccggtaaaagcggacgccctggaaaaggaagtagacaagctactgaccaacgacctaatccaggatgtgtactactcggaatggctggctaatccggtattggtgccaaagccgaatgggacatggcaggtatgtatagactttactgacttcaacaaggcctacccaaaagactgcttccctttacctcaaatcgaccagatggtagatgccacctctgggttcaagctactgtctttcatggacgcctactctgaatacaaccagattaagatgcacattgtagataaagagtgcactagcttca

SEQ ID NO: 355566 - DNA, 1451 bp, Cannabis indica
agattagtgataataagtttataaaggcacacacgtggcgtccctgagggtcagggcgttacaatctatatagtccaccttggagggggggggggtaacacgaatcgtcttcaagcctcttttgccgtttacctctattagtaatggtcagtcgtgaccgttatttgagttattatgtcaggtgtattctgttgtttattaggggtatttttgtccttaggttggttagttattttcgttattttctctgttgagctctgtatatatacatttgtttcttgtatcatattatcaatcaataaactcaagactttcttttctgtcataatgcctttttgtgttaatatcagaaaattctttattcataaataaaattgtggcttgtacctgtacagagaactaagacaacttagctatgaataaaacagtcaacaacatattaaagttatagaatatttaatcaatagttgttagtatagttcactgatgtgcattcttcagtgctagtaatcttggtttgaattacggatgtaatgtgatatcaaagtgaatgtgttgtatataatagagattatatatcacaatgatcgatatgaatgaagctatctttattgacatgccgttcatcataatgacctaattcatattataacgatgatcaatagtagatcggcctaaatcctaagttatcatgaagtcctgttcatgttattagtttctttgattcactcgtaaaagtttcttagagaagatgattcttaaaacttctgttttgggaatctaataatatggatgactaggaacataatgtacaattatacaattttgactttcctaatagatcaaatggtggtttcctttatgtgttaattctggtactggaaagttgcgcgtaaattcaaatgggatcttcaattatacttccactagtaaattaatggaactaaaggtaaataagtaattagaagggtaaaatagtattttgaccaaaacaaattacgaaccaacatatggagtgctaattacgggaattgattatatcaatggacatttaattaatcggtaaataattaattatattttataaatcaaatcaaataaaatatttgatttgttaccatatgaaaaaatattttaacacactgcagttaaactcagtaaatataattctataattactaagaatccaattccataattgtagtggagtaattatagaattaataaacaagggattatttggttgatgagattcaataaataatctagtttattgaagcttagaattataggtctatagttctcgaattgctaccttgacacactgtcaagggtaggaataaagagttgtaaagttttttggaaaaatttattttgaattgacaaaatagcaattaattattttttgtaaaaaataaatatttttttttcaaattaattaaataggaaaa

SEQ ID NO: 355567 - DNA, 1000 bp, Cannabis indica
atgtttgattataatctataatcaaacatcctaaacatgaatttcgtaaaacaataaaataaacacatatcaagttttagaaaaccttacattcgtggcagcgaaatataatggctccttccgttcaaatctctaactcttattcctttctgttgcagtgtattatcaagatgtaaatctggatctccttcaggtaatggaattcttcacaatcttccacactatatttgagtattaatttgaattgtgtgggcaagtactctcttcactataggcttcgaattctagaagggagaagagaaggaattttgaaaattataggagctctcttatttgtctgacaaagtaaattttgagttatcagcttatgaaaataagagcctatagttatctatttatatgatacctattagggttaggttaggatttaaaatacggattaaaaaaaagataaaattgctttaaattgaacccttgtggccaaaccccttgtaggccttacgggttttaattttgccactttattaaataacctatctttctttcttaaatactatattttaactctaactctataaatactaattttatctatttaaaaattataattaattattaaacaaaaattttcgtttaatttatttattaattagacctatcaatgtctcttaattaataaacatcataaattctcttttcttttcaattaagtcattgcttagtgaaaattcataaataagagatagtctaatttagaattttaattgactaattaaagccaattaactgactttacaagccagtattatctcaactagtgcggggaccatggcctatataatcaagctcccaataagtagttctagaatttaccaagtaaattttctatcttattaattcctcctgactccactatagatttgaaattgcactcgtgattatagagaacgctctatatgttccaaatatagatacactattaattatctattgtttcaat

SEQ ID NO: 355568 - DNA, 359 bp, Cannabis indica
ggatcaaaaatgaagaaatgaggggaagaaaggggcgattgggcaagggtttcgtgggtttgagagaaaaagggctgctggttattttgggatttgagaaagacgatagctgaagagagttatttattacaaaataaccgacttcgtattttttcattaaaattaaaaaataatcacttatggagtcggttattaaaaaataactaactccgtaggtatttttattaaaatttcattcagccacactctatggcgttggttgatgcttaatttatgaaaaaagtatctctaaaggcttgtttttgttggaaatattttaccaggatctagatttactactaagtatgtttcattaacat

SEQ ID NO: 355569 - DNA, 778 bp, Cannabis indica
taaactacaaatgttagtaaaaacatattggaaacaataataataaggttataatatatgttgcatttgttccaattcttaaaataatagcagaagaacatctttgacctggaaaaacaaatattacaaaattaagaataactaacacttgaaggaacattctcactaccaagaagaaatcttagatatatattacaaatattacaaaattaagaataactaacacttgaaggaacattctcactaccaaggagaaatcttagatatggaatcaaaaacagagcaaaatcaaaattaatgtgtacaagtattataaagccagcgtcactcaaaatagcacaacaaaagtaacaaagaagtattaaaggtgtaaattttaccaaaagcaatgagaattaacaactgatgattgcattctgtttcagtaggtgaaattgagacagagacttttgttgtgtttgcctgtatgggttaatcgtaaagattgtttaattttttgagtttaattattgggtttattttttaaaatttgaataaaccagtgtaaaaaaatttcaaaaattgtagtttgttagagagatatgtaagttaatcgtaaatattatttaattttttggtttaattattgggttcaaaaatggtaagatatgtgggtaagatattttttttaatttaaaaaaagattgtttaattttgtgggtttaattattgggtttattttttaaaatttgaatgaaccagtctaaaaaaatttcaatagaatttgttagagagatat

SEQ ID NO: 355570 - DNA, 720 bp, Cannabis indica
agatatttacaaaagactaaattacccgtgaatctagatattattcggctattctgttgggcttttagggcccaattaacagcccatgacttgttgtccacgtgtacaagttcctaggatagcttgtagggcatctcttggtcggccaggcccctatggaggccagattggccggccatggtgcagtcccaaggctggctggcccggtggccagccagctcctaagagggagttggtctttcacttgatgcctgtttgagtgtcagggtctccattttttcaggtgctgacttagccttcctattggacagctgtactatcacgtggcactaattttgtccatgtaagcatgtcacgtcaggaggataaaaatcgggataacagccctaagtcacaatttacgtaaaactggcaagggtttcgctaaatcactttcgggaactaaatcttgaaactaaaattttccctatcaataaatagcatgaccaaccctacatatcaataaaatgctaaaaatgagattttgggaaaagtatcccaaaaaaaagggcaggtcgtttttatttacagcaaaatttccccaaaagctcaaaaccaccacaaatcaatcttaatccttcccaaactatccaaaattttaaataaggctaaaaaaaacctatttcaacagttaaaagcatccttaaacccctagatcaaaaatgttggaattattttacc

SEQ ID NO: 355571 - DNA, 715 bp, Cannabis indica
ttaaagttagttatattaaaaataaaaatgttaaaaattgagtttaggatcctatttttataccattttggaaaatatagggtccattttgtcatttaacaaaacagagggtctaattgataacttttacaaagtagagggtccaaaatagtatttatcctataatttatagttaataagaaaatattttttaaaattttaaattaaatatgtggccctgacaataacacatcaactacattgacatgttttagcagaaaaaatttcaaggggtacgatacgatcattgtaatagttcaaggttataaaattttttaatagcctaattttattaatatttttaaaaaagaaataggtaaaaatacaattcgcttgaccttcctatttggcccctcctcgggtttttgtctggttccgccactgatcataaagaccctacacgaaccagctcaaatttatttatagtcttattattttttttttacatttttattagttataattttgttgaattgtaataccaggttatcaatatgtaaattttttttagaattaaattaattataattaattattttttttaaaataattaatttttaatttaaatattcaataacaccctttttaaaaaattaatattaataattttatttttcagatttaagttttcattatatttttttttaacaattaagccatttaattataatattta

SEQ ID NO: 355572 - DNA, 581 bp, Cannabis indica
ttaaatttttgtaaaaaactatttttttaaattttaccaaacatatattaactcataactttttccaaaagtgattttagctttttaaaaagctcccccaaaaggggcctaagaaaactatagcaaaataattataacatatttcacacattgccgaattgcatccctacacaggctttataaacatccaaactaatctaaagagttaaaagaattaagcacacattttaaaaattttaggacatttcacaatcaacggcaacatacaactatctttagcttattttcaaataaaaaacaaactaaactaaagcaaattaaaaattttaagtcccccaccccccccaaaactgaaattcacattgtcatgtggtatgaaaactaaaagggaagagacttacctgaggtccatgtcacattaacaagcggttgtcacctataataagcgtcatgcaagataactttaaagttatttttgaagatgctctcaagcttgacatgtaatgagtttcaactaaaaatcgcaccaacaacaaaagattttggatgagcttggggagaaaccgttgataactcgtaga

SEQ ID NO: 355573 - DNA, 595 bp, Cannabis indica
ccatgtctccatgtgaccatgcaaataggtcaaggtttacccttagaaatttagtcaaggctgacctgatttctagagccaaacccttactaatctttagtcttcttgtgggatgagtgtgatcaacctccacctcctcccactcttctacaggtccaaagcttcctacagcatccctaaagcgaggatccatgtctgtatccccacttgggctagacttcattgccccttggagggctcatcttctagactcttggaaagcatcttatccttcttagccttggataaggcctggttgtaacagtgacaggaagactgttggtctcccctcacacacgccactccgtgccttgttgggaatttgaggcccaagtggtaaatagacgtcagttccgtcaagtcgttgagggccagtgacaatcatggcattgaaagttgagggaacatcaataaccacgaactgtgccatcaatgttcttgtggttggattctctccaactgtgagaggtaatctgatacacccggctagtgcaatgacttggccaaagaagccatacatcacctgattgccaggtgccaggtcagtgagttggag

SEQ ID NO: 355574 - DNA, 805 bp, Cannabis indica
tctctctctctctctcggccattcctagaaccaggtagggttcttgttgctccttccattcagtgttttgtagtagctctaagtataatccaagctaaggtaacccttgtgcaactcccttgttagtttccctaagttgtaagaatgaaaattttgcatgctttgaagttttagttgttgttgttgcttaaggattatttctgcagttgttttatgtttgttgagttgtttggaagtgattttaggggctgttatgttgtttgagaaagctttggagttttgaactcaagcttggctcattaatggtagaatttgattctgtgaatgggtggtagttttgttgccttgaaattgttctttagggtgtatagaataggtctggaaagtttggtttggattggggtcgaattggttgagttatgaaaattttagtgattcttgcattgaaccggaatttcggttcagagtggcctgtaggaaccggaattccggttgatttcctgggtttcctcccagaattggaattccgattgaggaaccagtctaccggttggggcaaatttcggaaccctagttcttcccatttttgtgttatttagggtattgccatgctatttatcgatagggaaacttttagtttctagtttaagtccccgggaagtgatttagcgtgtcacttatcagtgttgtgattattatgatttaggagcctgtaattcgccgagcagattgttccactcaggttgaccggcacacctgaatttggaatcgaggtaagattagtataatgttatgcatatgctta

SEQ ID NO: 355575 - DNA, 683 bp, Cannabis indica
cgattctcgttgagacagtacttatcaaaattttgctgggtttgcctcccaagcctgttttcaaaaaattcatttctttttgggcttcttcttttcgaacaaatatctgagccctttcgttgaacttagtgatgtttcttactagacgaccttgtaagtcgtcccacagctcgcccccacctgttgatggatcagtggagattcccgcctgaagggctgtaagttgtgtactatcatccaaatttctaaccctagcagcagccgtgctaaaacgacttaaatatgctttatattggttagcgacgctactctgggtcgtttatccctagcagcttggaactgtttcttgaaatccctagatagctgttcccatgaagttattgaatggtgagtaaacttgttaatgttgggttttatgccctaaataaaactccatttcaatgtaatctttatcctttaaatatcaataaagaaacagaagtatttttcttcactttgtgtgtcttttggttcgtgttatcatttacttatttatttgatttataaattcatccaaacccttatcacatttatgttcttgtttattgtgtcatcagcacagtggaaagtaatcaagattatgtgattaaagatatattcctagatttatcagtacacaaagggtttaactgatatgacaatct

SEQ ID NO: 355576 - DNA, 615 bp, Cannabis indica
ctctctcaagctcactctctctctttttcggcccccttagagcagctagggttgcctcatttcctctcaattccagcaagtttctgcaagattttggagtgcttaagctctaggtaagcttttgactttgtcttcttgagtttcttgatttataagttagtgatgattgcatgttatgaggttttgtttgctgtagctgctgttagtgtttagtgttgttatctgaagcttaaatatgtttagttatgtggattcaagcaggttttgttgattgttagttagatttaaccaagtttgagttttgaactcaaacttggagctttaatggtggattttgattctgtacttgggtggttgttttattgccttgaaaatgttctctagggtgtatagaacaggtctggaaagtttggattggattggggttgaattggttgagttatgaaaattttggtaattcctgcactgaaccagaattccggttcagagaggcctgtaggaaccggaattccggttggcttccaggaatttttcccagaactggaattccggttggggaaccggtctacccgttggggcaattttaggaaccctaatttttcccatttttgtgtt

SEQ ID NO: 355577 - DNA, 1183 bp, Cannabis indica
ctactcagaacccgggacgacttgttgccatgactcaggctgacacgagattctagtctgtcagtggtgattaggtcagttatatataaatggttgtccttattctgtattatttgacgtcgggagctactcactattacgtgttgagtagagtaatagaaacgtttccataagccatgtgatatatatgcgttcggggtttggtaccctgttaccttcgagagaccttatagtatccacaaagtggattcgatccttgtctttctcgatcgacggttgtgaattaaccgccaattcaatagaattacaactatctaattttgatataatcttgggaattgattttctgtccaagtatgcggcaacgatcgactgcaaaaggaagatggtggtgtttgagcccgatagagctaacccagcagtgtttgtgggtatagttcaagggacacgtataccaagaataacacttttgaaagttagggatctgatgaacagaggttgtttgggattcatagtcactgtagtggataccagccaacctgtgacatttggacctaagaatacaagattggtgtgcgagttccttgacgtctttccaaaagatttactgggattgccacctacccgggagattgaatttgtaattgagttggttacaggagcgaaacaagtatcaaaagcaccgtatcgaatggctccagtggaattgaaagaactaaagatacaattgcaggagttattgaatttgggattcattaggttgagctactctcctcagggtgctccggtgttgtttgtaaagaagaaatatatgcctctatgaatgtgtattgattaccgaggttgaataagcttaccatcaagaacaaatatcctttacctcgaattgatgatatttttgatcaacggaaagggaagatggtcttctccaagatcgatattcgctcaggctatcttcagttgagaattcgagaggaagatgtctcgaaaattgtttttttatactcgttatggacattatgaatttctagtgatgtcttttggactcaccaatgccccgccggcattaatggatcttatgaattgggtattcaacgattacctagatagatgtatgatcatgtttattgatgttatcttggtttattctgaatcggaagaggaacatgagttgcatcttaga

SEQ ID NO: 355578 - DNA, 742 bp, Cannabis indica
gagcccatgccacaacttggcactagtatatcgcatcgtctaatcacatgagcccgtacctacacctgatacttatcatatgccactgacgcctgtacttatgcctgatacattgccaggaagaaacccaataatggtttcgatatatgccataactaggcattttcatatcactgatgcccgtacctacgctcaatacgttgctaggaatatcacatcacctaatcaggtgagcccgtacctacgcttggtactcatcatatgttattgacgcccgtacctacgcccaatacgtcgccaggtatattgcatcacctagtcaggtgagcccctatattatatccatagtattatcatattatcattgcctaatcaaacaatcgataatttcagaacttgtcatgcaatgtggtacattatacttttttgacctcaagtcctggtccaggtatgttggctgacctgcttagagaacgatcgataatcttgggccttctgccataacaatgataaaccaataagtgtttatcccaaaacactactttacattcgcgttagacaatctagggttttctaccaaatctcacagtataaatatactaaaataaaacttatattttggctctaaaacatacaccttatcatagagcttatcggaagcttcgaaatagtatatagaatgtccaaaacggatacctcagtcaaaagttatgaccaaaatacgatttctgatctcctatga

SEQ ID NO: 355579 - DNA, 781 bp, Cannabis indica
aaattcataggagatcagaaattgtgtttttatcataaattttcactcgggtgtccgttttggacgttctatataccgtttcgaagcttgaaatgagctctacgatatggtatatgtttaagagccaaagtataagtttcattttagtgtatttataccacagtgtttgatagaaaatcctaaattgtcttccgcgagtgttaactagtatttcgggataaacacttattgatttattattgttatgacatagggcccgaggttatcaatctttctccaagaaggttggccaacatacctgattcgaaacttgaggtaagaaaagtataatgtacctcatggcatgacaggttctaaaattattgatcgtttgattaggtaatgataatgtaatgatactatggacataatatatgggctcacctgattaggtgatgcaatattcctggcgacgtatcgggcgtaggtacgtcagtgatatgaaattgcctggttatggcatagattgaaactattattgggtttcttcctagcgatgtatcgcgcgtaggtacgggcatcagtgacatatgataagtaccggacgtaactacgagatcgtctgattagacgatgtgatatattagtgacaagctgtggcacgggctcaccagattaggtggtgcagtgatattatatatgatattgcattatgacacgggcttgcctaattaggcaatgcaattatatgagcatatctatttctatgcatatgactcgttatattacctattattgaatg

SEQ ID NO: 355580 - DNA, 705 bp, Cannabis indica
agatgagaatgagcctttgtgtcctacaatgaaaatgttacgtagaaagagcaagaggacaatgaaaccaagttctgttgtttgctctccgtttaaagcttttggaaagaatcactaatggagcatggcttttaagatacataggaaggaaaccaactgctgattgatgtcctatcttgagttcttaaagctgtaatcttatagaaatcctttaatggtttacttgcagtcaattttttgtgtaatgtgtcaaatattttcacacatatagtaaagctcacaagctcaggctgtctaaaaaaccattatgtcgtgttatcttatatcattgatttaagaatgttgctgtcaatttgaccaagatgatacctacgtggctataattgttagggaagtggtggtgtaacatccccgcttcaagcctccattgggcccttacacccacagactcatggctcttatacacgagtacgccactctagctgcttcctggactgacgaactgaccctacagaccaacacgagtgtttccagcgtgctttgtcctcactcacacgcttcctgggaaaacttcccaggaggtcacccatcctgaaatcgccccaggtcaagcacgcttaactgtggagttcttttgtgatgggctaccgaaaaataagatgcaccttgttgatataggtagtaccaatcaatccatttaagctc

SEQ ID NO: 355581 - DNA, 744 bp, Cannabis indica
caccaaggtggaggccaaactcagaatgcgcagccgctgaagatggaaaagaaggatcaactgtattacgcaaccaatcggtcgactcaaccagagacggtctcttgttattcttcttctgagccctcgcagaaggacaagaaggagcagcagtagtaacaacctccttctcaacactaggagtcgtcctagtcttctgtttgcgtgagcgtaaacgttccatagcaccgtcaccaaccagaggaagagtgaaagaagattgggccatgaatcgatctgcaaaatctcatccgtctgatgtcaattcaagtagaaataaaggttcgcatcccaaaatctccaaacttctttggagtatagcaacttgagcttagcacgattcttaggatgagatataccttcgggttgacggggaacgtgatcccacaaagtgctgtctcgaagagaagaatcagacaatagaacgttccaatagcgctcctcctccgcaatctgaagaacttgatcaactctccctggtgcttgcccacacacccaactaaatggaaggccaatcctacctacaaagaagacaaatcaaccagttaggcatgcatcaataaaccataacaaataagggcataattcaacaccaaaactatgacactcactagcaggagaccacgaatggggaatcccacgatcaaccgataatcctagagcatcaaaaggaacaaagaaaaaatcctccttccatcgcttagc

SEQ ID NO: 355582 - DNA, 736 bp, Cannabis indica
cttcgctgggtaacttggatcaacattttaaatgatggcatataatcttagggtcgatccttttcatatctccatggctctaggagaattggtcctggttcgccttcaaaaaacttattaactactatttgagctgcttgtccaggttcttcctaatgtatacacactttgtgggatgttttgggtcaagaataacctcttccaattcttcaattggttttaataggtttctctcatcttgaacttaggggtcaagatcttggtctttcttttcattttcttctgccaagatcgccatcaactgatgaccgactttcctatgctacaactctatgcgatagcaatcgcgagccagcatttggtcgccacgcactactcccacgccttctggtgttcagaacttcaaggataggtgcatgatcgaactaactgcccctagtccaatcagtgctggacgacccaacaatatgttgtaagccgatggttggtcaacaattaagaagtcttgtataacagtggcagataggggtgcctcgcccaaggttaatgcgagctcgattataccaagactggcgatgctgtctctagtgaatccatgaagattcaccatacaaggcctcaatatggcttttttgagccccatcatccttagagtttccttataaaggatatttactgaactctcgttgtctattgataccctcttgatccttttattggcgagttgaatggtaat

SEQ ID NO: 355583 - DNA, 764 bp, Cannabis indica
gctcgcattattgtattaaaatgtgatactgaatcagtggttccgtcatatgacaagacatgcgggttttcaaatcccgaaggaaaaggggtactcatgatatctggatgatacgactcaagcttcgtgagagggttctggctggtgattctgatttttgggggtatctcattttccctgggttgttcttcccgggcattttcctatctcctggttcatgagccacgaggtatgcctcgtggtcttctcactccaggttcaggttgattttgagcattcatcccttgtgccgccttggccgcggctgcatcacattctaattcagcgttccaccgctgcgcctcttctagacggcatcttaggcgacagttttccatttcataagtaccttctcccataggctgggtacctccacgattgggctcttcatctctcatcctagggttctgtccattcccacgctaagttctcctcgagcgcattgtttgcgtactaggaccaacgtcaggttgagtcctttgggaacgtgtgatccgtgcggtggggctaccctcaggttgagtcctcctagaacgggtgttccgtctggactgtgggttggaagtccttctggagcccatgggctctttcccagaacaatgatgagtttcctcatgcggtgtattaaacttttctggatttttagccatgaacgagagggttttttcttcaaaagaaatgagggtttttctgagctttttcaaagaggctctcaatgaaagtac

SEQ ID NO: 355584 - DNA, 622 bp, Cannabis indica
atggttatttggcaaaaatcttctatgacctacgtaagatgtcgtaccaattacttgaatggaagaggtatcttcattgcaagtgggacaagctttgtatccctgaccactccaactagacaaataactatcattcactgtccatagaagagctgcgcgcagcttgaagacagtgttagttcgacaatctctcgtatctactccattaacccacaactccttcaactcatccaccaagggtcttaaaaatacatctatgtccattcctggtgatttatctctaagaataagaatgatcaacatgaaattattatctttcatacataaccaaggtggaagattatagttcgccaaaactacaggccacatactgtaagcttggctcatgttgccaaatggattaaagccatcggcagctaaatcgagacgaacatttcgaggttcactagcaaaatcaagatgtttggcatcaaagtccttccacgctgcaccatccacagggtgtcgcatcacaccgtcatcttttgatttaccagtgtggtgccataccatgtatttcgccatatgccttgaagtatacagtctcttcagttgcggaattaacggaaagtaacgcagcacc

SEQ ID NO: 355585 - DNA, 297 bp, Cannabis indica
ggggtttgaaaattcaaaaaattggatttttgggaaaagtcccatgaaaatcgggttgttggggtgagctggcagcaaggctgcacgagcagccccaggaggctgcacgagaggccttacgagcgcgtaggagggactttgcagggtcccatgtgctgctcatctcggcgcctgcagcattttcgtgggcggacagtagggtcctgggcgagacgcacgggttcagacaatgcttgtttgaggctcacgcgcgcgcacgacttccttgtctgaagcctgatgcgtgcgattgagcac

SEQ ID NO: 355586 - DNA, 1137 bp, Cannabis indica
atgtatattattgaaaagttcccaaaaaattaactatatatatcaagtatatgtaccataaaaaaattaaatatttgtaaaaacaagaaagttgtacatatgaaaaaactatatttaaattatttcttttattagggaataatttgtctaaaattaaataataggggatcgaaaaataagaaaatattacgttggaatttcttttctttactttttggggaaaaaaaaaaaccttttcccttttcctacatggaaatggaatgcaatctgtatggataaactaaaagtatttttcaatcatccaataagaaaaaggaattaaaaaaggaagaagaaatgagtcggccaatcatataatatgatagattttgaattttgatgattagataatgattttgatatacgaggtcccctaccaatgagagatcggacaaagggagctccacgtgaagcagatactgacacctgacaattcagtgtgtctgctgccacgcgtcgtgatgggatgcgcttatatgatccccatttccaatatctttctcttttacaatggaattacaaagaaataaataaattaagcactactctttcttcttctacaaacttaaatctatatatttatataatatgtttttgttagagtagatgaggtgccatatcatattgtatgagttttcttctattttctttgttctcttatttttttcttaattattaagtttttattaatttgttaataacttaataatgttttatcatttaataataatatttttatttaattttttcattctcttaactcccattctacttattatatattagtaggggtgtgcataaatcgatctaatccaatgagaaccgaccgatccaattacaaccgactgccaaacattagatatccaattgtaatcggatcggattggatgttatttttaaatatccaattcgattggattagatggtggatggggtgtctaaaaatccaatacatccaacatccaatcgaactaattagtatttttatttagttttggatgagtaattagattttatattgttatacgtcaaatttatatgtatatatgaaaattaacattaaagttttacttttttttcttggattggatggattca

SEQ ID NO: 355587 - DNA, 682 bp, Cannabis indica
gtcattacaagacttgtacaattgtattgaataatttttttttcttttatgatatttataatgtacttatttatgtttaggtattttccaaaataaataaactttacttacttaaaaaaatcttctttccattaataaaaataaaaaataaacattctctttttctaattatatttagacgatgttggcattattaaatattttaacatgccttcatcttggctggcactttttaagtatagcccaactaagaaaactgcaggtttgtgggcttagcttatttaaagacagtgttccataactattgtaattttcttagaaaaactagtaacttgtaggaccaaaaaatatgggccaaaatgttgagaaaacatgaaagtgacaattatgagcttcattgattaataagtttgtactgttttaccaaagttatagattgaacattctgttttgttaaagtgattatttcacaaatatatagaaacaacaaaaaaaaaaattacaaaaatacggtttcacggaattttaaatatttttacgatttttttattttatttacagaaaatacagtctttttatgttgtactcatgttaatttgttgttgattttttattatctgtatgttattttttgttattgttttgatgttatttagatgttattttcatgttacttctatgt

SEQ ID NO: 355588 - DNA, 921 bp, Cannabis indica
tgtcttttcaggtgtgttctgacaggttggcgcggtatagtcacaactgggtatttcagggcgaatcgggttcaggcccaaaataaaatttgagttgaattattttcattttaattgttgatgaataatctaaaaattaattgggtttattatatgtgagatgtcatttttgcccttgtgagtgaatatgtgtgtgattttagcctaggggtaaaaaagtcttttgacctttatttgttaattgataaaagatgaaattttgagtaaatcaaatggaaaattttggttttgcttcctctagcccgtaccctctctccctcaaaccctcttctttttccaaatttgattctatgattttaatctttgatttattgctgaaaaattaattgttggaaaatatgaaaaagtgatgtggcttgtgattatgagcttgtgatgcatgtttaagtgtgttgggttgttttgagctttaatttcttgaatttatttgggttaagtttggtaagaatttaaaggaatttatttgtgtttttgttctgttattgaacgctaaaatttgtgtttgatgtgtgagttcttgagtttgagttttatggaattaagctcaagttggagctttgattttcatgaattagtaatatgaaattatgggatttattgttggaaattgatgcataaaataggttattttgaccctctaatatttgttagcaaccctatttgatgatttgagagttttgttgtgaattggggtgatttgattgtgttttggagctgattttcgtgttcttgctgctggttttccgggttttgaacccaggtgccgcagcatggtatttagcatgccgcggcgcacccttttctttctgggcagatccttatgcaaacttcaaatagccataactttgtgatctggactcc

SEQ ID NO: 355589 - DNA, 679 bp, Cannabis indica
aaggtctaaaaattctcactttttcataacttcgaatctcaaccaaatcagagagtaaaaacaaaattccatgcttaaattcaccacaaaatatgtatcccaaaaattagattaacaacactcaagtcaagctcaacacttgagcaaaattcaacctaaaagtcaagtccataaccatgaacatcgaaaccccaaatacctcatgcttgaacacaacaaaaatcagaacttaaggttagatttcaaacacaatataacctgagaaatcacatttgaaattactagtaaacatactcctcaactcaacaacacaatcaaactaaaacattaaaattaacaccaaaatcaccttcaatttcactatcatgcatccgtaattaaaaaggacatcaagaacaccttaattcattacatgacatcagaaattaataaatcaaaaggctaaagatcattaccacaagttcctcaagttttccccgagcaagaacatccacaaagctacaccaaatcaagccattttcttccacaattgaaatttgaaaataccaattcaagagagaaagagggagagtcggtcatgggggttcaaatccagaaatagctttctcaattaaataaaaatcatattttttttccttttattaaaaatggattagatggtcaaatgaccaaattgccc

SEQ ID NO: 355590 - DNA, 880 bp, Cannabis indica
aattaaattaatttcatcattttacccttcccgggtcataattactataatgcccctggctcaccaacggggtcttaacacataattaatcaaataaattctcatatattgaactatataataatataattcctcaattattcataattatctaattaggattttgctaatccatttcttcattctagggtattacagatacaatttacaacatattaaatacacgtttacattgacccggttaaagcggaccaatcacatctgtgtgatttcaaataataatcgtatttattttacgtgggatgtaatcgaatcccacaatttcaggagattattgttgtaagatatcaatccaatttgtaattaactgccctcctatgtaattataaataggggcagattatactaaaaaagggacgaaaaattcattagagaaaagtcctaagaattgtatcagaaatctaataagattgactcgtggactgtgcagaattataactgcaaaaccacgtaaaaacctctatgttcttatttccttttttttttactgcttctatttttggtgcaaatccatctcgatgtaggcttaaatatagttaacaaaaatctgcgttaatagtttggtgctttcattgagagccttcgtagaaaaaaaaaaaaagctcagaaaaaaccctcctgatatatatataaacagctttctccatggctggcaacagagaaaacgttgcactcctcataaagaaaccactcatcgtcttggaaaagagccaatgggctcctggaggcctcccaactcacaatctaaatggaccactccttccaagacggaccaacctgagggtggcccaagtatatggaccactcgttctaggaggac

SEQ ID NO: 355591 - DNA, 787 bp, Cannabis indica
ttttcttagaacttagaacttaaatagaattaataattaagttaattttatttaagatacttgattatttgtttctatttcatgaaatttcattaaattagaaaatataattgttgacctcgcttttagctaacgacaacgagtctatttttataagcgataagtgatttatagcaataaatatatgataaagcaatgtaaagacacaggaattttatagagattcagccccgagcagttcggtaataacctaatcctagttatttgtattaacttaagatcaaggagaaagattccttttcttatagttcttacaacagtatctctgaatgtataattattagataatatatttagggtatagtcttggcttaacttcttttcccaccccttgcccagtgaacatgcttcactatttatagggctagtaagcttggagaggaagagtttcccctctcgttacattgcgtataaacagaaagatcgtgggatcaatgctgaatacaaggatcgtgagattgaggttgaatacactgatagtgggatcatgtgtatgccatatccacgtaaattgatccctgagttatagggattgtgctgatgactcacgatgcgaaagctgaattcgctaagtgttggtcgctctgcgcggattgctcgatactttgctctgggcatgccagggagatatcctgctcggactatgcttcccgagcagatgttccaagtggattccacgtgtcaccattcatgcgatgccacgtcagagtgcaaaatttgggataac

SEQ ID NO: 355592 - DNA, 701 bp, Cannabis indica
tcaagaatgtcatatatttcaggtatgtctagtgtctaaaaaagtgctaggtctttgtatcatcttcaactggcctctaaacattagtggtagatgggacctcagtgttgggagtggattaatcggctgttgaactggtgttcccagtcttttgcacgcctagtgtgatcccagcaagaggggaagtcactccatggcccacagtaggtggttgtgtattgacttacttggggtttgtccctggtggtcctctcatgtttccatgagtttgcacgttgggatctgtcaccatctggtcaccctgatcagcaaggcctctacgagtttgtacaaccatcttgtttgcctgtcaagacttaagacaaaaaacttgtgttttgctctcaatgaaagcaccaaaatattgacctcacatttagccaaagacagtgagtcaaataataagtgattgaataatataattaaatgagaacaaaaaacaataaagtaaaatcaacaccagattttaaagaggttcagccccgtgagtgtggtaatagcctactccccttgtattatattaacttaagtgaaggaacaaagtgttcttcccctttgaaagctcttacatgcgatctctgagtaactctcttagatcgctattttctctataaaatttctatctgaagcaattctttcgatccccttcatagtgaggctag

SEQ ID NO: 355593 - DNA, 782 bp, Cannabis indica
ttgttgtgctattttgagtgacggtggctttataatgagcagatgagatttcagttagcattgttaaaattcatgacttctggtaggctgacagtggtagcttcttaggaatacttgtacacattaattttgattttgctctgtttttgactccatatctaagattttttcttggtagtgagaatgttccttcaagtgttagttattcttaattttgtaatatttgaactggaacaaatgcaacatatattataaccttattattattgtttccaatatgtttttactaacatttgtagtttaatttaaactccattatactggacataaaagttaaatttaaatttattattcaaatctctctaaattaaatattatttatttttgattcatttatttccttccgaactcataatataatacttaatataaaacatagcatacgtgcatcgcacgtaacaatatactagtatataattaatcgggtatttattatttggtgttctcttatctctactttttcttacttcactttttttaaaacaacaaattcagatgtaatcattttgccaacccaacacatttttaagatatgaaattatgctaaatcataaatgatatacttttttttttaataattagaaattttgtcatttaactatttaatttgttccctaaaatatataatttgttaaaaagtatctcataaaatataaaaattacataattatgtctattttgttaggttctatttcttttattgttaaaaattagtattttta

SEQ ID NO: 355594 - DNA, 661 bp, Cannabis indica
tgttctatgttatatacaaatagatcttgggttaaatgttaatttatttaacattcacattattagattattactttgtttatttttatcatgttggattcacatcgactaaaaaaaagaattatcacatactttatttataaaaatttataagggtggacaatatttatactttttatgtatttttaattactaaaatacttcttatactatcacttacacacacaattactatcacttattgtatataccacctattaattttttttttgtaggaattcgaaacagtccttattttgattgattccggtcgtcttctcaagtgaagtcgccggaatcaatggtgattctctttctagttgaatgtcgtttcagttgtgttgggttggtgggtggttgatcgaaagttgcatcagacgaaggtttcaatcccagaaagcatggttcgtgggttgaaggtgtgtgtaagaggtatttgtttaattttttttatttgggctgtatatttgtttatttggccagctggaagattttttgtaatattgactccgatttcgctcccccgtggctaacaatggtcgtcgtccagtgaagaagtagtcgaaggtatctttgcctgaaaaaaaatttcaacttcaatggccagaagggaaagaagaag

SEQ ID NO: 355595 - DNA, 694 bp, Cannabis indica
gatgtgatttctgcacttaagccatggacatagagatgaagaatgataaactagggagtactagtggagaggctcacctaggtaaaggcaaaaacaatcataagaagccttgacaaaacagaggcatgagtcaaagccaaggcattgcaagaatcatagaaatgggcacagaggaagaccaaactctaaacggccaagtgacaacaatggttgttattattgtgggaaaccaatgcatttcaagaaggattgctaattctggaataggttaaagaataattagaaggatcagatcaagactcacaacagggagaaagtcccttctcaaagaccaagaacaatcaggcttcaaccaatctaagtgatggctatgacaatgaagaagtttatgttgttgctttaaaatttaaagatgattggatactagactgaggttctacatttcatatgactaataacaaaagtttgcttactgattacaggaaaacaaatgagggacatgttatcttaggaaataatatcaaacatggaagatagaaggatagggaacaattagcttccagatgttgatggagtcattagatccttaacaagggtaagatttgttcccaaactatctagaaatttgatttctattattgttctagatgacttgggtattataagtaaaattgaggtaggaacaatgaagatc

SEQ ID NO: 355596 - DNA, 439 bp, Cannabis indica
aattgaaaatatttcaaattggaaatatttcaaattggaaaaatcgaattttgggaaacaatcccataaaaattggatttttggggaaaaaaccacagaaatcgcaattttgggttctggctacccaggaggctgcatgtgcagcccaggaaggctgcacgcagcctcgggtcgcgcgcggagcaaggaggttgcaggtgttgatttttacgccctaaataaaactctttacaatctgattagtaatcaatataaaaaatttgaggtgatttatgtttgcatgaattttacatgctaatggtttaatatgtttattacatttacacacaaaatcaattaaatccagatcatatgtttattcacaattacagtatcgtcaacacagtggaatgtgattgtgatcatatgaatcaaaagactaagtccctgtttcatcagt

SEQ ID NO: 355597 - DNA, 844 bp, Cannabis indica
aaaaaagataacgaaaaaaaaagatagttttcaagtagagttgcaatttttttttaaagatgtgttatcttttcttttagtgagatatttcctaatactataaatagaatcctaattctaatgggattcttctatcttttcaagtactataaatagaatcctaattctaaggggattcatctatcttttcaagcactataaatagaatcttaattctaaggggattcatctatctttttaagcactataaataggacctcttaagctacgaatttattgattcaaaagctacaaattagatagagcaaggaagagacggagatcggcttcgagtgttcttcattctagttcttttcttctccttctactcttattatatactatgatttttattataatgtctaattcagggtagttttcttagttaagggttattcaaagcccgagacatgaattcttagtttcattattgaatgttaatttctagtttccattatatcaaattatttttatttttctatgtcaatgctatgattattgttttaatcttatttagatgactactaaattaggttttactttaatctaccgtcatcttaggactactattcacttaatagtctaaaattctaagtgtttgtgataaattacaatttttatttatgatgaagaatagaacctaggttaaataaattatatgcttcattgattttgttgcctagattagtctatctccataaaactcaatgctttatctaagttaaataaattgcatgcttcatggatttactatttaggtaaaagagttaattattgattacatataatagggagattgggataa

SEQ ID NO: 355598 - DNA, 669 bp, Cannabis indica
gataatctctggaacgactaccaattctgcatcctaatactaatctttctagctatactttgtcttcactcgtacgctttctgagatgactcccttaaagatttcccatcttgagattactccaagttaagtatgcttaactccaaggtaagctcatgatgggttatcagaaagtagatgcttctttgttgttccttattgtatttcatactttcattccttcgttaattaaatctaattttcgtcactcccttcattagcatcttacaattcctcatcgcttttgatcacttaaacttaaggaattttcattttattgtcaacaagaatctcgttcatctctacttattttaactcgtatcaattttccttaaactgacacaacttttaaatttcctaatcatttatggttaaccactgttataaagtaaattaattaaacctatacataaggcaacactgctcataccaggtacccacaactatactggaaatacctatttctctaattctcaactaatacaattaatcaaagatcattccttgatcctaaattttcttttttgtgtttggtagaaatcttgataatcttttcaaacacatctagaaacatacatacatcaagtatattctttgttttattgataaccccttggtatgaattaccat

SEQ ID NO: 355599 - DNA, 598 bp, Cannabis indica
atcgggtcccagtctgggtcccgagtccccggtccggatccgagtttgggtcttaggtttgagtttgggtcccggtcccgatctgggtccaagtcctaagtcagggtccgagtctcggtcccggtcccaggtctcggtcccggtcctagtctcgggtctcgggttcggtcctggtttagggtctggggtccgatcactggtctcgatccaggtttgggtccgggtcccagtcctggtcccgggtcctgggtcctagtccgggtctgggttcgggtttgggtctcgggtcctgagtcccgagtcccaagtccgagtttgggtcccggtctaagtttgggtcccgggtcggagtccggatctcagtctgggtctgggtcccaggtcccaagtctgagttcgggttcgagtccgggtctgggtttgggtcccggtctgggtccgggtccgggtctgggtcaaggtacgggtccgggtgtcgagttagggtttgggtcccgttcccgctcctaggtcccaggtctgggttccggtccgggtctcgggtctgggtccgagtccaggtcccaagggatccgagtctggggtcgtaagtcttgaa

SEQ ID NO: 355600 - DNA, 657 bp, Cannabis indica
aaggtaatttatagtcttcttagatatataaatctcaattacatgcaatttttttactctcgtgataaattaaatatacatcaggcattaaacacataaatcctataagctatctaaaccatacaggactctcatcctatatcgaaattcaattatatctcactatagcataattgacactcacttctcagatctcgcatcaaaatcatagacagttaattggtgatcaggcaattaaaagtgattaagtacgaatgaaatagaatgcatagaaattgagggaaaataaatcatattaaaatcataaaataatgtcaaacaatattcatctagaccctaattaagtgtttagctactcatatttattgtagcaaattcacacatattaatttaagaaagagaagagaatagagaagaaaagaatgctgaaaaccccgttgaaaaagccttcgcgattgatttttttctctaattttcttcctccttgattgcttgttaattgctattgaacttcacttcttatatagccaaaaaaaaaatggtaaaaaaagattaaaaaaaaaacgctaaaaaaatctattttgcttaggattagaagggcgggccgcggcccatgatttccatacgttgactaattgtattttggccataactctc

SEQ ID NO: 355601 - DNA, 725 bp, Cannabis indica
tgaatcatactagcaaccattgattaaagattcctaaactttaatacgttactgattattttattcatggctaagtgatcttactccatacaactacaagtcacaacctcatgtatgaataagaaattttttgatatttatatataaatattcaatattaaattttaatgatttaacaataaaaatgttcaattataatttataatcagaaatgtctttacatgttttttagagcataaaccctaataatctcccactttcccaaaaagcaaatttggcatctcccttaatttcatattagtaatatgaccatatagatttcactggtagcatctttgtgaattgatcttccaagttatgttctgatgcaatcttcaagactgtcacatgacctttctatactatatttcttagtagatggtacttgttttcaatatgctttcctctcttatggcttctcggttccttggagttagctactcctccattgttatcacggtagagtactggtggtttatctacttctaaaactacttcaagatcagtgtagagtttcttgaaccaaaatgcttcattaggtgcttcgcaagctactatatattcgacctccatggttgaatctgcaatacatgtttgcttattgcttctctagactatatatccacaacaaagagtgaatgctgacccagatatcgatttttcgactatctttgtctaattgaaaa

SEQ ID NO: 355602 - DNA, 793 bp, Cannabis indica
ccggtacacttcccctaacttgacaactttaaacttgacaacattaaacctttttttttcatctatatttgtataatatcaaaaaaattgttagaatcttatttcctgacgaaaaatatattactgtaatcctaaaaaattatgatgtgccacatgattttgaattatttttcattattaaaagaaataataattaactaaaatacataaaaataatgacacataattattaatatgaataataattattttaataataactgttgtcatatgattaaaagaaataatcatacaaattaagaaatcaatgaagagagaaaaactagtgtatagtgtgtttattaattttggcccacatgtttatttggacataaaataaaaaataataaagttcattccattccaactataattacatcaaaccaaaccaacttttaccttttcatggatatcacaataaaatattattttaatttgattggacttcttgtgattgacaatacttgttgtatataagtatagtgcaccaaagactttgaaagaaattacttaaaggcagcaagaaatatgctccccaagtttaatatactttcaaacagtttcaaaaaaattcagtttcccccctaaattcattttcacaaggctatatttatacagaaaacccactttccttcttccaaaaatactactacacactatctccaccattaggacgagggaaacactcctttggaagcctcacaaaaatcaaacctttaaaaaaaaaacacatggtggctggtggtggagagga

SEQ ID NO: 355603 - DNA, 1194 bp, Cannabis indica
attgtgtcttatgtaattattccttattataactcactaaacatgaatttattcttttaaaacagtttcaggccctaaaaacaattttagtttcattaatttgggggaatatatttattaaaaataaaaataaaacttgtctattttaataatttcactaaataataaaaatatattttaactttttctgaaaaaataaaataaaattgaggtgtactcatacagtcatacctattttttagtcttaggtattttgagtgtaaaaataactcccatttctctatattcttttaaaaaaaaatacatatcctttttttttttgcttgaacaaaaaaaaaaaaatacatatcttatttttgtgaacctataccttattttttattgtaaacctatacctttaaacgacttttcaaaaaaaaaaaaggaaacgaaagttttccgttaaaaatattggaattataagattttcatatcaataaaaaggaaagtttccaaacttgatacacaagaaacttttgcttacatatttccctttttttgtttacttaatagtgtttgaatcatttgtttcacagcaaaattaaacgagaaaattgttcaacaatggcttcttctgattcttatagtcatattacccaggttgagacacagtttcctctaactgctcaccatattttcaatattattattgaacaaactcctcccaacaccaagttggtaagcataccttattactactctactctactctctgtgcatcaactttaattgattctttttcgatgatttattatgtatgcacaccagatattacagcttgatagccttgattttgtggtaaattcgtctaaatttattatgtatacatatatttatgtatagccctgatttgtgattttgtggaaaaaagaaattttaccctaagtttgtctaatttgtttactttggaaatattgtcaatgtgctaaaattagaggatggcatgttaaagtaagtctcttatgatatgttgaattttcgattcctctaaatatatccctaatcataatctctgcaacttgaaaaaagtgcttctttgatttatataggttgcagtcatgtgtagttatgttttctggtagcttaactttagtggtaatttatcttccattaacatttttttatggtgttctcttgtgcagcaaatttcaaagg

SEQ ID NO: 355604 - DNA, 638 bp, Cannabis indica
attttttatgaatatcgaaaaatatcataaaaatatcttcgtacttttaatctttatcaaatgaattccaatttccaatatgcctaagtaattgacgtattcacgtccgtttttagcaattgttggaaattgggaaaagaaaccgcttcaactaactaaagtttttgttaatttctatctaattgcctgcctattttagtttttttcttaattttgtctttttgttattatattttttaaaaaacttacttgccaacaagttgtaagtacaatgcttattttgccttcttcctaatttttgtcttttttgagatttttttttttcagtacaacaaattattagtaagaacgagactatttcttttatttgttttaaaaataatttgtatcaatcttacttttgacaataaggttttacacaatatattttacaaaaaatttcctttaattttgtctttctgtatttttttcaattatttaattatttgctaacaaattattaagtactagagattatttattttagggattttttatttttactctttcaaaataatttttttttagcatttttacaaaattctacctaaaaaactttattgcaacttgtcgatgcaacctaaaattgcaacaaaaaa

SEQ ID NO: 355605 - DNA, 640 bp, Cannabis indica
gaccagagtacctctgggagtaagtcaggccaattgccttttgcctcttctagatgctttttcatagtatccttgagggtcttatttacagcttccactatagtgatagagtacatgcccacacatagcaagttggtactcaatcatagtgtgtaataatgtgaagaatccattcaactgaaggagaatcgggctcagatcttggtgatactctgctatagaaaggatacaagggttaaagatctgattggaaggattcaattaattctgctgcaactaatgtaaggtttcttgaaatttatatgtgtttaaattccattgttttagaaattcatatttaggatgttaaacaacatacatagtagtaaatctagatcctaataaaataatccccaataatactagccaagttcaatgacccacttaagtagttgaccggacactttcagtttctataacacctgtcgcaacggctagtcagtgtatacccaaagtatggtcttacctttcttgaagctaagaacagacagtatgtcagcttctctgtgacagtcagtagtttcgtgatctagaagggaaatactaggtaagttctgcaatcccacatcccctagggaaggtcaaatgtgatgattctgag

SEQ ID NO: 355606 - DNA, 504 bp, Cannabis indica
aatgtgtctttctcggcttattcaatagtcttcttttcctagacctaacttttttggatacactactcaaacaaacaccagaagactcagcaggaaaacaataagctatagtgacctcttctggtctcaaagaatttagtgatgaatgagcaaaaagagaagccgttgttgctttatctggagatgaaatatacacctctttaattactttataagatttctatgaaatgcagaaatatcaataataaaccacataaattcacacacagtaacccacagaccccacaaacccatccccgaatagattccaaaaattattctctaaccatgtgcaatttgaccatacaaacagagaaattaccaaaatcaacctcaactacttcctataaagcttaaaattactctacacaaatacccacatatgagaccacttttcatatttagttgaaatgtaccaaaaaaaaaaaaaccaaacttaccataaaatggaggtttggttctctg

SEQ ID NO: 355607 - DNA, 666 bp, Cannabis indica
tgtgggccaacataattttgcgttacaaaatagttaaaagcttagttcaagtctgatatatgcgagtaaatcaagtttaaagttttgattttcttaatggtgtaggatcttattgtcaagtcactttcatagttggacacatatgctttgcttgatcttttgcctaaaatctcattgtgggcgaagagcgctgactatgatagagtaagtatcattgttaaatcttattacaataattttcatttgtatttaccttgaatttcaatgaacaatcatctacattcaaccttctaagataataagatgagtaataaagtaattatgtgtcttgcttttgatttttttgcttgagttcatttaatttacaggctctgccttggtattataagaacataaccaatattgaagagtacaatgagaaggacatgattgaattgattgagtttaacactattagtattagtataggagatcttcctcctttactatacggtaagtgtactaacaatatgtgtttttatgttatcaaaggtctctattaattttattgcttcaggtttgaagtgttgaaagtaaaatacacattttgacacaagcattacactattttcattacatgttaagaatttttgctaagaaaatctccatttttcttttagctgtatt

SEQ ID NO: 355608 - DNA, 491 bp, Cannabis indica
aaagggtccaattgataacttttgcaaaacacaaaatccaaaatagtactcttatattactcaatatatataccccattttaaaattataagatttattgtatttattattaatgtaaccatttatttaacttataaaaaaataaattgtcattttaactttcactaactcaaaaaagaagagaaaaaaaattgaaagtgtgaagttgtaattacaaatttcatggagaaaaataatatagtagtatgaaaagataaatcaaattgtcaaaactaagtaaaaaaaaaattgttttataaatacatgctgaggagttgatatttttttacttattgtaacgagatcaatgacttgttgtttttttttattattttgtagcttttttttttatatatatatagttattttcatgttgtgctaaattgttttacaattttttttatttattttagtgaaacatgattttatttttatttttttttacttttgta

SEQ ID NO: 355609 - DNA, 609 bp, Cannabis indica
aagaaaaaaaaaaaaaaacaatccaaaaaatatataccctatctctgtcaactcactatttgccttccctattcatcatcgattttaaaaaatttaggaaacaaatttatataaacaaaccaaatctcaaatccaaacaaatccataaatatctaaaatccagaaattacaaacaagccaataaattttaaattcaaacttgttgcattcaaaccaattctttacaactgcacagtctatactcagatttatacacaaataaatagtaacatttcatcatatgttcatcattattcaatattctatttatagaagaaaaaatggccaaaaaaatcaagcaaatttacctctataatcttctcttctatttagccaaactcatatccagatctggcctcttctgtgatagatctcgtcttctcgcaagaggagcttggggatggagattccaccattgaatccggcaaggagacaagaaagggagaagttgagcagagggaactcgagttgcggggtgaggatttttgaaccatccaaacggccttcatggtgacggtggatcaaggaataactttgtggtccaccattgaaaccgacgagagagagaga

SEQ ID NO: 355610 - DNA, 627 bp, Cannabis indica
tgaaatttacatttcaaatttctcaattcaatatctgatcaaatcacttagaatatcaattcaagatcaaaataatatataaatcttgactagaaagagataactctaaaaaatatttgattttatcattcaaaacttactatatttgtcttactttcccaaagtaaaaaaattagataacaaatattctttaaatgaataaatcaaataaaatatataatcaaaagtaatgtacaactcaaccgagatatatatataaataaataataaaaaattaagtcaattagatatactaaaaatagaattaataaatatactaatgttaatatattctctaataatattcataataacatgagcgaaacacattataaattgcaagactttttactaccaagaagttcttcatctacttaaaaggaagaaatgacaaatatagtggcaaaaaccaaatcaaatataatgttaactggctgcttgataatgataatgaaacaaatacctcaagtactatgatgctacttaccacaagcatttaaaaagtagtatcaactaatattttaaatagggtaaatactattttggaatttgtgttttgtaaaagttattaattggactctctgtttt

SEQ ID NO: 355611 - DNA, 566 bp, Cannabis indica
aaaacttaataataataatctgatatagagatgttatgataaaattagttacattttttgtctctattcacattagaaattattttaaagttggttatattaaaaaataacattattaaaaattgagctcagagttttatttttaccattttagaaaatataaggttcattttatcatttaacaaaataaaaaatctaattacaagcttttgcaaaataccgaatctaaaatagtatttacctatttttattttttaaaaaaacaaccctttgcatctctttaaaattgacataattgggctttcttaattgtgtcagtactaaagtgattgtgacgtaaaactaacacaattgttaaaacatcagcatcactttacaacttatgtaaatgactaatatttctcaattgcattgattttgggctttgatagatgtaaaaaaaaagttcaggggtagtggaaacataatgtaaaaatatagagaaaaaaaaaaaaaggaaatttacaaaaatactggaatttagattaacttttacaaaaatactgtcacacggaatttttttcaaa

SEQ ID NO: 355612 - DNA, 728 bp, Cannabis indica
gatttttgagcacactgttacatataattcttttgataatacagtgacatgtagctgtaagaaatttgattttgcaggaattttatgcgcacatattttgaaagtatattcgtctaggaatgtcaaaaaaattccttgtgaatatattttaaagaggtggacaatgcattcaaaaactggattttccacaactatgaattgcaagagtgtgtctactgaggatgcaaaagcaaacatggcaaaacgttacaaagaaatttgtagaatgcaaactcaacttgcaacaaaagccgccgaagatgaaaaagcatacaatattgttgtttccgcgtttactaagatttttatagatttggatgcaagtgatgtagctcaggggaaagagatatcgacttctactaccatacataatgacattgaaaacaaaacaagtaacgaaacgggtgataaaattaaagggttcaagactaaaaggaaagctcatgtgggatctagaagactaaaaagattgtccatgaagattctccatcataaaaggtaatatttacttagttttatatattgtaatttctaactgtttcatagtctttctcctatataagttataagtgtgcatgcttttatcattatgttgcaggattttcataaagaaaaagcaaatgatcaaagccatagcagaattggaataccttttttgtctactaataattcttttcaagataatatgc

SEQ ID NO: 355613 - DNA, 509 bp, Cannabis indica
gtggtttttgctttaaagatatggcgacattatctttatggtgagaaatgcaaaatttatactgatcataaaagtctcaagtacttttttacccagaaagacttaaacatgaggcagagaaggtggctagaacaggttaaagactacgactgtgagattttgtatcatcccgggaaagccaatgctgtggctaatgcacttagaagaggtgtcatgcaagtttccaccacggtttggataacccctcaactagcttctgagatggttagtgcagggattgagtttgtagttggaaagttacacaacttgacactcagtctgagttgctagaaagaatgaaaaaggcacaattagaagtcccgagctagttaagattcgagatgaggtgatgactggtcggcctaaagacttttgaatctcctataatggaatgttattgtataaagctcgagtgtgtgttcctagtattgatgagcttaagaaagagatccttgatgaagctcacacca

SEQ ID NO: 355614 - DNA, 1421 bp, Cannabis indica
tgccccttgggtcactgggaaacccagccgttttttgaggtacatcgctagctggatatgcgtgacacattcgcaggttgtgattggttaggttcctcgaaacggtgggtgtttcccagtcacttcagggtcatgctcgaaaacgcatgtcgcttaggttactgggatacacccagccattttttgagatatccttctattcgcacacctgcgatttcgtgtcttggtgggctgattggttttcgcaagaattcgaatcagccttctaagacgattttacattttatatgcgggtgaggtcacttactttgttttcgcacattcaccacgctgaaaagatcttctatctttcagatgagcgatctatcggatagccaaatgcttggctcaggaggcaacgcgttcgatggcgatcaggaagatagcttcatcccgacctcgatctcagaagaggaggtccctactgccggagacacagagctgggtccgttgtcctctgcagacatcgagaggatggtgcaggagctcgctgaaccaggaactatcgagattcgagacagcgagtctacggtgtcagtccgtgatcatcttattcactccaggcatgctcctgacgtcgaagtcgaggagatgggtgaagattgggaggttcctgatcgtggatctgacgaagatggagatgccgaagggagcgagtccgattcggttgacaacacgcaattaaatgagccattctcctgcgaagacttagtctcgcgggtcaccaaatctgacctgaccactttttcgaggttaaatttactacgtctcagaaccatgcgtcctcatccttctcaaagaccacaccttccttttaccaaccctgcgatcataccctcagaagacgtcgtagtctctatccccattctccgatgcggagtgtcagtccccttccatccattcatctccgctattctcaagcagtatgatgtgtcacctttccaattaacccctaatagctatcgcatagacttaggcttttacgcgatgtatatggagtatgtgcacagggcaccctcgacggaagagtttagctatttctatgacataaagaatgtaggtctccacaacgacttctattgtttcagcaagtgggccacttctgagatcaacggggtggaaggcctggtttccaatatgagggattggaaatccaaatagctttatgtgtttaaggttccagggattaggactgactttaatcgttggcctagtacgtcgcgtgtgtctttactttgtcaatttttcaagttatcttgtgactataagctaactcattttttattgtcgcagatagactggctcgacccactcttgacgagactcgcagagaaactgctgaagttcttagaaccctccctgtgcaagatcgtgactggcga

SEQ ID NO: 355615 - DNA, 613 bp, Cannabis indica
tactaaaataaactaaaaaaaatgcttgagaaaagctaattaatgcacaaaaagagctaaataactctattttcatagagtgatcattgacttagaaagatataactgtaagtttataatatcttatccaagatcaatatcggtcccttccaatgtatactaaatacatccgatattggtaaactttgccaatacccaagaaaggacataacacttatccaaggtgtaaatataccttatcgctgattatcatactaatctaaatccagtgaattgacaaatcctcagaattaaacttttgaacatataatcatgattatattccactgtgctgacaacactataatcatgaacaaatatatatgttctggacttaatagaatttatacattaaacataatcatgaaataaatcatgtgaactctgcaacagtattgaatacaacctgacatatcctattacggagagaatactacatactacacttgatctggatatcaaggtgttgagattgggcgggttgaaataggtccaacccgcccaacttaaccgaccaacccgattttggactttattttttttaactttttagtttttatttatatatacataa

SEQ ID NO: 355616 - DNA, 286 bp, Cannabis indica
taaagccacgtggctttagtgacacgcaaaaagtgtcgggatccctctttggtcacacgcgtggcaggtcactatactattttattttaaaaagtaaaataaaatatatatcagccctaaagtcttcccccacaaatcgtctccataccccagtactctctctctctctctcgcacgatatcctcaaccagacccaaaaattttccccaactgaggccggcgcagtagacggagaccggagaccggtgcgaggtcctccctctcaagcggagaccggtgctcctcc

SEQ ID NO: 355617 - DNA, 680 bp, Cannabis indica
tttttttaaatatttattaatttgagttataatttctctaagcgctgaaaatagaattgtttatttatactgatatatccaaagtgatataagcgttgaagatataattaattgtataattataaactattataataattaaaatagtattttatctgttttcattttttttaaataacttatgattaaaatagttaattgcatgaatataaaatacaaacaggcatgtaagtaatttttgatataataaattattaatttgagttataatttctctaagcgctgaaaatagaattgtttatactgatataaaccaaagtggtgtctaatccatagtgtagaatctttttaaaattattatcgtataatatattgcagaaactttgtagtagggtaagccaattggtttcaccaatagacgtgtttgttttataaggattaatactattttggaccttgagttttacaaaagttattgattagactatctattttctaaaatgataaattagaccttgtatttttgaaaattatacaaaatagtaccctaagctcaattttcaataatttttttttaatataactagttttaagataatttctagcttgaaaagatataaaaaatgtactcagttttgtcataacaactctaaatcaagttattatgaatttttatttgg

SEQ ID NO: 355618 - DNA, 699 bp, Cannabis indica
gaatgcaactttttctgtgctgtataaaaatgcttaggaaaccctagggttagaaacttctgcgattcttctttatcacgtcttcatgtgggtctacagccatagagcttgtctctgaactgcattgtgtccgcctttcatcttgcttattctaagcttcatgaacatttttgccctaactcaagaaatttttttgacttcttgagttctgacttagccgttctctaatctgttgagtactcctggtcggcatatttgcttatttaacgtttgatattccgtccaacaatcatcttgtgtgttgtcttttgtagatgaactcaggtgagtcttgggaactcggacatcaaatcgaccaggatttgcttcaacttctggaagaagatcccctcgtcttcgttctagtcctccttctagcgaaggacattcttctgaccttgtacccagccataggatgatggctcgtacaaaggaaaccacgcgtctggctcacgctactgatccttaagtggctcagcttgccactctgcccagcgccgaacaggattcgaccgtcctgatggcggacgatcgtgagggggatggtaaagtccaagaggttgaggagctgaacgatgtgcgtccgggcagtccctccaaggcggagggggaggaagaggttgaacccccgaaattttggggagtacaatgaggatgggc

SEQ ID NO: 355619 - DNA, 509 bp, Cannabis indica
tgcctttactaatccaaattactaaagcggtcattacaatgagtctggattaaagggggatgatttctttgatgggttaagccagcttgaaatagatgatgatcaagttgtgttggctggcttagaggctattggtaaaatccatgtaagtgcatcttaatttgtttgcaagaaaattatgtttcattttggttgcctaatagttttctgtttgttttacaactatttaattccagtctttgttttttaggtttcccaacccaatacagatgttgttggtcaaaagtcagctgcccttcatactgatgaagaaactgaggacaatgtatctgatacacctctgttggataagaggaagcgtgctccggccttcaaatctccttttgttgatttcaggtcggctgatgtggggagcactccaatggagttaatgtcctcaggttctcaatcagctggggatgatagggattttaaaatggttacttatgtgaagggcctttatgctctta

SEQ ID NO: 355620 - DNA, 738 bp, Cannabis indica
ataatgaggggtttgtctctgcttttttttttttttttttgaaatggtgcatttttcattttagcaataggacaaaataaaacaatttaataatggtaggtagacattattggattggacaatattttgtctcgatgcttaaatgattgtcatgtattcttccaatcatagcatgccatgcatgcacttatatgttccctacccaggtagtgagatattatattatatggaaatttataatttttattttattttatttgtactgttggtgattattttttttttcactgtatttatttattttttttttaattttgggcaatatataaatactctcaccaataaagtaagtattaattatactatagtaaaatagacataaattttaatataagacaagagtacttgtatgatctatgtagctgttgcttctagttttgctcaaaatacgtggaccaaccggatgatgacacgtaaatgggaagtgtttagcatttaaattaaacaactaagtcttcttaaagcaaaggattaccttaggcaggcctctcggagaaggcatgtaagtctcatatgctcccggagagcaagatggcagcaaagcatctccggatggtgtcagatgccatccgaacggtcatctcgcattaaatgccgcatgggaggaggtgtattggaactaccacacgcaataaagtctgacgacacaacccccaatctgtacctactaggctatga

SEQ ID NO: 355621 - DNA, 781 bp, Cannabis indica
tggatgccctaatcacataatgagaccaagtaaattacatattcaaaactaatctggaaaacccgaacccacaactctaggtcctgttatactctctaaggattacactaactcaggaaacaaggaaacacccaactatgacattgaaatggacgagaattgagaaaatagaacattcggggaaccctgccaattgccgattttacaggtaaaatctgtaaaccggtttataacagtcctcccaaaaaataccacttcttgctcaaaactccaccaaatgcaactgtacctaaacagggtatatacaacatattacaacccataaatctcagaaaaacatactgaatcaaaacatgccattaaagatcaaagcttggcaaagctcaagcttgctcaaaacaatcccatacaccaaaaccagctactagaagctaaattcaagtcaaattaagcttagaattcgaattacaacataagctaaccctaacagccatatatctcaaaatcactacttgaaatcaaagtaaaatcttcaaaatacaaaaccataggttctagcgttaccttagctccaagtacacctgaattcctagctgaattccaaaaaaatgatcatgatgagcatagtttccttctgctttttgggttggctgagaaaagagagagagaaaggatgagttttcttgatttttctttgattttctctaattgaataaaggttaggaaattaattcctttgctgaaattaagttagtcatgtgtcacttcctagggcagccac

SEQ ID NO: 355622 - DNA, 551 bp, Cannabis indica
tatatagtatcatgaattcaatttttgataatttttctttaatataactaacttaaaataatttttagtacgaacagatacaaaaaattttgtcataataactctaaatcgaattattattaacttttatattaacaaaaaattagttcatagtactattttatatcattttaaaaaatataaaatcaaatttattattttacaaaaccaagaatctttatccataatttttacaaatacaatatttaaaataaaatttatcatagtactatatatagtgaattattttaaactataaggtttaattattaataatcttaaccttaaatgtcttgtcggtgcttggccaaaaattaataaattaattttaatatttaattttatttttactttcgtcgaaacatcccattaaagagttcttagctatattaattgaagcttatttggtttgacaaagagaaaaaaataataataaaaataaaaaaataaaaacaatttttagggaaaagttttagccacgtgaaatctccctcatatttcactttcaactc

SEQ ID NO: 355623 - DNA, 607 bp, Cannabis indica
aaaaggtatagtttttttagggttttaattattggtttataaatcaaattttttgattttctaagcatagaaaatcaaatttcccattcagagttatcgatgatgatgatggtaggaaaacaattttagaaaataaataaataaattggcatgaaagaaaatgtaggcttgtccaagacgtgtcactgttgtaaaaatttattcaaaatttccaataaatgcttttgaaaaactaacagtatttgtcttacctaaacaaaaccactttactcaaataattatgcccttatttggcttgtgtcctcatcattaccaaacaattaggtccttcactaaaaaggtgtgaccttatctcagtgtgaaatattacagtcaaacccctttgactttttttttccctcttttttactagatttcttttttataataataataaaaaaaattaccctatatattattttttttaattttttttctaaaattacgattttggtttctaaagtagttacagcgctaattgcaataggagtttctatacgatttttttattgtcgatttaagttgcagcgctatgagtttttatataaaattctgtaaaaatataaaa

SEQ ID NO: 355624 - DNA, 1345 bp, Cannabis indica
cggggttatggaatttgaccattttacccctagtcttgagaaatacctaagttacaacctaaaaggcattttagtctttttaattaggggattaggtggttgatttttatgttggacgctggccacttaaattattcagccaaggttaatgtgattaaccatatttctcatttttagaaaataaggaaaattaaaaggaaaaacaaaaagaatagaactctctttctttctctctttcggctgaggcaaaccagagagaatcaccctcaaaacttggtgtttttatggattaaagctagggattcaagtagctctgaggcaaggtaaaccctagaacctatggttatgtattttgaagcttttactttggtttgagtatgtgattttggaatttaggagctgttagggtttaattgttgtataacctaatttctaagttgattttaagttggttttaagctctgaatactacttttggtgtatgaagatagaattgctcaagcttgagctttgaaactcaagtttaggtctttaatggcatgtttgattttattgagtttttttgtgaaatactatttgggttatgttgtatatgcattgtttaggtggtctggaaagtatggatgcttttggatgagttttgagcaagttggagcttgtttgggaaaacctggtgcaaacgggctagccggtttgccaggcctgtaaaatcggctagctggttttggcaggattcccgaacaagccattttctcaattctcgtccattccagtgtcgtggttgggtatttccctatttcctgagttagtgttatccctagagagtataacagaacctagagtggtgggttcgggtttcccggattaggattttgatcatgtgatttacccgacttcattatgtgattagggcatccatctagcacgagattttccattcaaatcggctggcacacttgaatctggaaagaaggtaagaactgtgtataatgtgtaatatgaatatctgagtgtatatatgtgttaagtgtatatgcatgcttaaatgttagtggcactaccaacacttgtatcgttatggtacagagtgcattggtatagtgaatattgtttaagagtacattacagtgataccagcacaggtacggaaaagtacatggtgtctgtggtatatcactcagtggtactcgaggtacaaatcaaaccctaccaacactcgtacagcaaggtgcgaagtttatgtggtatagtggttgtaccctagtatggaacgttcttactcatttgttgcgccttgtaataagtgtatttgcacctagatacaagtcggtattatatgatatgt

SEQ ID NO: 355625 - DNA, 384 bp, Cannabis indica
gctgcacccaatataaggtttactaaactttatatgtgtttatttcattatattagaattcatatttggatgttaataaaacatacttggtagtaaatctagatcctggtaaaatatttccaacaccgctatcactacgtactgcactacccccttgcctttggataattgtccgattaggtcaattccccagaaggcaaaaggccacatttctggcttttatcacatttcttaacataggcctttgaatcttcaaacattgtcggctaaaaataaccttaccttagaattttcttagataaactctgccccgctgcatgatttccataaaatccatcgtgcacctcagatagaagtcgtgcagcttcttcttgagtaacccat

SEQ ID NO: 355626 - DNA, 625 bp, Cannabis indica
ttgagttttaactatcaaaatttaattacccacacttttagtataattacatcttatataattattggtattttaaataaattgcacacacacgtggcgttcctgttggacagggcgttacaaacacgttcttgattccagtctcgggacccagccggcaggctctacagagagttaagcttattctcaagctcttttatagccacatcaagctttccgaattgggttctgctccagttaaagagggccaccctagtggccccaacctttttgaagattcttgcaggtgcccaattatgactaactgaattccaagcattgttcactaccagattgcttctagcatcacgggtccacccttcctcaaatttgaagcttcttttatacttggtgacctgaccatgcgacattaagcacaaaggcctatgatcggtgttgcaagtatgggacgagcagaggatggccctaggaaataaattgagtcaagcgccattcactaatcctttgtccaacgcagatttcacatgatgcctcccagacctatggttatcccaagtcaagttgtccccttggataggaaaattgattagacctcgggcgtccaacaggttagatatgatcggga

SEQ ID NO: 355627 - DNA, 712 bp, Cannabis indica
tcattaataataacaataaactttttgttggttcatgaaaccaagaaaaagattatcaaaaaggaaaagtataagatccaaaactagaatttgaactattggttaaattttttatcttctttttaattttaatttcattatcattattatattttggtgtatctttaatgtgtttttttttcttttttattctttatgattttggactagcaaaatggcctccatatctaattacaaacttaaatttaaatattaatttaaaaatatgaagaaaaatttgtaaaaactaattagattggatccgttttttaattggatattcaattacacacctaaattttaatattaatttaaaaatatgaaggaaaatatgtaaaaactaagtatcagcctttatttaagtttaatactccataaatataccattgttacaagtataatataactaaaagtttcaaataattaaaatacatgaaatatcacttttgccagcacatttttatgttggtaaaaatttatattgcactggtaaaataaaatttacttctgatgtgttggcaaaaggagttggcaaatcaacgttggtactaaaacttttgccatcacaaaatgaaaagtgttggtaaaaataatttgggaaatttgattttttatacttacatttggttaaaaaaaaatacctaaacaaataataactaatatttgtaggata

SEQ ID NO: 355628 - DNA, 940 bp, Cannabis indica
aaatgcattctgattcaaataaatcatcgtaaataattaattcaatattaataattaactttcataataaagtcctaattatctactaatttctaaattaaagctaagcggtctttacagctccaatacatcaaaagcaaaccaggccaaggattgtttttttactccaacactcctacccacctcactgcctatactgcatctgacatacctgatcccaacatctccctcaaagtgttctttgacgcggactggggcacctgccccgacactcgacgatcaatcacgggctactgcgtcttcttaggggattctctcatatcatggaaatcaaagaaacaaacaacagtctctcgttcatctgcagaagccgaataccgcgccatagccaatgccacttgcgaagtcacttggattacatctcttcttcaagattttcccatcactcatcggctccctacaaatctctactgtgacaatgctgcaactattcacatctccgagaatcccgtcttccatgaccgcaccaagcacgtcgaaatcgattgccacatcatccacgagaagcttcaagctggaacactcaagttactccatgtccacacaaaactcaacattgccgacctgctcaccaaacctctgcattcgtctcagttcaacagtttgttatccaaaatgaatgtaaaaaccatttagtttttcctaactgattcctaccacttggacatgggtatataaagagagctttttccctattctttgtaatctttttcacataataataagaaatacatttctctatttctgttaatcttatctaagccatgacaatgaggatcattagagattattattattattattagctttattggaggttttttcttttaatagtaataaaaaaagtaacaaaataagagaattaagaagagaatagatg

SEQ ID NO: 355629 - DNA, 474 bp, Cannabis indica
ttctcgcccagtatacatcttccataccgccatcttaaacttttgcaagggcaaggcattaatatatgcagagaatggtgatccccttgacctatctagttcaaggtctgaaggttttgtgccagttaggcccttgatcatgtccttttgttggtccaactatgcttgcacagaagaattcgttgctgcatggacttggctgattatcccttcttgaatgggttgcagctctgattgtgccatggtctagccagccaaactctggaagagggtatggtggaggctgtccagccctgagctctattgctggatttggctggccactcctaaatagggtgactggtctttactggccagccgtacgctaggtagagtctgcctgctcgttatcccctgatgttgggattttatgccctaaataaaacccattccaatctaatctgatttgttatcaataaaagattagaagtcatt

SEQ ID NO: 355630 - DNA, 517 bp, Cannabis indica
ttccaacaactaatattgcaaaaatccattaacaacacaagctgaagtcattctctccctttacttcttcatgttgtccccctgttaatatcttaaaagaatttctaagcactttctcacccttgtcattatctcttcttgtcgaaccagagcctttagaaacacggttctttggagctatccaatccccactagctgttttgatagcagttttttcccctatgccattgattgttttatcttttaaaactgctatagcagtcgcatctgtcatatgggcattacatggaaaaataatattttttagtagctaatgtttaatatggaaagtttttagtaattagtgtaattaaatccaattctcatggggggccatgagaattggagagtgtaattggaacccctcaattacttctaattacacagttacaatgtaattacatggtcagacaaacatgacaaattatgtaattacctccaattacacacaaatctaattacattgtgactttccaaa

SEQ ID NO: 355631 - DNA, 1209 bp, Cannabis indica
ttctattaagcacgtaattaaattaatttcatcgttttacccttctcgggtcaaaattactaaaatgccccttgctcaccaacggggtcttaatatgtcataaatcatattaattcacagatattcaactatataataatataattcctcaactatttataattatctaattagagttttgctaatcgatttcttaattccagggtattacaattacccctccttatagaaatttcgtcctgaaatttacttgaacaactccggatatttctgctgcatatccgtctcgagttcccaggttgcctattccactttactgtttctccacagtactttcaccagtgcaaccgtcttgcttctcaagactttttttttctatcaaatatctgcaccggttattcctcatatgacaagtctggctgaagttccaacgcttcataactcagaatatgggacgaatctaagacatacttttgaagcattgaaacatgaagcacatcatgtacagctgccagcgatgggggcatagccaacctgtacgctatttgccctatcctctcaaggatttcaaaaggtccaatgaaccttgggctaagctttcctttcttaccaaagcgtctaatacctttcatcggaggtattcggagaaacaccatgtccccaacctggaaataaatatcccgacgctttgaatcagcataactcttctgtctactctgagccgcgagcattcacgctctaatcttgtcaactgcctcacttgttctctgaacagcttcgagacccaagaactttctttcacccacttcatcccagtgaatgggcgatctacactttcttccatataaaagttcataaggggccatcccgattgtggcctagtagctgttgttataagagaacttgatcatgggaaggtactttacccatgatccctcaaagtcaagcacacatgcccgtagcatgtcttctagaatctgtatcgtcctctcagattgcccatccgtctgaggatgaaatgccgtgctaaactttaactgagtacccatagcttgatgcaaactctcccagaatcttgatgtaaacttcggatccctatccaaaacaatggactttgggacaccatgaagacgaacaatttatctgacatataactcagcacactggtcaatggagaaattcgttcgaacaggtaaaaagtgagctgac

SEQ ID NO: 355632 - DNA, 602 bp, Cannabis indica
acataaataatacaactaagctgaacctaagcatatcaagattaagatccatagacctaagatcaaccattgatattgacttcatcagatcattagtagtattatttatggcaggattgatcacatttgtaatgttcataaaaattccaatcgtggctggaacatgaacaacaggatctacagtcaaaaggatcttgaggaagacctgatgatgcagatggtgtagtgaaagttctcctcatgttaaccatgacgtttgatcagacatgatatcaactcactctcaatgaaggcaccaaattgttgacctcagatttagctaaccgacaacggagtcgtatttatgttgatgcttgccacatgttacacaataagaacaagaaagtaaaagaacacaggattttatagagggtcgacccccttagttagcgagtaatgacctattctcctttcagttatattgataccgagagataatactattcagatcactataggtgggatctgagatagttctcttaaggttacaatgtaggaatcaaagatggaaaatctcaagttaagagagaaacaatggtgggtgtgtgtgtgtgtgagagaga

SEQ ID NO: 355633 - DNA, 794 bp, Cannabis indica
aaccatgcaacattaaatgttatttctgatctatattaatagtaaatctgattatattgaaatgagttttatttagggcataaaacccaacaccaagtttgggtccggattcgagtctagctctggggttcggggttcgggatcgagttcgggtttgggttcgagtctggtgttcgggctgcgggaccagatccgggttcaggttcgggtctgagtccgagtctgggttcagattcgggtttgggtcctaggtccaagttgggtcgggagttcgggtctagggtccaggtctgggtccgggtcccaggtttgggtttggattcgggttcgagtccaggttggagattgttgttgaccttgaatcctttgtaaatattataatacaaggtaatacaactatttgttatttattaaataatataacatacattatattaaaatttttggtcgtaatagttaatataatacattgatttattcaaacataatgttatttgttatttaatataacacgattttggcgtaccaaacgagccaataaatttaaaaaatagagtaatttgcggcaaaaccccctcaactatcaatttacttgcaaaaaaccatccaacctcatattttggtggaaaaaccctccaaagtactgtttcgtttacatttttaaggtgccgtctattcagcctcgttaagtcctaattttgcacatgtggcaatgataggtcactaaaaaattatcctacgtggccatattttacaaaataaaaattaaaataaaaacaaaaaatttaagagta

SEQ ID NO: 355634 - DNA, 520 bp, Cannabis indica
ccgactacgggttttgtccaagccctggggctagattcagatctcaatctcaggtcctagtttggttccttttctggtgccgggtcacgagctgggtcctatgttcaagttggggtctgggtcgggtactaggttctggtcctagttctgtttcctaggtccctctccttattctcggtccaggtcccagttattttgtgggtttgggtccggtctaggttcggattcgagtcctagtctcggttcaggtttttgtctctatttgggtttcgatctcggttcgggtttgggtttaggtccttgtcctggtcatagtcctagttcagttcaattccatttgcaattctgagttcgaggttgggtttgagttcgggtcagagttcgactctttgccagaatttaaattcgggtccggatttcagtctaggtcaagatcaggctccgggtgtgggttcacatcctgggtcttggtctaggttgggtccgagtcccaagttccaatcccgatctgagtctggat

SEQ ID NO: 355635 - DNA, 521 bp, Cannabis indica
gataactgaaactagtttcttcaattaaccaaatagaaattacacacactcatacacaataaaatacaaaaatacaaaaagaaaactctatcgatacaataaaacatacaatgcacaacaataatctcaaataaaatataagtgtgaaaaccagttttgaacctagaaacaaaataataaaaagaaacttaaaattaaaatataaaataacatcataaaacagagcaaccctattacaaaacccttaagacctatgaaactaatttcaaaaccattaaaacctgctaaaccaatttcaaatagatgtgaaccttgcaatactagttttaaacctgtgaaccatgtgaaataattaaatgaataagtgtacgagactgatgatttcatgttttcattacaaacaaaagattagataaatattattttatgtgccaaagcccatgatattattgcttcagctctaaaaatggttattaaaaaatagttttaccctgtatttttcatcattggataaactaatt

SEQ ID NO: 355636 - DNA, 540 bp, Cannabis indica
gttgatctctattaaatcatccatagtggcttgtcctccatcttcgaattcctgaggtgctagatgaaagatgtctataaaatcttctgaagagtttgagctcaaggcttcatcttctacggtcaaactttcttcaaaagagaggtaattgacttgagcaaaattttcttcatcttcttgtgtttcatgcccctgaatagtattctcaaagatttcttctgttttggcacccactgtttttgctttttggttccctttgactgtggaacacttgggaaaacaagtctttcgaatgttgacactcgtggggtgaatgtgcttgcttcaagtttatcaaatactgacatccgcggggagggtgtaggaacatcgtcgctgcgaaacattttttgttcctcctctgttaactcgtctagttcaaaagaagcttttaaacaatcactattttgatggattgtgactcattttcgctaaaatgaaactttttcttctccattttgaaggtttttggagttacagatgtggaggactttttattga

SEQ ID NO: 355637 - DNA, 650 bp, Cannabis indica
gccatgacaaatagagtttgtccagttgtttttttctcagttgttcggtacgaccataaaacttcaggaagctcctccggccaatttcctttggcatcctcgagtcttttctttagtgtatccttcagggtcttgtgaactgtttcaacttgaccatttgcttggggatgcgccactgcggagatacttttgatgataccatggttcgcgcagaaattagtgaaggactagctgtcaagctatttgacattgtccaaaattattttgtacggcaatctgaaccgacagattatgttcttcacaacgaagtcttgaacttttttggatgtaatggttgccagtggttcggcttccgtccactttgtgaagtaatcagacgcaaccactgcatactccacctttacctttgggtaattgtccgatcaggtcaattccccaaatggcaaaaggccacggatttcgcatctgagttaactcgttgggcggagctcgaggtatctttgaaaatctctggcatttgtcacatttttaaacataggcctttgaatcctcgatcattgtcggccagaaataaccttacccagcgatgtgatttccacaaaatccatcgtgcactttagacaaaagtcgtgtagcttcttcttgggtaa

SEQ ID NO: 355638 - DNA, 521 bp, Cannabis indica
atagtcacaaggataataaagtgtttatttctacaaatgccacattctttgaagatgacaatattaagaacttcaagccgcaaagtaaagtagtattggaggaaatgctttcagaaataactccaactaatgttccatcatcttctactgaaatagaggataatcccactccctcagttgaaccaatgcaagttgatacaactgagaaatctaccactgatattcctatgtagaaggtcacgactcgtcgtcgtagtgggagggtttccacaaaacctgctcgttatggcttagatggtgaaatcaatatggtcattggtgacgatattaatggcaatccattaatctataaacaggaaatggcgagtccatagtagaaacaatggtcagctggcatggattcaaaaatggattccatgaaaagaaataaagtctgggaatatgtatatgcacctgatgattatcatccaatcggatgtaaatgggtcacaagaagaaagaggtgctggtggagaagtcaa

SEQ ID NO: 355639 - DNA, 612 bp, Cannabis indica
atatgaacataacacattaataataatataaattttcttttgcgataatgatagtactccaagcccatatatttgttctattcttgttgtatgatcttaaatttcatatcaaatgatcatatatttataatttttaatgcatgtgaagtacttcaggacttctcttcttataaacaaactatataaatttaatatttctcaatataaaaacagaaataaaagttttcttcaatataatataatcaaaaactctttaagagtctattacaacatataatttacaaatttatattacatagacaatcatacatgtttttaaaataataatttacttacatgtctttattttatacaaagatctttatcttatagtgcgctcaactttgaattatatcacttaagacacgtattaacttcttctagaatttttagataagacatatttcaaattttcaataaattaggagcttcaaataaataaatttttcctgcaatatttttgtgatgcttataaatcctcataaaatatatttcaggccataatcaaattatgattatattttctcaatatttaggtcttattttaatcaatctcatgtctatgcaaaattt

SEQ ID NO: 355640 - DNA, 457 bp, Cannabis indica
catcatgcaattgtgtttgttttattttttaccaaatgcttcgtacaggtataggtgcccccaagtgaccaagcagacttatgaatcttggtcacttttcatatatttttacaagtatactttcttgtctattcgaggttttgggttcgaccaaaccttttgtatgcattggatggtaaactaatatcatgctaatggattcgactcaatttgaattttgaaataaacatctttattcatttattgatcggaagtatgtttgttactgtagtaacttacatcaaagctattatgttgatctgatctgatctttagcttaacatgaaataaaacaaattgtagaaattaaaaattgtactttcaaaaatggtcatccgacctgagtacttgagaacttgatccaaacctttgggcgtggtccgcccagaagcccattcacttaagagcaaatgttctt

SEQ ID NO: 355641 - DNA, 625 bp, Cannabis indica
atatatatatatatattaaaaaatacatacaaagtgaaaatatactccaaaaatttaaggagtcgtgaagagagagaatatcacgtagaggagagaaagaaatatcgcttattaataattgttacttctaattagttgttttttatttctatttttaatttactattattaggttaattctaattagtatttttatggggttagaattataagaagtacattccttaattaattttaattgttgtgattgtgtttatgtgttgaaactaatttaattttttccattagtcttgtcttttgacatagttctttagtcttttccttttagtttttcccattagtcttgtcttttgacatggttctttagtcttttccttttagtttatctggttcgagtcttgtcttttggcatgggttgtgtagctcggaatcatcatggtgctatagtagaagcattcaagaagtgaaagattggatgtgttcaacccgaaattgtgagataataggcattaaagaagccttgagttggattgcaactcattcgtgggatagagtcatattggaaacagatagcttggtatgtgtccaagcgattcagagcaatatttttatgccttcacagttt

SEQ ID NO: 355642 - DNA, 887 bp, Cannabis indica
cgacgtccaagcctagatagctactcttgatctcagatgagggaaaccaatgaaagcctcagaacagtacaagaagagaatatagcatttctgggaagagaatgctctgctgaaaatcaaaaggtggagatactagaggccgttcaacgtagtacgatggagtctcagtcaaggaggtttcacgttccaattccatccatgcaatcccttgattccactccgactacaaacgtaggccaaatgtccaacggtcataggaacaccacaaaaccaaacagcacaccaacattcaaccacaacgattattggagcagatggatcggtaccaagagatctactctaacacatggaccctctttggtaggtgacgagactatgaccgatgcccaggtcacatcagttccagacagaagcgttcccgcaccaactactcaagaaggacaactcaagacctctgacccaatcactccaagtattttgatatctaatgttcatgttgtttcatttgcaggtcaagtcgtcgcaatgacacctgagaagatgatcgaacaaatggtagcaaggaagcttcaaggcatggaggctatgattcacaaaatcccaagagtccctgaacctatcaaaaagagcttaccaagtagcttcatagactctccattcgtggatgctatagctctcgtggagatgccaaaaaagtttgtcttcccatcaatgaagatgtacgacggaacaacggaccctaatgatcacatagcgagttacaagcaaagaatattcacagtcgccatccctcgtaaattgcgagaggcttgtatgtgtaaggggtttggttctagtcttgtgacagtcagtagtcccgtgatccgtaaggagaaataccgggtaag

SEQ ID NO: 355643 - DNA, 597 bp, Cannabis indica
ggtcccaagtccgagtcctgagtcctgggtcctggctccgggtctgggtttgggtccgggtcccgggtccaggtccgggtccgggtctgggtttcggtcctgggtcctgggtccgggaccgggtccaagtcctgggcaggtccgggtcccaggtccgggttcgggtctatgtccgagtctgggtccaggtccgagtccaggtcacaagggatttgagtcttgaattaatttttttaaaaaataaattgaaatcgggtcggatcagatccgatccataaaaaattaggcttcgataaactgagggatcggggaggagtttgcctttgtcttcgctcagtttaagattgagttccataggtgtagaggccggtttaactcctagataactagtatctttgaggagttgaagggtaaagggcctttgtgaaaccgagatacctttggaagttttgccaacttcaagtccaaggaaaaaacgaagtttgcctaagtcttttaacttgatcttggcatcaagttgttgagtaaattgtgataaggccacaatattgttgctggctataatcatatcatcaacatagatgaggatagccatga

SEQ ID NO: 355644 - DNA, 1065 bp, Cannabis indica
acattgaaatggagttttattaagggcataaaacctaacactctcgaccaggacggatatctggacgagctagactacttcattccctctgacgacaatcgcgcttcaaatcctagtgaggggatgtgcgcctggtcgggggctcacggccagcaaggggcgttgatgcccttgcacaaatacttccgggatgtggcagacttcttcggcctctgcccggcccagatcactcccaagggcattaagtatctgtctgccctcttcgtcctctatgcttcccaagaatgaggtgttccttctcctcacgaggtcgcttggttctttgacctgaagtctacccccaagcaaggcaggtcggggtattttacatctctcagccaggcttcaagtggttgagcgggacggacaacaaggccatcagcaaaatagggcgttttgttgatgagtacttcatggtgaaggatccgaacatcacccggactcagtttcagcagattctgacatatcaccgtcctcccctcactcttacccttagggatagggctcagaagcttgcccggttgccgacggaagacagggatattatccagttgacctccgatgcaaatctggtgcagtacgggctctaccctgaggacttttcttctaagtccgtgacggggaaaaagaggaagtctgctgctgctcggcctgaacgagctcattcagaggatgagctgattcaacttaagcgggaggctaagttgaagggtggtgttcgggcaaagcagtacgctcaggagcctatgaatcctgaagatgaagctgaggctgaggctgaggctgagcaggtggctcctttgaggaggaagaagaaactcccagccacgcccaggcccgtggaacacggcattcgcataagggagcccatttcacctgttcggccatcccatccttatgctggaaaagggaatgccgttatggctgagataaagtctatgtcaggtgatgatggacttctgactttctgggtggacagtcactctgcgctttgcttcttttttcagcttcttggcttccatactt

SEQ ID NO: 355645 - DNA, 1124 bp, Cannabis indica
tctgggtaagtatatcgggtctcagaactaccttgacgactgcttcgaccctggttcccccgaaacccctattctgacccgagccaccggttgcagtggatgccttccttttctgatccatggccgaaccgctaccttccctgctaaagcctgatgtaggaggggtaggagtcccgtcaaccattggagtcctagcagactcactcatgcacccaattgcgccctcaactcgcagtgccttttccaccatttcagcataggtggttttgtcgtaggtagaaatcattaggtcatgtctaatcttcacattcaatccatccagatacttttcctttttactaaaatcagttggcacaatacccgaggccaacctcgccaaccgatcaaaccgcattgtatactcagtaacgctcatattttctttttgggtcagatgggtaaattcttttctcttagcacttctgacagcctcattgtagtacttggcattgaaaagttcctggaacttttcccaagtcatcttaatgacatcgtgtatcatggacaccatgtcccaccacactaacgcgtcttcttggaactgaaaagtggcacaaaccaccctatcattcccggtgacgcccatgaaatttaatattttggtgatcaccgttagccactgcttggctttcataacatcccgacctcccagaaaaaccggaggtgcctgcttacggaacctttcatacagaggttccatccgattcactgcaactgtaggttcggcctggacaacaggggcaggtgccactggaatttttggaacaggcactgcaggagcaccctgctgtcttaatagttcgatttcatcatcctgttcctcaattctggcttgcatttctgtacacctgttttcccaattctgggcttcttgagtagcttgggtagcctgggcagcctatggcgggttagcgtcaccccggccacgtgccctgctcctgggacctctacctcggccccgatcatttgggcgaaactgagctccctgaccttcatttgacccgaccgagttgccctggctcctggtatttcgcctggcgtccatctatcttgaacagcctccgtaaccaagagctagcatggtc

SEQ ID NO: 355646 - DNA, 791 bp, Cannabis indica
ccaaacgaaaacccaataacctgtagtacccaccatcctcatcactacgaacaaccctcttaagaccagagtcaatcttacccttcaaagaatgaatagtgatatcaaaacaatgcttgccccaaccaaattcattatatcgaccactatcgacaacatatatttcctctataaacaactttacccgggggaccacccaacaagtaacactgcacaaaatacaagacagccaacttgactgcaagatcgtcgttactcttgagattgtcagcaataaaggcagtctgaatagcacccttggtaatttttttgtaacccttaaaacaatgtttaaccaatgcattatcatcttgcttaaactgataaaaatcagaatcaacctgacaatctaacccggtaactaacgaaaactcttcgatactaaacctaagatatttcccttggacacatacccaaaactccaactcattaggctgttgaacctccctcaacagcaaacaatgaagcagttggtaatggataatgtactctggaatccgaagaaaatatccaaacacagtttttgaaaaaatttctagttggctttcagttagaattcttttgatgtctccaattacagagtaataaccagatgtgactactctagaatggtagaattgagatcgggtgtacttgcattcccaatcctaaaacagaacaataaaaaacactgctaaaacacacataaaacactacaaaacaacaataaaacaaaaaactaggaaaaaaaaaacagagaacagaatgcataa

SEQ ID NO: 355647 - DNA, 625 bp, Cannabis indica
ccagacctagacctgggacccaaaattagaacctgaacgagaatcgccgaacaaggaccctagaacaagactaggaccgtgacaaggacctggacccagattgagaaccgaacacaaccctagcctcagatccaaactgagacttgaactcggtccccgacacggtcgtgtacccagaacggaactaagaactggaccaggacctaaatttgggattccaaacacagacttggacctagatagggatccggatacgaacctggactcggaccaagacccagactaggatcaaaatgctggacctagatctcgaccgagatcttgacctagacccaaacttggacccgtactcgggacccgaactgggacctggagccgaacctagacccagatcagggtccagacctagacacaaacccggacacaaactcagacccaaactcaaacccacacctagaatcagacccaaagccaaacccggacccaaacccaaactcaaacccagaccaggatcaaaaccaaggacttagatccagaactgaatccagactcagaccgagattggaacttgggactcggacccaacctagacagaaaaccaggacgcgaacccacacacggagcc

SEQ ID NO: 355648 - DNA, 591 bp, Cannabis indica
accgggacaacgttggattcttattttgatcgaataaaaggttgctagaatggtttccattttagatgagttgactactctatttaatgaatgatatctttgactctcgcctgccgggacactgtatcagtttgttgaaaaccttagaaattatttaatgtgtttgttttgtattttcacatgtctttcttacttgctaaatgtatgataatttctgatgtgtatgaatttatattgaaccaagctgttttctattattaattgtacttataaattttgagtcttcattgttggtctaacttaagttgttgttttaaatgggacaaaatccaaaagattgtcatccattatacaaacataatagtgttagatctcgacaggttcgtatttgtgaatgcaacatctagttgtacatccaaagatgacaacttagactagtgtttacaatatgaaataatgaagaaataataaaataaaaataactttgactctcgcctaaatgggacgtcgttagattcttattttattcaaaattatcctttatttttctcttagctttttcattttagaattcgcttatatagtatatca

SEQ ID NO: 355649 - DNA, 668 bp, Cannabis indica
tttgacctctcatgaaacattggttttttcatgagatgcaaagcattttgattgtcacaataaaatgtgatatcctcagatttgaaacctaactcctctgttaaccctttaagccatatagcctttttgatggcttatgcatcagccatgtattcagcttctatagatgacaaggctactactttctataggtttgatttccagctgatgcagcccccaagagtagtgagcacaaaccctgttaggctccttctaacatctaggtttgctgcaaaatctgagtcaacaaagcaagtgatttcttccttgaactggttctccttactgaacacaattccagcgtccatagtaccttgcaggtacctcattgtccatttcaatgcttcccaatgttcagggccagggtctgaaatgtacttgcagactacactcatggcatgagctaagtcaggtctagaacacaccatagagtacatgagactcccaacacaacttgcatagggaaccttgctcatattggctctttctgcatctatttttggtgattgagatgcagacaacttgaagtgttgagcaagtggtgttgcaactgatttgcacttgaccattctaaacttattcaatacaaactgtaggtaggcaacttgagaaagtattatcatgccagg

SEQ ID NO: 355650 - DNA, 515 bp, Cannabis indica
agatcctggtaaaataaattccaacactattccactgagataaatcctaatttttttctttatattgcttacttgacagtggtattaccaattgtggggttagtggagagattccttctacctttgaaaatctctaaatttgcaagaattgtacactgcttattctatgtaccctctcatgatatgacatgatttaaaataaatttaaaaagtttgttgtcgaattataaaatgatcatcttttatttaccagttattttcttttttctataacttgtgtagatgggcattagatattagacttacaggtaagatacctgatttaatttcgtaggaagttggtcaaatcttactaccttggtaggcaagatgaacaaatatctgtattttgatgatgttgcaatatctatatccttattaacaatagctaactacttgtttgtcttgatgcaaggtttcctaagggaactctttccaaggacccataccattctcataagtacttctaatattac

SEQ ID NO: 355651 - DNA, 965 bp, Cannabis indica
agtcccccattcgtgtattctcaatttttaactttctaatgaaactcatatgtgttcttacctaaaaaataaaaaaaaaaaaaaactacatgtatcctctaaagagtaactcgctaacatatcgactaaggccctatttccaaatcatttcaagacttttaaggacaaaattggattgaaagcatacataatatttcaagacttttaagggttgttaagttaattgattgttgtgctagttagttacaaaactgttaccaattgtaactctttattcttgagcttgtatatatagctcatactctgtacattcattgatcgattcaatacagagaattcttttctcattttctcttccacactctaagaactaaaatgtaaacattttagtacaaatataaaacaataaaaaaaaaaaaaaacaatgcaaacaacatagtacaatgttgttgtgaaaataacataaaaagtaacgtcttccataaatgtcaaaaacaaactggagatccatatttttgtattttttaattattatttttatttggtattttgaaaatatctctaaaatatatgagttctttgtttattttttacatttatttgacaattaataaaataaaatctgtttttctttttaaaaaaataataaaatcaatattatatgtaaaatttatattaagataaacagttaggggcaaaagaaatctaattataccctaccacttggaatgcatttagttaatactagattaaagttacgtacaatgtacatatacttaattatatgtttaatttttatataaaattttttaacactaaaacaaaaattacaaactataaactcaacaatagtattgtatttctttttttgcagtaaataaagattattgaaattaacccgacaaaaataaaattgttaaagagtaattttacaaaataatttaactttaagttttttttttttt

SEQ ID NO: 355652 - DNA, 939 bp, Cannabis indica
cttatgtttctgatgtttgttttttctaaccatattgttttacgtttggtacagacatgtctcggtagatgcttgacgctttgaagaagagaataggcggaagctctagcgcctttcctccagccaagaagtctaaaggcggtgaggggtccccttcaaaggaaaagaggcccattggggaggtcattaatctttccgaggagctaactgctgcaaacccctctaccccaaaagctgctaagtccaaggagtctcggggaggaagcttggacaggtctgaaccaccgaattgtgggtttgagctggtcagaaatgaacccgaacaggtgcgagcacctaatccacctttgacaatgcttccagaggccaagaagggcaaggacatgctggcccactacatgaaccggctagttcatgaggtcagtaagcaactggctggtgttgacaatgactcttctttggagctgctggtgggcggaattttgaaggaattcaccagggtaagtcttcctcgatattcttctttaagtttctttacttggctcaaatactcaagtcttttctttgtgtaggcctgtctgaagctggcctacacctactcccgggctaagtctgcttcttccaagaatgtagctttatccaacaccatcagggcggaggtggacttgcccaagaaggatgctgaagacgccagggcagaactcggacctattcggtttgagttgggtgaagccaataagaaacttttcaccgcctagaagaagataactaagctgactaaggatctcgaggtttctgaccgtcttgaagagaccatcgacaccttctctgctgaagtgaagagtcttcaggatgagaggacttctcttcgagcagttcttcatcgggtgaagcaggagaaggaagctaagaaggaggagcttacggccgaggtgacga

SEQ ID NO: 355653 - DNA, 747 bp, Cannabis indica
atatccacgtaaattggtccctgagttatagggattgtgctgatgactcttgatgcgaaagctgaattcgctaagtgttggttgctctgcgcagatcgctgaatatcttgctctgggcatgccagcgaggcatccggctcggcctattttctcgagcagaggttctaagtggactcaacgtgtcaccattcacgtgatgccacgtcaaagtggaaaaattgggataacatttgcccccaaagtatatacgggacttctaaagttgcgtgtagacttcatccgagctgattatgcctttggatgggggcacgtgttgagcgcgactgtgcgagactcgatgtgaggttgactaggcgtcccttcggttttcggctaataaatgctctgacaattgataattcaaaatccaattttctctctccacggctaacggctgcacttgattatttttgatttcccaaattttcttttaaggcgggaagttgagtcgtctgaggttcctttgagacagttacctcttttcgtgacttgcctataaataccaacaacattggcacataaactcatttcatcacccttctttgctagttaagcttcagagcgaaaagagaaattcttgacttcgaagttgccgaagtgccttcataaactgcttgttggattgacattgctcgaacccagacaattgaatcttgagtaagtttcggattcccctttatgcttatctttgcatgtttacattttgaa

SEQ ID NO: 355654 - DNA, 410 bp, Cannabis indica
aaatccaacaaacacttttcacacactttgaacttgtgtttattccatttcagtgtgcttgcttatcactctaggtttccattgtattatcctaactctagagttattttgcttgtaatatcaaacatattttcatattgtgattgaggtgaggttggcactagtattgtaaacaacccaattatagtgagattggcacttcaacaatccgagaaagaggttaatagtcctcggtggtgcgaaactattgtaagaggtttagaaacaccttggtgaaaatttcccagttgtaaaggttagtgaagcctgttaacttggctcgatattggaactcaaagctaggtccatagctttgaagaccaagggcgtagttggcatagttctatcgaaccttgtaaaaattgagagtt

SEQ ID NO: 355655 - DNA, 612 bp, Cannabis indica
ttttgtaacgccctaaaaattaggcaagctacaccaacggattaggaaaccctaatcccctaaatcaggattactagaaagataagcgccggaaatttaaactttatttgaaacaaaatgaaaattaaacttgtaacaactttaaactttacaaccaaaagatacatgttttgggatctcgtaaatactgtcataaaaatattacaagttcattttacgagccggcctaagcagcaaaattggagttacaaaatacatcaccggtagaccccaacctacttggtctagtgtggcccaaacatgtacaagcatggccaaggtctcgcactcatggcatcacagactgatttaccctttcctgcatagtagagcacccgtgagccaagccaagcaagacagtataaataaccatgtcaacaataaatatataacacataattaatggtgccattgcactatttgtatattcaatatagacctgcgtgttacactcacacacctatatatgtctatgtggcatagacccacgtgttacgctcacacatctatttatgtctatatagcatagacccacgtgttacgctcacactctatttatgtctatgtagcata

SEQ ID NO: 355656 - DNA, 164 bp, Cannabis indica
tatgtaggttagtttgtattgtgttcgaggaacacaagtagtttggagacttattagtgttgcctaaggggtaatttgatgtaattcttggtatggattggttgtctaaataccaagctattgtggattgttcacgcgaaagagtgactcttttaacccctagt

SEQ ID NO: 355657 - DNA, 527 bp, Cannabis indica
cgacctggaactgtttttgaagtccttaaacatctgttcccaagaggtaattgaatgatgagtaagcttgctgaaccagctgcttgctgctccaactagcgaagtggggaacaaaatacagcgtagattgttcgtaacattgttggctcgcatgatattattgaaattatttaaatgcgagaccggatctgtggtcccatcatatgacgagacgtgaggattcttgaatccttgggggaatgcagtattcatgatgtttggatggaaaggctcgagcttctcatccgagtcatatccagaatactttccctggtcctcgacttgataactcctgaatttgtcctccagttcatcaatttgcaattggataggaaccttttgcttttgaccgagctgttggcgaagattaggttttttctggttcaagtgatcacgaagatccacttgttgcgggttatagtagctaacggacctcgtcctactcattgttgggttttatgccctaaataaaactctgtttcaatgta

SEQ ID NO: 355658 - DNA, 685 bp, Cannabis indica
taattctgcatgtgcatgttttgctgaatcagataattcagctgatcgtgagtgtactgcatggctgggtcaagaggcccgacaagacgtggtggttcaatgtcgtcatgctcctcttgttctgttgcgggaggatctccccgagctggtggttgaccatgagggtgaggaggtttgagtcgcataacagtggataagttgatactgcgttgtggcgctaccttggtatcataagagtactgtggtactccatgtttctcacacagatcagtgataatgccagcaagcccaagtccaccaccacaagaaccctcaaccattatatcaaatgtcactcgaatgatgtcccccacattcaaattataacctttcataattccatacacccatttaatcctgtcaatctgagcatcagaaaagtgtttgttcgggagcaaccttgcactgacaaagtatagccacgccttggctacctggttgagttcacaccgaaacaattgatatggttctccatcataggtatgaaacctaagtcccggataccctagagtttcggctatatccacataatccaaactttttgcccgaatttgctgcttcaaaggttgctgttctacagtaaaggttgggagctcataaagagcatgaatttcagctgtggaagcaggcactctaacccccctaa

SEQ ID NO: 355659 - DNA, 878 bp, Cannabis indica
tccctacccccacgggcgtgtgggatccgtgcgaggagtccaatcagattcaagagagtgctataacacgacactaatactcacagaaaagaagaagtcggtaaatgtgatatatttactagaagcactgcctccttcacaagaaatttttagaattgaggagataccacatgttgagaagctggatctagatccaaggatcctcgattacacaaatactgtacaggctgaagaagaaacaattggggtacaaattgatccttctgatcaaaataatgttttaaaaattggttctaaactaacctttcaacagcgagaaaatctcgtcacttttctcaaacaaaatatggatgtttttcaggggaaacattcagacatggttggaatatcaccaaaggtcatgtgtcatcgattgaacattgaccctgaagtgcgaggtgtccgatgaaagcatcgcaaaatggacctcgcgaggtaccaagcgcttaaagaagaagtggattgccttttgtcatgtagcttcataagggagtcattctacccaaactttttagcatatcccgtactagtgcctatgccaaatggctcatggcacacatgcgtccatttcactaatttaaacgaagcatgttttaaggataattttcctctaccaagcattgaccaacttgttgatgctactgcaggtcatgagcttcgtagcttcatggatgcatactcgggatacaactagattcttatgtatgaattagaccaggagcatacctccttcaatacagatcgcgatttggactggtataaggtaatgccctttggtttgataaacgcaggagcaacttatcagaggctagttaacatgatgtcgcggctcttgttgg

SEQ ID NO: 355660 - DNA, 673 bp, Cannabis indica
aaagagttttatttagggcataaaatccaacagccataacaataataaaccaataagtatttattctaaaacactagttaacagttgcaaatgacaacttaagatttcctaccaaaccctgtagttcaaatacacaaaaataaaacttatattttagctctaaaacatatataatatggtagagctcattgcaagcttcaaaatggtatatagaacgtctaaaacaaacaccttagtgaaaagttatggcaaaaatacgattttccagttcccgaggctgcccgaaacgataaaccaattggccagaaccggttgaccggttccaaactggttgatcagtttttcaagggtaagaaatgtgatttttcaactttacgcactcaccgaaatgctaccgaacctgtccaaaccaccccaaacttcatagggcacatatataccatacatactaccatacttgcataatagaaattaaaattgagcccttaattggcaaatgccactaatatttagacttaagctataaaaaactctaaactcaatttctaacccaaaatcacctcaatttcagcaagaaaacatcagaactagccccatgactacccaataacaattctataaggtcagaactttcataactattctaattcacaaaacccttatacgaaactaa

SEQ ID NO: 355661 - DNA, 1581 bp, Cannabis indica
tatggacctagctttgagttcaattatcgagccaagttaacaagcttgactaactcttacaactggggattttttcaccaaggttttttccaaacctctcaagatatttttcttccaaggactatcaacctcactagattgctgaagtgccaatctcaccaaccgagttatttttccaccggtgccaacatcacctcaactaatagttttccaaaagaatatcaacctattaagattgttgaagtgcaatctcactcttaaattgttgtagtaacaatctcactcttctcgggttgtttacaaaatcggtgttaacctcacctacaaccgagttgtttttctaccggtgccaacctcacctctcatacaatggatatgtaattttgaaataaaaagaaaaatatctctaataagatgaaaatccatgtaaagttgggcttaaacggttcacaaacggttcacttcagttcaccattttcgaaacgcgcataatgcgtaaaatgtaattttttttgtcttaaaatgcgcataactcttagctcgtttatctgatttcaagaattatagttgcgctctcttagttaaaagataataatcttaaaatccaatttagaaaaattatatgttatttttaaaaagtaacttgtagcacaagttagtgagccaaacatttaacttataaaccctaatatactatgcaaatcactttaacaagactaaagtaaacttataccatttaattgtatgtagtcttgatgtagatgagcttcttagcttgatttttatgttttaatctaaagttgacttttcttgagagttgactttgactttgactttttggctgacttttgactttgagcttttgaagtcctttttgggatagggtcttgaattcttgatctcttaataaaacttttgatcttatgaagtatgaagtagtttatatacttgttgaattcaattctttgattatgtttgactttaccaagcaaatattaatactttgtgaatttgcttgtaaaatgatcaagaaataattagtaaaaaataataagcaaatatttgtttatcatcaaaataagtgagtgattgaattttggtcaatattctccccccttttgatgatatcataatatttgattattttacctaaaccctaaaccctagcatatattgatttataccattttacctttgcatgtttattgttacttttttttttgacatgacaaagctcttccttaatcatatacttaataaacttgttaatacttgaaagcataatatgattaatgccaaaataattaattctaatatttctcctccttttgatttcatcaaaaaaggtggcataggaagcaaggtaaaaaaaaaaatatatgtctccccccttaatcatacacgatatgacttagaccaatgaagcacaataggtaaagagaaatttcaaataaataaaagaccaattagtaatttttccccccgaactttgacatgtagtaaattgtgccccctgaacttttttggtcgttaaaaatttccccccaactattgagattgttaaatttaaggacttttgtc

SEQ ID NO: 355662 - DNA, 516 bp, Cannabis indica
tatatatatataaactaattaatggggtttaccttgaagaggaataagtttccacggagcttaatttcatagcttgcaggatgggagaagaaaactgatatggttattagtgggagaagaaagagatgtagtgggagaaagagaaaaatgtggaaaataataaagactcttcaaatttgaatgataatatacgtgtattgcagttagtttactttaatatatttttatttattttatttataataattacagaaaatactctataacaacacttttttaaaaaatgttgttttttttatattgaggagtaagagacaatcacacttttttaaaagcgttgttatatcatatttaaatttattatttaaataaataatgtaaaataaaatgaatcaataacaacacttatttattaagtgtttctaatttaaatatcaaatgatgttgcaacactttttttttttaatgttactaaataattgttgcaaaatatactttttctagtagtgttggttg

SEQ ID NO: 355663 - DNA, 958 bp, Cannabis indica
ttgttcgttacagctgaccacttggatcggacaaatacttacatcttaggaacatggtagtataattgagtgggagtgctaatcatagatatgaaatctacagcttctacaattatttagaagtgaaacaatgatttccataaagcttggctaacaaacataaatggattagctcttatttcagtaattatattagtttactaaaatatcatttataagaaactaaatgttttaaggacaaaatacattaaagggtagaatggtaaatttatccttactcgatgtagatcatctatagaagatctttgattatttagattgaaacaatagataatttatagcgtatctattcttggtgaataaagcattctatgtaattaagagtgtaattttgaatctataatggagttaggaaaaattaatgagatagagaatttaattggtaaattctagaactatttattaggagcttagttatatacgcttatggtccttacactaactagggtaatattgttttgaagtctcaattaattaatttatttaattaattaggaatttaaattaaggttatgtcttatttgtgaattttactaagaaacgacataattgagaagaaaaaagaatttgaagtttatttattaattaagagattttagaatgtctaactaataaatatatttaaatggtaattttattttataattaattctaattattaaatatatataattaatatttaaataactagagtagaaaaaatagtattactgaagaaagataagtttgtttcattaaggaagtaaaataatggcagaaattttcattaaggaagcaaaataatgacaaaaatctaatttataggccttcataggggttcagattagggctgaatattttgagcgggtttgacccgaacccgagcaacccgcccgaacccgaactggtgaacccgcaa

SEQ ID NO: 355664 - DNA, 1067 bp, Cannabis indica
acaagagaaaagagttaagtgttagaatatctgtgaaagcagtaaacacttaaaatcaatcaagctagtcctaccctgactctctaattcggccctagcaaagttttgaatcttaatactggttgcatcatccccgagatagctgtccaagagacggaaccagctagaagaaagataggccgaaggatccaagagaacgggcatcggaggtccggaacccatccgggaccgacctaaataatctcctaagttggagaaataataatcctttgcatgatccccccaccgggtcgagggcatcctaaacctaaagagacgttcgtcgaatcctacaggcctaaggctagcatattcgcgaacagaagggacgtaatgtattgttaaaggagacttaccagagccggaagtgctggcatcaggagcccccgtattcggcacctggacagtaggccttagcctgggagccctcttctcaaccggactcccaatgcgaaggggtctcccggcagccgtctgactcctcctctcaatcgggctcccaacacgaaggggcctcccagcagccgcttgggccttggtgtaacccttctcctgggacttccagtagaggtactctcggtacttctcttccgcggtggtaataatctcatcccggaaggtcttttccgcggccggaacccttacattcgggcagataaccttggaaaggttggagtcctccaccgactggtgtcccaggatcagcttggccttccagaaattctccgtcgtgaccaaacccccgacgtcaagatcctgcctatcataagttgcgaaggtcttggcccgctaaaggaagagctgagtaggcgcggtccgctcgtacggagggatcctaacccactccgtaagaagctccgggtgttccacagctcagaacctggagaaaaagaagaagcaatggcgatactccttgacgtgcttttgctgattgaaagggaccacgccctcattcaaagggtgggcccggaagccgtaaaaaccattcttaagtttttcccccttcttagggacagaaacaagttcat

SEQ ID NO: 355665 - DNA, 623 bp, Cannabis indica
gtaaaatatttccaacaataaccgacactaattaatacttttttgcgtcagtttagaagtgatgccccaatgtttccttgtactattcacctcggtcaatgcaatgaacagtagcgttgaccaacgtgaatagtgctttttgtagtagtgtcggagaccgtctatgtgaaaagtggtcaaatttttcattagcacatcaactagacataccatagacatgttcaaggcatcataatcagattaagagcaagttgaacttttagcacctggggccttgaggccctaagcacgcaacgcccaggttgacaatttgtcaatctaggcgccttccaagtgtccaattgaagatcctagttttgcattgaatccgtattcatcaaaaatggggaaataggtccttctagaggaaaaacaacaattcctgagcacaaataagaagacttagtgtcttggttgacacctagggctggctctatacccaaattgacaatttgacaacctaggccacaaaaagtggagtttattaagaattctttcaagcattatcttcgtctttagaaaatattacgattcaactatttctggtgacaaaacaaaatttttgaaggggcaaaactaggacc

SEQ ID NO: 355666 - DNA, 954 bp, Cannabis indica
tggtaaaataattttcaacaatagcaatattgagttattaattatgatttacatgtttatggagatttatttaaattcaaaatgtattattatgctatatatgtgaatttcgcgttttctgtgcttgtgttcggtaacggtggaaagcgacgtgggccattagagagtcacattttgtatgatttagaatgtcaatagcggggtactattgttaggcattggagatatcggggatttgtcgggagtggtaaatgactaaactacccttgctacaattaaagagttttcaatcagaaataggaggtccaattcaaggtataatgcttagccttcttctttatggttttctttagctcaagataggttaattgcatgattttagtgatttgaggttctgtagtgtgcagctagtttgggtttgaattctggggttaagataggtttgttttagttgattttgtgctgagatagctagttgtgctacggattactcaaacttgaagttagagagcctaagttggctctctaatggtgtttttaatttctgagctatttgatgtgttctgttgcttgaaatggatttagtatagtatatgcaagtgttctagagagtatggtagagtttgggctcgaattgagttgtggaggacatttttggggttccctgcactgaaccggtcgaccgattcaggggagcctgtaacaaccggtcgaccggttgatccccaggaaccggtcttccggttgggaaccagtctgctggttgggcttttttcagaaccctaccttaaactaagtttaagaataaccatactatgaatgtatattatttactagttcatgcatgattttataaatgatgtaattgatgtaaaaaattaattttatatctaaaaattttaaatacattgaacattataatcttgaaaagtaaaattaattaatataatatga

SEQ ID NO: 355667 - DNA, 851 bp, Cannabis indica
aaaactatatatagtattaacttttatggaaacctaaatatataatattttaatataatttaaagtttaacatagtattatataaaaatataacatataatctaattcaatataatacaatacaatataatacaacctaatacgacgttccaaacgagtccttaattgagtatttagtgaattgacatttgtaacacatgcattaactttaacaactactaatatcttttgagaaatttgacaattcatgcttaaaaattgtccatgtttttttagtatgccacattaaaatacataagaatttaatactctaaaattaattaaatctcaaaataccatttttataccttccctctttctctcggccctctctccctctctctctaactcacaccaaacccatggatacccacaaccacaaggcgaaacccactctgaagacaaaatgtaggacaaaaccgaggaggatattacgaaactacaagagaaattgtgaaatccaaagccccaaaatctatgagcttaaccaccctgaaacccctaaaatccctacccatcgttagagttctcaactcgcttgttttctgcattttttttttctggtttttgacgatatcacgaaacatcgctaaatatcgtgaaatcatgaaacatcgctaaacacatcgctaaatgtcgcgaaatcatactcaagttttcacgatgattagcgatgtttattgatatgttgtgtattttttagtctcatatcacaaatacatctttaatatcatcgctaaattcgcaaaatatcgccaaatatcgcaaatcatcgctaaactttatcctaacctcatatttgttctatcatt

SEQ ID NO: 355668 - DNA, 1633 bp, Cannabis indica
tcacactaaaacattctctcatataaaagaataattcaactatttataagaacataataatataaagaatataatgtcataactcgaactatatatttaaagaagcctagccgacgtttgaagttacactaaataaacggtagtcgactgtttgattgaaatcgtcattgaggcagtacaaccctaattcatgagaaaagcccaactatgaggaatctgtgctttgtaacgctaaattaatcatacctaaaacgacaagaaatttagtaagcataatcagaaggactaataataataataataataataatatcatttattagtgtttcttctttaatatggagagcgagaattaggtccccaaggcatgacatctggtgaaagttggcagttgattggagttgggctagccacaccatagacagacccctcattaacggcaacaactccagtaccgacgatggaactcttcacatcctcatctccttcttcgtcttcttccgacggaatcttgtaaagggtaggtttaacgaacgtagccgccacaacaactacaagactcgctgccactaccttcccaccgatgatgcctccgaatacttggccttgacctccagcaaggcaaattccgaaagaagaggaagaatacggcggaggctgtgacgacaacatgggcttcgagccagaagttcccattgccatgggagaagaaaaagtactcaagaatgtgcctgacagcgagagcagactaaaaggtccttggagtgaaaataccgccggagagtgagaaagggagtggcggagggtgacgcttgaaatagagccagatccgctgagaaccgtgatgcccattcggcgctttcgggcgaactggacaatcgtgtccacgacatcgcaaccggctttaatctcgagaacaacgggcttcatagcgaaatcgctgtctttggttataacgattggggccttaggcttattcttagaaccgggtggtcttcctctgggcttcttggattgctcgaccggtgaagagaaatcgccagcccctgagaacctccggggcttagacgaggtggctgagcctcctcctcctgcgccgccagagagcgttcgaatgctcccgggactgtggccggatgattcgtcgtcgtcggaggtgcgagaatgagagaggtctccgggttgggcaagtgtcattgtcggattagccatgtgtttgaggtttgggttgggaggctgagtaaatagtgaatagtgaattgtgtgagtgaggaagtagagtatataacaaaggccaatccttatgggcccggccttagtgggatgggacccatagaaggtttcctaacatatgtcaatcaacacaaatattcttggattgtgatccaaaggcttagaaaactcaaacttaattttttcacattgagtaatttgcggcataaatacttaagttttatgtcgagtagcagataaatacctaagtcctatttttggcggtaaaaataccttccgtcactactctagaatttccgtaggtacctctccgttatgtgccaagttagtgtccacatatcacattgtgattggtctagatagatttatttttattttttattttaaataattatttaat

SEQ ID NO: 355669 - DNA, 604 bp, Cannabis indica
tggaagaaccaaaaaaaaaaaaatagaaaatagaattttttacataaatacaaaatgacattttactttattttaccctttttttttccttttttcttatcatttttatttttagttttagtttttaagttagtgttctagtttatctttccatttctttattagtttttcattcaaaacctagttagatcaaaaccaagaagcctcctctctgacgagttcttccataatagtgaaggacgatggaagtttgaggacctcaggcctttggggtttcggggctcgtggaggtcagccatggcctcaatcttggttgtggacgaccgatgtcaatgttgggttttgtgccataaataaaactcatttcaatataataagatttactaattaataaagattagaaatcattttatgttgcatggttcatgttgaccgaggttttcggcaaccaataaaataatagaagattagagagcggtaagaaaataaaagaaggatttttacgtggttgggcgttaatgagccttagtccacgagtttgtgtatttatgagtgtattaaatacagagaatgttcttggtgagtatttactcttcttgcactt

SEQ ID NO: 355670 - DNA, 661 bp, Cannabis indica
aaaattggaaaaagaaagcaaaaattcaattttctctcaaagtcttcctctctgtttcgaacccacctagaggcagctagattttggttgatttctcagcattttcaagctggttttagcaaggaattgtgatctcatgttcttggtaagattcttgtagctctctcttaagtttcttgaattttaagaaaaagaaattttgcatgcttagagtttatgcttgctgtggtttctgtggttaattgttgttgtgtttagaggttaaagcatgtttgattgtgttgatttaatctggttatagtggttgttggtttgatttaagtaagttttggtgtttgaactcaaatcttgaatttcaatggtgaaatggtttttagctactgtggatgttgtttgtgtttgaggatgcttgttgtagttatattatagttatttgaagtgatttaagtaggtttttatggccaattagttggatgagcaagctttgagtttttaaactcaagcttgactcatcaatggtgatttttgtatttgagcatgaagctttgttttgttgctttagaattgatctttgggctctaattagcaggtctggcaagtttgaattggttgggggttgaattggtcgagttatgaaattttgaaaaattcatgtagtgaa

SEQ ID NO: 355671 - DNA, 1329 bp, Cannabis indica
atgttgtttactaaaattttttagaaatggaatagttgtgatttttcttgtttactttattagtaaacgtaatcggaaggcttaaattaactaaatttccttttgagttaaactatattatatggtagttattttgtaagatatattttaatagacaaaattgtcattatatatttaatattaaaaatataaaataaaataattaaaatccattacccttaatggcattccttacaaaattggtggggaaagttctccttttcttttctctcttatttaatcaagttctccatttcttgattttaataatgtaagtaaacaaatgtaaaggtaaggtcattgattccgattacttattagtaaacatgccattagagtattgggatttagggaatgggaatggaaatgggctggggaatgggaatgggaataagaatggaaatgggcatgggttggggattgggaataagaataggctggggaatgggaatgggaatgggttcgagaatgggaatgggaatggaaatgggaatgggaataggaatgggaacaggaatggaaatgggaatgggaatgggaatgggaataggaatgggaacatgaatggaaatgggaatgggaatggaatgagaatgggatggggaatagaaatgggaatgggaatgggaatgggaatgggaatggggatgggctagggagtgggaatgggagtgagaatgggagtgagaatgggagtgggaatgggaataataatgggaatgggtcgggaatgggaatgggaattggaatgcgaatggaaatgggagtgggaatgggaaagggaaagggaatggggatgggaatgggaatgagaatgtgaatgggaatcagaatgggaatgggaattggccggggaatggaaattggccagcgaatgggaatgggaaagggaataggaatgagaatagaaatgggaatgtgactaggaatggtaataggtcaaggaatgggaatgggactaggaatgcaaatgcaaatgggaatgcgaatgggaataggaatgggaatgggaatgggaatggtaatggtaatggggatgggaatgggttggggaacaataatgggaatggagaatgggaatgggaatgagaatgggttggggaatgggaattggggtttgaggtttggggtttagggtttaggataaggattggtgtttaggggttatatgttagggttaggggtagggtttggggtaggggtagggttttggggttaagggttcagggtcaggggtcagggttcagggttagggtttaggggaatgtgaatgagaataaaataaaattt

SEQ ID NO: 355672 - DNA, 1190 bp, Cannabis indica
ttttttttcgttattttttcttttttttcatggttgtttcatagtaattaattttacctaatttttttgttttaatttttaatttagtatttttatttttcaaatctgaaatctaattatcagtaattaaaattaatttaattttttttaataaattttagatattaatagattttaaacctgaaaatggatgaaatctaattttttgcttaattagttacttatttttaaaatttattactctatattatttttaaatattaggtcagatattttatattttgcattatgtaattaattttataaaatgaccttatttgatatttaaaataagatgtatcttaattgaaataatttagaaaattttaaaaatctaacaagatattttgtcaactttcaattttttttattttatttaaattaaattataaaattagataaataatatttatttatcattttattttattagaaatttaattttattttctattaaaaataatataaattttgaaaagttagttggcattttttgaatagatatctaggtttgttaaaaacctaatgttgcaaatttataggtttaattttaaaaattaattatttaattttaattaatttttttcgaaaataattatttatttatttattttcgaaaataatttaattgtctaattaatttaaattaaatattatttaaacttgttttataaaacctattattgtttgagctaaatttctatggttaacttgttgacatatccaatgatctaattttaacaaatatttcaattgtcaataggtcaaataaataatttgtaacaggtaaattttacaatcttctttcatctgtgtataaacatagtaacatgatcgaatccatccaaatcagcgtgtgtttgtgcctatatgtttgctttgggcctagatgtatacagggagcccatttaatttttgtaattaaagtggactaggttgctaaaatagaattatcactttatgatagattttatttaggtccaattaatattggacttattcaatgaataacaattgtttaattaaggttaaattccactcttttgggcattgtgtgagagctagggggccattagtagtggctatgacatacagaatcctgccctcccccacatgaataaccccaatttgtgaaggctcatttgccttat

SEQ ID NO: 355673 - DNA, 724 bp, Cannabis indica
acctaaatcttggacccgatcccaaacactgtcttggacctagagagggattcgaatacaaacctgcacacggaccaagacccaaacggggatcggaatgctagacctacttttggaacaagatcgtgaccgagacccaaacctggacccacattcgggacccaaacttggacttggacctaaatctgggacccgatcccaaacatagacttggacctagatagggatctggatacaaaactggactcggaccaaaacccagactgggatttaaatgttggacgtagatctggaccgagatcctgacccagaccaaaacttggaactgcatttgggacccgaactatgatgtggacccgaacctagacccagatcggggtacataccttgacacaaacccggacacagactcggacccgaactcaaacccacacaatgaatcagccccaaagttagacccggacccggacacaaactcgaaccagaccaggatcagaaccaaggacttagacccagaactgcatccagactaagatcgggattggaacttgcgactcggacccaacctagacaaagacccaggacgggaacacacacccagagcctgatttggagctagactgaaattcggagctgaacccaaactcagaccatgactcgaactccaaactaaaacccaaactcgaactcagaatagcaaatggaactagagccgaactaggac

SEQ ID NO: 355674 - DNA, 804 bp, Cannabis indica
gttcaatttcagtttcgggtcccatgtttaggtttgggtccaggtcctagtccagcttcgggtccttgtctgagtcccaaatcaagattcagactatgggttttttccaagccccagttcccggatctcaggacaagatctggatcccaatcacaagtcctagtatagtttcggttcatgtcccaggtcttagtctaggtctcagtcttggttcgggaccgagactagggtgcagttctttgtctcgatctctattctgggtctcgagtcctgttccatgttcgggtctgagttcaggtgtgggtttaggtccaaagtctcgattcgggtttggattcaagtttgggacccaatcctagggtgggtttgtttccgaatccgggtcctggttctgttacagttttcggtctgggtcgaggtcccgttcttggtcctgttcctgggtcctgatccgcttctgtttttgtttccagtttcaagtcacggggtacgggtttaggttaagtttgggtctgagtctgggttcaggtcttgatttgggtcttgggcgaggtttaggtctgggtttctgtctcggttagggttaaaggttgggtctggtttcgagttcgagtctagatctaggtcttagtcccgttccaagatctcagtccggttccaattcaagtttcggttttggttcccaagtgtgggtctcggtctaggtctgtgatcggatcatggtttgagttcgagtttgggtgcgggttctagtctaagtcctatatcaagcaccgactacgggtcaggtccaagcatcgagtc

SEQ ID NO: 355675 - DNA, 513 bp, Cannabis indica
acaagcatttgttatgctcttttggggtgtacatatttcattttctttctaaatcaagtaacttacttgtttggtattattttttgtatttggtttaagttataatgcttctcctcgtactaggccaatatatctctatcaaaacagaaaaaaaaaagagagcagtggacattcatgggtgaacaacagacaatgagatggttacattgggtgggtttgaccccacttgattttaatttttacccaagtcacagctaaatttgtaggataatgaaaccaagcacatgatttctgtgacagacagattagcattttctattcccctgagcctgagagagactggttctctgaggaagacaatttacaggacatgcagatggtgactctcactgtttatgcttttggtcacattcaaataataattcatcttcttcttaaaaaaacaattcattttggaggtgtttggtaatatttttatatttttaatgttttaattacaaaaataaaaataaa

SEQ ID NO: 355676 - DNA, 1308 bp, Cannabis indica
atgaacgttggcgatttctagcaggtgacctccgttctcctggttgagtccaaagatcttcctcattctcatgagggatttctctttcatcgatttccgattgtcttccatctggccgttcatcctgattttcagggggtgtctcattttccccgggttgttcttcccgagccttttcctgtctcctggttcatgggccacgaggtctgccttgtgttcttctcactccaagttcaagtgaattttgagcattcgtcccctatgcctccctggccgagactgcatcgcgttctaactcagcgtttcgacgttgcgcctcttccagacgatgtctcaggcggcggttttccatttcattggctccttctcccacagattgggcacctccacgattgagttcttcatcgctcgttctggggttctgaccattcccacgctgagttctcctcgggcgtgttgtccgcgtactaggaccaacgtcgggtcgagttcttcgggaacgtgtggtccgtgcactggggccacgctcaggctgagccctcctggaatgggtggtctttctggactgtggattggtagatcttttggagcccatgggctctttcccagaacgatgattagtttcctcatgtggggtgttaacattttctggattttcagccatgaaggagatggtttttcttcgaaagaagggaggatttttttctgagctttttcgcagaggctctcaatgaaagcaccaaactgttaacgcggattttcgttaactaaaattgaacctcacaatattgatctcacaaaaaaagatgaaagctacagaaaaataataaatgaacagagggttttttttgcgtggttttgcagttaaaattctacatagtccacgagtcaatcttattcagatttctgattgtattttttaggaactctcttgtatgatttttcgtcccttttcaggtcttgtttgtcactatttatatttacatagtggacagttaattacaaagttgaccagaatatgtttgcaacaattatccctaaaatcgtgggatttgattacatatcacgtagtgtaaatgcggtttatgatttgaaaattgtatagctgtgattttctcgcttttactgggtaaaaactatcgtgcatttaatacgtctttaattattgtatctggaggtgtctcgacagaaacttgattatagtgatcccaatagcgagctggggtcattcttctttctgaggtcgacaatgtatgtcttgtgtcgatcacagttatttacaaaaaattcttttgactcgccagggtt

SEQ ID NO: 355677 - DNA, 792 bp, Cannabis indica
gagcctcgtatctgatacatgatttaccaccaactatgaatcgctgcagatctcaatgtgttcggccttcatctcatgtgctagttttaggccggcgattagagcttcatattcaacgtcattattggatgccttaaatccaaatttgactgcaacatgcaggtgttgacccccaggtgtgacaagggagattcctacactggatagttgatctatagccgacccatctacatgtagcttccaagtcagcctgtctttactattactcggttgaggtatttgtactggctctgggttgttttctaaaatgctctcttctttacccgtacattcaactacaaaatctaccaaggcctgacctttgatcactgttcagggttggaagataatctcatactgacccaactccactacccatttgagcaaccgtccagaggtgtccagcttttacaatacttggcgtaatggttggtcagtgtatacccgaacaggatgagcctgaaagtagggccttagctttctcgttgctaggattaggtaataagtgagcttttctattaatggataccgaccttcaacttcaatgagtcttttactgatgtagtagaccgggtgttaaatattgttttcttctctgatcagtacgacacttatagcatgttccgtgacagccaggtatattcctaattcttctccgtctagaggttttgagagcataggaggttttgcaagttgcatttttagctcttgaaaagctttttcttattcctccatccattcaaattgcttatt

SEQ ID NO: 355678 - DNA, 557 bp, Cannabis indica
aagtaaacaatataaatcactaccattccattaccaaaaaaatttagtgaacaacatattacaaatattgattccgattatatttcatttattccgttacatttctcatttaatttattccaattctgaatactgtatagtaaacgtgccattagagttgttaagtgttggagtaatttttagtagtaagtggccaaaaatgatgtggatgagagacaaaaaaatattatattttggaatgatgtggaattttgtgacaacttttagaattgtttgcattggagatgctctaactaaatgcaattttcttgaagtttgaaaaacctaagacttaggctatctccaattataattgtacaacttagtattacaccaatatcaaatatgcaataaaattactttttttattctaaccatactatcacaaaaaaaatattttttggcatgaccttttaatatgttatataacacatgatgcatatatatatacaggttaatacgtgcaatgcacgtataattaatttttttaattaaatttaattaagtaatgttaagtg

SEQ ID NO: 355679 - DNA, 672 bp, Cannabis indica
ttgtcttgtccgagttaaggacagtggagtggtttataagccatcaatttctgtttacctcttttcgtggatcgggtttcggacatttattattattattaatttatttgttaagaaaagacatttttttttacttgttaatatattattattaacatgtaaatgcaaaaataaaagcctaattagaatctccaaactttttttttttagtgtagcataatggtattttacaatcatttaatagcttaatagcttcaaagtcctaggtttgaacccatgacctcttcctttttcccatccctccctcaccattaagctagccttagtggcttagaatctccaaacttttacatgtattaaattatgtcttcttaacttttaaggtcgttagaaattcctcttaaaattttgagattgttgaatttaagaacttttgtttaatttcattcaattttactatttcagtaattatttacatactaaaccatactccttatactttgatatctaccaaatcatacccctcgaattttaacatgtactcaatcatgccccctgaattttcatctatgttagtacttttttttttattaaaattagacaaaagtctttaaattcaacaatctaaatagtttatgaagaattggtaacgaccttaaaatttacctagag

SEQ ID NO: 355680 - DNA, 871 bp, Cannabis indica
taaaataatttccaacagtccaggggccattaggtgagtcaaggggcattttggtgagtcgtggaacccttgatacaagtggtggagcatgttgggctttgtgccctaaataaaactctatttcaatgtaatctttatcatttaattatcaataaaagacagaagtattttcatcacttatttagtgtgtcatttggttcatgttatcatttatatgtttatttaatttagaaattcatcccaatccttatcacattaatattcttgtttattgtgttgtcagcatagtggaaagtaattaagattgtgtgattaaatgtattcctagatttatcagtacacatgtgatgtcgcccaattaattaaactgtggtcgtggtagtaatatgtcgtatccaggagaggtaaattaccactaaagattagtatgtataaaatatggtaaaaatataaatgaaatataaataataaaatggtaagctaatggaagtgatcagataaagagtttgataaggtagaaatgtaattatgcaaatcctattctaataggaatattaattcaaaacgcagttgcaattctacaccattaattacaactggaagatatatatatatatattaaaagcacaaattaattaatcttgcataaattgaacatcacttctaacttaagagcatatcatattatgtatcataaatcgacaaaataccactattggcagaatgcagtttacgacatgcaatataataaatatattaaaataattaatagcctaacttacgtaagaaaagtatgactaaacttatataaaagatactattaactttggaagaaaaattagaagattaagaacaatttaataaatgagat

SEQ ID NO: 355681 - DNA, 857 bp, Cannabis indica
ctcccactcaattgtactattgtgttcccaaaatgtaatttttaccctgaccaaaaagtaggcttaactacaaatcaaagaacacaaataacactcttgagatcaaacctaaccatgtcaggattaagatcatttgatctaggatcaactaggtgagattgaattgaatagatattacggtaaatttatcatctaatccaaattcaatatcgctcccttcaaatgtatactccatacacccgaaactggtaaactttgccaatgcccttgaaagaacataacatttatccaaggtgtaagtatacctatcgttgattatcataccagtctaaatccagtgaactgacaaatcagggaattaaactttttgaacatataatcatgattatattccactgtgctgacaacactataatcatgaacaaatacatatgttctggacttaatagaatttatacattaaatataaaaatgaaataaatcatgtgaaccatgcaacataaaatgatttatgatctttattaattagtaaatctgattatattgaaatgggtttaatttagggcacaaaacccaacaggtactagctgatcaaccacttaagaaagttctgatcgagctagaagcatcagggcgcctacttcagtgggcagttaaactaggtcagtttgagatcacctaccagccttaaacaacaatcaaaaggcaagcattagcaaactttaatgctgaatgcactggccttgaagaagccaatcccatgatttgtgaagactaggtccacatgcctgagactccaactcagaatgaccctggaccttcctggaaactatatgtagatggatcctccaatgagc

SEQ ID NO: 355682 - DNA, 980 bp, Cannabis indica
atttacagaaaatacggtctttttatattgtattcatgttaatttgttgttgattttttgttatttgtatgttattttttgttgttattttaatgttatttggatgctatttttctgttgtttttgtgtagttttcttattgttttcgtgttatttttacgagaaaccattaaaatataaaaaattctttaaacctaaaaatttaatttttttacaaaaaaatggtgtcttgtttaattgttcttttttggttgggaacttacaaaaataaaagtaatgtaaaatggggaaaattttacgaaaatactagaacacgaaaatttttatatttttactgtacaaattttacaaaaatatcgtatcaaagttttaaaatacaaaaatattgtgttaaaattttaaaattacaaaaatactgtgttaatttttttttttttaacaaaagaaaaatttattcaaaacaaaacaagcaactgcaacaaaggcaaaaaatcctcaacaagacacacacactatcatctctcaattacatttagaatgtacttatcactctttttcacattggaatttaaaattcctaaaatacgccatttcacaagatattttatctctttacaaacagccttaaccgagctacaaacataatcaaagacacatctattcctattttttaaatcatgtaaattgtagaagcaattactgcattaataactttgtttttcaacccactttgtgacttcgaacacaataagctcaacttgttcttggcaaacgactaactaactaagagccaattcatccactatttcttagtgtagatgcaatctataaacaaataatcatgggattcatcttctaattcacaaactggacagtgagatgatgggatgctcaaaattctgctcaagtggatcttgtaagtaacaggtcattaattgcttcagtaagtatacctgtgttttggcatgatgagcttgttc

SEQ ID NO: 355683 - DNA, 821 bp, Cannabis indica
ggtttagatcttgataatactttgtgacagaaaggatacaagggttagagatctgaacggaaggagaaattttattccaatgcacccaatgtaagatttcatatactttatatgtgtttatttcataatcgttttagaagttcatatttagggtgttaatcaacatacttgtgagtagatctaagatcctggtaaaaaaatttccaacaattaggtggctgagtttggtgttggcgactggccactcaaattattcagccaaggttaatcaatttcacttttatcatttgaggaaaatcaagggaaaaaggaaaaaatttaagaaaaacctaaaatagagagctttctctctttctctctttcggctgaagcaaaccagagggattcaccctcaaagcttcgtgttttctagattatagataaggaattgatcattcttgaagctaaggtaaccctagaaacttttgtcatagaattctttaagtttttactttgtttgattttatgattttgagagttagtggctgttaaggttagagatgtttagggtttgaattctagggttcatttgagttgattatagctttttgcagctgattttgatgtatggaattggatttatgcaagtttgggtttgaaaacctaaactttgatcttaaatggcatgttttgattcagtgggttttgctgtggtttattggctggattatgttgtgtataccctaattaggtactctggaaggtttggttacatttggtagagttttgagcaagaaattagatttcttgggtgaactggtgcaaaccggttagccagtttt

SEQ ID NO: 355684 - DNA, 613 bp, Cannabis indica
ttaactttggaagaaaaattagaagattaagaacaatttaataaatgagatatggagatgaaacacaaaagaataaatatcaatattaagaataaaaagtacaataactacactctaacctcactaatatttttaaaatagttcactcatttttgtcacataaaataagtaaaactaagagagaaataagaaaataataaagagagtataattttactacctctaaaaatctgatgacttttgatcccactcttgatgatttacgtgtgtgttgtacgtgagaaaatggctccagatattagtgtactgggataagtagtggatcattttgatgtgtgcgtcaaagtaaaatatcctgaagacgtgggagtaaacagaaatttgtatgaccccacacgtttatctgatggaaccttcatgcgttatgagccattccaataattataggacattggaccttcatgaattgaactccaccatatatatgtaggaataattacataagacaccatttttttgtaaaatatttacatttttacgttcaaagaatattttttttacatttttatggtttttcaaaaaataacacgaaaacaacataaaatcaacaaga

SEQ ID NO: 355685 - DNA, 528 bp, Cannabis indica
ctagtaccctcctcagtgtcatattgttattggtgtaattaagtatctgatctcatgtaataacttaagaaaatagcttttaaggaatatcgataaccaatcgtaggacgctatatataaaaagtactaaacaccactggtgcccaatagcaataataatacccttaaaactacatcttcaaacaaaataaaaaatcactaattatctaacttttacatcatatcatatatgtattaaatttttaacctttttttttccttcatacaattttgattagtgaaaattataaagagaagttgaataatacttttatatatatatatatattaactaaatttacctccatgtaaaatttaaatcaaatatatatacctataattattgtacttaaattattattacaccctcacataactaagatataatttcgaatataataaatttgtattttttgtagatggatatgtaggtttgtggaaagttggagcaaaatttttattagaaaaaaataaaaactatcgtgaagt

SEQ ID NO: 355686 - DNA, 619 bp, Cannabis indica
tgctctggtttttcaagaataaaaatgtctaaaatgattaattagggttttcaatcctattcataggcagatcgaaagaaagaagtaatcatctcaaaatttaaatgtctcaaattccccccaaaagtgtacgttatgtactcattgctggcaaaataaccgtcttcatgcacgaacattaaaatgcaatttgaggcaaaattgtcaatcagcattaatgagctgaaattgaagagacccgtggtcagggtcacgtcagttcttcaatcgacgcctaggacacgcgtcacccgtccgtacaagactccagattgagtaaagtccacgtgcgaccgggaaggtcccgcgcagacttgggggcaaatgtgattcagttttctacacattgacgtggcaagatgatcgagcgacatatgtctcacatttttgatacctgggtagaggtaaatgtccctagcagcctacacataattcgtcaacatctatgattgtcaattacctgagtagagttgtaaagaagacatctgacgaggtagaagactattatgccaagccacttacaagagataattacttcagaatgatcttcttatgtacagacacgaagacaatccctaca

SEQ ID NO: 355687 - DNA, 774 bp, Cannabis indica
tttaatctttaatggtggattgttattctggatgtttgggttggtttgttgcttggttattgtttgttgcaacctaattaggtgttctggaagatttggcttgagttgggcacgttttgggttggtttcgaactttttggagaaacatggtgtaaaacggttaaccagtttgataggtcctgtaaaaccggttaactggatcaggggcaggtttcccaaattgtttgattcgtgttattttcagagccttggttggttaattctttactaattaggatattattaattagttcccaatagcagaacccttagttggggggtttgggttttctagattaggattttggcgtgttgtttcacctgtttttacgatatttagggcattgccttgttatccgtcgataggaaaaattttagtttcaattttaagtccccaaaaagtgatttagcgtgtgacttatcatttttgcgaataatgtgatttaggggtctgtaattcgtcgagcagctgttccactcaggtagtctggcacacctgaattcggaagcaaggtaagattagtataatgatatgcatatgtgtttacacatttagcgtacatgtttattaagcttgttagattacatcgatagtggtatcaatatacgtagaattatattggatactgatagatgtatgtttgactcagctattgatcaacgctatttcatcattacacttagagtatgacttgcatactgagtataggttgatattatggttgatagtattat

SEQ ID NO: 355688 - DNA, 552 bp, Cannabis indica
aagatagtgagatcagatagaggcagtgagtattatggtagatacgcagaagatggacaagcacctggtccatttgcgaagtttcttgaagaaaatgggattgttgcccattacaccttgcccggtacacccaagctaaaatggtgttgcaaaaagaagaaaccgaacattaatggacatggtgcggagtatgcttagtagcaactctaaccttcctaaatccttgtggactgaagctttaaagacatccgtgtacatattaaactgagttccaacaaaggcagtctcaaaaacgccttttgaattatggaaacgttggaaaccaagtttgaatcatgtacgcatttggagatgtccatcaaaagttagaatacggaatccataagagaagaaattggacccaaggaccataagcggattctttatagggtacgctgaaaagtcaaaggttacaaatttattgtccatctcatagcacaagaattgtggaatcaaggaatgcaaaatttctgagaatgccttgatcagttggagtgatcaatcaaaggctta

SEQ ID NO: 355689 - DNA, 822 bp, Cannabis indica
tgaaaagcatcctgaaattgaccttatggattggttgaaatttgttcaaagtcaactaactcttgaattttaggtactaattatatttgtactaagataaacttttaaatacaagtactggtagctaatgtatttttttggaattgtaggaattgagtaaggtgcaatgggaacgttcagcaaaaatccaatccagacatcgaaaaggtcggaatggaatggtgaacgtaagagaagatctggtaagtaatcaataatttctaacaatgtacttcaaaatgtaattgtactcatttaatttttataattaggtagtgtttagttgattggaatggatctgggaatggaatgacttttcctaaagtgaatccatttgtttgtttggtttgtcatttataattgcaaagtttatataaatatatataattatttgtgttttatcacctaatttcttacaactagctagtaattaactagttatttgtgttatgtacttttccttcaatattgatgcttttttagtaaaatttattctaattctaccgaaattttggcagcataacgactgtaattggacgttcccagaaattttaaaaatgtctaaaataacaaacaaaataaataaaacaatacagaacaaacaaaataacatcaacaatataaaatttatccacccatccgaccgtagtacatgtattcgcagaacctacttcactatggttgaatatttaagatatttaaactcaactaacatacatattattacacccatccgaccgcagtacactatatcacagaacctacttcactacggatgaatat

SEQ ID NO: 355690 - DNA, 563 bp, Cannabis indica
gcattacaaaagggattgccccctgcttagaactgaagcaccgaagactacagtgaaacccactccagccagggtgtttgcgataactcaagctctctcggtcaataactcttattactctgtgttgtttgactctggggccattcattcttatgtggcatccataatttttagtaaattggatagaccgcatgatagctatgaaacagggtttggaacccttggcggagaattagtcatctccaaaaggtggtttaggtctatgccgatcagaatagaggatagagaattgagtgctgatttgatagagatgaatttattggattttgatgttaactgggaatggatttcttgtccaagtattcagccagtattgactgtaagaggaagatggtaatcttccaaccagaaggtgaagaaccgtttatctttgtcagctcggttcaaggatctcggatcccagtaatttcagtactaacaactagggaattattacgagagggatgtctaaggtttctggccgtggtattagataccactcgacctgactctgttcggccaga

SEQ ID NO: 355691 - DNA, 557 bp, Cannabis indica
caactatatacaataatgcttaactaattttaatctcataatttaaagtaatgttgtccttacttaatgatataaatagctaattatatgtatacacattattgtgtacaacttaagtatgtatctagcattactctattgttgttattattagtgtaatacaatatagaattttatatattttaatttaataaagaatataaaaactcttttattttgctattttgcatataatttattaaattaaaatttataaaatttgatattaaaatatattaataataatatatcacgtgttgtggtgcttttaataagggaaaagagagagagagttataaatgaacaaaaaaaagaagtaaaaaaattgttctttgaaatttatatatattttttaattttaattattttaattatttttatttttttaataattatttacgttaattaataaaagggtaaataccattttggaccctctgttttacaaaagttaccaattggaccctgtgttttgttaaatgataaaatggaccctgtattttctaaaatagtacaaa

SEQ ID NO: 355692 - DNA, 900 bp, Cannabis indica
attcaataaataacagtataataaattatttaaataactataaataatttcataattaatcaagattaactgctaatttcctaattaactaagcgggctttacacttctggaaagatatcagtaagatcttaacaaccaacatggaggagttccttgagcaagctgatggcttcataaagttggtagaagctgtctggcaaacccagacaagagggtaggataatgacaaacaaacatagggcctcatagcgccccaaacagtgtttatcatgccaacaagcacaaacgatctctacaattctcaaacaacaagaatacgtgaggcaagcacaacaacaatggaactaaccaacataattgcaaaagagggaaattcataaattcttttatgccatgaagtttaaggaagaaggaggagaaatgagtatgcttcactcttctatcaaaactcccaaggcacagcatgtctagacatattagtagggcgagtcagcaacatgcagtaggttgtgttgggattttatgccctaaataaaatccatttcaatataattttatttgttatcaatagaagattagacgtcatttatatttacatgtagcttttatgtttatggtttaatgtgtacagtttttgttaagtccggaacatatagttattcacaattacagtgatgtcaacacagtgaaaggtaattgtgattatatacttcaaaagataatgtcccatgattcatcagtgcactagatttacactaatgtgatagtcatcgataaagcttacttacgccttggataagtgttatgttctttccaggacattggcaaagtatgctagtatcggatgtatggagtatacattggactaggaccgatattgatcttggtaaagatattat

SEQ ID NO: 355693 - DNA, 519 bp, Cannabis indica
tagaacaagaataggaccgcgactagtttccagacccagacctagaattgaacacagacctagcgccagacgcaaactgtgactggaactctggcccagaaacggtcgtgtacccagaccggaactgagaactgagacccacacctagaccaaaatatgggacccgaccccaaacatagacttggacctagatagggatcgggatacgaacttggactcggaccaagacccaggctggatcgaaatgctggacctagatctagaccgagatcctgacccagaaccgaacttggacccacactcgggacccgaacttggacctagacccgaacctagacccagatcggggtcagacctagacacaaacctggacacaaactcgcacctgaactcaaacaccgacacctagaatcagacccaaagaaagacccagacccggacgcaaactcgaaacaaaaccaggattaaaactaaggacttagaccgagaactgaatacagactcaaatcgggattggat

SEQ ID NO: 355694 - DNA, 482 bp, Cannabis indica
tttaaatgtaatctttctattcaattatcaattaagaaatatatttattttcattactcatttagtgtgttatttggttcagtgatcatttatttatttatttgatttataaattcatccaaatccttatcacattaatattcttgtttattgtgtcgtcaacacagtgaaaaataatcaagattgtgtgattaaatgtattcctatgatttatcagtacacaggatttaactactaggataatctacaatgtagtttacttgcaccttggataagtgctatgtcctttctagggcattggttaaagtaagcttgggttggagttgcattatgtgtgttcttaaatctattcgttaaagtcgaccaaatggtttctcgtgacatataggttaaggacatggtagttcaattgagtgggagcgctaattatagatacgaaatctatagcttctatccgaatatagaagtcaaacgatgatttc

SEQ ID NO: 355695 - DNA, 571 bp, Cannabis indica
ttgaatcccatgcaccagccgaaaatgagaggaaaagagagaaaattctcttttgaaatttctaattttttactaagtgtgaaatgagagaaaataaaagaataaagccacttaaactattttatttcagccactaaaataaacaaataacatttatttttcaaataaacaattcactaaaagacaaaaagtcattggggcaaaaagaccattttgccctccaccataaaactcacataagaatcacttttcataattaatcataaacaactgataatttccaaattaactaagcgggctttacacacagactggacctggactcagaactcgaacttgaactgggattggcactcggacccgacttgtaatcggtattggggcagagtttattaaaaatgtattataactttacacaatctattaatacaagtcaatattaaatagaatattatattaaataatacttatataataaaatctagggactttttcatttttatacttctaaacaattttttttttttttcatttttacagaattctagataaaaacccctattgcaactag

SEQ ID NO: 355696 - DNA, 716 bp, Cannabis indica
atagcttgaacaactaaaatgctgtccgtctctaaaatgacatttgacttattattcctctttatccaactcagtgcttctttgacactgagaacttctgcaatttcgagtcggcagctgacagaagaaattgttgaaaatgcctccattactcggccatcgcagtcgcgtgctacaaaacacgtgcctatctcatttgtggctgcaaaaaccgccccatccacattaatttttaactgaccagcaaccggtttggaccagtaatctcttgtgtcagtgcgatcggaagccagagacaccgagcccagccgcttagactgagcactcgtccattgtcgaagagtggtacgagccagccaaataacatcagcagcactacagcttctaccattccaaagcatatcattccgagccttccaaattgcccaaccaaccatgacggcttcttccaccaaccccatattgcccactgccaacacttccataaaccagtcaaaaaaattgtttgttgtggaatggccaacacctaacgcagagtggagccaacatgaatgagcaaaggggcattgaaccaaacatggaaaattgactcgtccccatagctgcacaacacacaatgtaactccaccggaacatgtttactagaaaactgggtacgcgtaggcaaacagcccgaaagagctttccaaacaaaatgtaaaaccttaggaggggct

SEQ ID NO: 355697 - DNA, 302 bp, Cannabis indica
tttttttttttttttacagaattatacataacaacctacataacaactaatggagcaacttaaatcgcaaccaaaatctacatagcaatccacatagaaactaccggagcaaccactgaagcaaccaaaccgtaaattaaaaaaaaaaatgttaagaaatagtatatgaggtaatttccctagtaaatttttataccattaaaaaataaatattctaatataatagacatgaatatctcgtctttttccatttaaaaaatttctcgtcctttatttatattttaattttaatatttagtgtt

SEQ ID NO: 355698 - DNA, 572 bp, Cannabis indica
tagggcacaaaacccaacagcacagccctatttataggtagaaaaatgaaaaaagggtaatcatttcaaaatgccttagacacatcgattcccccaaaagcaaatatcgagattcaaatataatcaagtgtaaccgtcaaacgtggagagagaaagccagttttgaggcattaattgagtcagagcattaattagccaaaaactgaagagacgcctggtcagcctcacatcaaatcgcgaacagacgcgcctaacacgtgtcacccattcaaatgcaagggcaactcggataaagtctacacgtaacttcagaagtcccgtacaaacttggggggcaaatgttatcccaatttttgcactctgacgtggcttcatacgatggtgacacgtggaatcaactctatgtacctgctcgtaggagatatgccaaacaaggtaccacatatattcgcttgcacgaagcctcttaaccgggcagtgagcagtccgaacagcacgccaacacttagcaatttcagctttcgcatcgtgagtcactgaagaaatccttataattttggaatcagatcaca

SEQ ID NO: 355699 - DNA, 695 bp, Cannabis indica
aaagtaattatgctatatatagcttctcattgtttttttctttctacaatatataactttatcattttaattttttctttatttttaacaagaaagttataaagttgtatttcctttgcatagttcttacgttttgaatcgtacttaatgtaactttcttttttattatacgatatatatacattttatatttatgagacttcctacgaaaaaattaattaatgacttatgttatatagagtaacatactttgccatgagtggaatacgagtgttagattagtatctcttctattttccttcaccactaaattcatgtacataataaagaataaataagattatttgtccccaaactatatgatctttaaaagaattttgtcgtccttttaacttgtttttttttgtttgttaaaaatttctctcgaaaactataattgtttcaaatatatcactttttataattacattttgcttatttcttttaaacaatatatttgcttatatatatatatatagtctatttacttttaaacaatatatttgctgatatatatagtcatgatcgtttcacgtatagttacagtacgaaagtctattttaacaagctatttttgaaaaactatctgaaatacagtttattaataatattaaacatattgtaacgtccctgcttcaagcttttattggaccctt

SEQ ID NO: 355700 - DNA, 635 bp, Cannabis indica
ttcatatttaggacgttaatcaacatacttgttagtacatttagatcctggtaaaatattctcaacaactggcctccgagccattgtaatgatttgctttcatgtaatatgaatttaaaacgatgaatattgtttgtgttgttgatttggatgtgtttattttggtttatgtgttattttatgaatgtatgtgaattacgaaatttttccatgaaaataattttatttttgttttgaaaatattttatttggattccttgtaaaaaattaagcaattttggtttttacgaaactcaattttgataaaaattagaaaagttatgaaagtttgaaaatcagggttcaatggtgtcgagtaggtgcatcgagtgcaccaggcactcggacaagaccctctcgtgcgcgcgcgtagggggacacagatgcttgtctgaaatcgtgtcacgcccgtgtcttcagacaccatggatgttgcgcgggcccaggaccctacaggtgccgaggaaactcggtgtgagaccctgcatctccttcaatccgcgcgcggacagggtgcgtgcagccctcctgggaaaccagccaccaaacccgaattttgtgggattttttcaattttttcaaattttcccaatttc

SEQ ID NO: 355701 - DNA, 794 bp, Cannabis indica
gaaagaaattacaaaatttacctttaacaaattatttatatgatctattgacaattagactatgactaaaattagatcattggctctgtgaataaattaataatagcaatttagataaaataatagtaggtttgctaaaaaaattttgaataaacaattaaataaaataaacaatacccatgtaacactctgtgaaattgagatatttattagttatataattaacttattatttgaataaccaactaattttgaaaatttagggttgttgaaacaacctaaaatatcttttcaaaattcaaaattcaaactaattttaaaatatctaagtttctttgaattattttatcaaattaaattaaatttctaataagataaatgatttgaaaataaccaattagatattttgaatatcattttctaatattatattttaataaaattaaaataataaaataaataaattttaaaatagatatggttaggcaattatttatttaagaataaaataataaaaaaaatataatcatctaaattatatgtcaaaatatcttaaattaagcctttttaaatttctacaaaaatatctaggttatttgaatatttaaaatactatttataaatctctcataagtaagatgatatgaaatagccataaatatcatttttctaacttattatttgtaaacaattaaatatttcacaaaataaccaatttatgactttgaacatattatggttatgataaaaatatgtaaggttaatttcaaatttattattatttaatttgtcat

SEQ ID NO: 355702 - DNA, 982 bp, Cannabis indica
aaaaatcctgtgtgtgttcatattttttattttatagcttttattttttctgtgtgcgattgtcacggttaggctcaaatttggttaatgaaatttgcgttaacagtttggtgctttcattgagagcctttgtgaaaaagctcagaaaaaaccctcctttcttttgaagaaaacccacctttatggctgaaaaacccagaaaatgttaatactccacatgagaaaactcatcattgttctgggaaagagcccgtgggctctagaaggtttaccaacccatggtctcgacgaaccacccgctccaggaggactcaacctgagggtggccctggtatgcggaccacacgttcacggaggactcaacctgacattggtcctagtacgcaaacaacacgctcgaggagaactcgacgtgggagtggcgagaatcttgggacgagggacgaagaaccaaaacgtggaggtgcccaatctatgggagaaggtacttatgaaacggaaaaccaccgcttaagacaccgtctcgaagaggcacaacggaggaacgctgaattagaatatgatgcagtcgcgaccagggcggcacaggagacgaatgctgaaaaccaacctacacctggagtgagaagaccacaaggcaggcctcgtggctcatgaactaggagacaggaacatgcccgggaagaacagcccagggaaaatgagataccccttaaaaattagaaggatcagtcagaaccctctcaccgaaataaggatgggaggaaactgaaaactgatgaacgagaaattcctcatgacaatgaggaggatcttgggactcaatcgggagaatgtaggtcacctgcgagaaatcaccagcgttcttcccaaacccatagagtgaggactcgtacaggccctaatgggggaaatacaagaaaccatactcgggggaaagaacagagcgtgaagaagcaagtgtgacctcgaggcggtcaag

SEQ ID NO: 355703 - DNA, 630 bp, Cannabis indica
aagccttgttcatacataggcttttgagactcttttgctccggcccatgaggatacatttaatgcataagccccgcacaagaggtcaatgcactaatactatgcctctcaattatttatgcataaaccaaatataccaaatcccaaacaacttcaaaacaattccaaagtgaaacaaagtacgcaaatttcatttttgttaattagaaaacaagcttaaaaactgcatatatcaatcaaggatttgaaatccatgaaacgatgtacgaaaaccttttccttacaaaaaaaaaaaagaaaaaagaaaagaagcataaatagggattcaaagcttgagactttcacttatgttatgtatatgtaattatgtatatacaattatagtagaagaggttttagattgaaattcaaaagtgatcctattcatacctgccttcagtagagacgagagttttttttgattgaaaaagctttagacacagataaataaatataaatattaaataataaaaggatttttactattatagccttgtatttcaacgattttgataagggttttatggtaatttcgaaaaatcatcttttattttaatttgaaaaataaaatataataaaagtttcttacttc

SEQ ID NO: 355704 - DNA, 1075 bp, Cannabis indica
gacaactagttgatgagagacaccttctatagtgatttacgcctcctttattattcttcatagtcgactcttagtgatagagcaccatgcccacatatagcaagtaaagtactcaatcatagtgcggaagacggtggtaaccaacctgaaggagagaaagagatataggctcagatcttgataatactctgcgatagaaaggaataagggttagagatctgagcagaacgagtaatatgattctgctgcaaccaatgtaaggctttctaaactcttatgtgtttaattttattgttttagagatattcatatttaggatgttaatcaacatacttgttagtaaatctagatcctaataaaatatttccaacagtaatcaacacacatagggtaaaattgtcttacaccataacccctaaaattcttgacattccaaatatctaactatattgtcacactaatacaaagatactaaaccttgtctaagtgactctataggcctaatgtcgcattccactattatcgggcataaaatatggaaatcataaaatttcacctgcttcataattaatacacctaaagttcaaatataactctataattgcataaataataatcaaaagtctgtttcagaatataagctctaattatctattaattctcataatagagttaagcagtcattataattatcccctataaaaaggatttcatcctcaaaatctaacctaaaatactcttgatattgagccctcatatcaaactctaattcccaggtggcttcctccaccttactatttatcctgagtaccttgaccaatgctctagtcttattctgaagatttacatcctttttgtcaaggatctaccctggttgctcttcatatgacaaatctggttggagctctaaaatttcattattcaagacaagagtgggatctgagacgtatttccgtatcataaaaacatggaatatattatgaattgctgacaatactagaggcaaggctacacaatatgcaactaatctaacattctcgatgtaaaaccctaactagcataggcgtgttaacgt

SEQ ID NO: 355705 - DNA, 966 bp, Cannabis indica
gttgatctctatgctttcgcagaagtatagagaggatactcgcatatgtcccgacacatgcgagttggatccatcctctcatcctgcataatgcgagttacagttacgcgatccgactttggtcgtactcgcagtatctcgctggctttatcctggcgaggttcaaacttcgaggagtctctcatggacatttcagcttccattggaaatctgaatatacgtgtcctctaaataggagtcttgtctcgagtttctaggtgagagaaatctcactataacacacccttctcgagaaattgagtttgtgatagagttagttttggtagcggaaccaatatcaaagacactgtatcgaatggctccagtgaaattgaaagaatcgaagatccaactccaggagttacttaacttaggatttaaaagaccaagttattccccctatggtgttccaatattatttgttaaaaagaaagatgggtcgcttcgaatgtgtgtcgactatcaggaattgaataagctcactttcaagaatacatattctctacctcgaattgatgatctgtttggtcagttaaagggtaagacgatattttcaaagatcgaccttcgctcaggttaccatcaactgataatttgagaagaggatatcctaaagactacgttctgtactcggtatggacattatgagttcttggtgatgtctttcggactcactaatgccccagctgtatttatggaccttatgactcgggtattcaaggattacctagacaagtttgtgatagtatttattgatgatattctggtttattttgaatcagaagaagaacatgagctccaccttagatcagtacttcagagattgcgagatcataagctttacgcaagttcaaaaagtgtgagttctggttatcacgtgtcgctttcttagggcacatagcagataaagatgggatcatggttgat

SEQ ID NO: 355706 - DNA, 365 bp, Cannabis indica
ttggaaaagtttaaaattggaaaaatcgaattttgggaaacaatcccatgaaaattcagatttttggggaaaaaacccacaaaatatcgcaaatgggtgaatgtagcccaggaggctgcatgtgcagcccaggaaggctgcacgcagcctcctacgcgcgcggacaaggagacctgcagggagaatgaccggcaaagctcagcgttggcagggtgatcctgggcggataagcaggttcgtctgggcgtgtcacgcgcgcggatgggggcttgtagaccgagtgcctggtgctcacgagcaaccactcgacatccttgaatcccgattttccaaaattcataacttcaccaatttttatcggaatc

SEQ ID NO: 355707 - DNA, 685 bp, Cannabis indica
tcttcttcccaaactcagcttcttaagctcttgatagccaaagtgtgatcatagtaagaagggagtaagctcaaggtagtgtttctaatttcttcccttggttttcatgaaaagtttagatttttggaagtggaatttttgttttgtggctgtagtgagttgggtaaggttttggttgagtttctgggtggaattagaagtgttatgaatgttcttttgtttgccttgctgtagttttgaggtatgaactaaagttgagcttttaaagctcaaagcttgagctttaatggaacttttgatttaagggcatgcttttgatttctattacgttgaaactgttatatggatgatatatatgtgtcatatgaagtttggaatgatttggttaggtttggagcgagtttggagagtttaaagttgagaaaaatcgtgttattggctgttcagaaccggaattccgaatgtacaaaccggaattccgtttggtttgtttttggaaaagtcgaatttcgtattttgcccataacttttcactcgggtatccgttttcgacgttctatataccgttttaaatcttgcgaagagctctatgatacggttgatattttaaggccaaaatataagtttaattatagtgaatttttacctcgaggtttggtaagaaacactaggtgttcctttacag

SEQ ID NO: 355708 - DNA, 604 bp, Cannabis indica
tactgactgtcatagtccatgtaaatcttttcttctaattcaccattcaaaaacacaatttcaacttccatttagtgcacaataagattataaatagcaccaagagaaataagcacatgaatagatataattctagtaataggtgaatatgtatcaaagaaatactacgttttctctttttaaaatcctttggcaacaagacgtatcctgtacttttctaacagtaccattgggtctcaatttttttttaagaatccacttacaactcggtagtagcacaaataaatgccaacttccgtttgactcaagagactccatttcatcattaatatctttattcaactaatcaacatctagtgaagtcaaagcttcttggaggttaatgaaaaaaatattaatgaaactgtagtttttctaaatagtgaaaagagtaatatttactttgagtattcttctattaggatcttgaaacatcatcttaagttcttgttatttcgttgatgagttcttactgccaaaagtatttatccttaaaacacttaacacttgtatataatatttcgagaaactaatataattacaaaaatgaaacgttcaatcattt

SEQ ID NO: 355709 - DNA, 958 bp, Cannabis indica
aaaccctttggcaacaagacgtgtcctgtacttttcaacagtagcattgggtctcaatttctttttaagaatccacttacaacccggtagtaacacaaataaatgccaagttccatttgactctagagagtccatttcatcattaatatctttattcaacaaattaacatctagtgaagtcaaagcttcttggaggttaatgaaaaaatattaatgaaactgtagtttttctaaatagtgaagagagtaatatttactttgagtattcttctattaggatcttgaaacatcatcttaagttcttgttatttcgttgacgagttcttactgtcaacagtattttatccttcaaacacttagctacttgtatataatatttcaggaaactaatataattacaaaaatgaacgttcaatcatttaacgcctctagctaagctcaaagggaactattgtttcacttttaataacacatgaaagctatagatgtgcatatctatgattaacacttacacttaattgcactattgagttaccaagatataagtataggctagtcctatgagcacgctggtaacgaacaagtcaaagaactcgtgcaatagaattaagttggagcttaaccatctcacgattgagataaaatgatctatgaccaaataagtgacattgacttagaaaatatataataaaaagtttatgatatattttccactctcaataccgctctagtttgatgtatagccaatacatccgatcctggattactttactaataccctggaaaaggcattctgtgcttatctaagtgtaagcaaacctcatcactgattatcacatcaatgtaaatcgagtgcactgataaattgtgggactaaataatttgaaacatatgatcataattacttttcactgtgatgacatcactgcaattgtgaataactatatgttcaagatgt

SEQ ID NO: 355710 - DNA, 623 bp, Cannabis indica
tggccaaggctaagaaggaagtatcctccagccagagcacagacaagggaaaaatatttccaagtagggagcttcccaagatgaggatgaaggtgtggatcatcgacttggggacccaaacagtaatgttggacctgtagaagaattagaagagattgagatcgatccagatatcccggccaaaaagctaaatgttggaaagggtttgttgctcgaagtaaaatcagaattaacaaaatttctgagagcaaacctagacgtctttacctggtcacatgaggatatggtcggaattgatcctcctgtcatttcgcacgtcctaaatattgatccaaaattctgactagttcaacaaaagcgatggctattagacaaagagcgagcactagcctaaaagaagaagtacaaaagctacgcaacaacaatttcataattgaagctttctacccagcttgggttgcaaatcccgtactagtacccaagccgaacaagaaacaatgagtgtgtattgatttcacaaacctcaacaaagcatgccccaaagtctgttttctgcttccaagaatcgatcagcttgtggatgcaacaacagggcatgaaatattaagcttcatggatgctta

SEQ ID NO: 355711 - DNA, 482 bp, Cannabis indica
tctaattttcttacagctctctaactttataatattttattagttgctgaaaacctcggtcaacaataatatttaaatagggatcataaaataactccacagattgcataactccaagaataaataaaaatacgattaataagtaaactaaacttaaaaggaactacaaagcgtttcaaaaatatatgtacccataaaaattaaatataaatttatttttctcttggtcgaacaactaattaataaagaacaaacaattaaatagcaatctaactttaatatactaattttttttgctagaatacgaaaattaattaggaatttatacattgcattaacttaaaaaaaacacttaagtaatctcagaagaataaataaacttaaaagcaattacaaattaattttacatgtactcaatgttgggttttatgccctaaataaaactccatttcaatataatccattttattcaacatcaataa

SEQ ID NO: 355712 - DNA, 649 bp, Cannabis indica
caaattcatcctcaaaactggacaactcggtctgatcccatcaccctgatggtgtgagagggacaataaaacctagaacctcttaaaccaatagcatacaaaactaccaccgatagtcttcgtatccagcttcctagatttaggggtataaggccttacctccgccttgtttccccaaacgtgaaagtaatgcaaactcgatttcttgcctgaccacagctcgtatggcgtctttggaaccgccttgctaggcacttgattcaagatataagcagcagttcttaatgcctcaccccataaaaactctagtaagctagaatgaattaacatacaacgtaccatatcaagaagtgtgcgattccttctttcaacaattccattatgctagagtgtacctgacattatatatcttgcatcaatgccacgttcgtgcaagaatctggcaaacggcccgggttcctatcagtttcatcataacgcccataatactctccacctctattagaattgacagctttaatcttctttcccttttggagctcaacatttgtcatgaaaatcttaaggcatctaaagattcagacttctcacgaatgagctcaatatgaccatatcgggaaaaaacaatcaatgaaggtaatgaagtatt

SEQ ID NO: 355713 - DNA, 564 bp, Cannabis indica
gtcagaaaaatcaccaaaaaaataccaagaaactggttttttcatcaagaaactggtttcttcatcaagtaattggttttttcatcaagaaactagtttcttaattaagaagccagtttcttggtaatttttctgacaaatatgccaattttgattacttttctaaagtttgctatcggtgccgaaaaagttgccggagtagctgccagtgtcagaaaagtcgtcagaattggcagtgtcaccggaaaaatcaccaagaaagtggtttcttcatcaagaaaccgatttcttcttcaagaaaccagtttcttgttgatttttttagtgatttttgcgacaacaatgccaattctgacaaatttatcggcgtcggcagcaactccgacaatttttccggtaccgacagtaaactccgacgaattttctgatatcagtgacaaataaaactacctaaacaaataaaaatattgaatatgggatttgaaaacctaatttacatctatatgacttatcaaataccataaaaagacctaaaaattaaaaaaaaaaataacaatataaata

SEQ ID NO: 355714 - DNA, 1273 bp, Cannabis indica
aaaccaagttttgagtcaatagaaacagaaaggattggtttaccagattccataagtaatatccattgatgtggtaaccaatctttttgagcttaaactattatgctaaaatgacaactaaaagaagaaacaagttaagctgtaattgtcaatcttaatgaggagtatgtgtcagtgtcagcagttgactctataatctatatatatatccaaagaagcattaacttcaggagttgacaaagtaacaaagatttcatgtcataaacactgtgacattccgcattcttgtataaattaatggaaatttttaataataataataataataataataataataataataataataataataataacttatacaaaaaatagaaattatataattttttaaataattttatggatttaaagttgaaatttttttaaaaaaatactaatcaaactattttaattaaaaaatccctaagtaaaataggaagaaacattagagctatggaatatggtactttatttttgggcttgggcctcatacggttttgggcttgagtcttgtggaaggcctggtcctggctttataaagtataacccataaacttttatttggtatcaagacagtgaccctaaacataataaaatataaagaatttttttaatccttctaacttagaaaatagcttttcaataagttgtcaaatggtaaccataactatttaactagagactaataacagattaaagaagactaataacacacttaactaactaatactttttgtattaattaatatataattagtaatgatacattttagaagatgttgactaatgatcctatcagttcaaatagtgactaattaaagtacattcaattattcaaaaatatgcaattaacaataaaattgaaaatccaacatacataaatctattatagaattttataatagagcactactaatactaaggaacatcaaggtgtctaacactactatgaggttacgtcttataattagttagcgattttttttataatctttaataaagtaaaataaatgagagagcgctgtctctctctctttctcatgaaaccataagctcgtaagctccattttggcctctctctttctcgtgaaaccgtaagctcgtaagctccatcgcccctaccccaccttcacgtagccacctccagggacggagggactttagcccatatgtgggctaaagccctcactcaaatataaacatcaaattttttatatgtagatatata

SEQ ID NO: 355715 - DNA, 439 bp, Cannabis indica
aacatacttgtgagtagacctaagatcctggtaaaataatttccaacaacagcatgggacatgtggaacatcggatggaaattgccagccctctcttcaggttcatcagaatggaactcacacaaacccttatcgggagaacaaggtgaatcaaaccttaagaggaagagcgaggtccgacggcagtcacgacaggggtgacctacgagagcatctgaacttgaagaaacttgatcttcgtcaatgacttggcccaaaacacaaggattcactccatttgcaaatggacgagttggagaataagtttcaaagcatcaagtcaggaaacccagaaggcgaccagggtatgattccgttggataatttgaattggaagctttgcggttgaagaattttatgtggagatacgagtggttgattctatttccacacctatgct

SEQ ID NO: 355716 - DNA, 607 bp, Cannabis indica
gcccatgaaaatttccctttattatacttttttttaagggggtttattgaaaaatacatcttttattcatcaattaaccaaatttacttttaattttatatttaattgaaacatacctctttttatatgtgttgtactcaaaatataaaaatagtatatagtctaatttcctcttttttaataccatatatttttttaattattaacaatttattcactaactcttatctcaatttttactcacatgacgtggtatgtccacatagacaagattgatgctacatagagtacagcttgtcagaaagaaggccaagtcaccatgcacaacgtaccacttgacgaggagtccaaatacttaagcaggacaaagagacaatgagctggtcaaccaagggggtctggtcagaccaccccccggccctattggcaacataggtcggctaacctctcttcttgcaggcactttttgtgcctctggagctttcagcttggacaacacttccaattacgaattgggcttcaacaacccatgaatataggagattaactttagttatttacctattctttaggactaattaacatgttatttttgttggaaattatt

SEQ ID NO: 355717 - DNA, 257 bp, Cannabis indica
taaaataatttccaacacaacctccacaccctatgaagggtcgggggtgtaccccgagcttggacccttgagggtcggggtgtatccctagcttggagccttgagggtcgggagggtacccctagcttggacccttgagggtcgagggtactcctagcttcctgaggtcggggggtacccctagcgtgaacccttgagggtcggggggtacccctagcttagaccctcgaggatcggggggtacccctagcttggac

SEQ ID NO: 355718 - DNA, 589 bp, Cannabis indica
ttttttacaaaaatactctctttttataaatcaaccgtaaaacaacaaaatagaacaattaaaacaacaataaaacagtcgtagaacaacatgtgaaaacttaacatagtatacagtattttaaaataatacacagtacttttgaaaaaaattctgctccacagtaaaaaagaaaaatgttaaaaatttcagtatgtagtgtaaaaattctatgtttttatggctattcagatctgatctaattatatattagatgttaaattttaccattcgatccaatccaattaattttaattacccaatcgatccaacatccattggatattggattggatcggttctatatgttagatgtatttgatatatatttattggtttaatttgagtttatttaatattttagacttaatatttttagaatcggataagattcatctaatattttaagtttagtatgtattgaaataaattggatcaatctaattcaagaaaaaacaaaactaaagttagaaatcagtcacattatttaagaagtcaaaaacgtgattctagttattattttttaaatatatatatagatattattttt

SEQ ID NO: 355719 - DNA, 703 bp, Cannabis indica
tttaaggggtttttgccgcaaataacccttaaatataatattattcttatataaaactatattaattagttaaatataatattattcttaaataatattaaagagaaaagtatattgttttagagaaaatgatatttattttaatcattgtgaaataagagaataatgagaattaatcaattattatttattagtagaataaataataaatcttatatgtggtaaaattaagaaatcaattttggcccttaaaatatggcccacacagtaggtccattctacacgtgtagggtgacatataaaggctcatgattaattttgtttgattattttattaagttaagataatttaaattaaaattaagttaattatcttttaattactaattaattaaattattggataattatttaattgaaagaataattattaaaataaaagatctactgatattttgatattcggttattagatatttatatttgaattttaattctgattcaaatcaaattagatatttatcttttattttaaataaatgattaaaagttttatttataacactaaagggatatataatatcataattaataagccagcgaacactaaaaatagaggcagataacaaactgaaagtagagaaaatagaattagatttttcaaccaatattttctctctcacacacgcctctctctctctct

SEQ ID NO: 355720 - DNA, 687 bp, Cannabis indica
tatactgatttgaacaatgatagtttaagcttttttaattatgttcaatttttatgttttaaagtttatttaaagataatttcctaattttatttaagataatatactttatattgtaatggataaatttattttaatgcttaatttcttaattttaatgttttatttctaattaataatatatttatgaaataattattatatataaaataattattataattaatttaattatattaaataatcaaaataatattttttttaatatttaaaatattaaaccggcgaaacaatgattggggtccgccggtattaatgcatctgcgtgtaaaagtgcagacattaatattggcggaccccaccgctattaatccgccggtattaatattattaccggcggaataccatttttgtcgctaatagtcacttatagcaaccaattaatagggacggataattaccggcgaattccgccggtattaattattactggcggtctctcctattaataccggcggatgcctccgccggtaatgtcataatctgttgtagtgagaacacaatagattgaacattccatttagaaaagagtaaaatcgcgagtgaagcataagtgattcaactttaaactcttgcacctcggataataatattatttaaataataataatatttaaataataataa

SEQ ID NO: 355721 - DNA, 948 bp, Cannabis indica
ataatatcttgtagtagtattgagtaccaattgtattttttcataaatattttgttccacgtgcatagcacttgtatgatacatcatatagaacttatgaagttcctcacttggtttcacacacctcatataggacaagaattttaggagtagtagtgtaaataagcatttttgttgagatgttttaacattagtaccaattaccaaatattttttcttttaaagcatgtatattttttttttcaactaaaattatattattgtgttttctatttttgttttttctgattaaaataaaaaatcgaaaatcataaaataaaatgaaaataagtggtgctaacaataaattatgataactaaacaaaaattaaaaagactatttctaatgtttaggatgtactttttttttttcatttttctaaataaaaaaaagaaaaacaaatattgctagtagtacttgcccaatttataaattaaaataaatttaatatttcaagagtattatgatttaatattaaaaaaaatggttcaaaaaaaaaattaaaaaaaattaagagttattgacggcttaaatttttattttttacattttagtaaaagttaaccttaattttttttttttttttttaaaaaaaaaaatagcacaattacctcataatctacttttacattagcaaatttaaagtacctctcgttagttagttattattgttgaatgtcaataaaaattgttcatgtgtacataacatatgaactaacactacttgaaaatagtatatgtctttagttttatttagaagacaataggtctttaatacttcatatcaaaaactctctttttcttctttcttcttttctatctctcaaacaaaaatcaacgaaccatcaccacttaatcttcatttctccatatatcattattttctctcattttttttaaatcttaga

SEQ ID NO: 355722 - DNA, 775 bp, Cannabis indica
gttacccgaatcccgagtcaagatctggatcattgtcacatgtctcggtctcgttctggttcaggtcctaggtcccatttctgattttgggttcgggatctagattggggagcagttgtatgtcccgaccctggtttcgtgtccctagtctggttccatgttttggtctgagttcaggttcaggtttgggtctcgaggccaggtttgggtagggatccaggtctggctcccaattcgggtctaggtctgattttgagtccggcacctggtctggttacggttctgcatctaggaccaactttagttattattccaagtccaagtcctagttccaatcccggtcaacttccaggtttggttcaaattttaggtcacagcgtaggggttcgggtcaacttttgggtttggaactgggttcaggtccgagtgtgggttcgggtccttgtcagggttcgggtccaggggtgggtcccaaaccgagacaccgactatgggttttgtcaaagctttgggtccagatccagatcccactttcgggtccctatctggttcaatttctggtgccgagtcacgagctgggtcctatgttcaagttggggtctaggtcgggtactaggtcccaatcctagttttgtttcccaggttcctatcctgattcttggtccaagtcctggttattgtgtgggtttgggtcccggtctacgttcgggttcgagtcctagtctcagttcgggtttaggtttctttctcggttttgatctgggttcgggtttgg

SEQ ID NO: 355723 - DNA, 502 bp, Cannabis indica
tcctcggatagagtcatcaagactagatccatggacacagtgctaggagtacaggaactagagattgaggaagctgctgaatcaatggaacagtgtcatgaggaaaatgaacattatgcagagaggattctttcacctggagaatcggagcaaaccaataggaggcaaagtgagattcgtaatgacttctcagattggctctcgatcgcaaatcgaactgctcaagacattactactgtgaaaaaggtatcaccccctattctcagatctaatattgtacgcaatcttgaaaacttgtttgaactttctaagaaagaggttgagattggctcgaagaagaagattaaaattgattttgaggttatagcagaggaagttaactactggcaaccttcattagtttgctatgtaattggagcgaatcctcctatcaacattcttgaagggtttgtgcgtaggctgtggaaggaagaagttgttggaatttattttaccaggatct

SEQ ID NO: 355724 - DNA, 941 bp, Cannabis indica
gctttggccttgcccttacctacacataaacatagctctgtgagtcaacaaactcagtaagaaaagcataaatcatataacatacataaatcccgggttatgatcagacgcccatacccctgaccacaaccctaatccccgtgtcccacacggtactgagtctcgaacgttcgtacgacagtacttttgacatagtaacagcctatactcggtacgctagtcatactctagccgtactgatgtgttactgtatcagcctatactcggtatgtcagtcatactctgaccataccgatgtgatactgtcaaatagtacggtactatcgaccataatatcagcctatactcggtacgctagtcatactctagccgtaccgatgtgatactgtcgaatagtacgaagccaacatacatatctaatgtaatctaacaggcttcctaacatgcacgctaaacatgtaaatacatatgcatactattatgctaatcttacctcaatttcgaattcaggtgtgccggtcaacctgagttgaacaatctgctcagcgaattacaggatcctaaatcacaataatcacaacaatgataagtgacacgctaaatcacttcccggggacttaaacttgaaacttaaagtttccctatcgataaatagcatggcaataccctaaataacacaaaaattggaaaaactagggttcccaaatttgtccgaacaggtagaccggttccccaatcggaattccggttctgggaaaaattcctggaagccaaccggaattccggttcctacaggcctccctgaaccggaattccggttcagtgcacgaattggtcaaaatttcataactcgacaaaatcaacccctattcaaacaaaactctccagacctactatataaaccacaaagaaaatttttaaagcaacaaaacaaccctaca

SEQ ID NO: 355725 - DNA, 828 bp, Cannabis indica
aaactaataattgaaatccaaattgttctgaaaataaaacaaatattaattcaaaaataataattttaaaaatagaagattccgagcttcatcttcatcttggactatctccacccatctgtccaaccatccgattcaactcgctaggatagcatccgagttcaagcagctggagctgaaataagaagaaaaataaacatggttagtaggtccagaattaacaatccaagtggataataattctctaaaacacatgagtttatagcatagaaagaaataccttgtttctttgctagaaacttagggcattggggtttccagtggcccttttcattgcaatagaagcattttccttttggcttatcaccaggagtagcagcctttttctttttaattgttttcacagcttgaacatgctttttgctattattccacttcttcttgttcttgggtttggaagtagaggcaaagtttgcctcagccttagccgccccattagcattcccagaattaggagttttagatccctttttctgtggtcctccaataaaattttcaaatgtctgaaggttgtttaccaactcatgaaagtcaagttccttcttattcatgacataatttgaagtataaggaagaaaggctggagtcaaactgttcaagatcagactcacttgagttgtctgatccataacaactccatgattctgagcttcttggaagtaactcgccatttggagaaggtgatcacgcacgttctgatgagggttcatccgtgcattgatgaaattccttgtcgcttcaaagcgagattaattgatgccatcccga

SEQ ID NO: 355726 - DNA, 676 bp, Cannabis indica
tcttctttaatttagcaaaggctttatagatttatgatttagggttttctatattaaagcacttttaggaatatgtttggatctgtgatttatatatttcttaagtgttttataaaccctaacactgtaataatagagattctaaagccacgggtgctcctgaccaagtgccggtaatctagtcacaattctgggatttacacaaatagggtgaacccctaattccacatttataaaatatatacatggcattcgaaatatatataatcacatagagctcggaacgagctttccaacggtatatagaactcccaaaacggagttcgaatcacaaagttatgcattttcaaggttcgcacatgaatctgcccagaaacacgagggcgagccgcggcatgcaaaagacatgccacgacacctgggaccaactcccagattccattcaaaggggcgggccgcggcacctgagttccaaacccaaaaaccagcaagcttaatcacgaatttcagcagcaaaatacatccaaatcattttaaatccacatacaactcaaagttattctccatgaattagcaagctcaaagataaggcattaaaatacatataatcatgcatcaaaacccactatataccttgaaaattcagattaaatatcacacaataacaagcttctcc

SEQ ID NO: 355727 - DNA, 1550 bp, Cannabis indica
tgtaggtaagggcaaggctacggttgaggagccgtgagagcgagcagatgaagattgtacatgtcgagggggttaggcctggagcgtacgatcctcgggacatcaaggccttttgttgtttagtcgctgggcgacaaatattttgtaaagaaatagtaaacttttgtaactgtattttgtaaacaggatcctagaattttataaatgcaatatattaagttttaaataattaagcaaaattttaattaatcacaacttccaataatctcaacgagctgcacagtacgttaaaaatcacgctaacacacctataatagttagggtgttacaatttggtatcagagctgccaagttgtcttctgaagatcgtcacgacatgtacaatcatcatcaacagtcagctcgtttcatggttcagtaagctttcattgcttacaatctgaccagactagctcttggtagcctgatagtagcctgatagtagaataggtgcatgttttaatttccaaataagcggcatttgtaagttttcttgattacaatctgaccagactagctcttggttatggaggcagtgcagattagtatggacgccaggcgaaacaccaggagccagggtaattcagttggatcaaattaaggtcagggagctcagattcccccaaatgtccgtggccgaggtagaggtcctaggtgcagggcacattgccagggtgatattaacccgccacaggttgcccaagctgcccaaggtgctcaggatgcctagaattgggaaaacaggtttacagaaatgcaaactagaatcaatgaacaagaggaagtgattcggcagttaagacagcagggtgctcctatagttcctgcaccagaaataccagtagctcctgcccctgctgtgcaggccgaacccgttgtcgcaatgaatcagatggaacccctgtatgaaagggttcgtaagtaggcacctctagttttcttgggaggttcaatgttatgaaagccgagcaatggctaactatgatcactaggatcttgaattttatgggcttcactggtaatgatagggtggcctgcgccactttccgatttcaagaagacgctttggtttggtgggacatggtgtccatgatttatgacgttactacaatgacctgggagaattccaggagctgtttaatgtcaagtattttaatgaggcagttagaagtgccaaaagaaaaaaattaacacagctgactcataaagataatatgagtgttactactatacgactcagtttgatcgcttggcaaggttggcttcgggaattgtgccaactgatttcagtaagaaagagaagtatctggatgggttaaatgcgaagatcagacatgacttgatgattactaatgacaacagaaccacctatgctgaaatggtggataaggcactgcgagttgaaggcatagtgggatgcatagttgagtctcgtgagactccggttgttggtggggctcctacctttcctacatcaagctttagtaggggagctagtggctcggccactg

SEQ ID NO: 355728 - DNA, 851 bp, Cannabis indica
gctgcaatcttgtatcattcttcttggtgaacagcgatgcaaaagtatcccatgcttccttcggtgtcttcgccggcctgatgtgctccaacatctcatcttcgactgtggtccgaatcgcaaacatggctttgcccgctttaatcttccatttctttaaagcggatgcatcctccggttgtgtgacttcattgccaccaacgatctcccataagtcttggccttggagatatgcctccatgtgcatcgaccacgtgttgtaattttggttgttaagtttcttaattccgccgaccacttgaaggtcacccatcgtgcaaactctgtagtactaaaccacacacgatcactctaagaaactcaacaaaagactctttcagaacaaactcgatccggctctgataccacttgttggacaccacaacacgtgaaaacgtaattactttattattgaaaaagtaattacaccaagacttagaacactttttactagaccacaatacaccaaatactcacactcttattttaatactatacacttttacaacactcttgtgtataactcacacttttgaaagactttagggacactttagaacacactctcactcttttgaacacactttgaagacactcttgttggatgcacaacttgaagacccatgacccctatttatactactcaaaagaaaccaactataatattctagataattctaactaattgtgttactaaaatattcttgaaacttctaatgactattactctctacgattctagaaaattctataatattaccaaaatgatagaaagttctagatacttgtagagtaggtgttgatctttaaca

SEQ ID NO: 355729 - DNA, 556 bp, Cannabis indica
aattccaaattctctctctaacttcttaagtataattttgttcatgatggtatgtacgttattattaacacaaacattattttttgtaaatattttaaaagttatgataatttacagtaggttaaattttttatttttaaatataaatggtaaataaaacatctaacaattttgttgctagtcactataagaaatatcaattttaccagtataatttattattgcactgataaaagtaacttttacttttaccagtagatttcgtaaactgcgttggcaaaaaggtcaaagctttaccattgcacatttgcagtggctaaaattcaactttttctagtgcatttacgcgctgggaaaaatcatttttcccgtgctttttattttgtgctggcaaaaattctaataccaatgttgatttgccaaccccttttgccaacacatcaaaagtaaattctattttacgagctcaataccaaacttataccagtacaaaaatgtactgacaaaagtaacatttcttgtagtaaatattgtagcttatttagatttttttttt

SEQ ID NO: 355730 - DNA, 687 bp, Cannabis indica
tcagtaacagaactcccaacaatgtcccaatagttctgatagaacattgcagacataccatcactaccggggcttttatctggactcattgtttttaaagctgtctgaacttcggctgctgtgaagggtgctgtgagtgatgaatttacttcaggcgaaatggtgctgggaatagttgcaacaacttcagcaatagcatcatgatctgcttctgttgcagtaaataactcaccaaaataattagtaattatgcctttcatgccatctttagaggtaatcttgttcccattgctgtccaaaagagagacaattttattctttgcttttcgagatgtagcatgtgcatgaaaaaattttgtgttttggtccccactttgcaaccaatcaacacgagatctttgttgccaatattgttcttcttgttccaaaagctcatctaaaacattctcagatttcttcaaatcatccataagtaatggggttcgtacaggctggttattgagtctggtgacattcttttgagcattggaaatcctatgtttcaaatttccaaaagttgagccatgccattgttgaagagaagaagtacatgctgctatattatgcagaaaattatccatggctgagccttgtatatgagattgccattgcttttcaatgattgccgtggcttcttcttgctgtagc

SEQ ID NO: 355731 - DNA, 553 bp, Cannabis indica
ctcattaattacgtaagtatcaaagtatatttgtaacctgttgactataaggtcttaggcgaggaatcaatatataaactggtgcttagtatattagcgagaaaccatatgtcgttgaatgcgaatagcgaggaatcaaggacagtacacataggaagacgaaagcgacacatatcaactgcaaaagcccttactgtacaatgtacaaactagtgtaacagtcggatcggcttgagaccaagtaagcgaggtgcccgtctcactatgggaaggcttcctgtaacttcatccagtttatttcaatgagacttacaaccttggcaagtcagaggctaacattcaaatgagctttgaagaactctttgtaaataagaaccacgatcgtcacaagacatgcatcatcgacctcggaaggaaaaatggccccgactcgctattgagatcactgaaactaagcttccgtcgagacatctccagatacaacaattaaagacgtgtttaatatacgatcattttgacccagtaaaagtgggaaaatcatagttataagatt

SEQ ID NO: 355732 - DNA, 855 bp, Cannabis indica
aagaatattaatacataaattgttatatttataagacataaaatcgatttatcaaatttccccacacttgactcttgctcgtcctcgagtgaattagtgataagatgaatgatgcttaaaaaaattaatctttatgagaaataattttagttttaataattgtacatcaacatataattctaagaaacatataaactcttcaatcattagaatttcaactcaagataatgacaattcaaactcaatttgtgtgtgtttgttcaatcaactcatcatattatcaacattaaaattaattcatgcatgccaataatcaatgtttatctcaaaataaatgagtatttcaataaaaatctactccataagcttaattatcgaacaattttccactaatgtaattacacaaaatctaaacatcaataagattttatacgcttataatgtaaggatagggtggaaggtagataagaaggttgatttaggcttaaatcatatcatgacatgcatatacaacattctctcaaataattactatttgtattccccaattagtctcctcaacaattcaatcttgtatctttttttcaacataaaacttattattctcccccacttaaattgttgcaagtattcatttatttttcattgattttttttttatgaaataattacaacttacaaacattcattctaagggaataataattttttttcctcatcatcacttgtacataaccatcaatattttccactcaatgaaactctcacacccttacaaatacataatatactatggtgtgaaaaaggatgaacaaggaattttctttttttcttaaggctcaaaaggttcatgta

SEQ ID NO: 355733 - DNA, 915 bp, Cannabis indica
tagtaaatgcctttgcaaatgaactctatagtgtgaaaatgctccctggaattgaattatctagagaacaatgggttcagttcatacttaatagtcttcctcctgagtataatggaattgttgtatcttatatgatcaacaattttaactcttccgacatggataagctagaagcagaattgcgagcttatgaacggaacttgattacaacgtcgcccccaatatttgcaaacttgtgtaagaggaaaagaattaaggatgaagcttctaacgatgctgcttcttcaagtacaattgaaggtaataaacttcaatgttcaaattgtaatgagaagggacatcaagaacgatgtcccagacttctaaacaatttgaatgaaggtaatgcttttatttttgaatcatgtgttttggagaatgacaaatccttctagattgttgattctggatctactaacctgttggaaattattttaccaggatcttagatctactcactagtatgttgattaacaccctaaatatgaacttctaaaacgattatgaaataaacacataaaatttaggaaaccttacattgggtgtagcggaagaatatgactccttccgttcagaccccaaaccctggaacccttccggcccaaaagaattatcaagatctgaacctggatcttattcactccttctttagtgctgaaactccttgttgaatgtctttcttcacgatcttccttactatgattgaggtacacttgctgtgtgtgggcgctaactctaatcactaagtgtttcaaaatctcaaggaagaagagagagagagaagtggcggccaggtatagagagaaggctcaggtttttctgaatgaaaagtgtgaaagttaagtgtaaattgcctgaagccttcactatctattt

SEQ ID NO: 355734 - DNA, 488 bp, Cannabis indica
tgtcaaaatggacaacccacaccctgaccctctcctagtaaatgcctttgcaaatgaactctatagtgtgaaaatgcttcctggaaagagcattaattcacacttgttaatgatgaatctgaagttccagaaagcgaatttgctgggaattgatttatctagagagcaatgggttcaattaattcttaagagtcttcctcctgagtacaatagatttattgtatcttatatgatcaacaattttaactcatccgacatggacaagctagaagtagaattgcgtgcttatgaacggagcttacctgcaaggaggccaccctcaagttttgcagacttaagtatgaggaaaggaattaagtatgaagcttctaacagtgctgcttcttcaagtacatatcgtgaaacaattgatggtagagaatgacaaatccttctgaacaatgttaaaattgtaatgagaagggacatcaagaagaacgatgtcccag

SEQ ID NO: 355735 - DNA, 510 bp, Cannabis indica
ttgaagagtctgtttgaggaaaatttttataacatcgctatgaggacttcacacatggatgactttgtgaaataaacctaggggaaaatgtctttggccgaatacagcctggagtatgatcggctgtccaagtttgctggtgatctggtgcccacagatttcaccaggaaacagaaatatgtgagaggactgaatgccacgatcagtcgggacttgaaaattaccactaaacatgacacttttgtaataccctaatgctaaggcacgctacagtattttattttcaattatattgctatctttgctaattaaagaattttctcaaaaaacgtgtcaaattaaaacttttataataaatgttaaactttatagtttacatagtcatttacaaatactaagatcccgtttctatacttttatacaaaatgtaccaagatacataaccaggtcgcacaatgactacaaaatactaaaccccatatgtccgagactgaacactccaggttgcac

SEQ ID NO: 355736 - DNA, 862 bp, Cannabis indica
gagcagacattttttctgaaaaaataagaaatccaacagttaggtcccgaaccaaactctaatgttaaaaaaggaaattgggatcccctaaccgctggaaggaggccccctccatacgcttgccaaaaaaaaaaggaaaccccaaggactttccttaacaagcatcgggtgcaaaaatcccaaaggcagcgacagcagaggaaaggaaaataaaaaaaaaaaagagaagagaagaaaagaaagagaagggacaaaatgccgaggatagaaacaagaatcgccctttgccctaaaagcgttatctcaaaaaaagagataactctaaaagaaaaaaccaataaaggataacagaaaggacacaaataagagagattctacgcattacacagcaaattcagtcaaagttatttcctaaaaatttagcactaaacccagacattctaatcatgctatacaaacaaacagtagacaagtataaagtatcctgaaaacttacatgaagtttgagagctgggggttggtgttgatcgtcgatacaatgaggactggcaacggcggaggaagagcagcaaataatctatggtgtctggaattttttctctctgtaaaggctctgagaaaatttggcaaactagcgaaagtaactaaatgaaatgagaaggctggcttttataggccagaacgtgtgtgaagcggctatgatcaagcatcatcgtacggtgagaatagcaatcgattcacattctacagatctaacggttgggacaagcgttcatcaaggcgtttggaaacgcttgagtacttgactgacacccattaaatgcgccggatcattaatggataggaaacgaatcgttgcctg

SEQ ID NO: 355737 - DNA, 631 bp, Cannabis indica
aaatctgacctcccctctctctttcccctctctttctctctttctctctgtgtctcgcataccctcaactgcacgcacaccagacacagacggagactgcccacacccgtccacgcaagccgcccacacccaaccgcccccaccatccacgcagccgaccgccgccaccatcgctcctatcggacccaacacaccaaaaaaaaaaaaaagagaacaacacataggcatcgggccccatcggacccaacacaatttttttttgaaaaatcactcaacaccatcgggctccattggacccagcatcaggtgccatcagactcaatgagaaaatccaacacaagcatcagaccccatcatgtcttcgtcttccccaacccattagcatgagcatcagacctgcatcgggcctgcattggactacatcgggcctggtggttcggtcgagatgggttcgtggtggaggaggtggatcgacgtgggttttcgttgtggtcggttttcatggtggtcacggcggtcgagcgacggggtggttacgacagtcgggcggtgcggtggaggaggtggatcggcgtggttttgtgtagtggaggaggtggctcggcgtggaggctttgtgggttctgggttt

SEQ ID NO: 355738 - DNA, 538 bp, Cannabis indica
aagaagtattaataattctttcccaaaaaaaaaaagaagaagtattaataataaaagaatcgttattatgttataatggtgtctaacaccattatgagataatactttctacacgttaaaatgttgatagtatttttcgaaagtttaaatatattttaatgaaaataatttatgtgtgcaattaatatacagttatatatacaaatacaaaagtggttgcagtttaacattattaaactattaataaacaacattaatcactttgctaattaccaattaattaatgagtgatttaacaggggaacacatgggttactctaggaatcaaaagtaagacatcaaccgtattttttttggtataaattattatattttagtatatactcgctttagaaattaatttcatgttagttatgtttaaaaaaaataattaaaattgaggtctggatattattttgtaaatatttttaaaaatacaggtttttttttttctgaaggaaaatggtaactttatcaataaaaagattcaaccattaca

SEQ ID NO: 355739 - DNA, 669 bp, Cannabis indica
cacggattttgtagtagaagatgaccgcttcaagtattgtttcttctctctaggtccttgtattcgggggtttatgttttatcgacctattgtatgcgttgatgggtctttcttgaagactaggtatggtgggcaaatgttgtgtgcaatggcactggatgcagggatagcttttgctatagttgacagtgaaaaccacaattcttggacctattttatgagaaaattgaaagaaacgattggtgatgttgagaacttagcctttgtttcagataggcatcaaagcattgttcgtgctttggatatcgtgttccttgatgcacaccacggtgcatgctactaccacattattatgaacatcaaccacaagttcaagactgacgtcttcacgaatcacatttacatgtgtgcctacacgtattcaagatcagagtttcacagagaatttgagaatattcgggcaatgaatgttgcggttgcacaatatcttgagaaaattggatttgagaaatgggtccgattgtactttccaggggtacgttacaatgtaatgacgagcaactgggttgagagcttcagcaacacaactaaggttgcaagaggcttcccgatcactactgttgtagcattcctaaggtccaaagtccaaaagtggtttgcttcacgaaa

SEQ ID NO: 355740 - DNA, 953 bp, Cannabis indica
acctcaaccccaagcggcaccgctcttttcgccgccgttagcccggaatcacaagtcaaagtttggcaattcaaactttgaatagattttttggccacctccggtgtccgttggatgagccgtcttcactactagactcagtttgacgaggagaacaacctacaataagctatttcgcccaactcgctactttttctggtgacatttttgtagctccacccctttccggtaatatcgtatactgttttgacaaatagttggcatgggtgtgatctacttgtcgaggtggtcgttttgatatgtactacctttattttcggtgatgtttccggtacaccgatttttaccgccaccgatagttaatgtgcaccgcttaagtgaggtttaagaactccaaactttaaatacaatcatattatatgtcattggacacgattttgaatgtagaatgcaatgatgataattatttagccatttgatggtataggtgagagtaatatctaagattagactaaacaattggagctcgggacttaagagcttaagatcgtcttttggacaaagtttaacgacttgagagaggtagagactcaatttgattattggacttgatttttatatgtgttgaataacagacacattcaaatttttatgatttacaaattgtttaaaaaaattgaaaacttaatctgcacatttttctggactgttctagggcactgagtgtcaaatatatttttgtacaaatatttatgcatgttatgatatttgggtttatttaaaatacagtcgttatgctgccagattttctagaaaataaaaaaatatatgttcttttgttattcttattatttgcctgttttggttatactgatgagagccatgttgatcatgttcagtgcatattgttgtttcacggcctagtctttttatcatcataggtagatcaggtg

SEQ ID NO: 355741 - DNA, 811 bp, Cannabis indica
ggagcagcaggagcagatccatccgcaactttgctgacggcttcattctcgacttcttcagcatctgtagcctcagcctccttgggaagattccctccaccgccttgagtttgtgtgggcgacatggcgcgaaagcctcagccatttcaacggcttctgctccgaggattgagaagtcaaaatctggaattttggaaagagtggtgtaaatatagtcaaaaactgcctgatcatactgtttcttcccattctccttctcgacctctaagtcgcgagccatctcctcgatcttcctctgagagttcttggcctcgagctcaacctgctccttagacttgcgaaggtcttcaagctccctgtccttatcagccgcgtcttgtttcagtttctttatgctctcctggagctgggcattttgcctcttcagcagttcagcttccttagaaccagcggcaatggctttcatgaacagagtcatcgaatgcaaagccaactccacagagcgcggaacaagctcctcaaaagggatcctctccgccttggatatgaactcctcgcccacaaacttctcctgcatagccagaaaattgcgggctcggatagttggctcgatcatgactttcttccctttgtcttgcacggtcttagccagcttcttggaagaatccacggcaagagtagttataacatcgctcttcctcttttgggaaatgacaggcgatgtcgtcgctgttccactttttagcttgcgattaaggatgagcgcggactttaaaaaagtcatctctgcgaggacaaataaaagataagt

SEQ ID NO: 355742 - DNA, 500 bp, Cannabis indica
gtttgggtttgagttcgggtcggagttcaagtcctggtatgagttagggttcgagtctggatttcagtctaggtccagatcaggttccgggtgtgggttcgcctcctgggtcttggtctagcttgggtctgagtcccaagttccaatcccgatctgagtctagattaagttctgggtctaagtccgtagttttgatcctggtctgtgttcgagtttgggtcccggtctgagtttatctttgtgtctgcttctaggtttggaggtttgagttcgggtctgagtttgtgtctggttttgtgcccaggtcaggaccccgatctgggtctaggttcgggtccaagtccaagttccggtctagagtgcgggtccaagtttgaatctgagtcataatctcggtccagatctaggtcctacatttcgatcccagtctgggtcttggaccgagtctaggttcgtatccggatccctatctaggtccaagtctgtgtttgggatcgggt

SEQ ID NO: 355743 - DNA, 571 bp, Cannabis indica
ttttattttgtgattaaaaaattgaaaaacaaaagtattaccaaacggcaccataatatattgtacaaatccatcttcaatgtatgatgtaaattttatagcaaatttaattcaaaaatgtcttaatattatatttcagctaaattttgtaattatattccattatacaagatgtatatttatatagtaattaatttttttactgaaataatataaaaaaattatttaaatgaataaataaagtattaaaaaacttctaattagtaaaaatcacaaatgagtaaataaaaaatataacattaattatagtgtaaatttaactaaatttctatatacatcaccattaataataatgtaaccggcactaactataggttgtggtagcataggtatatatatgcttaataataaggtttgtctacacatttggtactctgtcttttatctaaatacaagtttggtaccttgtatttttaataatgcttatttggtactctttattttaaaatcatatttatttggtaacctaaatttaaattttttttgataaaatttaatcaatactatcaat

SEQ ID NO: 355744 - DNA, 738 bp, Cannabis indica
gtgacaaattattgttcatatatttaataattctttttgattaatgagattcatatatataaatgtgtatattgaattctttattcaaataattattttttatttttacgtgattatttattgttctttattcaaataatctcacctaataactaataatgttttttctttaattttttattgtatcactttcaaataacatagaaaaaaactagcataaaatttagtatacgtgcctcgcacgtaatttttgctagtatatatatagatatccttaactatggaataacacttttaaacggtgctactattaatgcgcaatgctcgtatttattttggtagattacatgcaagcatttatatcaaagaagacatgcaccacctcgattaccattctagggttatcttttttttttttcaattaatcaaaccaatattcccaaagctcatattaattaataaaagaaaatattttataatacactttttaaaagggatatatgaatacatttttatctgttttagtattcgaaataattttttagtcaaaagttttcgatcatgtaaattatagttatttaaaatattctgcaaaatttaacacgccaaaaattacattcaaatagtatattacacagcgtgattattttattttatatgcgtataaaatagacagtaaatttatttttttatatatattataaattattttaaatttctcaaaattttataaaatat

SEQ ID NO: 355745 - DNA, 649 bp, Cannabis indica
aacatacttgtgagtagacctaagatcctggtaaaataatttccaacatgagcaaggtgccaagttgattagttagagccccatttttcatatgttgatctgaaaagaatgttagaggaggctccgttgtccactatgcaccttgcaaccgtcatgttcctaatttgtgcagcaatgaccagggatcaatgtgtgggaagttaacttaggcagcatctccttatgtaaaatagatggcgagctatccaagctttggttgcttggagcccctctctgcaacggtgaagatatttctcttaggatcatgatggagtgtccaagcatagctacctagcttgctggttttgcctacaatgtggggtctgccaatgatgacccctagggtttcggccattggatgttgcataggctctctgttctgggtagcttgtgcctgagattggtcatttttcacataacaacacaagtggggaatggtcttgctaataaggaattcaatctcccttctcatgttttgacactcgttggtgtcatggaacaatgccctaagtggccatgtaaatggtgtcaggtttcatccaaatacaacaccttggaggtcaaacttcccaaagaaagaggatcaacctagttcatcctctgcacccaa

SEQ ID NO: 355746 - DNA, 705 bp, Cannabis indica
cgccaacaaagaagacaacctttgggtctgatggattcacaatgtttatctcaaagaggaagaatggtggagctacaaagctccaatccaagggagctggtattggaagcaaattgttgctgcaaaagatcaactcaaagaactaatcgatactcaacaattcacatccaacatgtacactatctctcttggctataagttgctctgtccaccacaaactaaagtcgcttagagtaatgaagtgtgggggagatttaatatccccaaacacagcttcatcacttggctttcagttcaaaatcgattgaagaccaaagatagattgcataagctccatatagcagctgatgccacttgcagcttatgctctcaacatgaagaatgggtcatgcatctgttcttcaactgccagttagctcaggagtgtgtgaaacagattaaaagttggctgtcctggggtgttctatccaataacctcaacaagcttcttagatggataaaccgtgcaaagatcagctccttcaagaagaaagttcttgcaggggctgtagctgggttagtgtactcaatatggcatactagaaatgacaaaatatggaataataagattgataatgtagatgcaattgtaaagaaagttcagcttagtgttaaacatagaattgactccctttgtccaaaaaaagtgagtcaaatagatagaga

SEQ ID NO: 355747 - DNA, 1315 bp, Cannabis indica
attaaaattgaattagcaacataattgattttaaaataaatgaaattaatttctagtaactaatttatatattctattatttaattatgtaggaaaatatattaatgttgaaaattaattttaattaattttggaccaacttaatttagaatatatttcttagaacttaataaattaataattaagtctattttattcaagatacttaattatttatttatattccaagaatataattaattacaacatatatttaagttgaaattaatttattaattaatattagaaaaacttaaattagaatatttttcttaaatattaaattagaattaataattaagttgattttattaaaaaatacttaattatttatttctattttaataaattaattaaatcgaaaatcacacagctgtgattcaaactactttttaaaaggtcaacactgacgtggattaaaacacgctgcaaaacgtatctcgcttggtacatgaataacttggtttattcataagtcttccagcaatggcatgagcactagtgtactgagcaaacttaagggctgctctttaaccataaagccttgcagaatggacagtcatgtctttgggttctcaataacaaataaccctggtagtgagctagagtttaccaagagcatgccttcctatagcgagatggatggctcactatccgttatctatgtccttcaagctagaacacttagctagtataatgtatattatacgctaagtattttatcagccaactcaccttgtcaacacatctctacatattgcaaggtacatgcctcgctatgtattatcgatgttatccttgcaattatgtcttgtgacgctaaatggtttctcattaatacataaatcaatacttcgtacatccttgcctcgctaaagactgtgcgatctgcaagttataaagataccctattgacttctgcatttaaagagttattccatttaatatttattaatataattgccattatatttgctggttcatattccatgaagagcattttaatctggttatatccttgctagtggagagcaatcctttggacatgccttgtttaaatctgagaagtcgatacaagttctctaggttccatttggttttcggacaaggatatgattggatatccacgagggatagaatgcctcgcgtataaagtcgttaattaaccagttatccacttcctacttgagtgccccttgtctctcagaatccaagggtcgtctcttttgtctcttggctgggtaactttggttgatattcaagtggtgacagataa

SEQ ID NO: 355748 - DNA, 775 bp, Cannabis indica
tattgaagatattaaaaaacttcatactgaaacccaattaaattgttttcaaaaactatattggaagttgtttttgattgcgtagaagatgtaaactttcttcagtgtttccttgtctttgtatgcctgacctttttcaacttctggttggtgtttgtctgttataagcttctcgttgttgatgtcgatttctggatctagttttttactcttattttcaagtttttctaccatttttttagcaaccagcttcgcatagtcaactatgtcgaatttgttgttttcaaattctcttgtttttgactctcctccttcttctaattggttttccaatgtgtatgattctgttgttggtgtgttattttcaagtattgttgtgttgttttcgagcattgtcacattctattgaaataattatgttctttttcccattgtccattgctctttatgagaactagtatagattccatgtcctgtcatttttcacaatatttcatttacttggcatttttttcatattaaaacaacagtaaaataacactacaaaatagtaatttgttattaatttcgtaatttttctctttgccagattttatgattttttcctggtgtttctatgattccggtgttgatttgttcgtccccaaccacgaaggagaggtgtcgtttgtgttttgttgctgtttacagtataaaagtaaatatattgggcgtggacagtataaaagaaataaaaatgggcttggacagtaaaaatgtaaagtttaccatgtcc

SEQ ID NO: 355749 - DNA, 1977 bp, Cannabis indica
ttgatatcgtgaatgtatgtgtttggcaattcagaaagtatgaaccaatgctaccaatactagtacgccagattattgagtgcatgtggtattatggttggttatacttttgaaagcatgaactagtgctaccaacactagtacaccggagtactgagtgcatgtggtattatggctagttgtacttatagtatagattgatgctaccaacactagtacgactagagtactaagtgcatgtggtattatggtcaattatactatggtcaagaacgttcgagactcaattatacatgtttgcattgtttatgacttgttgataggtgtatgggcacttagtcgtaggtcagttatatatttacgttttatgcttttcttactgagtctgttgactcacagatgctatgttatgtgcaggtaaaggcaaagctgttgttgaacgacaatgagttttgagctggatgaagattgtatatatcgagacagttcgacctggagtgttggatcttcgggacaactagggctcacgattttgtagtcgttgtgcgacatcttttgattatgtaaagttgaaaaatgtagatacgggatcccaaattttataaatgtaatacagtatatgtttatttattaaagtttaaattttatcacttttgataaaccctttgattagcaaaggttgcacagtaatttttaaaagcactgtagcacgcctaaactagtagggtgttacaattttggtatcagagccgccaggttgtctactagaccgtcaagatatgtacaatcatcatcagatataagctcgactcacggttcagtaagcctttacatgttttagtagctttttataattagaaaagcatgatggaaacatgttagtgaaatattgattaattatgtgcgtgtctaagatctcatgtatgaggtcttaagtttattatgttgaccacttcctgattaaactaacttatgggttcacaggctagtatcatatagatacccagagaaatgtacgaagtcagggtaatgtggttggaactagtggcggtcaaggccaccaagaaccccctcctttgcgaggccaaggtagaggtcgtggacaggctcatggtctgggtaatgttaatccactacaaggtccacaagattgggagcataggttttttgagttgcaggctagaatacagcaacaggatgaggagattgttaggctgaggcagcaaggccctcaggttgctcctcttcctcaggttggtatggccccagtaccaatgttgccagcgaaatatcctatagctggcaacaagttagtaccactatatgagtgatttcggaaatagggacctccagtctttttgggaggccctgatgttatgaaagctgagcaatggctaaccactatgaatcgaatactaaattttatgggagtcaccggtagcgacagagtggcctgtgccacatttcagttctaggaagatgctctgatatggtgggagttagtatcgctcacataggatgttgctgttatgagctgggatgaattccaggatttgtttaactctaagtattataatgaggctgttcatagtgcaaaacggaaggagtttacacaattggttcaagaagaatcaatgtcagtgacggagtatacgacaaagtttaaacgattggccagattagcctcaggtatagtacctacagattacactaagaaggaaaagtacttggctgggcttaatgccaagattcgtcatgatttgacaattacaaccgatgatgctaccccatatgcactgatggtacaaaaggctcttcgagctgaaggtgcagtacagtttttgcatgagccccgagggactcagggttcttgtggagtcactgctttgcctccttctactttgggtaggagtagtagtgattcaatttttgattcaaaaaggaagactcctttcagaccaagcaattttaggcaga

SEQ ID NO: 355750 - DNA, 400 bp, Cannabis indica
atttccgaccactcccataaaattcaatattctctcaataacggtcaaccactgttcagcttttaaaacatcagggcctcccagaaacactggaggtgcctgcttcctaaatctctcatataaaggctccaaacggttaccagcaacatattgctcagctggtaccgcaggggctacaggaaccgcagcaggcggttgcgagggaaactcaacaggagcatcccgttgcctgagtcctcagatctcttcttcttgttgctcaattctagtttgcatctcagcaaacctttgctcccaatcaaccggggcgtgaggtaaattctcctgtccaccgctcgggacacgaccgcggcctctaccgcgtccacgaggatgttggggatttctaccacccgaccac

SEQ ID NO: 355751 - DNA, 599 bp, Cannabis indica
gtttgggttcgggtccggatattagtctaggtccagatcaggctctgggtgtgggttcgcatcctgggtcttggtctaggttgggtccgagtcccaagttccaatctcgatctgagtctggattcaattcatggtttaagtatttgcttctgatcctagtcagggttcgagtttaggtccgggttcgagtctagctttcggtctgattctaggtgtggggttttgatttcaggtccaagtatgtgttcgggtttgtgtcctggttttgacagcgatctgggtctaggttcgggtcccgcgtgtgggtccaaatttgggcttgtgtcacgatttcggtcctgatctaggtccagcatttcaatcccagtctgggtctaggtccgagtccaggttcgtatccggatccctatctaggtcaaagtttgtgtttgggattgggtcccagatttaggtccaggtccgcgtctcagtttcagtttgggtatacgaccgtgttcgggcctgagttctagtctcagttttggtctgaggctaggttcgtgttcggttctaggtcagggtgcgggtcctggtcacggtcctagtcttgttctagggtc

SEQ ID NO: 355752 - DNA, 635 bp, Cannabis indica
gtaaaattttatgataaaaaatgtctttaaaggattttctaggcataaactctaacaatatcctacttgtcctaaaataaaactaggcatctcccttaatcccatattcgtaatatgacccataaaagattttgctagtattgtcttatgaatggatcaatcagaatatgttccaacgtaatctttaagactgtcatatcacatccctttattacatctcttagtagatgatacttcctctcgatgtgcttgcctctcttgtggcttcttggctccttgaagttggccaccgctataatgttttcatagtagagtaccagtggtttttctacttctagataagtgtagaatttcttcagccaaattgcttccttagttgcttcacaagctgcaatatattcgacttccatagttgaatctgcaataccggtttgcttaatgtttctctagactacaactctttaaccaagagtgaatactaactctgatgttgaatttggactatctttgtctgattaaaaattagaatcgatatatctggtaggattcaactctcctccagaatatacaagcatgagatctctcattctccgaagatacttgagaatgtgctctacaactatccattgttctaa

SEQ ID NO: 355753 - DNA, 680 bp, Cannabis indica
tcaagtctctcagccatcgtccagttgtccaaaccctcttcgaaccatgccgtgaaggtcatagcagtcccagcaaccgcaggcacacgagacacgccccagcattcctgagcaaaccggcagcgcaccagaacatgtaaagaagtttctggtgcagcattacaaaaggggcagctggtgttgataggtacatgacgaactctaagctgaaaacgagtgggaaggcaattggttgagactcgccataagaaattaagaactttcggaggcaatttcaattgccaaagttgtttccaaaaaccagaatttgaagccatttcgttagcaccttttaaatcttgctgaagcttataggcgctcttgacggtgaatagaccatgatcttctttcgtccaaaaccatgagtcactgctgttgccattagagggaggaattttccaaattaattcttggtctctctcggtcaaaacatccatgattacctcttcatcccattcgttctcatcaatcttcatgagggacttcacaagagcaccagcaagtgcaggatgtctagactccacaaagggattcatatcgtcaaccaaccaaggatctaagagcacactagttgtggagccatcaccaactagctttcgaacacccgcccgaactagaccttgtgcttctaagacacttcg

SEQ ID NO: 355754 - DNA, 601 bp, Cannabis indica
ctttcttcattaaatcacatccccaaagaagactacgccaggaataagaaggattaaaaccagggcctgcctcaaggatagaggaattaggaaaatacctagcttttaaagtttgactaagtaaagagtgaggacaagtaaggaccctccatgcttgtttggcaagcatggcttggttaaaatgggttaaagatcgaaaacccaaccccccaataaattttgattgacaaatagctccccagtttttccaatgaagcttcgaattatcccccgatgaaccccaccagaatttagcaataagggactcaatttccttgcaaagtttagttggcaatctaaaacaggacatggcataagtaggaatggcttggagaacagctttaataagggtttcctttcctgctctcgaaaaccatttgtgatgccaagaatgaataatgttggagactcgatctttaaggaaaacaaaagcaggatacttagacctagacaaacactgaggcaaacctaagtatttagtaatgaaaggcttatcttccaaatgaaaagtatcaaaaaagagatttctgacctctgaatgagtattgggggaaaacaaaat

SEQ ID NO: 355755 - DNA, 660 bp, Cannabis indica
gacattgcaaaaagaaagagaaaaaaaaaagggaaaaaagacaaagccgagaaagcacgaactattctaagccctaaaggcgttattacaaaagacaaaaggcaattcctgaaaggaaacacagtaaaaagaaacaatcaagacacaaaaaagagggatttaacgcatcattcagcaaaatcaggcaaactcattcctagaagttcgagattcaacccagaaatcataaacatgctatatgaaaaaacagtaagtaagcgtaaagtgttctgagaacttacatgaagtttgaaggctgggggttggtgttgatcgtcgataaagggatgactggcaacgacgaaggaagaggagcaagtaatctatggtgcctgaagttttttcctctctgtgaaagctctgagaaaatttggtgaaatggtgaaagtaagcaaatgaaagaagagggctggcttttataggccagaacggatgggagatagctgcgatcgaccatcatcatacggccagaatagcaatcgatttgcattctacagatccaacggttgggacaagcgttcatcaaggcggtagaaaacgtttgagtactcgactgacacccatttaacgcaccatatcattaaatggacaggaaacgaatcgttgtctgcaaaaagcgaa

SEQ ID NO: 355756 - DNA, 574 bp, Cannabis indica
ctaacggtatttcttggtttaacggtgtttttattttttttttccgtcaactttaacggaggctactgataacgttatttaattttataataataaataactcccttttacgggttgttacgtgaataaaccctcaaatagtgagaatattctaattacgaacaaactatgcctcaaattttcaagatctctcggatcaataacccaaacccattcttctccaatgcaaactatcaaacctcttcttcaaaaagtttcaatgtcgtaagccaccacctgaaaatcctaaagcactcctcctccaagaaaggacttcgtttgatctttatgaagtatttcgaggagggcatacagaaagggaacagaggaagagggctggtcttcacccattacatgggtgttaaagtggcaaaggaaattgatcattctgatagtaacgaatacagtaagaggtaccttatctctacaattgaatttcaatgtataattaatcaagagtagtttttctcttttctgttttgcccaattctaagatgtggtcaatgctcacatgtgctagccttgtgccacaacc

SEQ ID NO: 355757 - DNA, 1014 bp, Cannabis indica
ttatttccaagctcacccaatcaaggtgttgactaatcacccactccggcgagtcctacaaaagccagaggcgtccggaaggctcctcaaatgggcaatggagttaagtcaattcgacttacactacgtaccccgtatttccataaaggggcaagcgctagcagacttcatcaccgaatttaatgaagccgaagcaaccgcgaacataccggcaccgtcagcccaaacatggaaagtatttgtggacggagcctccaacgaaaatggatccggagcgggggttgcaatgatatctccgagtggacttcgactccaggcagacctacggttcgacttctcggcttcaaataacgaggccaagtatgaagccttgatagcagggctgagattagcaaaggctgtgggggccaaaagagtagaagtctacagcgactcccaactggtcgtgaaccaggtgtcgggagagtatcagacgcgcggcgaaagaatggccgcgtatgtggcgatagtccgggaactgctccacgagttcacggattataaagtagaaagaatccccagggaaaagaacgctcacgcggactgtctggctaagttagcttcagacagtgagattgaggaactgggggtagtacccgtggaacgcttggcagagccaagcatcaaaataaaagaggccatagcaacggttgggcaagaacccaactggatggtccccatcatagaatacataacgaaaggtgagttgccccaagaaagggcactgtccagaaagattcagtatcaggctcaccgttatgtaatgatggataaaattctctaccgaagaggactcagcatgccttatttaaggtgtgtatcggaccctgaagctaggcaaattatgctagaggtccatgaagggttctgtggagatcatacaggaggaccaagtctctcaaagaaaatattgagacaagggtacttctggccaacaatgaaaaaagattgcatagactacgtccaaaaatgtga

SEQ ID NO: 355758 - DNA, 921 bp, Cannabis indica
aatggaaaaacccaaaagtactgtaaatttgatcaaaatatgattatttacattgtgaataaaaacgcaagcaaatgcaattgtattaagtttggataaaaatagtacaaggcatttaagataaaaaaaaaaaaaaacctaaagtggggttacaaacttgtctttacaaaaatgccactaggggcaaaccattaaatcatcttcctaagcaaatgacgagaggagaagtcaataaacttgagaaagaccgtcttcatatagtttgagaaagaccgtctacacgtagcttaaagaaagatcgactacacatagctcgagaaagaccggctacatgtagagagccttgatctctgcacggacctcattctcctcatcattagaaggtcccatttcctgaagccgagacctcttttccagcctcaggaaactcctctataccagaaaggggctggcataaaagtcctctagtgcagaccttgggttggctggattctatgatagaaacgacaccaacttctctcctgggtccatctgaaaccatgccaaccttcctctggaattctttgtcagcctgaggaggacgtttaatatcgctcataagatctatgcctattcctgttgaggcaaagaaaaaaggtcaatagagcaacaaaaaataataattcggctcaaaccaccattcaccaagaataacacttaccctcaaggatcacttgtgaggatcgcccatggtgggctacagggtttccctattttggattggtcggaagctcctcagccttgaaatccattatttccggctccaattgaggcttgaagttcttggggacaaatggaaaattgttggcgcaccctcgtattatatcaagaaagagatgatccattctgaaaaaaataggatctcactaaaaagaccagagg

SEQ ID NO: 355759 - DNA, 737 bp, Cannabis indica
ctgaaataaaggttaaaaattatgttttttttatcattcattcaaaatttaaaaaattagaaaaaagtaaggagattttccctcaagctctctctctctttcggtttggattggggctgctagggctgggaattttcttgctagttcaagcattttcagcaattttaagggtgattcaagtgcttggtaagatccttgtagcttcatttttagttttcttagtttttaagaaacttgagtattgcatgcttgagaatttgtggctgtggttattgtttgtgggttcttttgatttctgaagtttaattatgttttaaaatgatgattcaagctagtttttatggttgttagttggatttaatctattatggagttttagactcaaaacttgatttttatggcaaaatgaagaatttggttgctgtgtttgtggtggttgttttctgttatttgctgaagcttagttatccatatttaagtagatttaaacaggtttgaatgcatgttagaggggtttagccaagcttgagttttgaactcaaagcttggagctttaatggcatttttcgtttatgtgatttctgggttgttttaatgctttgaaattgtttattgggatatttagaacaggtctggaaggtttggtatgatttgggtttgatttgagtgagttatggatttttgtgtgtttcctgcgaggaaccggaattctggatggtgttcaggaattcccagaa

SEQ ID NO: 355760 - DNA, 714 bp, Cannabis indica
ctacttcgatcaattttttttttgtcacgtagtcgctagagatttttttttatttgttttgctctgataccatattagaattttagataaggtgaatgaagtttcatctcaaaaccaattagcaatgggacgagtagcctatttctcttatatattctattatcttttcacatattagctatgtgagactatctaacaatttaaaaaagtatatgtgtaattcaatgacaaaaaatccaaattattgctacttttatttaagttatatgtaattgataattttatatttttccacagagattgttgtgctatggtagagggataattggtttacataatattttagtaattgagaattagtttacataatatttaggtgtactaatgtaaataaactaatgatactatactagaatgaacatatttatttgcttattatttttattggaacaataccaactagggttgtacaaaaaaatttgtaaatcgtccaaaccgaataatccgcccaaaccaaaccgaaaaaaacgataaaaattacaaaacgaaataactcgaaaaaattacaaaccacccgatctgttaattgggcgggttgaaaataggtccaacccgcccaattaaactgaccaacccgatttcgaattttaatgttttatttttaacttttcagtttttattatatataacataaatgattaaatatataataat

SEQ ID NO: 355761 - DNA, 1601 bp, Cannabis indica
atcataaacttactgttatgtcttttctaagtcaatgtaacttagttgatcttagatcaaaagatcttaaacctgagatggttaggttctggctgaattctactgcatgtcttctttgacttgttcattacagctgaccacttagatcggcccaatacttaaattttgggaacatgttagggccattgagtgggagcactaatcatagatatagaatatatagcttctataactatttagaagtgaaatgatgatttccttagagcttggctaatagacataaacgaaagagctcttatttaagtaattatattagtttaataaaatatcatttataagaagctaattgatttaaggataaaatacattgaaggggtttgttactactcgatttaaatcatctatagtggatctttgattatttagattgaaacaatggataatttatagcgtatctattcttggtgaatagagcattctatgtaatcaggagtgtaattctgaatttataatggagtcaagaggaattaataagatagaaaatttacttggtaaattctagaactacttattaagagctttattacataggcccatggtccctgcactaactaggataatattgttttgtaatctcaattaattaatttatttaatcaattaagattatgttatcctaatttatgtccacttgatgtggcatgtccacgtggccaatatcaatgccacatgggagtacaacttgtcagcaagaaggccaaatcatttactcagcacttcaacaattaagggttctgagtacttagaagggacaaagaaatgacaaactagccacctcaagggggttggctagcaacccctggcctgcccttggccagcataggtcggccagcttttggacatcatatggctgaccaacatgcactctggaggtgcatggctagctagcctttggcttggcaagtttcggtgcacaactttcatttgtagacaacaagtcaaaccatgaattggacctaaataatccacaaaaataaagggaaaatatcaacaccttccctatttttgaggagcaatttagttatttgtattttattaatttattatgtaaatagtacactttacttattttttagagatattagggatgtaaactcaactatataaagagcattagtcaagccctaaaaccctaagtctcaaaccctaagcctcaagctctaagtctgataactcatctcacctctctctaacacacccatttctcaattctcacttgagatttgccaactctggttctcacattgtaatcttaagagaaccacttcagatcccattactatagtgatctaaatggtattatctcttgtatcaatacaactaaaaggggagtaggtcgttacgcactaactaagggggtcaaacctctataaattcatgtgtctatttacttttctattctaattgtttaacacgtggcaagcatcagcattaaattcgaatttgttgtcggttggccaaatttgaggtcagcagtttggtgctttcattgagagcgagttgctaatttatcttatcaaacatctgttggaaattatttt

SEQ ID NO: 355762 - DNA, 549 bp, Cannabis indica
agatcatcaatagtgaatttcctatctttgacttttgagttgaagtgtttagccaccttcttttgataagctgccattcgtatttgagactcatctcagagttcgtcgatttgatccagtgcttcttgtaataaagccttgtttgttgctagatcgtaagtcgtcctcttatgggatgggaacgaagtttcaccgggaccatggcctcacaaccgtatgccattgagaacggcgagtggacagttgtggttcttggggtgatctggtatgccataacactcttggcaattcttcaggccaattgtttttgcaggccagcagcttcttctttagggtgaccttgaggattttattgacggcttctgcttttccatttgtttgtggccttgccaccgcggagaagcttttgatgacttcgtgttggttgccgaagtcggtgaattcttcgcagtcaaactgttttccgttgtctaagactatcttatgaggcaggccatatcgacacactatgtttttgataacaaaatctagtgcttttttagcagttat

SEQ ID NO: 355763 - DNA, 667 bp, Cannabis indica
aaattcatgcacaagttaagaaaataacaattaaagcgaatatgtttgcaaaaatacaaaaaaattaaacatataaattatgttctaaggtttctaacataatgaaatacaattacctggtcggtgagtctcaaagataacatcagttgaatagagtagtcagctcatctaaaatagacaccattctagcaaccttttattcgaccaaaataagaatccaacgttgtcctggtaggcgagaatcaaggttattctcattttacgagcttccaccattgtttcatactctgtaatttaatttctaagtagtcaccgtaggggagagtctaatagaaacaaaaacttacaaaaaacttatcatacgagatcttacggtgttaagtgctttcaacaaataactatccataagggggacgaagtctagcgtttcgaggttatattgaaaacaattaaccactttaagaccaacaatggagattgaatatctctttcattaaagctcattatttaaaataatatatttttaacaaatcatttattttaatcttaatattttgaaaatgaaattacttaatttaagctggtccaaaattaattaaaatgaattttcaactttaatttaatttctaaaaaaaattttgaaaatctatttataattaaatataaa

SEQ ID NO: 355764 - DNA, 754 bp, Cannabis indica
tgagtaagttcttcatctttttcctcttttatgcttgaatatttgattttctgggattctgctgcataactttgtagttcttgaacttgttatagggaaaccatagaaaatttaggttgaggaatgtgaaatcttgaatatacttaaccatgttgcttggttataactgcattttaattttgattccacgatattcagtttcacttgtccatttgggggcttaaagaaaattaacccttcgaaattttgaaattcaggattgtaaacctctatatcatgcaaaatttctatttttgattccttgatcggaccttgtcggtataaccaatctgtttctgttcgttatcccggccaaaatactcatcttgtgtcctaccttttgtagatgaaccctggtgtgttttggggaaacaaacatcgtattgaccatgatcttcttcaatttttgtatgaggatcatccttgtcttcgtgctagtccatcctcatctagtgacagtctctcaaattcaagcttcgaagaaagggagataagcagtgaacacacaccttctctagaacccaaagtgcaacaccatttttaccccagccagattgaaggtgaaggctacagacatttcatctgggagctcatgaagggttggaggcgatatttaccatccaactggacatatattgttcgaccagatatagttgacactttacccataggccgtccaaatcctactgctgtaggtacgcccattgctacattc

SEQ ID NO: 355765 - DNA, 1021 bp, Cannabis indica
actgtctcgatatatacaatctttatccagctcaaaactcactggcgttcaacaacaactttgcctttacctgcacataacgtagcatctgtgagtcaacagactcagtaaaaaaagcataaaacataaatatataactaaactatgacaagtgcccatacacctatcaacaagtcataaactaagcaaacatgtataattgagtctccaacgttcttgaccatagcataattgaccataataccacatgcactcagtactctagtcgtactggtgttggtagcatcattcatactataagtacaactagacataataccacatgcactcagtactctagtcgtactactgttagtagcatcaattcatactataagtacaactagccataataccacatgcactcaatactccggtatactagtgttggtagcactagttcatgctttcgaaagtataaccaaccataatactacatgcactcagtaatctggagtactagtgttggtagcataggttcatactttctgaattgccaaacacatacattcacgatatcaagatgcaaccatatgtacaccaactatcattttaacggatatgtcatccatctggctaacataaaaataaacatttacatatgtatgtgtgctatactagtcttacctcaattttaatttcaggtgtgccggacaatcttagtggaaatagctgctggtaatcgaaggccctaagtcacatttccagaaaaacaaataagtgttgccctaacacttttggggacttaaattgacaactaaaactttccctattgatatacatcatggaaatatcctaagtacatagaaaacactcaattggggtcctcggaaaagtcttaagatggacccccaaattctgcctaaatcggatcgcccgaaactccattattccattttaaaacttgcataactcctgaaattctaagacaaaccttacaaaattttgcagggattctgaaaacatcacaatgaacattttt

SEQ ID NO: 355766 - DNA, 760 bp, Cannabis indica
aatttcattgatttatggaactgatttctttgtcttattatgtcgttttaatttgtatatgactttcattatatttgttagttattttcatccatataataacaaccagaaaccagtttcataaattaataaaatttacataatgatacatagatacaaatttatttaagaaaatactacatatgttattatgtaaaaaccagtttcattgatttatgtaactggtttctatgttttattatgttatttttatttatatatgactttcatcgtatttgttctcaacttatttttatttgtagttgatgatttgagattttaacattaatttttgttatggtcttgtatgagttcacaagttttgttatgatttttcatagggtcaaaactggtttcacagggttaataagtttcaaactagtttcacaggtttgaagctcgtttcaccaggtttaatggttcgaaactgatttcaccgggttcataggttcaaaactaatttcacatgtttcgagggatctataatggagcagctccattttatgatgttattatataattttgattttaagtttcctttttattattttatttttaggttcgaaactggttttcacacttatattttatttttagattattgttatacattgtatgttgtttttattatatttgtgattaattttttttatgtgtgtgtgggggggggggggggggggggtttccgtttttttttttttgttctatttagttgcttgat

SEQ ID NO: 355767 - DNA, 820 bp, Cannabis indica
tttgaatttctttattttttttttctaaacaatagttcatttttttttaatatttactaatatggaacaattcttatactataaaaattttaaagtttgtaattattgtggtgaaaagttttaaacttttatttgttaatatatattgatggttgtattacataaagtataatagtgaacaataaaataacacatgcaacaataataataatcaaataaaaagtttgtcaaataaaaattgaataataaattttgtcaaataaaaaaaatacattataaatagatgaaaaattttgtactaaaaaaatatctaaacgatttcgatttattgtcgatctcatccaaattttatagtttatgacaactttaattataaggtgcttcaaacgtactataaacgatcgaattgctacccttgtaaagacatgattttttattatttattattaatttaacttttaaattaatttaataatttaaaatttttgttttaaacaatatgtatggaatacactataaaaattttaaggttgtaattataatagtgaacaataaaataatacatgcattaataaataatattcaaatgaaaagttatggctctttgtcaaagcaaattatgcataataaatagataaaaagttttgcactaaaaaaaatctaaaatgatctcgattaccgttgatctcattcaaattagatagtatatgataactctaatgaccgcttaagatcaatattttggattattaaatgattagggttaattgcaatattgagttattaattatgatttacatgtttatggagatttatttaa

SEQ ID NO: 355768 - DNA, 632 bp, Cannabis indica
tatactacttatttgttaaccaagtaaagattttttgttcttaaatctataactattagaggttattgtcttttttctctcgttaggtccgccgacttttcttaggcttaggtgcggcttggtcgaggctgtgttttgctactacaattaaatttttgctatagcaattagtcttgtttttctgacatagtttttagtgttttagtcttgtctttatgagatagttctgagtgtttgtcttgtctctgtcacatggtggcttgtcatcaaatcattgttaatggttggtaataacaagtgttctgcgacttgaaggggttggtatagtagtgtaattacgtactttacacaaaagttgagtgctcaaattacgaggttgaatgaactgtaacagttactactattgtatctttggaacaatagaatataagtgttcttgaagttaattatgatgctgcaatctttttcatttgattttagtttaattttttttatcaaacgatctgagaattagatgattgattatttatctagtttctttaattttaatcttaatcgtgtctttaatggaaaaatgtcctaattagattgtaagctattattttagttgattgtcattaataaaattccat

SEQ ID NO: 355769 - DNA, 624 bp, Cannabis indica
cttaggtgagaaatcaatgtatgagctggacttagagtattaacgagaaacgatatgtcgctaaaggataatagcgaggcaccagagaagagtaacacatacctcagcttgcaataagcagactaagtataaaaaaaaccggctcgaaatacaagaatgcgagacgaccatctcgctacgaggaaacttcctattggttcatccaactaacggaagggagactcacaaccctggtaagtcagcaaatttccttatatctgcaatcgacgcaagacacatcttgccgatctcaaaaagaagagtggttccagctcgccattgggatcactacaatcaagtttctgtcaagacatctccaaaatcaataattaaagacgtgtttaatacacgatatttctgaccctatataagtgggaaatcatagttgtatgacttccaaaatcatgcaccgcgtttacattttgtaatatgtaatcagatcccataatttaagggataatagctgtaattacattttgaccagccttgtaattaactgctactatacaattataaatagttgcagacaatctcaaaaaggagaggaaaaaactcttatacaagaggccctaaaaaaaaatactc

SEQ ID NO: 355770 - DNA, 467 bp, Cannabis indica
acacaagaggttagtactcactaggtaagcaaatcaaacagtagtggttacatatatactattcatcaagctaaaaaacaacatatatatatatatatatataagagagttgtatatgcacgagagttgatacagtcaaataatctcatttcacaaaatttctattttaccatatcttcaattatctcatgtcactcacgtaaggaaaaacttaaaataaatttcatcacaagaaaaatccataacaatatgtatatatattttatatttaaaacaaaaattctaaaaagaggaagaaaaagtgaagagaatagaaataaataaaaaaaaaaaagacaggttaagctgaaaccgtgtcaattgtttatttaatttattttgttgcattgggttagaaatgaaatggtctaattcctcttacgttctctctttttttttatctctgtgtgtgtgtgtgtgtgaaatca

SEQ ID NO: 355771 - DNA, 667 bp, Cannabis indica
agtgccaactaaacctctttcatttcttttaagaaacactcattatgctcctaacctccatcatcccccatgtacatcattctccattaaaacagtacaattccactgtggaccccatcccgtccgtgagcaacatatatgttgtattcacacattagaataatatataaagatgccgtcttgatctgttcaattcaagttaaatgggacctacccttttggcccaaataacacgtggacggttctagtgaagccaactcagagataggtatggttgatgcccgctgtagcagagaatcacttatctattcttttactattatcattaagttttaatattagctttagtttatatatatattagttttagttttaagtaaagttagtacatgtaatctttttctttctttttaactttgggaggattttgagtctcaggaacacaaggaataatggaatctaatcatcaatttacctccttgtcctggtacgggtaaccagctgtacaccctgaataaattttctttctttttttttttaatcactaactaaaataagctaggtgtcatcacccatggctgccaccttctcccaccaaggaaaagactaaaataccctttaatgtaaaacttaggtatttctaaagctaggggtaaaatggtcaatt

SEQ ID NO: 355772 - DNA, 413 bp, Cannabis indica
tcaacaacttatccacttcctgcgtgagtgcttcttgtctctcagaatccaagggtcgtctcttttgtctcttagctgggtaatttgggtcgacattcaagtggtgacatataatatcatatctgagtggctctaggcgaactgatcctggtttgccctcaaaaaatttattagttgctattttagttgttcatccaggttcttcccaatgaatacacactttgtgggacttcctggatctaaaataacctcttctaattcctcgatcagtttcaattgattccgttcgtcttgaattcgtggatcaagatcttcatcctgcttctctccttcttcaatcgtgactgccattagctgatgattgacttttctattttgtagctctatgcggtagctgttgggttttgtgccct

SEQ ID NO: 355773 - DNA, 576 bp, Cannabis indica
gaactgcctcagcaagctcctcactgacgagtccacgccctcaaccaggacgtctctgtcagcattgactggctgcccagcctcattgtactccccgaagtcagggggtccaacctcttcctctccctccgcagcgggaggactgcccagacgcacctcgtccagctccttaacatcctggacctcagcgtccccctcacggtcctcctctatcgggactgccaaaccctgtttggcttcgggcagagtggcgagccgagccacttgaggatcagaagcgtcggccaaacgcgtggttttcttcgtacgagccatcatcctatggctgggtacaaggttagaagaatttccttcggtagaaggaggactagcacaaaggcgagtatgaacttcgtgcagaagttgaagtaaatcctagtcgatctgatgcccaagttcccaagactcacctgggttcatctacaaaagaaaacacataagatgagtgttggacggagtatcaaacgaaaaacaagcaaatatgccgatcaggagtactcaacaaattaaagaacgactatgtttaaagaaaagtta

SEQ ID NO: 355774 - DNA, 914 bp, Cannabis indica
aataattttcataattaaacatgattaagtgctaatttctaaattaaactaagcggtctttacaaagtatgtcttcatgttggtcatacagtcactgtctgtcactatcatttcgataaaagttaggtcactcccaagtatggtagttccttatctcaggcttatccgactgaaattgatattcttcatgatccacatgctttagttagctactataatgcttcttataattggggatgatgagctccggtacgtgaacacaagcgcagcaaactatgtcacttttggctctaataacttggactctaccactccttacaatggcgtcgagacacttgttattggtaatgttaataaattacttatttctcatatatgccatactaccattccctcctttatcgatttttatcccttacatttaaatttccttcttcaagtgcctttcattaccaagaatcttgttattgtttcccaaataactaatgataacaatgtctttcatgatttttataaatcatgttgctttgtcaaggacaagttaatggacttttctcctcaaagggtggtctatgttatagtgagattttctcacctagaaacttgagaccggactcctatgaaaaatgacacttgtattcactatcctcagggagggttgagatgttagtgagagacctcttgagtgcaaacctcgcctgaaaccagactcagtgggatgatgtgaccttgacagtgtctagtcgcattcgagtagcttgcatggagcaggatcaaagatcgggttaagactcgcatataccaagatatatgcgaggactataaaggtcttcctgcgaagatcgtttctgtactcagcgagctggtctggatgacctaacatgtaacaccctaatctatagggacgccacgtg

SEQ ID NO: 355775 - DNA, 563 bp, Cannabis indica
aaaaactagattcttccctaaaacatagattcgaccaatccaaccctaaatctaatccaaactcaaaatcacagaggtttaaccctaaatctcaataaacctatcaataatctcttacattttaacccttaatcatgcaaaaatacaatacattgtcgtggttggagaagctgtggtcatgatggtgggtcaacctttgttgggtctattcagagagcgctagagagaagggatcgagggggacgcgagtggtgggtggtgggttgagctccttgttccgttcagagagggagagagaaaggaggaagagagagagagatgtacgggccggtgtgttgaaatgggagagataattttgagttttatgaaaagttaacctattctacaaattttgatacacttaaatttagtgtacacattttagtccaataaaagcatagaaattcatattttcaattttaaataagatttcatgaaaaagaaatgaaaatccaacgtggaagatgaacatgaaataattgagatatattcataaaatttctccaatttttgtagtttttttt

SEQ ID NO: 355776 - DNA, 653 bp, Cannabis indica
actaaataattttagccattagtgattgagtaagtgcccacacacacatcaagttggtcctcaatcaacaagaaggagagaaagagatccaggttcagatcttcataatgctctgctaccgaaaggaatcaagggctagagatctgaacgaaaggagtcattatattccactgcaatcaatgtaaggtttcttaaactttatatgtgtttatttacattgttttacaaattcatattaggatgttaaacaacatacatggtagtaaatctagatcctggtgaaataattccaacaaagtctagtcgcatttgtatggctcgcatagattaggaccaaggaacaatttaagactcgcatatcctgagatatatgcgaggactttcgagatcctcctgcgaattgtaaagatcgattctttactctgcgagctggtccagatgacccaacaacctcaataacccgataaggactgggatgccttaggttgccgacttattacaagatgtctgtataagcgacttgaacaggacacaggcatcctagactcgactagtcttgtatgcatcttaagcctgggagcttatgcaagaatatgaacatgcaactcacattgtaaaagtctcatacattgttgtatttagtgaattaagct

SEQ ID NO: 355777 - DNA, 627 bp, Cannabis indica
catgaaaaaaataagactaaaaagttatcatgaatgttgaaaacataaagagtataccaaaattattcttttaagaaatatactattgttaagcaaaaattccacatttagaatataaaaataaatgcaaaacacaatttcacctatgctaaatttatagcataagagtttattaattttaagttcgacccatccaagattaaaagaataattacgtactgggttggttggctgaacatttttgtgatctttatagtggttggagctccctaattgacttgccctttttaagtatgctggagtgccacttgaagatcgaagtttgaacacagcctgtcgtatcttgaggaaagaagatcatgtcattcaccgaccatcttgctgaagaagatgttgattgtatagaccatgaagacttatctgatgatagatttgaaatgcttgtttctatgcgttcatttatgttttctgtgagagtaggcaaggacttatacattgaaccatattttcccaatagattcgctcgccagtttggatttgatcaaggtgtgtcacttcgttctagtttttcttggaggacacaatgtgggataattattgttgctgaagcttgggcattactattga

SEQ ID NO: 355778 - DNA, 593 bp, Cannabis indica
taaatttaaccatctcaatagtttggagaatttctaaaggctaaaaaaattcaggaacacgatttagttatgtgaaagttcggaaggaaaaattactaattagtctaaaaaaaattaaatagagattcggatttccctttttttcatctatgtaaaacactcccctttttagctttcccccttgcaccttttctctccgtcttttcgaactcactgctcttcctcgacgattcactctctccgtcatcaacgttagctggtgtttcgatttcccggcgttctccagccatttcttcccttcgctattcggtttcacattcaggttagtactctcggtcccttttatgttgcattatggaaatacatttgaaaatcctctcgaaaatacactaggatttcataaacttaactcaatcttaaaagcgatttttgtgaattttgggtcaaataaatacgttaatgtatcattccatacttaattgagtacctaaaatatatcttaatcataatcgattatcatggtgtttggaattgatctttgagttggcgaatggtatatttttttttttgaaataattcactcttggatttat

SEQ ID NO: 355779 - DNA, 732 bp, Cannabis indica
taagtaaaaattaattaaaataataagtaaaatatactaatttatactatttattgactttaataaaatattaaaattgaaagaagttaaggagagaagagattaatagttttagagtgaatttagaatgatatgtcaccgcctcatacttctcttttatatatatatatatatagattataaatatttttattagaaaaaaaaaaaaagagagtaataagattattgtatgtttttttaattaatcatccatgaatttgtatgaaggattgtattaagtatactttagggtttttcttatttatcattagtttaaaaaactttatatagcatatttgtttagtgattaaatgattatatttatggttttcaatcataaattatattgtgattaatgtatataaagtgagtttgttttcttatattggggaagggaaattttgggatatgagaaaagtgtgcaactttttagtttactaggttgtgtctatgactgctgttatcggaggaattcaaataacactaaataaaataaaggttttgattatttaattaaaaaagagcgagcactcaacctagaatgataagtattcaaatgaagctacgcagataaatagaaaaataatgaaaacaacgaacacaagaaaatatagtggttcagtcagattacggtatgcttagtctgttgggttttgtgccctaaataaaaccctttacaatctgattagttat

SEQ ID NO: 355780 - DNA, 1159 bp, Cannabis indica
ggaagggtttcaccctgtgcgcgcggatgtggctggccacttggtcatgacacgcttttgaacaaagcgtgtcagagattccttagacaaggccttgtctgagcctccttatgcgcatgtcgaaagctgcatgtagcctcctcccttggtcaaccatgctcattttgtgcatgaaaagtatgcattgcatactatccgtattgcttgcattttttcaaattttcaaaattttggcttttttccatggattttaatttcaatttttcagtagattttttatatagtttttttttcaaattttaaaactaagtatcatatttaaattaattatttttatttaattaatctagatattagaaagctttgaatttaaaaatatatattattctacaaattttctattttggttagtttattttttaaattttgattttttattattttattttaatataataaggtcatatattttgtatttcatttatttaaataattatataaaatgatctttgatattcaaatatgatataatttaaaaggataatctagataattttgaaaactaactaggtattgatcaattttttaaaagttagttactttatttaaattaaatcatgagattagatcaataataattatttattattttaaagtaacataattttaaatagttagttgatatttttttgaaaaagatatttagggttgttataaccgtaatttttaaattttaggatttattttattttattttaaattaaatgaatcctataactagctatcctatcatgttacatgtttatctatgtatttaatttttattcaattttttttaataaacttattatttatttgatttaaattgctatgactaacttgttgatatatccaatgatctaaattaagcataattcaattgtcaatagatcaaataaataatttgtaacaggtaaattttgtaatattctttcatctatgtataaacttagtaatatgataggacccatccatatctgtgtgtgtatatgagcatatatgtttgccttaagggcgtagatgcatataggaagtccatttaatttttataattaaaatggactagattgctaaattaaaaggatcactttgatagttttatttaggccgaattagtatt

SEQ ID NO: 355781 - DNA, 765 bp, Cannabis indica
aaaatggtgacttttgaacgaggagaactttgtttttgttggttcggtccaaggttctcgtgttccaagaatctcagcgttgaaagctagggatttgttacgaaatggatgtgttggatttctagcagtggtagtggattccagtaaacctgtgttacttggacctgaagaagttaaagtggttaaggaattcctggatgtgtttccagaggaattgcctggattaccacctcagcgggagatagatttcatcattgatttaattcctggagcagaacctgtttcaaaggcaccctaccgaatggcacctgctgaattaaaagaactgaagatacaactccaagggatgttggatctagggttcactcggcctagtgtgtcaccttggggagcccctgtgctatttgtgaagaagaaagatggaactcttcggatgtgtatcgattatcgggagctgaataagttaaccattaagaataaatatcctctgcccagaattgacgatttgtttgaccaacttcagggcaagacagtattctctaagattgacttgaggtctggatatcatcaattgagaattcgagaagaggatatcccgaagacagctttccgaaccaggtatggtcattatgaattcctggttatgtcttttgggttaacaaatgcaccggcagcttttatggatctcatgaatagggtattcaaggatttcctcgataattttgtaattgtatttatcgatgatattcttgtgtactctcggtc

SEQ ID NO: 355782 - DNA, 576 bp, Cannabis indica
aatgataaatacaccctattatttaagaaaaaaaacttaattttttttatctcttaatactcaggatgtgttagtaggtgcaatttatgacatttggctaaacagaaatttgtgtataatgagaaaaaatgtataattaatccgagttgtatagatggtagagaaagaattgttcttaaaaatataaaagacttcatgtaagtttatcttttcgaagaggaatctccttgtggatgtaattagctcgatttaattaataaaagttatctttcttgataaaaaaaatagtaaaatatttcaaattgaaatattaatacataattttataaaaatattaaaacaaattaatttaaaagataattatggtagaattatgtatgtaaataaattggtagcgaaaatatttaagtaattaattttattataaattattagtataaaaaattgataacaaacatcgtaactaaatttttttaaaaaaataaatacttatataaaaataatttaaattaactttttaaagaaaaataataatttaaattaaaaataaataaatttttaatttattaatattat

SEQ ID NO: 355783 - DNA, 1395 bp, Cannabis indica
gataaagtctttaaaagcaaaagaagtaaaaaaatcttaaaaacttacatcgttcccaagccatatcctcggagtatgtagttcgaggaaccaagacgaatcgtatcgaccggtgaagcactctctcgggtacttgttcccaatctggccaagtacccaactgtgaaaagtcctgagcagcttccgatcaaccactctaagtgggtccgcattcacgagtgtcgaagtagccctagccttcttcttcatttcagtgtactcagcgaaccacctaggccgccttctcttcctccggttctccatgagttctggagctgtctctaacacctgcacctcagaatcctgagtatccccgatgctggtgatattcgtcttctcaggtgtacaaaacatgtcatcatcatccggtttgtaatcatttgggagaatgaagtcatcttccggtgactgagcctcctcttctggttgtggctgtggctgtggctgtggctgtgaatctgctgccggccttccaggatcttgcaggagcgtcattatggtcttcaactgatccataatcgctgtttgtcctcttagcagagcggcctgcccttccctcaaagcaatctgccccctctccacagtctccaaccttgccaaaatggcagggtatactggatcgcgagcctctgaggtgctgggaatagaagctgacgggggaacaggaggatcctgtgatgctgcaagtgggtcaacaccacactcatctggaactgaagctgcagatgggtcaacaccagacccatcaggaactgaagctggagatgggtcaacaccagacccatctggaactgcaggcggtgcacgtggtggagacggtggaggtggtgtagagtctttaaatattcgggctgcctccgctcgttcttccaatgtggaggcaagcttttcggcctggcttcgcaaagcatcctgtgttggttgcccatcctcacccaacacaagttcctccaagtcaacaaataacggaggctgacccccggttatgtaactcacaaactcaatctcgttcggccgaggacataacatggagtacactgtcaactgaaaaatataacaaatatattaatataatatatggaaattaacatgaattcaacataaagcgtaacaaacttacatttttagcaaataatctggtcacttcatccttcccgagtgtagtgttcggcttactctcccagttgaccattctcggaaagcgatgcgacctcctcactgcatactcgttgcccagctgtaatatggcctcgtatgcccaatactgcaacgctgcagtatagccgtaggctgagtattttgcctccttctgagtgactcccttctcaatctttttcaacatcttattcttcacat

SEQ ID NO: 355784 - DNA, 515 bp, Cannabis indica
aaaattaaattaatatatacacatataaatacgtataatatataaatatttaacttaataaattaggtgaaaaacatgctgtatagatggtaagtagaacttaaattggccttgaggatcaaggtttgatccttaccttagtcaccttttatacatatatatatttttgattacacacattttatacttttatttgtaaaaggttttacttagcatttcaaaaataaataaataacaatattataacttaaatatttgtattacactatataaaaaaaaatatattaaagtacttttaattttaaaatattaacgtacatttttaatgatactgttaataataaataaaatttatatttattatctattttttttaaaatatatataatttaaacacattatttttttttctttcaaatgtgctaaaatatatagcacttcaatagagatgttcttaataattaaatattacttgatcgagttagcttacgttgcaaaaaattatttattacata

SEQ ID NO: 355785 - DNA, 783 bp, Cannabis indica
caccctgatcgtccgcatggggatcacggagtgtctcagtattatgtgggacgcgagagcgtgccctgaaaactgcgttgaggtgatcacgcagatcacctcgatgtacctgataacgtcctccctgttgtgtctgcacagagccggaccttgtgtacctgcttggagtgcgaccatgcgatgacgaagaggctgactctgcgtcgttgtctcttgatggtcgactgcgaggattacggcgttcagggtcttcatcaacttgtgtgctttggtttggataccttgcggattgatcccttgacgttggatggttcaggtccaaaccttcaaggttggttctccgttccctgcgtacacggttagtatgacgtctagaagtcgttacctgagggttatcggtgcgaatagcaggaactcgaggagggcgtcgggctcaattttgtccatctacttcggcctgtagtgcgcgcactgaatcgcatcatactgatcagtggtgagctggatcattccctcggataccaccgctggagtgacggggggaaaatgcatggttgctggtggcgtggatgtgtccccgacttgagggtcagtcgtttctgggaataggttgagaggtctgatattgcttctccctactccgccgttaatgacgtctacaagtggcgatccagctccagataatggtacgttcatcatcccaatgttgatggactcgttgttaactcctccgttggcgtgatttccagccatgatgatattgttctttgaaatgaatgaaat

SEQ ID NO: 355786 - DNA, 745 bp, Cannabis indica
tacttgtgagtaaatctaagatcctggtaaaataatttccaacactaagagcaacccagccggtcctcaatctatacaaaactttctgcactatactgctaaattcatctaattacaaagcaaagaaccattctttatctacatttgagattttctttggcaaaacaacattaattcgagtccttagactccacttaatgtcacaaacaacctgcttttgattgatctgttcttgctgccatatgagttgatttcgagccttccagctgctgtaaacaagtgcagcaactgctgtagaaaaaactttgctttttaaattttgacacctttgccttctcaatccatcgaacaaactgctgaatgtttgttgctcttgctttccatcccagccagcttttaatctcatctagccaatagctggttgtcttgcactcaaagaacaagtgttgaacattctccttgtattcatcacaaaggcagcaggtttcttgaaccttaatgcccattttcaccagtctatcttttgtttttaatctgttaagcatagtaagccagaaaataccactatgttttggtgtattcagtcgagcccatacctcgttacaccaagttttccttgcttgtggattgctgaacattttatacctaggagctatggtatatttgcttctctgaaacttagcaacatcagcaacagaactgaggcagttcttgaggttaaccagcttctgttggaaattatttt

SEQ ID NO: 355787 - DNA, 823 bp, Cannabis indica
gctgcatcatccccaagatagctgttcgagggacggaaccagctagaagacagataggctgaagagtccaagggaatgggcactggaggtctagaacccatccgggaccggcctaaataatcgcctaagtgagagaagtaatactcctttgcatgatccccccaccgagtggagggcatcctaaacctatggagacgttcgtcgaaccttataggccaaaggctaacatactcacggacaggagggacgtgatgtatcattaaaagggacttaccagaaccaaaagtgctggcatcgggagcccccgtattcggcacctggacctcaggccttggtctgggggtcctctccaccgggctcccgatacgaaggggccttccagcggccacctgggcgttattgtaagcctgctcctgggccttctagaagaagtacttctggtacttatcttccgtcgtggcgataatgtcctcccggagtaccttctacgcggccggaaccctcacttttgggcagatgactttggaaaggttggagtcatccaccgactgatgcccctggatcagcttggccttccggcaattctccgtcgtgaccaactccccgacgtcgagggccttcttgtcatatgtggcgaaggtcttagcgcgttggaggaaaagctgagtaggttcagtccgcgcataaggagggatcctaaccaactccgtggtgacggtactccttcacatgtttctgctggttgaaagggacctgaccctcattcagaggatgggcccggaaaccgtaaaagtcgtccttaagtttgtctccctttttaggg

SEQ ID NO: 355788 - DNA, 543 bp, Cannabis indica
tctattatttctgtgcaaaacttgtcacaaaagaggcttattatcgttaacgaaaatctgtgttaacagtttggtgctttcattgagagcctatgtgaaaaaaagctcagaaaaaaccctcctaaccaaaagaaaaatctttctccatggctgataacggagaaaatgttgatactcatgctgaagagactactcaccgtcctaaaaaagagccaatgggctcacagaggcctcctacattcaagaaggacctaacatgaaggtggccagaacccaaatacagggaatgacgtaccaaacacaagcgttggaggtgctcaacccatggatgacggtgcttatgatcccacgagatacgtaccgattgtcgagttggaaaatcgtcatctcaggtgccgtctggaggaggcaaaccgacaaaacgctgagttggaacgggaggtagccacagccagggcggcacaggaaaacaacgcgcaaaactaaactggtcctggagtaaggagaccacgaggtagacctcgtggctcacgaaccaggagg

SEQ ID NO: 355789 - DNA, 938 bp, Cannabis indica
gtctggtccgatggggtccgatgccggaccgatggtggtccaatgcactgtaaaaattgggctggaagggacaaaggcccgattggcacccaaaaaatagagttcgggttaatttgtggcatcgggtccgatgggcccgatgggtacccaaaaaacagtttttttgttaatttgtggcaccgggtccgatgggcccgatgtgggctcgattgtggcttgatatgtaccaaagaaatagtttctggttaatttgtggcaccgggtccgatgggcccgatgtaggcccgatgggtacccaaattttttttaaaactttatttgtggtgctgggtccgattggcccgattggggccagatgggtacccaaaaaatgggtctgtttagtgtaaaaaaatgggtacgtgcaatttttttgttggggtccgattagtgtccgattgtgtctgattgtttacatatttattgcatttttaagattttagataacttttctgtgagatttgttctaaattgtaattgtatttttttaatgtatgtgataggttcaactgttaatgcattggttatgtataatggtatttgggagcttgagagtaaagattgggtttataaacgggctgaaaatttgatatttgacattgatcccaacgtaagctactcagatttggttgatcttttgtatgaagaactagatattgacaaagtggagtatgacttgaaattggaagtaaattacaagtacatgaaaggttacacgtatcgccctgaagttattggaaatgataagcgtgcaaggtactttttgtctacacttgcgaagaagccagacgattttactcctttgtttgtgactttgttaaagaagaatgtttgtgttgatcgtagtcccacaccaagttctgttaaggacaatcatagcgaggttgagagttttgttc

SEQ ID NO: 355790 - DNA, 653 bp, Cannabis indica
agcagatttatctgtgatcatagttatttaggagcttattgtgttttggggctatgagcaaacaagattttctcatttcctcactttgtcccaatttgtcattgggaattatatatagatcctttgacaaccacttgaatattgagtaagtgaaaaacctaagaactttttattatttatgcaaataaaatgtcttgaacgttgacatcattcaacatttctctcatatatataaatatatgtattcattcagtacttatatgaatgtatatataaatatacgtatatatagtctttctctctcatatatatatatgaatatgtatacattttgtatatgctcttttggttgccaaagccttatatatacttcgcatatataattataatattgtgtaaaataggtaagaatttaaaaggtactcctacatgttttaacgatgagtagtagaagaatattctactagactctccattttaaccaatgtcatagttaggattgtgaagatgatgaatctgaatctcttcctcttgaatctcttaaaacttccttctctcaatgaaagtaccaaactgttgacgcaattttttccaacttaatctaagaagattattaattcaagaaaagaagagacaacaataataaatcaaca

SEQ ID NO: 355791 - DNA, 721 bp, Cannabis indica
catgtcttatttttctttaatgatagtttctcatcttctatagcatgcaaccaagcaactttatttttaccagaaatggcttctatgtaacttgaaggctcatcattctccacatcttcagcaacactaagtgcataggctgtaaattcagcataaccaaacttgtcaggtgcctttgttgttctcctttctctatctcgagcaagctgataggagctgagaatagattgagtgatagtcccagtattgtcattcttggtagtttatgtttcttcaataggactagattgagtagtgtccacctcaatttgatctcctaggctgctggtttctggaggagtagcagtaacagcctttttcattgccatttcctcctcattgaacaccacatctctactaatgatgcatttcttatccctggttctagacaccataatttgtacccctttactccatcaggatagcctaggaacatgcattttagagccctaggttgtaacttgtcttgtctgtagtgagcataggctgagcaaccaaaaaccctcaagtggtcaagctttggtgcatgacctttccatagttcttgtggagtcttaaatttcaaaggaactgatggacacctatttattaggtaacaagttgtcttaacagcttcaccccaaaaaggcctatccaaaccagcacctttcaacatacacctaactctctcaatgagagttct

SEQ ID NO: 355792 - DNA, 691 bp, Cannabis indica
aaaataacttccaacaggcactttgcaaatgtaatggaaaaatccaaactgttcgaggattgctataaagataaaagtgttgggattttataccctaaataaaattcaattttaatgtaattttatattacttataaatgatcaaaaattattttattacttgtgtatattgcttggttcatgcttatatgtttaatatataaattctgctcaatctcgaatatatgactattcatgattatagtattatcaatacaataaaaaataattgtgatcatatacttcagacacatttactcttgagatttatcagtgtactggatttacattgacgtcataatcgacgatgtcatttactcacacttggccaagtggaatgtcttttccaaggtattagtcaagtaatcttgtatcagatgtagtattcgcttatacattgaacttgaccgatattaacactggaaaaaatatcataaacttactgttatatcatttctaagtcaatatcatttcattgactatagtttaattgatcttaatcttaaaatggttaagctttagcctaattgtagtatttgaatgctttgatatattcattactagcttacctacctgtctagcctatacttacatcttgggaactcggtagtgcaattgaatgaaagtgtaatcatagatatggacatctata

SEQ ID NO: 355793 - DNA, 1443 bp, Cannabis indica
caagagattcagtttgattagacaattgtttatttatttttgacaatgatctattttcagaagtaacctgtatccacttttcatacataaccttgtaagactcagctagggactcctcacagatgtcagattcatcagaatcagaattttcttatcaatggtattattcaaacataccaatctttctttcacttatgaatcacaaataaacttaaaagaagctgaggttagtgcaacatttttagaaatatcttcatcactatcagtttcatcgtcactccatgtgacatcgaaacttttcttattctttttcagtgtatttgcacattcagatcgaatatgtccaaaaccttcacattctctgtattgaattctcttttgaatgttagtcattgaaggttttgaaaaagtattacctttggagaattttagaaaattatttttgtcacttatctttttcatgtatttctaaaagtttttagttaaaacatccatctcatcatctgaaatttcttttttagcaacattaaaagcaatacaattacctctattagcaatggacctgggtttatccttctacttgatttattgattcaattcaaaagtacgcaaaaagcccattaactcctctaccttcatcttgctaaaattttttgcttcctccatagccaagagtttagtgtcaaatctgtttggaagaactctaacaatttttctaacaagaatagattcatcaatattttcaccaagagtaaaatattcattagctatattagataatctttcataaaactcagacaaggttttagattcagacattctaagatcatcaaatttgctctgaagcataataaactagaacgcttaacatcagatgttccttaaaactaagtttgaagggtctgccaagcttcttagtagattcacaagaagatataagcttaatatagccttcacctactccattaaatatagcatgtaaagctttgctattataagcaaacaatgtatcatcttcagtagaccattcaagttcagattattatttagaattaccttcaaaatctactacaataggaggagaccattctgaaagaaccatcctccatgctttttcatcttgagaattgataaaggctctcattctaatcttccaataagaatagttagaatcattgaggagtggtgggcgaacgatagaacttcctccctcaaagggaaagatattgtaaaaaacacaagaaaacgttaaaaggatcacactaagagtttagtgtcccgctctgataccaattgaaaaactgagtttttaaaaatgccaataattataacagaaaaatattaaaatatttaactgtcacagtctacagtagcagaatgtaattctgtcactgcagaacacagttttgcagaaacaaacaagaaataaatagtgcagaattt

SEQ ID NO: 355794 - DNA, 782 bp, Cannabis indica
aaaaaaaaataccaaagtcatatatattgtattttttatataatgattttgtttgatgtattataaaaaaatttagaatattactgctattctatcccatatagtctgaatgagtgtagcctcaatgtcctcgaactcaaacttgtccataggaatagtattgcgaataagaaactttatgtaattgttaaacttgttgccaaagtcatctacagggacccagtcgccatatgaaatataatttaaatttttgacctgctggcagcttggctagttcttgttcaatatttttcccttatactttcctctaactccctttttctgacctccacttgaacctgcatcaaccattctacaaatacaagttgcaaataattaattaatcatactattgacgaaagaggcatgtatttcgttaaatcaacaatggcgtctatattacaatacttaaaagtctacaagtcatcacaatcatcatcatcattaacatctacattattttcattatcactatcactagtgtcttcatcatcactataaacaatgaagccatctaaatcttcacggttagacgtctcatgacgacccatgttggtcacttgaattgggtcaacatcatcacgaacatattgaacatcatccaactgtggaagtttaacgactaaagaaattcatgaagagtttcttcttgtatagtcagggtctcatcatcatcctcatccgaaaagtcccagacattgcgaggggtgtaaaaattgccaaggttccaatcaactccattc

SEQ ID NO: 355795 - DNA, 669 bp, Cannabis indica
aagatcttgacccttgagttcaagaagagagaaacctattgaaaccaatctaggaattggaagaggtttttctcgacccaagaaatcctacaaagtgtgtatacattgggaagaacctggacgagcagctaaaatagcagctaataagctttttaaaggcgaaccaagatcagttcgcctagagccatggagatatgatagggatcgaccctaatattatctgccatcatttaaatgttgatctaaactacccaacgaagagacaaaaaaggaggcccttggatttcgagaggcaaggggcactaaaataggaagtggacaaattgttagttaacgactttatacgcgaggtattttatccctcgaggatagccattcctgttctcatcctgaagcccaacagaacttggagaacttgtattaacttctctgatctgaataaggcgtgtccaaaagactgtttcccacttcccatgatcaaccagttagtggatgcaactgttgggcacgagctgttgggttttgtgccctaaataaaacccatttcaatataatcagatttactaattaataaagatcagaaattgcattttatattgcgtggttcacatgatttatttcatgattatgtttaatgtataaattctattaagtccagaacatatttat

SEQ ID NO: 355796 - DNA, 1210 bp, Cannabis indica
tgattgcctttttgttaagtgtatgctgttttcacaggtgttctaacacttaaccttttctcttgttgcagcagccgtacccatggacgaaatcttggccactcttgctggagcccatagtcctggtgcttcccctcctcctacttcttctcagttggtcactcccgggagggcttcctccagtgcccctccgagcactattgacttagtggacgaggaggaggtacttcttgaggaagctgaagaaggtgaagaagagcaagagatcgctcttgtgcgcaagcgcaagggcaagatggtggaggaggagccttctaagcgccccaggagggtggacactccggccccgagtcatgactctgggattccctccgaggcggaggaatacacagtgcctcatggcattgtgttgactccgatccccagagatgaggagaggcagaatcttcggatagccaaacacaactacgcccttgacgagtacactcgggggcatgctgaggtggaggccttgaagagggtcttacgagaggagctgcaaaacactctcaacgaggagaacttgcggaatctgtgggacctgaacatggaccccctcacggactggttcaaccgtttcctcgggcccaccttggcccctttttcctcggagatgactagcgagtatgtctcccatctgactcaattcccgcccaaattgtacgctggttgtgcatccttcaactccgtctaccaggttcaggatatcagcaacgccatggctgtggtaagtacttgtgatttatttctttcctcaatattttgtctaaggcttttattctcactcttatctccttttccatattactgcagagaccagccgcctttccaagaacatagttaatcatggcttcgtcctgtctaagttcgggggcatagacgaggtcgtgaggatccttcgggacctgtccgctgagaggcgggcaatccaagaggaggctgagcgaagggaggcccttgctaaggcgaagcttgaggaggaggccaagcagagggaagcctaggcggaggcgatgctccgggaggaggttctgcggagggataagctggaggtgaggcaccaggaggcgttgagggcggagggcgaagccgttgctagggccaagcgggagcttcgggaggctaaggaggccatggatgaaatggctgccaaggtgaggtccctagagga

SEQ ID NO: 355797 - DNA, 726 bp, Cannabis indica
agttagaatttgaggaataagatgaatgaggttccatctcaaaaccaattggcaatgagagaagtagctcattcctcttatatattctattatctctctacacattagcaatgtgggactttctaacatccccctcaagatggtagctattttatttgctcaccatcgtggacaactcgatcataagcgactatattttggctcactatccctgatcacaagtggctctttttgctatactttttggatcggtatttttggatttttggtagctctttttatttttggctcactatccccgaatcacaagtgactttttttgactttggctcttggatcaacttttttgggtttttagtggttcttttctttcggctctacttcgataggttttaatttttgggttggatagtcgctagagatttttttttgtttatttttgctctgataccatgttagaatttgaggaataagataaatgaggttccatcccaaaaccaattggcaatgagaggagtagcccattcctcttatatattctattatctctccacacattagcaatgtgggactctctaacacactgctcctaagtcgctcatcaatgatgtctccaggggaggagacgatgatgctggtttagggtacggctgtacaaaaaaatttgtaaaccgcccaaaccgaataacccacccaaattgaaccgaaaaaaccgataaaaattac

SEQ ID NO: 355798 - DNA, 856 bp, Cannabis indica
aaaaatgtactaactgttaacttatgtatcgacgagaaaccatgtaaatgtaagtgtgcatgacaaggcattaacctcatcgcgtggaggagatataataacaatagaaataattagcgtatatgacacggtatacaaactaagtataaacagaggggtggatcaaggtgacagatagtgaggcgtctatctcgctgtaagatggcatgcacgcgagaaagatcatctcgacacgagaaactgtagttgtaaaaatcaaagtaaaagcaatatcaacctcaggaagatatatgacgagctccagcttgccatcaagggtaacttgactccattctaagcgaggcatccccatgagataaggcttaccgtctatctctgatatgcgttcattttgtcccaataaaagtgggatattcacagctgtgtaaattttaaataaaaactgcatttacttagcgtgatttgtaatcaaatcccatgattctaggggataatcgttataaaaagattacagtcaaactatgtaattacaaatagtggcgagcaagatcaaacggagggacgaaaaaactcatacaaaagagaccctgaaaaataatcagatatctgaataagattgactcgtggactatgcagaattttaactgcaaaaccacgtaaaaaaaaccttgtgtgttcatacatttttttataacttttattttttctgtgcgagattatcatgattaggctcaaatttagttaacaaaaatctgcgttaataaaaaggatagtctggatgacttaaattagctaagtgttagttagaaatgaggaatgatggattggatgctagatattatttttgtattttatt

SEQ ID NO: 355799 - DNA, 523 bp, Cannabis indica
tcagtgggtgtaaggacccaatggaggcttgaaatggggacattacaacatggtatcagagcgaccaaggtttaaagaccctgaagactattttgatatgtacattggttgtgaagactcattcgactcatggttcagtaagttttaattgttagataatttgttgatttcgttattgcatgtttatttgaaatatgctatttgtttgaaaagcatagtaaaggttagtgtgttagcaaatgattgagtactagacttgctatgtgtggatatgtactcaatcactataagggacaatttttttttttttgaagaacaatgaaggacgttcgaatatagaagaaggaagaagaagtctcaagaactctctagttgtctgacaaattgtagactaggttatgagtcattagttagataatgagaccatattatttcttttatactattttacctagggttagatttaaattatatgacattaaaaaaagataaattagcccaaaatcaccttaagtggccagcc

SEQ ID NO: 355800 - DNA, 865 bp, Cannabis indica
tattgcctcattatcatcgtatcacatcctcaagatcaccagtacatatattaaatctaaaaaaaataaacaaaaagaaaattcaatttttgaagcctatgagggtatccttgtttattttcgtatattgtattcttggatgacgaaaaactcacaccgtagtcttctgaatctttcaccacacacaaggactagtaggatataatgtatatgaagttcttggtttaattcttaacacatgagaacaactctttttggagagataattattaaccaacttaaatatctataactaccttttaaattcaaatttaaatagatatttatcttttgaattaattaattaacacaaaaataaatctagtttgacccaccatatcttataggcgcatatcactgtgtcttaacatagtgaatgtggcaccaccaatgttgatgagtccatatttgtcttataaatatgatcaatttatatattaatattcttaaattgattctttaaatttctgattagtgtaaattttgtttgttaggctattttaaagactatacatgcattaagagtcttttggagagattttagcatattttggtagaatataatggaagccgacgagctcagttttacaaggcggagcttaattgtaaattttaatgttcttacaagcagaactggacttggagcttaacatgaaagttttagatctcgttcttagctttctggaacatcttgaattgtctaattctgagcaatatcgagaaagttatggccaaaatactatcaatcgtcgcagcaagaaatttctggaaaaaaaaaaaacgattaaaagatagcttttcaaagtagagttgcgatttttatttt

SEQ ID NO: 355801 - DNA, 996 bp, Cannabis indica
atgaacaattagcactaaagaattaaatagtgtttacccgatattccaaggaaaaaagaacatttggtggttgttattcatcgacgataaccaagcagccaatcgtcttgctgcattgtcaaaagacagactcttctcttcatcgttgataccattcactgcgagaagctctaggtcgtaaaacttgaaaatttttctcaaatcgttgatgctctcccagatgttcctgcattaaattgttgagtagtagtgtcttataataatttgactagaatttgatatataaggttaattagattaaagaagagtatacatcattccaaacaacattccctggttgctgatgaagtcacacaatgcaacctgttgcatatcctctccagataacgtgatctgggtacgcggtgctatgaatcctcggggtatcaaaattgtgattatatcacgttaatctttgaggttcagaaattcaacaaccatctattttagcgatttagggatcaagtccatgacctttcgcgagaataattcatcttcttcatcatgaccgccttgttggagaaagcatgggagctttccccttcgacgcatcacgtcttgaaagcggttgaacgagtggaccctacacaaaacacaccataatatatcaaatttgatccaaattctaccgaaattttggcaacataacggctgcaattgaatgctcccaaaaattttaaacatgcctgtataatgacaaataacacagatataacaatagtttattcatccatcccaccgcaacacatatattcacagaacctactgttggattatagtttaccaagatctagatttactaccatgtatgtaacaccctaactagcatatgcgtattacgtgatttttaaacaaaatatttatacaaaagactcaggatctcgattacaaaatcatttacaaaagtttactgtctatgtaaaatacttgtcgcctagcgactaattacaaaagtag

SEQ ID NO: 355802 - DNA, 1044 bp, Cannabis indica
gagtttgggtttgagttctggtctatgtccttgatccagacactgagtactggtcgggtccaagcatcgagtcttggatcccaggttctgaggtgggtcctatgtccaggtttgggtctggggtcgagtccttgatcgcgatcaaagttctgagaccaatttctggtcctagttcgggggcccaattcccaggtctgggtcccccatctatgtccaggtcctaggtttcggtccgaatccaagttcaggttcgggttcggtgcgaggttaggtcgtgatttgtgttagggtccgagtatgggtcacagtcccattcttggtctgggcttcgtgtcccaagtctcagtctggttcttgggtcctgagtttggccctgatgtcctggttcgggtccgagtaccgtgttccgatttttgtctgggttctgtggcttaggtccaggtcccccatccaggtccgagtcctaggatctagtttgggtcctagtcccagtttcaatttcgattcagtgtctgggttcgattttgggtctgggtctgggttgaggtctgattcctggtccgagtctgggtctgagtctgggtccaggtccggatcctgatctgggtctcggtttaggtccaggttcaagttcgggtcccgagtgcgggtccaggtctgggtctaggtcagggtctcgttccagatctaggttctgagtttcgatcctagcctggatccgggtttcggtccaagtctcagtcttggtttaggtacacgatgtgtcagggcccaacttcaggtcacggtttgggtctggggatatgtccgagttcggttctagggtgggtccacgtcctactcacggtcctagtcttgtttgagggtcccggtgttgcagttcttgttcaggttctagttttgggtcaggggtctggtttgggtcctggtctgagtcccaagtctagtttgggaccgagattggggtgcggttctaggtcccggccccaattgtgtgtcccgattttgcttccatgtttgggtctgagttcgagtcgaggttcg

SEQ ID NO: 355803 - DNA, 501 bp, Cannabis indica
ttatttcttaaaggagttattctttatattatttttttttagtaatgtatttataatgaaaaataattcttacaaaaaaaatatttatatactaatcaaatctatatattaaatcattaattttttttttcaatttttacagacaaataatcttttaatttttaaaattaaaattatatatattataatattttattaattattatttattaaaaaaatataaatgtattagtaataattttgtatcaatataatatacattttaatagaaaaaattaaagtaatgccaaaaacattattgatgtttagtattttcctagatgtcatattactattggcgcaattaagtatcatatcttataaaatttgattaataacttttaaagagtatcactgaccaatcatagagcttgcacatctagatagtgataaacaccactaatgtctgataacaatgctctataacaaaatgtaagtaaaaaataaataaaatataaaatt

SEQ ID NO: 355804 - DNA, 494 bp, Cannabis indica
ggggctttctcctctctttgtctgaagcttcagaatgaaaaggatgtcaccataggcaaggtttatcgggtcagaagcgatcatgggaaggaatttgaaaacgacatatttgctcaattctgtaataaaatgggtattagccatgagttctctgcacctaagactccacagcagaatgggatagtggaacgaaaaaatagaactcttcaggagatggctcgggtcatgctgtgtgcaaagggagtggctatccggttttgggccgaagctgtgaatactgcatgttatatctgtaatcgagttcatttgagaactggtgcatctcaaactccttacgaactgtggaaaggcaagactcctaatctgagccatgtacatatatttgggtgtacctgttacatactcaatgatcgtgatcatctcggaaaatttgatgctcggagtgatgaaggaatttttcttggatactcaactaacagccgtgcgtatagggt

SEQ ID NO: 355805 - DNA, 384 bp, Cannabis indica
aatgataaaacaggaaagttgcaaaagtgaggcccatatccacaagccatggtcggccacatgcatagtgtttatcatttaatattttcattattttaatgccaagtaattcaaccctaaccctatgtggtattctataaatagaaagtaatggcttcaggtttgtttcacaattgcatctcattcctttcagagaaaatcctaagtcattgtcgccacctctctctctctctttcttcttcttctttgtttcgaaatccctaagtgatagagtagtgcccacacacagcaagtagtacctcaatcatagtgtggaagattgtgaagaatctagatacaacaaaaaaggacattcgggctcagatcctgataatactctgcaac

SEQ ID NO: 355806 - DNA, 911 bp, Cannabis indica
taatccaaaataattttcaaatgaaatcaccaaatcagaacttagcttagattggcggagaagctcggcttgacagaggactctcggttgctgtgttgctggtgaggccgtggtgtagttcgaaggttcgagcttgaagtcgaactggtgcgagatatgggtggaaggtgcgactggaactaggtgcgggcagtgtgatggtgtggttcgaaaggcttggagctgggcgttggggtggttcgaaggttgggttcacgggttggtttctggtgggttggtgggttgtggctcagtcaagtgggaaatggtgactcagagtgctctgaggtgagttcagtggctacgggttcagatgaaatggagatgggttcgtgtgctttgaatgaggtgtgactgagatggctcgggctgctatgggttcaggcgagatcgactgcagacggcttgggtgttgctggtttgtggctgggtcgagattggcgtgatggaggctatggtgaggtgcgaggtgggtgaagaagaattcggctggtgtttggttggttcggctggcaaagagaaatgaagaaggtgatgttgaatgttgtagggttgagggtgggctgaccaaagaattgggctggtcaaactagctggggcccagttgaccaaataatttggcccaaactgagttaaataatgtgaagtggggtctttgtatctccaaaaatgacttgggctcactcaattcaacactaaagtacaatttcaaataattggtctgaacattaatagacctatccaatgattgaatcatgaacaacaggacaatcccatgttttttttctgacagaccattcactttatttttgcaaaccccagttcgtttgatctgcctaaaacccaaaacacttcttgctaagctgttgcta

SEQ ID NO: 355807 - DNA, 792 bp, Cannabis indica
ataataataaaattgattataaattattaatttttttttaaataaaatattgattagatattaaattttacatcaatagtataaaattaaaatttggtgtaaatttaccacaaaattactttttgtgctaaatataacacaattttcacatgatcttatatgataatcaataatattagaagttccttcaaaagaaatatatatgtatatatatatatatatattagaagaaaaaaattgttaaattataataatcaatagaagcttttttcatatatataatataataataaataataaaagcttaataacactttatttattaatgaataatttgtagtataaatatttttgtattattaccggtaaaaattaattatcatggcaaatattcccaatacactaacttaatagcctaaagaaacaagaaacaagaggagcattttagaccaaatacgaaaatgatgagttgaactttcctcaacttaattccatgaaggtcttaggtgatcaatgaagaaaatgactaaaaaacatctccatctattcaaagtttgaaaattgcaactaaagactaagatacatctgctacacaagatacacatatatatagattgttttaagtgcaacatttggtggaggagaaaaagaacattgaaagagtgtataccaagttgtgttgtatgatggagattccccaagtatttggcaatagtaatttagcctcaaaaagctcttcaatccaacacaaacactaatgtccaaaatgtgtgcacatcacacacacgccta

SEQ ID NO: 355808 - DNA, 520 bp, Cannabis indica
atagaatagatatttacaaactcatatattacaaaattaataaaaaaatagaaattcaataaaaatataaattattttagtaaaagtttgtttttacaaaattaaatttttttttttttttttgaaattgctcaattcgttttaaaattttgattttttcttttaatttccttactattcacaatgattttcttgaagatctaaattaactccttaagatctattaaaaaaatattgattttttttttatttttatttaagagctacaatttaataattattaaagtttaaaacctaaatcaaattactaatttataaagacatacaagcaaataatgagacaaaatcttacagaaaagtaaaatttataaaaaaaaatatatatataattgggagaattttgaagggaaaattgataataggcacaaaattggtaactgttgttaaatatatataatatatagggtatgattttgtctcgtgatgtactttcacgaaatgtattctgtggtacattaga

SEQ ID NO: 355809 - DNA, 1366 bp, Cannabis indica
catgtcgtgacgatcttcggaagacaacatgacaactttgataccaaattgtaacaccctactattttaagcgtgttaacgtgatttttaacttaactgtgtagctcgttgctaatcaacgagtttattgaaaattgtgattaattcaaattttacttaattaattataaacactaaaataatatacttatactaaactgggatcctgtttacaaaagtttgtcacctagcgactatacaaaatatgccctgatgtcctaaagaccgtacgctccaagcctaactgccccgacatgtacaatcttcatctactcactctcacggctgatacacccaaccataaccctaactgagtcaggaacgttctcgacaaattatgactaactgcgaatccagcctatactcagtactctagtcgtactgatgtggtagaagataactcatactatatgatagcctagcatatatctgttggcatctcggtgtaactctatgtacacctcatcgatgccctgatatgctaatctgatggctataaattttcctattctgacggtaactaacatgtacgctaaacatgtatacatatatgcaaccattatactaatcttaccttgtttacgaattcaggtgtgccggccaacctgagtggaatagtttctcgacaaattacaggcccctaaattacattattcgtaaaattggtgaccgacacgctaaatcactttttggggacttaaacttaaaacttaaagtttccctattgctatcgataaaaaacatgacaataccctaaaaatcaaggaatcaaccaactaaagctctgaaactaacatgaaaaattcgggaaactggtttctgatccagttaaccggttttacagggcctatgaaactggttaaccggtttgcaccaggtaactcaaaataattcaaaaccttgaccaatttgtatccaaaccaaaccaaaccttccagacctgcttaatataccccaaagaagatatttcaagcaccaaaacaacctaacatgctcaaaatcaaaaattgccactaaagaccaaagtttgagttctaaaactcaaactttatctaacaacccaatcaagctataacctagcctcaaatcatctcaattaacattattttaactttagaacactcaaacaaaatcaaaacataactataacaaccctaagtccaaaatcttgtataaaactttaacttagaacttaataaatcatacaaagagaggcttaagggttttaccttggattaacacactagaatcttcctggaaatccctgaattgagagaaaaactccaaaccctagttggttctaggaaaatcgagagagagagagaga

SEQ ID NO: 355810 - DNA, 1868 bp, Cannabis indica
aaccataatatccactaaaatccctatagcctatactcttgaatatatcaaaaggctttattggttctaaatcccagctcgcatctatatgacctgccctatcttccatggtgtcgtattgcttagctataccataatatgactcgtgacagttaatctggacatgaaatctaggataccagctatcaaacttatgagcaattcagtctacgagaagagaatcccaaatataaaaattaaagtgggaatcttggaaggtgactaatgtgttacgtttagccctaagtactgtgggagacattgcgttcgagccacacagtcccaggccttatcctcatctagacaggtgatctgcttccatgaagaaatacttgggaaacttataatcacaagtatactccttgtcggcaagaaggcccactgatctcaggttggcctcgttcaaaaggaacttgcatgaacgaaggccataaggaagagttatcaagcgcctgtgccgactgaccatctcgggggtaggagtaggcctcttcaagagagctgtaaaaacaaacaaaatactggtcaaaaacttgacagacaaggattgatataactgagcgagaggaaacaatcacttacgaagtttgcaaaaggtggttgtgccaatgggggaaagaccatatgctcaaaagaagttgtctttgaaggacaccttatttggcaagtccacaatgattttaggctcgctagaatgcgtaccgaggtagtagaagcccactacaacattcttcctcgtagagatactcaatttctactggtgtggggcattcccagtttagaattttatacaagaccttcaaactagtgagaatcctgttagagataggagtcagctggaatggggcaactccaaggtgattaatgtaatccttcaagtactctcggagaggaagtatgccccccgcactgatgtgctccaagctccaggcacccataccagtctcgtcactggtactagtctcgccacttatctctaggacactgcttgaaaagcgtacagggggaaacaactgaactcaccctctcgtacatatctaacttggcatgattgctcaagttcgattccacaggtcttcagtatatcgcctttgtagcctaagatagatcgcaccttcgattctatcaactcagcttcaaaggtgacgttggggtcctaagagtctttgatgtatatggcttgggaggcattatttcaaaattcaagtcacctagttcaaaagcaatcatgacgttgggtaaaaacaaaggctttgctaaaggaataaaggacacgctcagaggttctagccaggttgcatctcgcaagaatcggcgtttgcctacggagatttcttgcaagaaacgcctgtagtgactagcattctcttcctggtgagttttcactacgtgttccctaaccctagcatcgtttaactctaatttggaggtgggttttgaagtttgggtcaagctgggaggaataaagaactcaaacacgtaatcgcaattacacttgacgtggaataacttgttgaaagcacaatttgcagagtatgtttataattcggctgtctgaatagtgtaatgtgagataaaaatgtactaactattgacttgtgcctcgatgagaaaccatgtaattgcaagtgtgcaagacgaggcattaacctcgtcgcgtggctgagatataatgacaacagaaatacttagcgtatagtacaaggtatacaaactaagtataagcaaatgggtgaatcaaagtgataggtagcgaggcgtccatctctgtaaagcccgcctagttaatttggaaattatcagttaattgtgattaattatgaaattat

SEQ ID NO: 355811 - DNA, 819 bp, Cannabis indica
aatttttttttgaatgtaatgtaagcattttgttaagtaatctaaaaatatctgtcaaaaagcttttcatgagataattagtaaaccttttccatgataattaaagaagaaatgggaggacaagaaattactagtagtaagttataatggatggatctagaggagattgaagacaaaaattgagaataatagcagataaaggaaaaaataaaaacatcattgaaagtagtgcaaaaggaattaatgtaaaaattgtcacgaaatttatgacttaatttaaacacttgctcaacttggtgtttatccaatttcaaggaccatgagatttccaactcatcttgtaaacgacaaggtactataaatattactattatatttatgaatgtatggtgattttcatacacgtggatcggttattgtggctacaaagtaggggataaaccctaccccaattcaaattcattctcaaatctaagcttaacttatatattactataacgcttatactgttatacaattatgtatccttcagccgaaaagaaaaataattgtataaaaatgataatataaatttaggaatttttatacgtgtagtattaagtaccacagtttaactaataaactctgtggttgagatagtggcatggacccgcaaaatcttttttattatttattaacacaattttattgtaattattatttatatgtgtaaaagtcttttgtttttcttgacattttacaaaagtgacaaaattaattatgggtaaatacttgggagttttacattaatatacataattataaaattatttataataa

SEQ ID NO: 355812 - DNA, 692 bp, Cannabis indica
gattactctttggaagaaatccaaaaaaacatattcgaaacgaggaggaatcgatatgtagggataagcttgtggaggggtctaatgaagagacttccaaagttcctaataagaacaagggtaataccttggttccaaagtctaaaccaaaccaattcaattcaaaggtggaaaaggtccatgttttgtgtgtggcaaacttggacactatgctaacgattgtaagcatagaaaagactttaagggacccaaagtaaatgctatggaggaggatatcattgctactcttagtaaggtgaattccgtgcaagggatactcttgtgagagaatggtgaaattgtgcaccaatgatgtaactttcaatgttagcaataataaatcatctagttccacttatatgattgagcatgattctttaattttgtggcatcttagattagctcatatcagtttttttactatgaaaggagttaaaaaaatgtggaatgattgattgtgatataataaattatggtaaatgtgaaacttgtgtaaaagcaaagatggttaaaaatattttccaaatgttgaaagaaattcaaaattgttagatttaattcatagtgatttatgtgaattaaatggaattctaactagaggtggtaaaatgtatttcattacttttatttgatgattatagtagtatatactt

SEQ ID NO: 355813 - DNA, 692 bp, Cannabis indica
agctatcgcagggattgaagctcaaagatcaatggctggaggtatatcgatccttcattgtatatataatatcgatatgtttatagtttttccgcattacatatcctttatatatatgctgtatttcatatactatattatagtctaacagttggtatcagagcggttttatctctgccttaattttggttgagtttcatatatatatacaattatatacactgttcatatataaatattcgttcggtccgtgtatatatatatactcatattcatataattctaagtatatatatagaattcatacgtatatacatatacatatatacagttattcatacattcatatatatattatatacatattcgtacggtataatatatatatatatgtatatatatttatatatattgtacattttatatatatgttttatcgtataataatattcataatactttgatttatgtgatatatacatgcacatatatatatatatatatttatatataacatcaagtttatcggtaaagtttgattttttcagtttttcattttttcggtgtttatttcgaattctaaatatattactatattcgtatagtattaaagatcgatctaattaagcattgaaaatcccttgaaaaacttaaagatggaaaattttttcagttaaaacttttccggaccc

SEQ ID NO: 355814 - DNA, 561 bp, Cannabis indica
caactaaaatagaaaacattgaatccccaattcctttaatgatgacatctagtgtttcaaaagctgcagcccgtacaatatctttctgaatatcaggtgatgttaattttaaattctcagggcattgctcaatgaaactgctttaatgtcatcatcatgatcggaaagaaattttagaattgcaagaaagttaccttgattactcgagtcttcagattcatcatcaccacgaaaagcaagtccttgtcgtaatagcaaacgaatgcaatcaaccactgcttccaaacgagttcgatactcactacgagcttgctccgattgctttacaaaaaatgtttgaatatgttgtttttcgttcattaatgcttcacacatttttctagctgtattgtgagcactaaaaggttttccaacatgagtatgaagccttgattttgcaagtttgaaatttataaatcctttactaacaaatgcatcaccacctgattgcccttcaacatcttctttaaacagatagcaatataaacaaaaagttgcatcctttgatacactatattcaag

SEQ ID NO: 355815 - DNA, 622 bp, Cannabis indica
atgcatttgtctgtggatcgggagataaaatggctcagggcagcgacctttccggttaaactctggacatctttgtgcttcttgggggaaggcatgctcaggagagcttagattttttctggatttgcctcaattcccagttgactgacaatgaagcccagaaactttcccgacttaaccccgaaagtgcacttcttcgggttgagtttgatttcgtatctccggaccacttcgaagcattcttctaggtcctccgcgtggctatcgcatgcctttgatttgaccagcaagtcatccacgtatacctccatattttgccccagaaggcccttgaacatccggttcaccattctttggtaagttgcaccagcattcttcagtccgaagggcatgaccaggtagcagtatacccccttatcggtcttgaagctagcggactcctgatccgcaatgtgcatcttaatctagttgtaaccggcgtatgagtccatgaaagacaatagcttgaatctggaggtggcgtccaccatctggtcgattcttggcaaggggaaacaatcttttgggcaggctttgtttagatcggtaaagtctatcaaacccgccatgtcccattgggctt

SEQ ID NO: 355816 - DNA, 559 bp, Cannabis indica
agatcctggtaaaataaattccaacagcatggagtatgcattggaagggaccgatattgaacttggattagatatgataaatttaccgtaatatctattcaattcaatatcacctaattgtcctagatcaaatgatcttaatcctgacatggttaggttcaatctcaagagtattattcatattcgttgatttgtcaattaagcctactttttggtcagggtaatacgtacaatttgggaacttggtagtgcaattgagtgggattttagtgattatgttagttcactgctgaaatatcatttataggtggctaagtattttaaggataaaatacttcgaacggtgtaacggtaaattaatccctatataatgtaaatcatctatagaggatcattgattattgagattataaaaatggataactaatagcgtatctatatcgtggaacatatatagcattttatataactgagagtgtaattccaagttctatggtggatgcaatgaggaatgaataagttagtgagttaacttgataaattctagatctacttattg

SEQ ID NO: 355817 - DNA, 611 bp, Cannabis indica
  modified_base (484)..(484): a, c, t, g, unknown or other
  modified_base (585)..(585): a, c, t, g, unknown or other
ttttggtcgggttggattacgtcaccgtctttctaagcggggatttgagtataggcttcgggctgcacgatcgttgtagtattctactcgtctgttcctcttcttctgtttagatcgtcccttaggtcatgggtcgttcccagcctatcaaacacagaagaacgtggctgcctcagcgattgattcacttggttgacaagcagaatgactccattattctaggtggatccatcgggtatggctcctcctgatgaattcccggacaaggtcttcctgcctaccacttggcccacgagtggaactcgtgactggggattggacggctgaccattggttgtctgggaggcattcctcatcgggtgatcctctgttttctccccagggggaaatgacactcgggtgtttgttgggcctacagtctggtaggctctcttcgtatcagcgacagtagcttgccgactccgatctcgatctctgcatggtnaggccccttaatgcctccatctctttgtccctccattcggcgacatatgcctctgtcttcaatgcaggtttcagcggcacgcagttccgtcctgatcatgntgcagggtattgctatgaccctgtca

SEQ ID NO: 355818 - DNA, 819 bp, Cannabis indica
actcgatgtgaagctgattgggcgtccctttagtcttcggataataaatgctctgacaattaatatttcgaaatctgattttctctctccacggctgacggttgcactcgattacttttgatttcccatattcgtttttgaggcgggaagctgaggcgtctaaggttcctttgatgcagttacctcttttcgtgacttgcctataaatacccatagcattggcacataactcattttaccacccttcactgttaagtaaactccagagcgaaaagagagttttctggcttcaaagttgccgaagtgccttcagacgattgctgtttagattgacgttgctcgaacccagacactcgaatctttgagtaagtttctgatttcctttatgcttttctttgcatgtttacactttgaatgcaactatgctgtagaaaaatgcttaggaaaccctagggttagaaacttctgcgactcttctttatcatgtcttcatgtgggcttatagccatagagcttgtctctgaactgcattgcgtctgtctttcatcttgcttattctaagcttcatgaacttttttgccctaactcaagaaaactttttgacttcttgagttctgacttttctttagacatagccgttctttaatctgttgagtactcctggtcggcatatttgcttgtttatcttttgatattccgtccaacactcatcttgtgtgttgtattttgtagatgaactcaggtgagtcttgggaactcgggcatcaaatcgaccaggatctgcttcaacttctgcacgaagtgttggaaattatttta

SEQ ID NO: 355819 - DNA, 949 bp, Cannabis indica
aaaaaattacaaaaatactattttacagaattttaagttatctactacaaaaggagagggttaaattttacttgagtaatattgttgtagacttgggttaaaaaagaaaaaaaaaagaagaatatgaataggagaggcaagaagaagatgagcaggagagagattgagctcaaatacaacaataaataaataatttgtgtgttttgttatttttctttttttgctaagaaaaaataacatgaaaataacatctaaataacatcaaaacaacaataaaaaataacatacaaataacatttgtgtgttttgttatttgctcaatatataaatatatataaaaactttggaataagagatcacactggttgcccaaatttaaaaaaaaaatgaaaaaataaatattttaagggaaaaaagggataatgtcacaaatacacaaaaataataaaaaaattacaaaaatactgttttacagaattttaaatatttttacgatttttttgattttatttacagaaaatacggtcttattatgttgtattgatgttaatttgttgttgattttttgttatatgtatgttattttttattgttattttaatgttatttaaatgttattttttatgttatttttatgttgttttcgtgttatttttacaggaaaccgtaaaatgtaaaaaaaaatctattaaacgtaaaaatataattttttttacaaaaaataatatcttatggtattataatttcacaaatacacaaaaacaagaaaaaaattacaaaaatacggttttacggaaatttaaacaattttacgatttttttattttatttactgaaaatacggtctttttatgttgtattcatgttaatttgttgttgatttttttgttatctatgcgttatttttttgttgttatttaaatgttatttttcatgtaattttcttatt

SEQ ID NO: 355820 - DNA, 422 bp, Cannabis indica
caatcactgaaacagtaaaattgaatgaaattagataaaagtccttaaatctaacaatttcaatagttcatggagaatttttaacagctaaaaaagttcaaggagcatgatttgctacatgttaaagtgtaagggtaaaaatcttaattaaccttaattatattattactctactataaatatgaaattgcacttttagtttttatagaattacatttattggttatttacagtttccattgatataaacaatactagcagttcgctctccttgtattggttcataattaaaattggtcaaattactattttacccttctagttatctctttatcctttagcagcattaattcactagtgaaagttaattttcgatccaatttaaattgggaaaaaaacagaaaaatacaaaaaaagaaaaa

SEQ ID NO: 355821 - DNA, 1260 bp, Cannabis indica
atggcaattttatttaataattaattttaattattaaataattagttttggcaattaagtggttaaattgaaaaaatggtatttttgagaaaataagataaataattagaaaaacggcaaaattgtaaagttgggcccatatccatggcgagccactttatgggcaatttataattttttattattattttgatgccaaataattctaacctaaccctaggtggattcctataaataggtagtgatggccacaaaggaaaagatgatgcaaacactttcctttagtcaaatttgagccatcttctctatacctatttcgaaaccctctctctctctttctctcttcaaatctgaaccctagagtgattagagtaagtgcccacacatatcaagtggtactcaatcatagtgtgtaagtctctgaagaatcttgattaaatagaaggagaatcgggctcagatcttagtgatactctgctacagaaaggatacaagggttacagatctgagcgaaaggagccatttaatttcgctgcaaccactgtaaggtttctcataccttttatgtgtttattttatatcgtttaagaagttcatgtttaggatcttaaaaacatactagttagtaaatctagatcctggtaaaatatattccaacaactggcctcagagccatggtaattgatttactttcaagaaatttggacttaaaacgatatatgtgtgatttggatgtgattcatgtttatctatgtgtttttgatgattatttgatgtttgcaattttttttacgaaaaataattggaatttttttctggaattatttttgttggatagtatggaaaaattaagcaatacacttttttacagaactccatttcgatttaatttgaattagttatgattttttgaagtttgacaaaaaaagataggggtagtgtcacccatgtgcgcgcggatccgagtgttcactcggtcacactcgcctcggacaaggttctgtccgagttttctcggtctcaagggccattttctctgaaactggggccatgcgcgtgcgggacaggctgcatgcagcctccttagccgaggtttctcacccgtacaccttcccttgcgcgcgcggatggtatgtcgtgcataccatccgcatcaaacacattttttcgtttttcttcattttttcatgctttttcatggaattaatttcaaattttttgtgtaattttgtatttagatttttatttttcatatttcaa

SEQ ID NO: 355822 - DNA, 511 bp, Cannabis indica
agggcttaattgagaagaaagaaggttttatggtttattttttaattaagagactttgtaaggtctaattaataaataagttaaatgaaaattttatgtgatgatcaattataattattaaataaatagatttgacatttaaaggtttaaaattaaaatatactatttgtgaaagaaaagataagttgttaaataaatcgcaaactgaaactagtgaggcccattatatggccagccacttaagtgaatatttaggaattctttatattttttaaatttcatataatttaaaccctatcccaagaaggaatcatagaaatagaatatgagaggctcataacaaccattcattagtctattttgtcaaaaaattgaaaataatgaggctcctctttattttgaattctctctctcttctctcttcaaatttcaaagcccctatagtgatagagtaccttacctactcatatcaagtcagtactcaatcatagtgtggaagattgtgaagaat

SEQ ID NO: 355823 - DNA, 1027 bp, Cannabis indica
aatcccaaatgaatttcgggcccaaacccggttcggcccaaaacacccggttgtgactataccgcgccaacctgttagaacacacctgaaaaagataacacagacacactatataataatatagttccagaagcacgtaattaaattaatttcaccattttacccttctcaggtcataattactaaaatgcccctggctcaccaacaaggtcttaacatagtaagaatcaaataaattctcatatattgaactatataataatataattcctcaattattcataattatctaattagggttttgctaatccactttccaattctagggtattacaagacctgttccttctccttagatggccgagcaacgcaggctcttactaactatcccgattggccttagggcatgcaacttccttctgaatgaggtcaacctgaggtctgtggatctcctaactgacaaggagtgtacttgtgattataaatatcccaagtattcttcttggcagcaggttcccgtcccagatgaggagaaggctcatgattgcgtggctcgggcacaatatctctagaatactgcccctcaggaagccggaaaaggagaatcccaaggcaatcaatgtggttggtcacccacatagcttagggttgagcgtaacatcctagttaccttttgagatagctgctttaattttaatatttggcatcccctcctcgtagattgcattacacataggtttgatagttggtatctcagaatccatgtccaaattagctgtattgagtcgtactacgtagtagccgagcagtacgggactatgatggatagggtgagtcatttagacacgagttggaatttaaaaccatttaatccctatgttatattcaggatcacgggttgtagggatgttagtggatattatggtccttctaccccatcttctagtgatacctcgtcttctagtgattatggtaaattccttaggtagaaaatcatgccccaatctctccttttacttgtcttcaa

SEQ ID NO: 355824 - DNA, 1023 bp, Cannabis indica
catcgaacccgaccccaacacacaacgattcctctcaaccatttccatcgtagaccaagacacctcaccacgagccatggtttttgctacagaatcatcgtccatggcagcattaaactgcttaagccatttagctttgatcatgtggtttctacgtataggtctcactcgtatccattccccatatggcttgattatctaaccctctccaacctcgaaacaccgtggacaaaagctttcggaatgtcccataattccacaaataaagcagaaagtggagagatattcatacttaaagttagtccagaactcgatcccacggtattgcgaagcttcttacgtctttttaatggctttgtaacattcaaagtcacacgaacatgaagataatcccgccataagcccataaaattccttttatccaattgaacaaacttcccaatatagtttgcgacatccttaacaaccgtagcagttttaaactccggtctaagatcatgcaattgcacccacatatcaacttcattcaaggtaaccaatcttggattttcccctcgctgcaaccttttaaaaattaataagaacctattaaaagtccaagggcttcgattcattatactttggatgtcaatctcatgataaaattgaaagagatagcgattactatccaattccttgataaacattcccttcctcggctgccacaatgaagccatcatatgttgcatagcctcaaaatcaatttgtctttcagtcaagaactttccaacgatacaccacctgtcatcatagtcattaccatccatagcactagcatcagaagacaagatagcctcctcctcctccacaataggaatatgcacccctataccgtcttccataatcgtactacaaccagcagaatcccgaaagtgacaaataaaacaagaaccaacaaaaatcgaaccagaaaaaactaaaaggaaaaacaaaagaaccatgttaaaagacaagactaatgggaaaacctaattagtttcaaca

SEQ ID NO: 355825 - DNA, 898 bp, Cannabis indica
ctaactaaaacctttaaagaaccaaccgaaagtataacattttagctaaaagcaacaaactaacaacactcaccaaatcacgtgtgattttgattataataaattaaacttattggcaaagtcttaataattttaagccctccacaaaaccaagcaacaaattaaataacaataaaataataaaactatattacaacaaaatgaaataaaaactaaataatagtaaaaagaacaaaagacaaaacaattacataatataatataaaacaatccatatcaaatataaaaacttaaaaaaaattgaaatatttatttatcaaaactgaaaagtcgttgcaatataaatcatgagcacaaaatgatcacttttcttgcccaatgaccataccacaaaactaccttaaataattaaggacaagccataataaatggcacaataaccgtaaaaggcacaaaagtcataaaaaaacacaaaatccgaaaaaagcatcaaaaacatcaaattattgtgcaaaaactagcttggttttatatatattaagtttaattcaagaattttcttttctagtacatgttgttttttggtgttgtttgtttttttacatgtagtatttttgtattacaagtcaaaatttttagctctctcataacaactatcaacaaaggaatagtgttttttaataagttgggggtgttgtttgaggatgttatagttttattgtctaaattttcggagatagttttgttccatgtggcttgcgataagaatttaacagcacatggtttggcaaagcatgtcctttgattagacgataagttatcctaatttaaagaagtgctgccattataaattattgtattattaataacgtgtgattttaatcaccacgtaaaaaaa

SEQ ID NO: 355826 - DNA, 912 bp, Cannabis indica
ttaatcacataatcttgattactttccactgcgctgacaacataataaacaagaatatcaatgtgacaaggatttggatgaatttataaatcaaataaacatataacttcctcttgttcgtgcttcgctattcgggcatacctcttctgagctttgccagaatctccagaaatatgcgggcctccaatgatgacttacagatgtccatctaccggtggaggtagtaaatcttggttattgtcgttcctctgaccctgattggttttgacatacttctgcaagtgtgggttgttttaccttatcaggaattcaatttcccgcttcaagttgttacattcattagtgttgtgaccatagtctccgtttaatcgacaaaactttatcatatgctgacatctttcttcatgggcccaggcttcttatatgaggctagtgactaagttgccatgtaaacactttctatgtcttcagtcaagatagtgaatgcagtgtactttgcttgactctcctagggagtttgttcggatttgccgaactttcccttcttcccattcccttgcctgtggctgttgttggaacgtttaccacttgagtttgaattatttaggtaatgcaggagttgggcagacgttccaattgaaggagctttcaacttgcaaggctttttctcaccttctgctcgttgaatggcttctttgagcttgatgaagccttcgacacggtcaagaaaatcactcattgagtgtacggacccgttcttccttatatccttccaaagttcacaaaggacttcaatgccccccagtatcgcggataactttccatcattagttacccgtgaaactttggtcgcctccgtcatgaatctgttgatgtatgctcggagaggttcgcctggtctttgcttgactt

SEQ ID NO: 355827 - DNA, 303 bp, Cannabis indica
aagatctaaacctggatctccttctctccttgttgatgttgattctccttcttgttgattggattcttcacaatcttccacactatgattcagataccactagatgtgtatgggcattcattcattcactcaaggttcgaaattattgaagaagacaagagtggtattggtttcggctatagagaaaagaataggaggctcaactttctgaagacaagaaatttcatccgacggagttaagtttgaatgtgagccatcactatgtatttataggtaactatctaggtttaggttagatttatt

SEQ ID NO: 355828 - DNA, 570 bp, Cannabis indica
aagacccgaaccaagagcctaggactccatctgtctaaatacttctctttttatctttcttttttatatatctacccgaccataagtccttttttaagacatcatgacaggccaagtggtctttaaacttggaattgtttttcattttacagacaacaggctgactgggcagcttttaatcccggtgttacatgcttatgttatctttaatgaatttcattctctgtttataatcatcgtgcaactgtgttattaccaaatgctttgtataggtataggtaccccaagtgaacgagcagacttatgactcttagtcacttgtttttttcaagtatactttttatctgtttggggttttgggttcaaccaaaccttttgcacgcagtggattgtaaattaacaacatgttaataatttcgactcaatttgaattttgaaataaacatctttattcatttattgatcgaaaatgtgtttgttaccatagtaacttacatcagagctatttgatctaatctaatcttttagcttaacatgaaataaaacaaattgtagaaattagaaattgta

SEQ ID NO: 355829 - DNA, 760 bp, Cannabis indica
ctacatgttgggtgaattggtgtatcttggattagatttgagtttgacttgttgtattcttgttattgagttgggctgagattattggtagttctaggttggagtttcaggtgtgaaatttagtgtttaattgctggaattggtttgaagagcttggttttgaagttcttgagtttgagctgaggttttgttaatcttaagcatgatattgagtgtttttgagcaatttgaattctaggattttgatgcatgtaatgtgataaatgagtatctagtatgtgctattaatcttatgtgccaatttgtggtttggttgtgaaattgctatgaaaagattgggttttgggctgaaaattcgaaaaagggttgctggttttctgggttcaggcatgccgcggcccgccccttgttggtggaacctgggttttgtcccaggtgacgcggcatggtctgagcatgccgcggcccgccctcgtgtttttgggcagttttgagttgattttcgaaagttcgtaacttttgatttcgaactccgatttgggagttctttatatcgttggaaagctcgttccgagctctgtatgattacctgaattgtaaatgccatgcttgaattttattgagttaaaagtcaggggttaaccctaagtatgaattatcccggatttgtgtgactaggattaccggcacctgatcaggagcacccggggattcggaatctccttctatagctggacaacaggtaagacagtgattagca

SEQ ID NO: 355830 - DNA, 661 bp, Cannabis indica
aggaagtagttgacggatccaagggtcttaagagagaacacctgctgcaattgattgatgattgtgcggactttgtgattgttatttcctattaagaggatatcatcgacatagacaatgaggtaaagttcagcaccagcattatgataaaagaaaagtgatggatcggatacaaagttacaaaatccaagagaaaatagcacttgtttaagacgatcaaaccatgcccgaggtgcctgccgaaggccatacaaggccttttgaagtttgcagacatgattaggatgtgtcttgcttacatagccaaatggttgttccatgtagacatcttcagtgaggacaccattaagaaaggcattatcaatgtccacttgttgtatatcccaattattggtggcagcgagagaaaggatgacacggattgtggaacttttgaccaccgggttgaaggtttcgaagaaatcaacaccaggttgttgttggaaacctttagcaacaaggcgcgccttaaacctttgaactgtgccatctcgattgagtttgacacgaaagagccaacggttgtcaaccacactcatacctggttgtcgcggaacaagaatccatgtgtcgtttttctttaaggcaaagtactcattatccatggcagacttccagcgag

SEQ ID NO: 355831 - DNA, 595 bp, Cannabis indica
aaggcaagggtgtgtgtacctaataaagtggagttgcaatcaaaaatcttacaagaggcgcacactacaccctattctttacacccaagatcaaccaaaatgtacaatgatctgaaaggtaggtatggtggccgggtatgaaaaatgatataaccgaatttgtagcaaaatgccttacttgccagcaagttaaggccgaacaccagagacctgcagagctgttgcaatctcttgatattcctgagtagaaatgggaagatattgctatggattttgtgacggggttaccgaagaacaccaaacaacaggattctgtatgggtgattattgatagactcactaaatcagcacattttctgcctatgcgcactaattacaacgcagagcaatatgtaaaagaaattgcaaggctacatggagttccaaagaccattgtatctgatagaggttcagtttttacctctaagttttgggaaagtgtgcaaagtgctttgggcacaaaactgaagttgagtacagcattccatcctcaaactgatggacaatcagaacgaactattcaagtactagaagacatgctacgagcttgtgcgtt

SEQ ID NO: 355832 - DNA, 630 bp, Cannabis indica
gcacataccactctatcattacccactgacgcccataaaattcaagatcctggtgatcacagttagccattgctcggctttcataacatcgggacctcccaaaaatactagaggtgcctgcttacggaacctttcatacaagggttccatcaagttcattgcgacaacaggtttggcctgcagagcaggggcaggagctactggtatctctggtacaggaactgtaggagcaccctgctgtcttaactgccgaatcacttcctcttgttcattgattttagtttgcatttctgcaaacttgttttcccaattatgggtatcctgagcagcttgggtaacctgtggcgggttagcatcaccccgaccacgtgccctgcgcttgggacctctacctcgaccatggacatttgggggaatctgagctccctgaccttcatttgatccaactgagttaccctggctcctggtgtttcgcctggcgtccatactaatctgaacagcctgcgtaaccaagagctagtctggttagatcatgattaaagaaaaacttactaatgccgcttatttggaaattaaaaaaaaaaaacatgcgcctattttactatcaggctactaacatgcttcctaaca

SEQ ID NO: 355833 - DNA, 638 bp, Cannabis indica
gctaacgcaaaagctagcccctccgttgtaacatgtcagatctcggtcaacaactcttacttctctttattgtttgactctgtggccactcgctcttatgtggcaaccaggatttttagtaaatttgatagactaaatgatagttatgataaagggtttcgaaccctactgtctgactaagaattagtcctctccaaaaggtagattaggtctaggctgatcaaaattgaggatcaggagttgagtgctgacttaatagaaatgggtttagcggatttcgacattatacttggaagggatttcttatccaagtactcagctagtattgattgtaatcggaagatggtaatcttccaacccgagggagaggaaccgtttgtttttgtgggatccgttcagggatcccagattctagcgacttcagtattaacagcaggagatttgtcacaagaagggtgttcagggtttctagcagtggtattggatacaacacgacttgagacaactcggccagaagatataaggtggtttaggaatttctaaatgttttgcttgatgaacttttaggtttaccaccacagagagaaattgatttcgttattgatttggcaccagagcagaaccaatttctaaggcac

SEQ ID NO: 355834 - DNA, 490 bp, Cannabis indica
tttcctctctgatcagcacgacactcacagcatgctctttgaaagctaagtatatcccaagttcttctctgtccagaggttttgagagtacaggaggctttgcaagttgcgtttttagctcctgaaaatctttttcacattcctctatccactcaaatcgcttgtttccccgcaggatgttgaagaattgaacacacttgtctgttgattttgaaacaaatctgctgagtgcggtgatccgaccagtcaaactttgtacttccttggttcttgttggagatttcatatccaagagggcttgaatcttctctagattggcttcaattcctcgagcatggacaataaagcccagaatcttacccgagctgactccaaaggagcactttaagggattgagtttcatgttgtatttcctaaggactttgaagcattcgtccagatcatctatgtgccccccagccttcctggatttgacaagcatgtcatccac

SEQ ID NO: 355835 - DNA, 1040 bp, Cannabis indica
gtcatagttacccagtttgtatgctcccgattctagaacttcgaccacttgatatggtccttcccagtttggtccgagcacacctaccgtattgtctttggtgtttaaaaatactcttcttaggaccatatctcccacaaagaattttcgtgctctcacttgcttgttaaaatatcgagctactttttgttgatgggctatcaatttcaagtttgctgcggttcgttttcttcaacttcatcaagtgattttgcgaggagtgcatgattggcctcttggttatatgtcagtcttctgtgggtcggcagttcgagttctacgggcattgcttcatatccatatgtcatggcaaatagagtctgtccgatcgctattttctcaattgtgtgaaatgaccataatacttcaggaagttcctccggccagtttcctttagcatcctcaagtttcttctttagggtatccttgagtgtcttgttgactgcttcaacttgaccatttacttggggatgtgccacttctgagaaactttttatgatcccatggttcgcacaaaaatcaatgaaggattgactgtcaaattgtttgtcattgtccgagactatcttgtatggcaatctgaactgacaaattatgtttttcacaatgaagtcttgcacttttttggacgtgatggttgccagcggctcgtcttccgtccacttggtaaaataatcaactgcaaacattgcatattgcactccgcctttgcctttggataactgtctaatcaggtcaattccccaaatggcgaaagtccaaggactttgcatccgagttagttcgttgggcggtgcacgaggtatctttgaaaatctctagcatttatcacatttcttaacataggccttggagtattcaatcatggttggctagaaataaccttgccttagaattttcttggataaactcggcccagctgcatggttgtcgcaaaacccatcatgtacttctgataaaagtcgtgcaacttctacttgtgtgacacacctgagtagcgg

SEQ ID NO: 355836 - DNA, 544 bp, Cannabis indica
atgagagatctcatgcttgaataatcccgtggagatttaaatataactagatatattgattttgattttcaattagacaaagataatcgaaagtcgacatctgggtcagtatttactcttggtggagaaattgtagtctggagaagcattaagcaaatcagcattgcagattcaaccatgaaagccgaatatatagcaactttaaagcggctaagtagtcggtttggttgaagaaattttacattgctctgaaagtagttccagaagtagaaaaaccactggttctctactgtgacaacaatggagcggtgcctaactcccatgaaccaaggagccacaagagaggcaagcatatttagatgaagtaccatctactaagagttatagtagagagaggtgatgtgatgatcttggagatcgtgttagaacataacctagtagatctattcacaaagatgctacgagcggaatcttttatgggtcatataaactaagagagatgtccagtttgcttttaaggcaagtgggagattattggggttta

SEQ ID NO: 355837 - DNA, 1483 bp, Cannabis indica
aagaggcctttcagagcataaaaaggcatctcgcaacgcctccaatttttggtgaaaccaataactggagagacgttatttctttatttagccatctcggaagatgcgattagtgcaagaagagggtaagcacgagtaacctatttactacgtaagtaaaaggttactaggggcagaatctaggtatccccctctaaaaaaactcgcgttatgcctagtccatgcatctcgcatactacggccatatttccaggctcaccccataaaagtgttaaccgatcagcccttgaggcaagttttatcaaaaccagatgcttttggaagattgataaaatggtcgattgaactggggcagttcacataacttaccatcctctaacatccatcaagggtcaagctttagctgacttcctgatagaaggaataactccagaaggaatcccatcttattagcaagatgaggatacctagaagttatatgtggatggctcatccaacgaacaagcttcaagagcaggggtgatattattgtcgccgaaaagctttaagtttcactatgctctgagatcccaatttgacgcatcaaataatgaggctgaatatgaagccttgatcaccggcttaaagatagcagaggccttgaaagtcaaaaatttcatttgtcatagtgattcgcagctgatcgtgaaccaggtcctcggggaataccaggccaaaggcttgaaaatggaaaaatatttagagaaagttcggaagaacttggaaagattcgtttactttaaaatcgaacaaattttaagagaacaaaactccaacgtcgatgccttagcaaagctggccttgcagaatcacctggatgaattaaatctggttccagtagaaatgctgagcgagcccaatatatgtgaaactggagacgtcgagatgatagatagctctccaacaaggatgacgcctattatcaactttttataggcgcaaaaacttgtgtatacagtgcctcgctacacaatgatcgaaggcaaactatatagaagagggtattcaatgcccctactttggtgtgttcctcccgcaaaagaaaacgaaattattagagaaattcatgaaggcttctgtggggatcatgtgggttggcaaagtctatctaagaagatcattagacaaggatattaatggccaacgatcaataaggacacacatgagtttgtcaagaaatgtgagattttcacatatacatcgcgtaccgccaaccaaacttagaatgatgacctcgccctatccatttgctatatgggggatcgacctaattggggcattacccactgggcgaggaggagctaagtatgcggtggtagcagttgacttcttcactaaatggacggaggtcgagcccctcgtatccataacctgcaagaaagcccttgacttcgtcgtcaagaacattatctgtaggtttggaattcccataaagatagtatcc

SEQ ID NO: 355838 - DNA, 1072 bp, Cannabis indica
accgtagcttttgaattgtgcgagcaggttgtatattttgctcagatatgctatcatcttttctccccgagcctcgtattcaccggatacatgatttaccaccagttgtgaatgactgcagatttcattgtgttcgaccttcatttcccgggctagttttagtccagcaattagagcttcgtaatcggcttcattgttagatgccttgaatccgaacttgaccgcagtgtgcaggtgttgcccccaggcgtgacgagggaaatccctgcgccagatagttgatctgtagccgacccatccacatgtagtttccaggtcagtttatcttcattgttacttggttgagatgctggctcggggttgctttctggtatgctttcttctttgcctgtgcattctacaacaaagtcggccaaggcctggcctttgattgttgttcgggattggaagttgatttcttactgacccaattctaccgcccacttaagtaaccgtccagaagcatctggcttttgcagtatttgtcataacggctggtcggtatatacccgaacaggatgagcatggaaataaggcctcaacttccttgttgctagaatgaggcagtaggcgagtttttcaatcaacggatatcggccctcggcctcgatgagtctcttactaatgtaatagattgggttttgtacgttgttttcttctctgatcagcacgacacttacgacatgttccgtgaaagctaggtatattcccagctcctcacagtccagaggtttagaaagtacggggcgttttgcaagctgtgcctttagatcttgaaaagctctttcacattcttctgtccactcgaaatgcttatttcctcctaggatgttgaagaatggaacacatttgtccgttgattttgacacgaatctgctgagtgcggcgattcgaccagttaagatttgcacttctttggtttttgttggcgagttcatatctaggagggcttgaatttttttctgggttggcttcaattcctcgggcattaacgatgaagcctagaaactttcccgaactgactccaaaggag

SEQ ID NO: 355839 - DNA, 598 bp, Cannabis indica
aaaaaaattagaacaactacaaaatacaatggttcgaaccaagctaattcatttttgagtggtttgatttggtttgatcattatattggtctggtttggttagaatttttaaaaaattgtaatagtgatttggtttgaaaaattgaaaatcccgaccaaaccaatccgtgaacaccaccctaaatgtgaggaatccaaaattattataattaacataaaatagtgtccagtattatctccctaaaatacagtaaaagaaacaagtaaataaatgaacaattcaatatataggtatgtttattatataataaaagcaattatgtagacatatttttttatcagaaaaatatatatatacacatatttgtataagctataagctcattactagaaacccaatatttaattaactttagataaataaataactgtacatctattaaaaaattcttacaacaataaaaatagactaatatatatatatatatgcagtattaattataagatttaccttacaatttatttgtaaagtcatataagtagcaaacatttttaaaacttcagagtttttttttctgttgccgttaaaattacttta

SEQ ID NO: 355840 - DNA, 736 bp, Cannabis indica
atattgacataacttatagagatctctttaaattacatattttttaaaatatgtttattatttataggtacctatatcgaaccacttcaaggattcaattatgatcaaatatgttctgtctaacttctctagggagtctcttctagagtatcatttctattacggttatcattttttaaattaccaatactttataacattaaggtatctccatgggtgcctctagatttaacagcttcagaacaaatcaaatgaatatttattaataatttttatattgttcatttacgcttcaggtgttttcaactcattctaactcaactttgaataatattgaattatatcgttcttatatactttgtgcatggatcattttttaaaaattattatcgatcccaactgcttctctccccctgatcaagagaatttttaaaaattgtgatatctaataatattaatacacatgtagggattttactatatcacaatgaatcaatgtttgtttaaacccatatatactatataaaaaatgaacttcaggttcaataaacctcaagttcaagttcaatagttatgaacttaattcatttcttagaatgagacgtgtataataagaaatacataaatttacgaattttgtaaatccatgatcatatgatcatatgatcttatcacatcgataaaaaactaatgtaataaaaatctaataatgcctcaagattgttaaagaaatata

SEQ ID NO: 355841 - DNA, 936 bp, Cannabis indica
gagagactattcggacagtatcgaatggggcatgattagaagcgttggtacattagcttggtgttggcatcttgtcatacatgttaccttggtcacgagtgactaggtgagcgtcgatgttaggatttaccctatcttagtgggaacctatggacagtgcgagtatcttggctagagagcctcgattcatggatgcacacatggatgcttgcgagcatgactcggaatgagttgctctagagacggaagtgtgcacgaggcacacagtcgcgtgaaaaatgagtctattgttacttgaatggttggaaggttgaccttggcttagagaaatcaaggtaccgtacgggtgttccacttcctgaaaatgtgagcccgtgacaccagacgttgatgggtcgtggtcggagaagaatgtccagcccgccacttttttctctctccttgactctagttccacagttttttagggttttggtttttttttttttttttttgagattaacagtttttagtagttttttgttttgaatagtaatttgttttttattagtttaattagttttttttttaaggaattagtcaataggtaggagtttgattttgtattaataattttatttcagattttattataaatttattaaattaatttttatgtatatattttttaaagtaaacttaatttttactttaatagttaatattaggtagctatttaataagataatatgatattattttaaataatataccataccatctggtgtacagtgtgcaagataataacaaagtacttacagaatatctgaaagtctaacggaagatatttatactgctaaaattttaacatagatattaaatttcaactacttaaatatttatatgtaacacaatattatataactataagatataattcaatttaatataatatta

SEQ ID NO: 355842 - DNA, 873 bp, Cannabis indica
atctgagtatttatgtgatatgtgatgccatacttagaatgatagatgttaagtgtttatttttatggagtaaatagttgagttagggtttaagacaataagtgcatagtgtggtattggtgcttgactcgccgaggttgttgattactgggctgtttgtaaaatggaccttccataattatctagaccacagggcgatctagtagagcctggtgtagaccagaccaatccatcggcatcgcctgcagctccacaagatctgggggataatacggaggttggaaatgctaatccacctgctgattggcagcagatgtttcaagaaatgcgaggtgtcatacttcgtcaagaggaagaattacgtcggttaacgtaaccggcactggctgcaacctgtaactttttgggaggtacagacataattaaagtttagtagtggatgagtacaatcacccgtatccttgataatatgggggtgatgggagcagagaaagtaaactgttctactttcatgttacaagatcatgcccgcattcggtgggatatagtgggacagactcgagatataagtatgataacttggaaaaagttgaagagtctatttgaggaaaaatttataacattgctgtgaggattgaatgccacaatcagtcggacttgatgattaccactgctcatgatactttatataggaaagtggtcgaactagccttaatttttgaggaggctgagcaacatgtaataaaggagtagattgtaaaggatgccgccatggcatcgaaccctcctgctagtggtaatatcagtaaggggagcgacagtggtaaccctgatcacaaacggaaggcaaaagcttctggaacatcaaggagt

SEQ ID NO: 355843 - DNA, 988 bp, Cannabis indica
acctcccaaactcatgttttacggcccctgcgtatcgcttgagctccttacgggtagttcctccgatgtaaggtcctcccgagatcatggccactctctcgttgggtcttggcggtaggccaagaatatgttgggcatctccgaggggagcaattggggccaaagctcctgctgcacctctggtgccccttgaggcagagttccggctgccggaaccggattgagatggggcagccagttcttgatacactcgtagagatgtcccaatcggatcaagttctcgatctcgtccttgagatttttgcattcgttggtgttgtgcccaatgtcgttatggtactcgcatctcttactggggtccctgcgggagttgtccttatacagaggaggcgatctctggtagtgtgtattttgcctagtagcaaaatatacacgttcttgggagtccgttaactccgtgtattgagtatattggggggtatacccccttttctgccgcttgtcctccgtccagttgctgcctttagaggaccttttgctccgagagccttgagaaggaccggctagacttacggcgggagtggagtgcgacggggcctgtccattcatccccaagggattcccaaagtaggaagatgcgggggccaaggcctgacctggactatatccgggagtagcgcaaaattgtataccgctcatgggtggagctactgctggcaaagtacctgggagctgggctccgggtacatatcctgcaatcccggtgggatagtatcccccataggccactatttgggcctcttccagattgatatacttttggactctcttctgtaaatcttgaaggttggaagctccttcttgctgtaactcgttccagaatggagttcttgtacggatgcccgcctgaagaagagcgagctactgtccgtcatcgactttcttggtttttgtaggcttcttccttgaacctctttatgaaattctt

SEQ ID NO: 355844 - DNA, 509 bp, Cannabis indica
gatcgtgggattgaggctgagtacaatgatagtgggatcgtgtgtatgccatatccacgtaagttgatccctgagttgtaaggattgagctgatgactcatgatgcgaaagctaaattcgctaagtgttgatcgtcctgctcggctcgttgaatatttcattctggatgtgccagcgaggcgtcctgctcggctcgttgaatatttcattctggatgtgccagcgaggcgtcctgctcggtctatcgttccgagcagatgctccaagtggactccacgtgtcatcattctcgtgataccacgtcagagtgccaaatttgggataacaaccttcgatatgcctaaatggaagctcgtcaataatgaagtacattccaatcaattctctcaccgtagcttgactaaacattgaggatcgagtcttacttgagttaacttcagaatcttgaatttattagaatatttctaattaaggaaataaaataatattattgattctgataaatgaat

SEQ ID NO: 355845 - DNA, 528 bp, Cannabis indica
gttattaactagaccttgttttattaaatgacaaattagaccctatattttttgaaatggtaaaaaatagaaccctaggttcaattttcaaaaattttattttttaatataaccaactttaagataatttctaatacgaacagatacagaaaatgtaaccagttttgtcttaaaatctctagatcagattattattacgttttattttgataaaaattagttcggggtcctatttgtacaattttagtaaatactgggtctattctatcatttaacaaaacaaaaggtctaatgggtaacttttacaaaacataatgtccaaaataatatttatccaaaaatttaaaaggagatatgaccaccctataaaacataatagttttgctctagatcactcccataaaaaataatagttcacaaatatttttcttttacgaaaaatacttgttattataaatcaaaaaaataaccgtttacaatagcagtgttgttaattctattttcggcatatttaattgacaaaaatat

SEQ ID NO: 355846 - DNA, 661 bp, Cannabis indica
ggtaatgtagcattatctttgttgtaatttaattattacttcacaacaatcctaaaattaacaaaagcattagagtaaggtaagcaacaaaacctataattttttatttggatttgaatgaaacttaggtagcattaaaaggaatgaatatataagaatagcaatgagaatggagataagaatagaaaaaacaattgaatcaaattttaaaaacgcataaaatattaataaaaaaactatttaatattttatcatattatattagaataattattcctcctattttaaaagttatatttgttcgaccaaaataatagaaaaattattccattaaaataaaattttaacactttaaaatataaccaaacaaataaataaaattaaaattttctttatcgccaccataatttattgtctttttttttagtggcctttgttttcaaaacttaatatagtaaaagcatttttagctgtcaattttcacatttgtttttttaatactgacattatgtaagattgttttgccaactccatccctcatcagtaaacatctacttattgggccacaacgttataaagagagagagagagagaaaaaaaaaaaaaaaaaaaaaagaagagaataaacatagcaagagaagtcaattttaatatcaagtac

SEQ ID NO: 355847 - DNA, 564 bp, Cannabis indica
acaaaaagaaaaaaaaattcaaacgaaaaggcagggtctattttcatgattcggtgggttttatttttatggttcggtatgaatgcctttataattgtgtattattttcactgatactatttatataattattttacaattgtcgtataaaactaaaaaaatcccttagaaattacactcgtgggtttttgaaagggttggagatagaaaatggaatttttacaaaaatattgaattttaggtaaaagtttacaattttgctattacacaatttcttttcacaaaaataccgtctttttataaaacaaccgtaaaacattaaaacagaacaattaaaataacagttaaacaaccatagaacaactgtgaaaacttaatacagtacatagtattaaacttacacagtatttttggaaaaaaaattcaccccacagtaaaatgttaaaaaggttagaaatttcaatataacaccataaaaaatagctctaaatctgtaaattaaattagtaaatgtgttttctttcaaaaaaaataataaaatagctaaatataataaattagtta

SEQ ID NO: 355848 - DNA, 676 bp, Cannabis indica
atcctcaatggttggtattcttctttaacttggtatttcagttgcagttgagtattttctttgtgttgcgttctagcacatgtttgagcttgtgtactagttctttaaatttgtaatctattgaaatgtattagtagcttcataatttacataattcgtcccttgatcaaactgtccattacaaatatgagaaacaaaattgcgtctttaaactggcagtttaaaaatttatgcattgtaagtcaactatgggataactatcaagaaattgtaatgcaacaattatatttgttgtgaggcagctaatattaaaccttaaaacaactaataatgcccatatgtaatacaaacaaaacttaccaatatataatcgagctttctctgtacgagtcgtgttttgccaatttcgagccatgttttttttaaaaaaaattataatattacagtagcacaactattattcaactagtatacaacttaattgcaactagaaatagaaaattcgaatggtcatcgtcatgaaaaagtttgtcggtatttttttgtcactaattaacaatcaattgtaccttaataatattatgtggagaaacaactgttagaattttgtaaaccaactttataacaaccaaatgaatatattaataaaactaaccatgttataattttttttaaa

SEQ ID NO: 355849 - DNA, 628 bp, Cannabis indica
ataaattacggagatttatatggtatatgtgaatgtaatatgagttatcagtgtaatataaatattttcaggtttggcgaccttagagacttgatcgggagccaaaaatgtcataacgaatttaattgatagaatttatgggaatattatgataagttgataatatgggtattgaagtaattaggagtatgtgagatttaacttagcgccctagaagtataaattttttagtggctaaaaaataataagataattactaataataaattttttattattatattattaatattatcttatattattattatattattattataatattatttttttattataaaacttatgtgtacgatttaattatatacatatatatattaatgttataaatttttaaaacagatgaatgaaaacgaaaccctcctctttcgttaaaaattctctctcctcttaaatctatttttttcgatttttaatccaaaacttagcgatctaagctcccgtagtagcaggatagcaaattctcctagcgagaaagcttaaggtaaggtttaatttcattttaagtttaaaacaattggtttcgtataggggttttacaaattagaatagttatgaaggttct

SEQ ID NO: 355850 - DNA, 545 bp, Cannabis indica
attttcttcgattttcaatccaaaacctagcgatctaagctctggtagtagcaagatagcaaattctcctagcgggaaagcttaaggtaaggtttaattccgttttaagtttaaaacaattggtttcatataggggttttgcgaattagaatagttatgaaagttctgaccttataggattattctcgggtagtcatgggattagttttgatgttttcttgttaaaattgaggtgattttgggttaaaaattgagtttagaattttatataagtccgaacactagtggcgtttgtcaattacgggctcgattttagattctattacataagtatggtagtatgtatggtatatatgtgccctataaagtttagggtggtttggacaggttccagtagcgtttcggtgagtgcgtaaacttggcaaaacacatttttttacctctgagaattcaggaatcgtatttttgccataacttcttacttgggtgtccattttaaacgttctatatactgttttgaagcttgcgacgagctttaccatatg

SEQ ID NO: 355851 - DNA, 695 bp, Cannabis indica
caagcatccagtgaccagaaacagtacttgaacctgttgtcctctatgaccatgtctataatagtacctagattcttttgttccagcacgtaaaagtaatcaggtagctgactataagctgctactagcgtacccctcgcataaataagtgccttctctcggcacctctaagccttctcataactcatcttgatctcatagtcctgaaacatatccctttgtatgtctttagctttgtacttagtttcatttgatctaaacttattcttaataaggtggccaacaacccacggtgctgcttgacggttatcagcatgtctaggatccaagctatatgtgtgttcgttgtggaatacagtcacctcaaacatgtcacaacgtgccctgttcctccccctcacactccatttgcaatttgaatttctgaaagttgcataaaagacatcagtcccagactttttcaccatgaactcaaaattcattttcaatgcaagccttcccactacattttataattcagtcttatttgtgtacaacttgccaacgtatatttctcctgaatgtgtaccagtaagagaagttttataaacattattttcctctatgtcttcccttgtccacacaataggtttgaattttgtacaaacttcaaaattagatggtacagtactgtaacaccctaactaccttaggcg

SEQ ID NO: 355852 - DNA, 709 bp, Cannabis indica
tggtagagactagagaggtcttcattttttgtccttttcctgttttggaagttttctccggaaccaggtcaaacgccactccccaccaaggcatcgccaacaatattatagcattcacattatgaatataattaacaccagttttttttagtgtcattttattaactttaaaggtcttgagtttcaacagatgaccttttccttcaagctttttcatagagcaaagtaatatttttcttttaataacaaattttttttgccatattatattatggttaattaggatttttgtcccataaattttgacatgtatcaaatattgtcccttgaacttttaaggtcgttacaaatgttccctaaactattgagatcgttggatttaaggacttttgtctaattttattcaattttactatttcagtgattgtttatgtaccgaaaccatactccagagattttaatatctaccaaattactaaattatgcctcctgaatttttatttatgttagatgtaacactctaacatttaggcacactacccaagatgattaagaattcctaatcccctaaacgggattactagtaaaataagcgtagaaattaaactttaaacgaaaacagaatgaaaataaacttgtaataatttaaccttacaaacaaagttacatgttcggatcccaaaattgtttacaaatattacaagtcttt

SEQ ID NO: 355853 - DNA, 762 bp, Cannabis indica
aaaaaaaaacaaaaaattaaaatttaatcgtatgttaataaaaaaatccaacaaaagaagattagttttgttaaatacaaaaactcaaaattaaattaaatacaaaattaaattcaaaatctaaaatattttagaatataaaatccctaacccctaaaattaaactcactaattttttctttacacagttcaaaaattgatgccatatggacatagatgatgaccgtccaacccaatctgttgatgaactttctccagaaaatcaccttctcttctccttcacttctgctagcctctcttcttgacaaaacaaacctaaaactgaaacagtgaaactcattctcatctctctcttctcacaggttcttctccggcgcacctccgcccgacccaggtttcttctccggcgcacctccgcccgaccctagtgagccattccaccacaaccaatggacgagattcccaccacccccaggatcgcaagggtcaaaccactctttctcgatctccggcgcacctctctttctcaatccactctctcactccatctcttttctcgatttctctctgctcagagccagacagagcaatcgcacaagaggacgacaaggttgagatatggacatcaacggcatctggatctgggaagcttgagtgctggggttgcaatcgcacaagaggacgacgatgatgtttctgtgcactcaagaaaatcgcacaaggcttctaggtatttttttttttacctttttattttctttt

SEQ ID NO: 355854 - DNA, 684 bp, Cannabis indica
ttaatcacataatcttgattacttttaattgtgtagacaacacaataatcataaataatagtgtgataaggatttaaatgaatttataaatcaaacaaataatcatgaagcaaacatgtgaacccactattaaacaagtagtaaaataattctatttctttattgataaatgaaattcaagataacattgaaatagagttttagttcgggcgtgaaacccaaaaaaactcccacttttgtactaacataaaacaatcagtacatttcaattaatcctaggttctctctgtgcttttcaaatacagtctctatcaaagtcttggtgaatgggtcgactaggttgtctttagtatcaaccttttctaccagcacgtctcctgttgccacatattctctgatgatgtagtattttctctcaatgtgtttactcctcttatggcttcgaggctctttactgttggctataatagcagtgttgtcacaaagaaacactagtgatttttctatccttagaacaataccaagctctatgaagaactttcttagctacaccagttccttagcaacctcagcagtagctatgtattcgaccttcatggtagagttagatattgaggattgcttgactgtaaagcccgcttagttaatttggaaattagtagttgtttatgtttaattatgaaa

SEQ ID NO: 355855 - DNA, 602 bp, Cannabis indica
ggcatttaccctgtgtgtgacaccggcatccgcgtgtgggattgggtcaagttcatttgggatcttaacaataaaggaatccaagctgatgaggttttcctttttgcttccattgttgtggatactatctggagggtgcggaatgaaaaggtccataataattgtgctcctgatataaaaaagtgtattgataacatttgtacttcttatgcagattgtcattcttctttgcttcctagtcccactccagatctaaaggaagcttggtcccctcctccgctggattggattaagctgaattgtgatgtcaaggtgggattcgatagcatgtgtattgctgttgttgctagagattatgttggcagagttattagagttcagacagctcgggaagatttctcggaggctctttgtggagaagcggctgcctgctgcttagctgtttctgtggctttagaattaggttgcaagtttgtgattgtggagaatgactcgagggtggttatcaatgctcttaatgggatggattctcgttggagtcttgaaaactatgtctctttttgtactaagtcttctccttcctttattagttgtaatttttc

SEQ ID NO: 355856 - DNA, 729 bp, Cannabis indica
ccacgggctttggacggtggttagcttggccggggggctaggatggacggagcatgcttctggcacttttcacacgttcgtgagtgagttgaagaatcctcctggaccgtgggtcagtagtacccttgcctttgtactctttgggcagtcacccgtccgctggagtggctcccacattctccttcatgtacctgtttcgttatacactttaagtacggcccatggtaagatcttttgtataattggttctgaagtatagtgtatcttgatgcccttactatgatttttcttgctttcttggcgtccgttggtaatttatcgtccctcaagtatttgaggattggccgcctccagtctttgaccgcatccgccgggatttctgcacatttaatttcttcctctgctgaaatactaggttccgggatgaagtcaaatggtattgttctcgtaatgtggagggggaaagaggatcccaagccggctaaagcgtcggcgtgcatattcgcttcacgggggatttggctaatttggaagtagtcgagagtcgcgatcaatttctttacttcaaataagtacctggccatcttcagttctttggcttcaaaatctcctttgacctgctggactatcaactgagaatctgactggactaacaccctctcggcacccatgtcctttaccagttttatcccgtggattagagcttcgtactcagcgtcgttgttggta

SEQ ID NO: 355857 - DNA, 520 bp, Cannabis indica
gcctttactaatccaaattactaaagcggtcattacaaccaatctgcctcggagtatacagatccaaagagaagattcgtttattttgaaggaataagtgaaattgcccaaagcaacttcgaaggacacctcgttattcataagaaatattgacgagacgaatcatttgttaaacacttagcgtgttttccaggttacagtaattaagtgtttcaacttggaaatatacaagacacgattgtccagtctgcgaggccttatggtcaaagagcagttcttaagtttgctcagtacactggtgctcatgccattactggaaagcatatgattgatcaaatcagtattgaccatctacaagttaagcgagttgctattgtctaaatcagtatttaccatctttgaggataagaataataagcacttatgcagttatcaattgttatctacatgtgatttaaatgaaacatgatcaactcccacgtttcatgaaacaattatgtattttgaatttaaatgtaaa

SEQ ID NO: 355858 - DNA, 661 bp, Cannabis indica
tcatcctcgtcttcgtgctagtacttctagcgaaggacattcttctgaccttgtacccagccatagaaggaaggctcgtacaaagaaaactacgcgtttggccgacgctactgatcctcaagtggctgggcttaccactcttcccgacgccgaacaggattcggccctcccaatggaggaggatcgtgagggggacgctgaggtccacgaagttgaggagctggacgaggtgcgtccgggcagtccttccgaggcgaagggagaggttgaacccctaaacttcggggagtacaaagaggctgggctgcaagtggatgctgacggagacgtcctggttgagggcgtggactacgtcagtgaggagctcgctgcggcggttcctcataggaggcagggtgctttgtgcactaggtgggtaagtcctccacccaagattacggaggcgtgcctttgaactctcgaccaggacgggtacctgggtgagatggactgctacattaccgctcacgacaatcgtgccacaaaccctgataagggaatgttcgcctggtcgggggctcacggccagcaaggggcgctgatgcccttgcacaagtactttagggatgtggcagacttctttagtctctgcccggcccagatcactcccaagggcatcaag

SEQ ID NO: 355859 - DNA, 704 bp, Cannabis indica
cataaaacccaacaacttgatgcattgaacttggtaccggtggatttgtgagacaaactgagtatatgtcaaaaggaagaagttgagatgatcgacaactcgcctacttggatgacaaccatagtcaattatcttctcaatggacaacttctagctgacaaaaacgaggcacgaaaactcttgtacacagtgcctcgctacatgatagtagaaggcaaattgtattgaaggggctattcaatgcctctcctacgatgtgttctccatgcagaagcaagcgagataatcagaaaaattcacgagggcttttgtccagatcatgaaggttggcaaagcttatcaaaaaaaataattcgacaaggatattactggccaactataaataaggatacacacgagtttgtcaaaaaatgtgataagtgtcaaaggttttcacatatacctcacgtaccaccaacggaactaagactgatgacctcgccatatccatttacaatatgggggattgatctaattggggcactccccacaaggcaaggaggagcaaagtacgtagtagtggctgtcgatttctttacaaagtggacagaggctgaacctctggtttccataacctgcaagaaagttctcgactttgtctttaaaaacataatttgcagatttggaataccctttaagatagtatctgataatggaactcagtt

SEQ ID NO: 355860 - DNA, 873 bp, Cannabis indica
ggtattttatgcaaatttttcaaatttccctttataaataggtagtggtccctaagaaacattagagtttctgtattctctccttccctatcaaagaaaatattttagaaatatagtgtattcctggaagatcctaactttctctgcaatctccaacaatgactttaggttagtgcttccgttaatcttttatcatcttcttctttaatttagcaaatgttttaatgattattaaaatacttttagaaatatatttaaatttgtgatatatatatttctaaagtattttataaatcctaacaacccatattcccaccaattcccactcgtccaatcttaattaatagttatgctctgtggttggcactacacaccattcacctccacagccttctgcttttcattatacactacttggacacaattaggaaataaagaatatataatctcaattacccttttaaatattgctcatataattcaacaggttcgagtccactacactttcgggtgtggtgtggcatatagctagactagaagtagaaggggaccccatcttttacaagttttttttttctttttcttttctatttgtttttaatatttgagaatcaagggacaatgataattccaaaaccatattttttaaaaaattaaagtattatagtagttagataattagaattaaaataataatctagaagctaataaagatatttttttattaaagatacaactataattagaatttaaagttacggatcaaataatctgttccctaattcttatatcgtttgacaaaaatactaaaataatattagatgaaaaaattaaaacatcacaattaaccttaagaatacttatattctgttt

SEQ ID NO: 355861 - DNA, 644 bp, Cannabis indica
caatttgatctacactacattccaagcatttccataaaagggcaggcgttagcagacttcatcacagagtgcaatgaagctgaagctaccgcaaacatacccacaccaccagtcccggcgtggaaggtatttgtggatggcgcctccacgagaacggatccggagcgggagtcgtaatgatatccccgaacagacttcgactccaagcagccctacggttcgaattcttagcttctaacaatgaggccgaatacgaagccctgatagcaaggctgaaattaacaaaaactgtgggggcttaaagagtagaagtctacagtgattcgcaactggtagtaaatcaggtgtcgggagaatatcagacgcgcggagaaaaaatggccgcatacgtggcgatagttcgggaactgctccacgagttcacggactataaagtagaaagaatccttagggaaaagaatgctcacgcggactgtctggctaaattagcttcagacaacaaaattgagaaactgagggtggtacctgtggaacgcttggcagagccaagcatcaaagtaaaaagtgtcataggaacggttgagcaagagcccagctggatggtacccatcatcgaatacataacaaaaggcgagttgccccaa

SEQ ID NO: 355862 - DNA, 566 bp, Cannabis indica
gacggaggactcacccatctggcgcccaaggcaccctgcctccgatgaggaaccacctcagcaagctcctcggtgacgtagtcgacgcctgcaaccaggacgtcctcatcagcatcaactggttggccagcctcattgtactccccatagtttaggggttcaatctcctcctctccctcagcagcgggagggctgcctggatgtgcctcgtccagttccctcaacctcctggacttcagcgtccccctcacggtcctcctccatggggaccgccaaatcctgttcaacgtcgggcagggtggcaagccgagccacttggggatcagaagcatcagccagacgcgtagttttcttcgtatgagatatcattctatggctgggtacgaaatctgaagaaggatgagcacgaagacaagggtggacttcgtgcagaagttgaagcagttcctggtcgatttgatgctcaggctcccaagactcaccaaggttcatctccaaaagacaacacacaagatgagtgttggacggagtatcaagcgaaaaaaaaaagcaaatatgccgaccag

SEQ ID NO: 355863 - DNA, 215 bp, Cannabis indica
ataaaacccaacaaaaagttgactcaatcaccaagaatattaaaggcaaatcaaatagtatgtaacagctttataagaccatattcggatatgaaagtgtaagcagcgaacatttcccaaattgtcaaaaacactttttgtgatagattccaacttactcagagacgactttcacacattgagatagatagctctatttgtaaagcccgcttagt

SEQ ID NO: 355864 - DNA, 838 bp, Cannabis indica
atgtattaaataattataatttatatgacgatagtaaaaaaaaaattaactaaaaaattatttcgaatattaaaacagatagagatgcattaatacatccgttttaaggggatgcattatacaattttctaatattagatattgtgttaagaaaaaataaaataaaatatgtatttgccttacagtgttgatgtgggagtaatttatgatatttatacttagtagttatcaaattttaactacatatagagttttggtaattaaaatattatacttgatatgattttattaaaatatatatataaatataaatatttggttaattatgatatagaacaatttagtatatagataattgtcaaattagtaaaaacaaacagaattccacaaaaattctaaatccaaccatcttaataatttaaaaataattttttaactaatttatttatgattgaatcgattcctcaaactaaaatgataaattctatttaatgaaagaaattaattttttcatataattcttctaaaaaaaaattattgacaaaaaaaaattgtcaattcactatggaaagtccttacaaaaagaaaagaagaaaaaaaagtcattattgaaattatcaacttcattaaaatgagcattccagttacaaaatagcttgaagatcagctagaacattattctcaagaatgctacgatcagagtaaaatcgagagcgtctagccacaaaatgtgccactcgatttgctgatcgtttaacaaaacgtaaactaatattaggtgaagaagacagtaaagttttacagtcattagtaaccaaaccgaataccgaagacattt

SEQ ID NO: 355865 - DNA, 575 bp, Cannabis indica
aagtaatcctagacatagaaacttgtcttcaaggatgtgagtttttgtgtttttatgatgtttcggttaattgaatttcattgggtgttttataacttattgtagtacgtgaagctttaatctttttgttgttttcttttgaaatttagtgatggagatagagataaagacaaatacaatcccagccccaagcgtagaaagttgtctgggaggtgagtttgtttatgacattgttgttgctttaatctctattttcattgattatatattatactatcatgacgtcgtcttcggaaattaatggtggtggtgggactttgactgtaatggatcacaagcttcgacccatagccagtgaccgaaccgaagtcacacctcgtcgaacgaatgccctttctctacgttcgagttctgaaagcaaagcccatagctaattcctctgtttacgccaaactcactcgatcaaaaccaaaaaacagagcttgctttcaacaaagacggacttaactcaaccaatctccaagtctccgtttggacttggacagaagaagaaatcaagaaagaaacaacaaaaa

SEQ ID NO: 355866 - DNA, 980 bp, Cannabis indica
tccaagggcctccttttttctctttcctaggtaggtgggatcaacatttaagtgatggcagataatcttagggtcaatccctatcatatctcgatgactccaggcgaattgatcatggttctccttcaaaaagcttattaatttctatttgagttgctcgtccaggttcttcccaatgtacacacatttgggtggacttcctgggtagagaataacctcttccaattcttcgattggttttagcaggtttctttcatcttgaactcgaggatcaagatcttcatttttcttctcgtgttctcctgccaagatcgtcatcagttgatgatcggccttcctatgttgcagctctatgcgataacaatcgcgagccagcaactggtcgccacgcaccacccccacgccttctggggtttggaacattaaagacaagtgcttgatcgagctgattgcccctagtccgatcactgttgggcgacccaacaatatgttgtaagccgagggcaggtcgacaaccaagaagtcttgcataacagtagtagttaaaggtgcatcgcctacggttaatgcaagctctattatgccaaggctggcgatgctatctccggtgaatccgtagagattcaccatataaggccttaactttcccttttcgagccccattttctttagagtctccttataaaatatatttacagagcttccattatcgattaacactctcttgatcctcttattagcgagttgtatagttatgatcaacggatcaacatgagggtatcacacgtttttctcgtcttcctatgtgaacgtaatggggggttcctcggttttcacctttttggaaggttctgttcgaattattttaccatgatcttagatttactaacaaatatgttatttaacatcctaaatatgaacttctaaaatgatatgaaataaacacatataaagtagaagaaaccttacagtggttgcag

SEQ ID NO: 355867 - DNA, 746 bp, Cannabis indica
gaaatgaaggaaaggtggtggcttttataggcaagaatgcataaggaacaggcactatcacctaccaatcgaacggctggggaggcgcacgattcgaattcccaaaaatcaacggttggattgattcgtaattaaggcggtggaaacgtttgagtatccgtctgacaccattaatgcgccgtatcaatcaatgggcatgaaacgaatcgacctctgcaaaaagtgaatcgctgcattaatggcgatcattaaatgcaccctcacgcgctcaaagctcgtgccaggaaaccgaggagtcgaccggaggcacttaagcaagccttgttttattttttaaataaacaaggcttgggggtaaatgttgcccctgattttgcccaatatacgtggaccaactagacagggacacgtggatcagagcgtcttaatgctataattatttgctaagtctttgtgatataaggcagcatccgggacgtgcctcccggagaaggcaagctgagccccatacgctcccggatgcccagctaatattaaggcatctccgcgaggtgtcaggcttcccctgagcagtcaattcgcatttaatgccgcatgggaggaagcgtgttgggactgctacacgcaataaagtctgacggcacaacccccaatctgcagctgcgaagtaatgatcatttaagtctattgacggctacactgtgaagagtcacatcagtcaaaagacaataaggacattccacata

SEQ ID NO: 355868 - DNA, 792 bp, Cannabis indica
acaatcaaaatcaagatgcatccaccagaccaagaacatacaagtttccaaacagacatgggtctgtactgttataaattcatcccatttggtctgaagaatgtcggagctacataccaaagatcggtaagtaaaatgcttaaagaccatatcagacaaaatatggaagtatatgtggatgacatgctcgtcaaatccaggaaggctgggggcatatagatgacctggacgaatgcttcaaagtcctcaagaaatacaatatgaaactcaatcccctaaattgttcctttggagtcggctcgggtaagtttctaggctttaccattaatgccgaaggaattgaagccaatccagagaaaattcaagccctcctggatatgaaattgcctacaaaaaccaaggaagttcaaagtttaactggtcgaattgccacactcagtagatttgtttcaaagtcaacagacaagtgtgttccattcttcaacatcctgcgaggaaattagcaatttgaatgaacggaggaatgcaaaaaagcctttcaagagctaaaaatgcaactcgcgaaacctcctgtactctcaaaacctttggacggggaagaattaggaatatacctggttgtcacggaacatggagtaagtgttgtactgatcagagaagagaacaatatccagcattcggtcaactacatcagcaaatgactcattgaggttgaaggctggtacccattaatagaaaagctcacatatttcctaatcttagcaacaaggaagctaaggccttactttcaag

SEQ ID NO: 355869 - DNA, 607 bp, Cannabis indica
agcaaatttaaggttgtatctatttttttacaattaactgctaacatagagtacttatgtgtatactcttttacacgtgacaagtttatattagtacacctaatattattatttaaaaattataaagattatttcaaaatttacaatattttttattttgtaaatattttattttttatttttataattttatttaattttaaaatgaaatttgaaataataatattaggcgtaccaatataaatgtgtgacgtatacaagagtgtacacataagcagtctatagtgacaattaaccgaagaataccttaaatttgctaatagttcagtagtttgaaacattttacttgtcaaaattaattaagtgcaagtaaaacaatagttagagcactcccaacagttcctctactctatctttaaaatatatcaccaaaattttattttttctattttacaacacacttttacactacatcatacatcaaattctattagatacatcacaaaaatctttttttttttttttttaaattttaattatattgtattcattactaatatataatattaatatatacatatattttcatataaaaataattattaaa

SEQ ID NO: 355870 - DNA, 633 bp, Cannabis indica
gacttataaaacggatttccaccatcatttgtggtgtcttctttcataccaaggttcatgcttaactaagcattagagtctgccatatttggtgtcgggtttcatcacaaatgttggtgtggttcgtatcatttggtatcagagcttatgatcatcgggttcgacctatctatcttttgtgtttttcttttcaattcatgttctataatcttgcttaacttgtgttctactttcctgtcaattcctgtttcatctcttctattttactttgtgaaatccgaaaactgttagaaccacattctcataattttcttttgtcaaacatcgtgtctttgcttttcttttcttcttaaaaaaattaaaaattcaaaaattttaatttttttggttgatttcttgtctccaaatttttttgtcaattatttccctttttttaattgaaatttaaaaattcaaaaaaaaaactccaatttgttattgctaaattctagtttccctatttgtgtcacaaatctgtttccttatttttgtttctcattggtttcccaaaattgtttcataaagcttgtctacttggtttcttttttttttctttgtgtcattagcaagtaaaaaaaaaaatcgaatttcata

SEQ ID NO: 355871 - DNA, 1059 bp, Cannabis indica
gacacttcatgtgtgtggctgttacttttgaagtctgataaaaccagactctatacgcctatagtgacatgcagaaaatgaatgcaaaaggtttcagtgacacgtgtgaagtgtcactaaaaatggtttttccagtcaccctcattagtgacgcgcgttgaagtgtcactatactcttttagagttactcaatgtgtgtcactaaaacccaattttctagtagtgaatcccaccacggagtccatagcaatatcttcccatttccactctggaatattcaatggctgcagcaaccctgcaggcctctgatgttcagccttcacttgttgacaggtaagacacttagcaacagttcagttggccaccaaaacatggccttgaggtcttgatacatcttcgttgaccccggatgaactgagtaaggagtcgtatgagactcagtcataatctctcttttaataccgtcatccataggcacacaaacacgattcataaatcgtaacattcctgtttcatccactgtaaagtcactagtcttcccagccgaaaccctatctcgggatttcattaactctggatcttgcaattgtgcttctttgattcgctctaaaagagtagattgcagggtaatattagccaactgccctacaaccaactcgattttagctcgggtcatctcatttgctaactgctgcgagatttgtttcacagtatttatctgactctgcccctttctactcaaggcatcggcaaccacgttggccttaccagggtgataaaggatctcacaatcataatccttcaccagttctagccagcgtctttgtctcatattcaggtctctctgggtaaagaagtatttcagacttttatgatcagtgtatatctcacatttctcgccatataagtaatgccgccaaatctttagcgcaaatactactgccgcgagttctaagtcgtgagtagggtacctctgctcgtactcctttaactgccgagaagcataagctattacctttccagcttgcataagaacacagccgagaccttgtctcgagg

SEQ ID NO: 355872 - DNA, 907 bp, Cannabis indica
ctcaatagttcaggaggcatttttaacgaccttaaaaagttcaggatgcatgatttggtacatagtcaaagttcaaaggggcgaaaaattataaattataccttttttgaaaaatagaataaagaaactgatgcgactgtaaactagcaaacccaaagctaaactgattgctccaatagctgtaaactaacaaacccaaagctaaaatagatccatctttatattatagaccgttacaaaatcaaacatccatcaattaagttaaactttagctattttatatatttttttacttatgattagcgcttattatattttagaataattaatatttttgtctcttaaacttttgatactttttgatcttgttttctaaaatatactgcttgttaaaaatttccaataaaatataatagttaaataattatgcttttttgttaggtttcgtttcttttaatgttaaaacttaacatttttattctctaaattttgatcaatacataattttgttcctttttattaaaaaaaaaaaaaataataatattttaatagttttgagaaaattaacataaaattattaaaaaacttgataaaaatattaaattaattaaaaatattaaatttacttaaaaattaaaattattcctaaaaaataatgtttttaaattttattttatttataaacacgtattttaaaaagtcaaaaattaaaattattgaaaattcaataaaataatttaaacagactaaaatttttttgaagaaaaaattaaacttatttatatttagggatattggcagctaaaccacctgaactcttaatctgttttgctatgtacccctccgtccaaaaatcacaaataagtgcaacgatggactgtccacgtgtacacacttgtacacgtgg

SEQ ID NO: 355873 - DNA, 614 bp, Cannabis indica
ttttttttaaaaaaaaatgtggggatcaaatgtctcgaatataataaaaatagaaccggttctataacataatgaataaaaataaataacacacaataactcaaaccggttataattaaaacataaccgatttttttatattatatttttagttaacatgttatatttattatgattatgatatatacaaatatataataaaaatttaagattattaaaattttaaaataataaaaaaaatgggttaatatattataggcgacggtttaaaatcatgccctatactataggcgacagttttagggtttgggacacggttttaaactatcacttatagtatagggcactgttttaaaccgttgcctataccatgttataggtgacagttttaaaccgtcgagaattttacattagtgactgacgagaatactttagacgactgtttaaaattgtcggaaaaaactatttttgtagtagtgattgtatcttaattggtgaacaagtcatatgtatgctgatacaacataagtgttgggttttataccctaaataaaactcatttcaatacaatcagatttacttattaatatagatcagaaataacatttaatgtt

SEQ ID NO: 355874 - DNA, 890 bp, Cannabis indica
gagctagagcttttcccacatctatgaggttgataatctaaatctcgtcgcttctatgctgaagacataacgctccatctaacaatcatagctcttggtgacaaggtgaacttcaacagtcaacatcatttgaatgtcagctcctatctgagagaactgactcgacggagctatgaatcttactaaaagatgtctaaggctgattggtgagaataccacgagtgcgccttcctatagtgagatgaacagctcgctattagttgtatgtgcttatgcgactatcttactgtgtaatatacattaagtatctcattagtcgttatatctcgtcttctaatgcgtaacgaggttgatgcctcaccttgtacacttgaagttatatggtttctcgttaatatgcgaggcaatagtttgtatatctttatctcgtataagactattcagtcaaccgaattgtaaatatactttgtcaatttcgcttttaacgagttattccacctttaatgtaattataattatgtgtgttggttcatattcttcccagtttgacacgtgtccttctctgatgtgctagccaaattttgggtataacaattgtgccttaaaaagctctttttaataaaaagtgctttttaatgaatacagagggtatatttgtcataatcccttttgaaaaaatgcatgtcctctaattttggcgattttgcagtttcgaggtacatcaacattaaatgaccattttttccacttccatttcaaactctgtctgcaggatcaaacatcttcctgatccgacgaaaatgatttcaagagtataaaataagaaaaagaaaccacctttgcattatttcttccattttagaaattttgaaaaactctcaagctccttt

SEQ ID NO: 355875 - DNA, 694 bp, Cannabis indica
ttttactacaataattttaagagctatttgtgtcataatcttcttaagtggtcaggtttttgcaactaaccctaattctaaaattttagtgatacaacctcctaaactcatgttctgttatcacttagtcctttccatccacttttaaatgttaaataccacactctattgtctacgtggatcaaaatgtacacatgacattatattattagtccaagttaataaatatttaaaaaaaattaaaaaaaataattatttaaaaataaaataaaaattattttctttaaaaattaattaatttaaaattaaaaaacaattttaaaaaaattaaattaaaaaaaaaaaacctaaattaccctaaaaaattctttcttcttctcgttctctctcctcattgctctaaacctagctgtcatcctcgtcaaagccaccatcaccatccaccacaattggtgactaccatcaccaccaaccctcacaactgccaaccatcaccaccactgtcgaaacaaatgcacaccatcaccaccgtcgaaaccacaattgctcaccaccattactattgtcacctccatcctgattcaaacacaatcccataactcatatcctaacacaatcaaacaatttacattcccgcctcttagaaagagccgctaaacgatcggaccatgttttaagacctgatactcaaatc

SEQ ID NO: 355876 - DNA, 1001 bp, Cannabis indica
aaggggagtaggctattaccgacttccggggccgaacttctttaaattctggtgtcttttatttacatttattacgaatttcggcattattaattgcatttattattgtgattttggtttaaatctcatttattcaactccgcgtcggttggctaaaaatccagtcaacagacactaaattcatttggttcatattggttagagtttgaaactacaaattgtaaataatatgcacagtcctaattaaagaggccttaaattaattaagcgcaagtgctggcaaaattttattgttgaaattattgtttagttactgtacaaacaattcaaaatgtgctaaatatggcatcttcatttgattttttgtgagtaattgtaagtttatattagcttctttaaattatgtcaaaatttgttttgctaaatgttttacgaataagattgcatattgtgttattcgtgattcttgttcatattaagattattatttaaaaaaaattatactttcagtaagaatgatactcttgctgaacttttattcagtaaaagcttgtttgataggttgtattgcattagtattatttaatacaatactatgtctagtattgatttgtattaatagattgtgcaaaatttatattttcaataaactagatcccaacatcgattataggtcgggctgggttccaagtttggagtttgggtctggatccgggtctcgagcccaaatctaggtcagagattgggattgaccccgaatcttttgtaaatattataatgcaagtcaatacaaataatttgttatgtattaaataatatattttcatagtattaaaaattttagtcgtaataattgatacaatacattattttatcaaaatatagtgttgtttattatttgatttaaaaaattatcctcatattttagaaataaatgtagcaaaaaaaaaaaaaaaaaaaaaatagagtaatttgcgatataaatttttaaatttaatttt

SEQ ID NO: 355877 - DNA, 944 bp, Cannabis indica
ctgcacgttcattgtagtatctgctcgtctgttccccttcttctgtttagattgtcccttaggtcgtgggtgttcccaacctatcgaacacaaaagaacctggctgcctcagcgattggttcgcttggttggcagatggaatggctccattattttgcgtggatccgtcgagcatgacccctctagatgaattcccgaacaaggtctgtccacctacctcttggcccacgagtggaactcatgaccagggattggacgactgaccgttggttgtctgggaagcattcaccgttgggtcatcctcggttactcctaggggaatgacgctcggcgtttgctggcctacagcttgataggctcttcgtatcaccacagtggcttgcccactacaatcttcgatttctgcatggtgagcccttaatgcctccatctctttgtccctccactcggcgaacatacgcctctgttcgtcaaatgcgaggtttactgcggcacgtaattcctcttgatcgtgatgcaaggtattgttgtgaccctgcatgactccgagcgcagcgcgaaggttttgcaattcggttgcctcttcgatggtcgtttgggcattgatgcctggtggaacagccgtgttatgaatgccctggcagtgtacgaaaccgttatttctgatctcttgcacaccaggcgcagtttcagtaacaggagttgtcccaccattcaccacgcttcctgtctgtccaggattgacagcgggtggaacccttgaactccctgggtcctgcaacatcggatccagcgtctgtgactgtgctgggtcggacaggcctctacgagtttgtaccatcgtgtcgagtattgaaaagagctatctgtgattctcctctcaatgaaagcaccaaaatgttgacgttgctttagccaacgacaatgagtcttttgataagcga

SEQ ID NO: 355878 - DNA, 959 bp, Cannabis indica
aagtatgaataattttaaagaaattctaaaataaaaaaaaaaatatttattagtagcgttttgtacattttaaaacgtgtcactttataattagttaacaataatactttctaaaaattattatattaaattatataagacttgatacataattatatcaataggattaattgacacgtaagagagtgttaaatattactgatctttcctcttattgatattaaattaacttatgtgaaacttaatacttaattacactaacatataaatagtgctaggtagtaggtaccacaaatgccttttagaatttcttcgccattatctcttttaagaaattttaacaagaaacatattcaaaagggttcattttattgtgaatatttatagtaagaatatctaaaattttgagtttgtaatcgataaaactcaataattatatttagcggcataaataaataatattagtaaaattatattcttttattctaattttgtcaatagattgatatgctagtgtattaaacacaacacatgtatgacctatatcctatatagggcttggatggaaatgtgtagtatattagttacttttaaattttcttttaacaaattttaaaactaagttggttaaaaatttaagacacactaatagaatccgtattgacaaaattaaagaaaaataatagttttataagaaaattatagtaaatggctcaaaatcagaactatattagtaaatattctcattttataacttgtagcagaataacactttttaagttatttattactggaaaattatagtaaatgatccaaaattataggactgtgttagtaaatatctcatttcaaaacttgtagcaacatgacccttttagctagattatttattatttatattgtcttttgtcaaataaaaaaaattaataattctctttcatattttttttttagaatta

SEQ ID NO: 355879 - DNA, 510 bp, Cannabis indica
ttcgatattttgaccaaacactcatcttgtgtgtttgcttttgtagatgaactcaagtgagttttgggagagcgaacatcaaatcaaccaggacctacttcaacttttgcacgaggatcgtcctcgtctttgtcctagcccaccttcttctaactaaggacattctcccccaaatcttatacccagccatagaatgatggctcgtacaaagaaaacaacgcatctggctgacgcatctgatcctcaagtggctcggcacgccactttgcccagcgccgaacaggatccagccgtccaggaggagggggatcatgaaggtgacgctgaggtccaggagattgaggagcaggacaacgtgcgtcctagaagttcctccaagacagaggaagaagcagaggttgaactcccaaactacggggagtacaatgaggttggggagccattcgacgctgacggagacgtcctggttgagggcatggactacgctagcttactactgcggttcctcac

SEQ ID NO: 355880 - DNA, 639 bp, Cannabis indica
attaaaattgaattagcaacataattagttttgtaaattcataaaatttacttttcattagactattttaaaattaattttagaaaaatacttagtttaattagatatattctagatagttgtttctagtaactaattatattttctaaaattgattagaaaaatatatttaagttaaaaattaatttttattcattttagatcaacttaaattagaatagtttttttgatattaaattagaattaataattaagttgattctattctagatacttaattatttgattcttttatataatatacatttaattaaatagaaaattaaatttttaagtggattttattctaaacatttaaatattagttattttcaaagatatttaattagatagaaaattatatttaagtttgaaattttttatttcagaacaactaaaattagaataattttaaaaatatatttcattttattttgttaatcattttctactaaaatttcgaaatgcattgttcaatacagataattttgatttttttttttttgaaaaattagattaaagttgaaaattaattaattttagatcaacttaaattaagtaaatttttcactaatgattgattaaaataaatagactaaa

SEQ ID NO: 355881 - DNA, 586 bp, Cannabis indica
agactcaactttctgaattcgttgaaaaaacacatgtttcgttgagcattataagagatttataaacggaaaaaaatctaagcagtaaattatatcttagatttgattcaatttaaaatttaaattgaattaaaaaatgataactaaatattatcatataaaaaattaataattaatttaattatttccttttggaaattatactaagttaattaaaaatatcactcaaataatctttttattttattttaaataaacaataaaacgatttcaagactcaatttatcacaaaaagtggtaaaattctaaaatccatacaaaatggcacaaaattccaaatgagctcactaaaattaatcttagaatttcaaagaggtcattaacctcacaaagtctcaaaaatggtaattttacctaaaaattaaaaagtgcactaaacttcaaagccataacaaattaaatggctttccaaaaaaaaagagaggtcattcacctcataaaaaaaaattaaaattcggaactacgtttgacttgattcctataaaaggatacgtatgcaacttagttgctaaaactaagtgcagtc

SEQ ID NO: 355882 - DNA, 1482 bp, Cannabis indica
tttctaactttatatgtgtttattttcattattttagaattcgtattaggttgttagtccaacatacttgttagtaaatctagatcctggtaaaatgatttccaacacgtacttgtgattggatttgaaataaagagcgatccttgattatgctctcaatgaaagcacattgacttcgctttttgcaatagaaaatgagtctaatttgtaagcgacaagtagtttaatacgagtgtaaaatagtaaaacaaatgaagatgcaagaattttatagaggtttagccccgagtagttcggtaatagcctaatcctcgttatttgtattgacttaagaacaaggagaatggttccttttcgtagagctcttacaatagtatgtctgaatatgaattcttagacaaatattttgaccctttgctcagtgaatatgaatccctatttatagggctataagcttgggagggaagtatttcccttcacattacaatcgatataagtagaaagattgcatagtaaatacacttattgtgggattcagacagcttgccatatctctgtaatatgatcccaattagctaagtgttgtcatgttgcgtggcttgcccactgctcggctaagaggacctcttccgagcgaatgtttgtgttgttctgtctggtatatttcttgcgagcaaggacatagagttgattctacatgttaccattgtgtgatgccacgtcagagtgcgaaaattgggatatctgcttgttttaccagataaaagagtttaagctctcctatataaagggccttatctaaaccctaaaatcctaagtgaagtgaacctaagctgaattctaagtcataagtggcaatccctaacgtctaagtttgaactctctctctctctctcacacacccaccattgcatctctcttaacttaagatttgccatctccgattcctatattgtaaccttaagagagcatcttcagattccacctacagtgatatgagtagtattatctctcaggatcaatacaactaaaaggatagtatgtcattacccgctaactaagagagtcgaacctctataaaatcctgtattcttttacttcttgttcttattgtgtatcatgtggcaagcatcataattaatacgactccattatcgattggccaaacttgaggtcaacagatataggctaatatcaacaattgatttatttgaaaatggggataacattgtcattttatttaaaaataaataaaataaaatacccttaaaattttcaaaaatattagggttaggaaaccctaaatatctatttaaaaaaatatcaactaactactaaaaaatttaatgttatttaaataaaatataaattaacaaaataaatatttaataagataaagtgctaaataaataacatttatctaatcttataatttaaattaataaaatatattaaaaaataataaatttttgaaaaataata

SEQ ID NO: 355883 - DNA, 566 bp, Cannabis indica
tttgtactattttagaaaatacagggtccattttgttatttaaaaaaacacagggtccaattggtaacttttgcaaaacagagagtttaaaatggtatttacccataattaaatgaacgctttatttcaagaaagaaatacacatataattaagcaagcaagagtgcacgtgacagggaaggaggaaagtatcatgtcacgtgacatgaactcttatctaggtgaaaaatcgtggcaaacgtcagcttcttctaaggcattctcttataaaacacccacatgctcaatggtactatatatatattaatccattttttttaatcatgttttcatcaatcaaattgaattatcatttatgatcaataaattaatctgagtttttgaacgtttattgatactgtaacatttcctttgtgcaatattgaatattatcgatcatgatgacatgaaatattctcaaataacaactgggaaaaaaaaattacataaataaaagacacaaatggaagtaacatataataatatatagtttgaagcttgatatgagcaaagcctatgatcgtatc

SEQ ID NO: 355884 - DNA, 652 bp, Cannabis indica
ttcttgggttttaagttatggaattatgcatgctttgtgagttttgttgttgtagttgctgctagtgtttgttattgttttcaatggataaattatgcttagatatgttgttttagacttgttgtgatgggtggtttgatgtttgagcaagctttgagttttagagctcaagcttggctctttaatggcatattttgtttctgagcatgtggaagtgttttattgctttgatattgttctttgaggtctaagtagcaggtctagaaggtttcatagggtttggggttgatttggttgagttatgaatttttgagtgaatcttgcactgaactggaattccggttcagagggacctgtaggaaccggaattccggttggtcgtcaggaaaccccacagaaccagaattttggttaggaattggtctaccggttggggcagttttggaaaccctagtttttcccatttttgtgatgtttagggtattgccatgttatccatcgatagggaaatttttaatttcaagtttaagtccccagaaagtgatttagtgtggcacttacctatgttatgattgatgtgatttaggagcctgtaattcgccgagcagttgttcaactcaggttggccagcacacctgaattcagaatcaag

SEQ ID NO: 355885 - DNA, 582 bp, Cannabis indica
agtatcatacatcagaccattttggttttccagtatgggtaattagcaccttccagcattgggggtcgtgatgtggaccctccttctctgaacatctccattcctgtactaacaaggaaaaacaaaacaaagatagagagcagtatactcccagagtcgtgtctggagagggggttagttccaactgggtgttgcagaaagaaaaaatgcagaaaaatcaagaattgcagcaacaataaatttcagaataacgaatcttgcaagaaccctaaggatcaatatttctaacagaaatagctggctctgataccaaatgttaggctggtagctcaagtttcactgtctgcatttctggaaggacagtggtacttggatagtggttgctctcgacacatgacgggcaacaagaaattgttagtcaattacaaagaagcaaaggagggagttgtcacttttggtgatggaaataagggccatattattggaaaatgagacttggtgatgagtagagctgcacctcttactgaagtactgcatgtgaaaggactcaaggcaaatctgataagcatcggtcaactttgt

SEQ ID NO: 355886 - DNA, 795 bp, Cannabis indica
gcttatctcaagaagcttacattaatcttgtgctcaacattcaacatgaatttatgtaaggttggttttgttcctattatgaaagatgacaaatttactaagcaatgatgtcctaagaacgacttggaaaaagaagtaatgaaaaacataacatatgtaagtgtagttgggagtttgatgtatgcctagatttgcattggacctaatattgctttcatagtaaatgttcttatgagataattatctgatccttgctatgatcattgggtttcagccaagaaagtcatgagatatttgcaaagaatgaagagttttatgcttgtttataagcatgttgacaatctctgagttgttggttatcacaaattttagtggttgtgtagatgatttaaaatcaaattatggctatattttcactttggttggtgcaactctttcttagaaaagtgttaaatagattttaatcacttcatctactatgtatgttgagtttgtcacatattatgtgatatctttgcaagttttgtggttaaagaattttattttagagatgcaactagtttactctatttcctctcctacactaatctattgtgataataataatactgttgttttcttttcaaagaataatgagattagtagtgcttccaaatatatgaaagtaaagtatctcactgttattagagactttgtcaagaaagaagacaatgtgatggaatattgcaagactaagtcgatgttagcaaatcctctaaccaaaggattaagcagtatcgtgttgtttaataaaca

SEQ ID NO: 355887 - DNA, 693 bp, Cannabis indica
cgtgatttttaacgtactgtgcggcttgttgctaatcaatgaggttattgaaaatcgtgaataattgaaatttgcttatttaattaaaaacttaaagtattacatatataaaatttctggatcccgtttacaaaatacttttttaaaagtttgctatacatataaacaaaagtttgtcgcccagggactatacaacaaaagccccgttgtcccaaagatcgtacgctccaggcctaaccgccccaacatgtacaatcttcacctgctcgtactcacggctcctcaactttagccttgcccttatctacacataaagatagcactgtgagttgagagactcagtaagaaaagcataacataaacatatgaataattcgggttataatctgacgcccatacaccgatcataaccctaatccccgtgtcccacacggtactgagtctagaacattcataagacaatactatcgaccataatgtcagcctatactcaatatgctagtcatactctagccatattgatgtgacaacatcgatcagtattttagccaacatacatttatcagtaatcaacacaactctatgtatatttttactgctatcaatgtaatctaacagacataaacaacatgtacgataaacatgtaataacatatgcatgatattatgctaatcttacctcaatttcgaatt

SEQ ID NO: 355888 - DNA, 550 bp, Cannabis indica
atttcaacatcgcagagtccattattttgtgcatggagttggagccaatgggattgcatcaatttttctgatttttggttagtgggaaaatgttggttaactgtgtatacaaacataggacttttggtttcaattctaagtgttatgattagcattgagctctcctaggttgttttggaacttatttacttcttgcattacatccgagcttaaagatctgtcttgatttttattggttgggttttagaggtgaagatttgaaaagccctactaagtatagaggaacatttacgatataaataaatatttttgattttatacacttgtatctattttttttttccctttttatcaaatgttatcattttgttgcatctgttactacagtattggcagctaagtgagatgaccacacatgttagtataatattgatccaaatcaattttttttttttttttaaataaaagaataaataaatttaaaataaaagaaattttcttttaattattaaaataacaacaaataatacatttttttttcaaaaaaaaa

SEQ ID NO: 355889 - DNA, 917 bp, Cannabis indica
aaataaaattttaaggtttatttttttgaattaagaaactttatcaagtctaattaataaataatataaatgataattttatttgataattaaatttaattattaaataaatagtttcgacatttataggactgaaagtgcacaaagtggtatttgtgaaaaattgataaatgattgagaaaagtggcaaaaatctaactagtgatggacctacatagggcccggccactaggtcttatttttgctcttattttttcattttttattccaaaaaaaaaagaagaaaaaggtctcactatccaactaatgcttctacagctctaaacctagtttttcattctatgaaacaactagagtgttgagacttcttcttcttctttctctctactaatttcaaaattcttcgtgttcttcaccatcaaaatttgggctttagatatagagtacatgccagcggatagcaagttggtactcaatcatagtgtgtaagagtatgaagaatccaatcaactgaaggagaatcgaactcaaaacttggtgatactctgctacagaaagtatacaagggttagagatctgagtggaaggagtcatttaatttcgctcaaaccaatgtaaagtttcttgaactttatatgtgtttaaattacattgtcttagaaattcatatttaggattttacataacatacatggtagtaaatctagattttagtaaaataatccctaacaactggcctcagagccatggtaatgatttactttcatgaaatatggatttaaaaggacgtttttgttgatttagatgtgttcatgttagtttatgtacatatttgatgattgtatgaaaatctcaatttacgatgctaaataataaatttaggcatttacagaacttaatttggattttttatgaat

SEQ ID NO: 355890 - DNA, 668 bp, Cannabis indica
tcggggtccagacctggacacaaacccggacacatactcagacccgaactcaaacacccacacctagaatcaaacaccaagctagacccggacttggacccaaactcgaacccagacaaggatcagaactaaggacttagaccgagaacggaatcccgactcggatcgggatttgaacttgggactcaaacccgaacctagaccgggacccaaacacacacaataaccgagacctagaccaataatcacgatacggacttgggaaatagaattaggaccggctcctagaacccgacccagaccttaacttgaacataggacccagctcgtgacacggcaccagaaatggaactagacggggacccgaaagtggaatccggatctggacctagggcttgtacatggatttgggacccagtcccaaacccaaaagtggacccaaacccgtaccctgtgaagcgaaattggaaccaaaacaaaaagttgacaaggactgcaactaggacttggacttagaatcataactgaaataggacctagatctagaaccgtaaccggaccaggacccggacaccaaattagacctagacccgatttgggaactgaacccggatcccaacccaaacctggactcgagacccgaactcgaacctgaactcagacccaaa

SEQ ID NO: 355891 - DNA, 710 bp, Cannabis indica
aagcattcatcgtggaatttatgtccccacatcgtgaaacatactgatttgaagctacactttgtaaagaaataaaaaaaagtattagcataaattttattaaatagtatttaatatatcgcaataaaaacgaacacgagagtgtatttatagttgtagattaaatgtatagtttaccttttatcaattaaatatatctcttgaattgtatgtggtccatagggagtgttgacttcttttggtgagttcattttgtgagcaatagccaaaatatctaataaattaaaatattaaatagttagtcaatgaggaatatatatttacaaaaatcaaattgtaaatacctattggtttgctgaattctttaggtgtatgcaggtcgctaaacagaataaaatcatagtttggtgctgatgtctggctgtcttctgtttggatttctttgatttctgttcttgagttcactgtccaaatatatttgtagtctcgctttttatcgaaaggcatggattttttttttacataggcattgttgatgtagtaagtgtggaacacttccaaagtgtattctctagcgtcaattttagtgtcaaatattactgctttaacatcattaccctgtgttcatttgtaaggaaaaaaaatctgttgcagtgcgtttatagacggaattctaaaaatatagcatttattagtagagtattgacaat

SEQ ID NO: 355892 - DNA, 1047 bp, Cannabis indica
ccactacctcccctactaaagccctgaggtaggaggagtaggagccccaccaacgacctgagtccctcgagactcctggatgcactctactgcgccctcagctcgcagtgcctttcccaccatatcagcataggtggtgttgtcatcattagtgatcatcagatcatgtcttatctttgcattcaacccatttatgtatttttctttcttgctaaaatcaggtggcactattcccaaggccaatctagccaaacaattaaactgagttgtgtattcagtaacactcatattttctttctgagtcagctgagtaaattcttttcttttcgcactcttgactgcctcattatagtatttcgcattgaacagttcctggaacttttcccaggtcatcgtagtaacatcatgggtcagggataccatgtcccaccatactagagcgtcttcttgaaactgaaatgtggcacaggccactatgtcattgccattgacgctcataaaattcagaattttggtaataaccgttagccactactcgactttcatgacatcgggaactcccagggaaactggaggttcctacttgcggaacctatcatacagttgttccgttcgattcactgcagcgactggtcctccctacacaataagagcgagctacctgcatttttggagcagggattgtaggagtaccgtgctgtctcaagcgtctaattttgttcatcttgctcattaattctggcttgcgtttctacaaatctattttccaaatcttgggtagcctgtggcgggttaacatcaccccgaccgcgtgccctgcctctagggcctctgtctcggccacaaacatttaggggaattagaactccctggccaccactggatccgaccgagttaccatgactcctggtatttcgcccgtccatactattagaacagcctacgtaaccaatagctagtctgatcagatcgtgatcaagtaaaacttactaattgtcgcttattttggaaattaaaaacatgcgcctattcagctatcagactact

SEQ ID NO: 355893 - DNA, 632 bp, Cannabis indica
tcataattaaacataaacaactgctaatttccaaattaactaagcgggctttacataagcccttggtcccggttcccaatactggtgctccagccagtacttcaggttccggtaagtctcctttagtaattcatcatgtcccctctgtccaagagtatacccaatataggcccataggatttgatgaacgcctttgtaagtttaggatgccttccacctggtggggggatcatgccaaagaatactatttctcccacttgggccatttcttgggtcgatcccgaatgggctctggacctcctacgcccattcccctcgatcattcagcccacttgtcctccatctggtttctcccctcagacaactttcttggggatgacgaagccagcactgtagttcaagactttgctagggctaaattagagagtcggggtaggattagctttattgctttgttgtagggcgcatgccttcttttgattattctaacactttgtttatttctttgttgcagcagccaagccaatggaagatttcctggctacccttgccgaggcctacagcccggacgcttctctgccttcggcttcatcccaactggtgacccccgggaggtcatcgtccagtgcccc

SEQ ID NO: 355894 - DNA, 277 bp, Cannabis indica
caaaactcccccacttcatcctctctatttgagctcgaattgtttcaaaccgaggttgacgtctcaaaggattctcggggaattcaataccctgatcttcaatgtaagccctattcttaattctcatgaagcgattttgggcctcaatgttacaaaatcgggtcctatcaaaacccgttggtggtgggtttgaagacgaaccctcctccacattcctagttctcttaggtgccatttttttttagaaaaatagaatattttttttctcttttttttt

SEQ ID NO: 355895 - DNA, 965 bp, Cannabis indica
atgtctaaaacccgtccccaactactaacatactaagttgtgattcttacttagccaaacgccgagttccaaataccggacaccggaaatgcaaaatatgcaagctactgaataacataaataacagtataataaattatttaaatagctataaataatttcataattaatcacaattaactgataatttccaaattaattaagcgggctttacatacttattggaagcttggctacataggcccatggtccctgaactaactagaataatattattttgtagtctcaattaattgatttaaattaatcaattagaattttgaataagactatgtcttgtttgtgaattttcactaagcagtgacttatttgagaagaaaagagatattagagtttgtttattaattaagagactttgtattgtctaattaataaataaattaaataaaaattttatttgataattattgagtagataggattgacatttatagagttagaattaaaaagatgacatttaagaaaagaaagataagtttcaaataaaatagcaaaatcgaaacccaataggccactaagggattcgaccataagggtttaaacaaagccgttatctttttttattctatttaaattataaacctaaccctaatagttagcatataaatagaaaagtatagttcttattttcataacctaattgactatttgtcagataaattaagaaataaagagagcctcttctatttttcaaatcctttcttcttcttctcaataatttcgaagcttatagtgattgagaattgttgaccgaggttttcggcaaccaataaaatattataagtttatagagctgtaagaaaattagaagaggatttttacgtggttggggcgttaatgagccttagtccacgagtctatcttatttatggatgtatttaatacagagaatgtatttggtgagt

SEQ ID NO: 355896 - DNA, 1411 bp, Cannabis indica
gacatgatcttgtaaaagtacaagatctcctctggtgttgacatagacttgctgtgttgaacacaaaagacgtaccaccttgatagtaagcggtacgcctgaggaataagctagaaaggtgttattctagccacgacacagaaattagcaaaatagcacctcagaggcaggtgtgcccccatctcaatatgagcccagctctaaacaccgaagcctccttccaagcacttgttaggcctctccctgagaatgggaagcctattcgagaacaaccctagaacactttcgagccttcataggatttcatacttccttagattgttataattcctgaacatgttgacatgttggtctagctcccatggattgtcgttgaggatcaattttggagcatcttctcactccattacgtcctcctctgagttagcttcctcttggcatgtttgcttaggcatagtttctgtataaaaagaagaaaatccaagtagttagccaccctaactacctagtatagaaagggagctagaggtcctcccccataaactgcttggagaggtcccgactagactaactatttagaaacgaaattccatgagttactcattccaaataggaagtcaagaacaatgcagagagaaagatgacagatattaataaaaacccctaaactagaaggattttggacaaaaaaaaattttgccagcacttatgccataaatcgaccaactctagaaatttttaaaacaagaaatttcaaaaataatatggttcgtgatgcttaaatctacctaagttgacaatcgcacaaacaaaaaaccctaattgcatcccagaatagagcatgcaaataaagtttatagcaacaaatttagaaaccacaatccatagatgaagaaacaacatagatattgataacgaagaggttaagctaatcgtcgctagatttggctcaggaagttgagtgtacctttcatgaagatgagatgctgaggcaataaacgaattaactttttgttgaaatccaggctcgcgatttctcctattgtaaatcactggtggtcgatgatgtgggaactcccgtgccctaatcctcaacaacagaccaaggcaaaaatctatggcactttccagattagagaaggagacattgccctgaatttagattgtagttttggaaagtgcaaaaaagtctataagctttgaagggttgaaaaattagggatgtaaacggggcgggacgggtgcggggattcctcccccacccccatacccgtttattaaattcacccccatacctgccccaactacccaatttaaacttaaaagtcgggggcggggacggggagttacctgtgggggaagggatttctatcgggtacccgacttacatatatattttttgaaaaaaaaa

SEQ ID NO: 355897 - DNA, 523 bp, Cannabis indica
ttatgattttttgaaaatttgaaaacaaaaatcaaaaatcgtgtgcaccacacacgcgtgcgaacatcaagtttcactcggtcagatgcatgttcggacactgagtgtccgaagaaacacgcacggggttgtctgaatccccccatccgcgcgcggaaaggctgcgtgcagcctccagggccgagttttctcggccagatcctccttgtgcgcgcgcggatggtatgcataccaaacccatttttttttcaatttttccaattttcatgttttttcatggaattaatttcgatttttttttgtagttttgtatttagattttatttttcatatttcaaatctaattatcagaattaaattaataaatattttttaaattaatttaagatattagtgaaatttgaagcttgaaaataggtaaaaatctatttttttttgtctttgtttattatcttattttaaaattttgattattttattgtttgactttcgcttttggccaatgatgagtccatatttatct

SEQ ID NO: 355898 - DNA, 1119 bp, Cannabis indica
attgaaatctgcagtgattcacatctggtggtaaatcacgtatctaaagaatatgaggctcagggagaaaagatgatagcatatttgagaaaaatacatgacctgcttgcacaattcaaaagctacagtcgcagacaaattctaatggaagaaaacacaactgcacacgtgttagttggcaagaagtaatgtaagtgaccaagcgaactgattcctatcagttcctcgaagagcctagcattactggcacgtaagagatcgaaatgattgatacttccctaaactggatgacactaatagcagcctacctcaacactggcgaactcccagataatcgaaatggagctcgaaaaatgagaaggaaggctgcacggtatatcatagtagagggaattatgtacagaagagggttctccatgccattgctcagatgtgttactcaagaagaagctgcacgacttttatctgaagtgcactatggattttgtggaaatcatgccgccgggtagagtttatctaagaaaattctaaggcaaggttatttttggcctacaatgattgaagattcaaaggcctatgttaagaaatatgacaaatgccaaagattttcgaagatacctcgagctctgcccaacgagttaactcagatgcaaattccgtggccttttgccatctggggaattgacctaatcagacaattacccaaaggcaagggatgtgtgtagtacgcaatggtagcgttgattacttcactaagtggacggaagccgaaccacttgcaaccattacttctaagaaagttcaagactttgttgtgaagaacataatctgccggttcagattgccgtacaaaatagttttggacaacggcaaacagtttgacagccagtcctttactgatttttgtgcaaaccatggtatcatcaaaagtttctttgcagtggtgcatccccaagaaaatggtcaagttgaagcagtcaacaagaccctgaaggatacattaaagaaaagactggaggatgtgaaaggaaactggccggaggagctccctgaagttctatggttgtaccgaacaactgaaaaaatggcaaccgggcagaccccatttgccatggcata

SEQ ID NO: 355899 - DNA, 639 bp, Cannabis indica
atcctcaagtttatgtgaacaaaactaatgaggaattgtaagatgctaatgaagggagtgatgggaattagatttaattaacgaaagaatgaaggaaagaaatacaattaggaacgaaaaagaagcatctactttttgacaacccactatgatcttcccttggagttaagcatacttaacttggggtaatctcaagatgggaaagcttccagcgagtcatcttagaaagcgtatgagtgaggaccaagtacgttagaaatattcgtattagggtgcagaacaagtagtcgttccagaaattatcaagaggaagggatgtcttaataagtagagatttatgaggcaccgagaagagtatatattagtggatggaagtaaggaatgctataattgaatatttatcaaaaactaatacttagcttgttaataagctaaattagtacattagtttaggagatcccagaggaatagaaagacataatcatgaattacgtactgtgggatattatagtttcgaccgagtagtaacaggttgacatgccaagttaaatgctgtgtctatcagtgcagataatttatataataaatgaggatatggagttcatacgacggaatagtctaatcttgtgaaatcctaaa

SEQ ID NO: 355900 - DNA, 684 bp, Cannabis indica
ttttttaaggtctctcgcgtaagagtcctctttcttctcccctttgtttgatcttatctgccaatatttataattgcatagtggcacttaattacaaagttgaccaaaatgtaattacagtcattatcccttaatgtagtaaataggttgctggtgcttaccctcttctcgcactatagctgcactaatcgcatcttccgagatggctagataaagaaataacgtctctccaattattggttttgcccaaattgggggcattgcaagatgcctttttatgttctaaaaggcctccttgcattattttgtccactcgaactttttgttgcctcacaatatgttgaagaacgacacacacttatcaactgacttcaaaattaatctgtcaagtgccgtcattcttcctgtcaaggcttgtacttccttaggttttgtcggggatggcatatctattaatgcattgatttttttaggatttgcctcaatgcccctcgcgttaactatgaatccaaaaaattttctcgaggagactccaaaggaacattttttggggtttaggttcatgttatacttttttaatattttaaagcattccgcaaggtctgaggtatgatccttactctttgttgatataaccaacatatcgtcgatgttaacttccctgttcctgttgggttttgtgcc

SEQ ID NO: 355901 - DNA, 591 bp, Cannabis indica
ttataattataaaaaactataacatattcaacttataataattttataataatcactcttaaaataattaaaatatcatgagttcaattctttagaagtaatatttcttttttttttctttacttatatttaatttaagatttcaattaatttaatagtttaaaaattctatcatattatattaattaatttatttttcaagattataatgttcaatgtatttaaaaattttagtgttgactgagattttcgacaaccaattaaatgatagaatgagaagagctgtagaaagttaattgcaagagatttttacgtgattggggcattaatgagccttagtccatgagtctttgttatttatgagagtgtttattacagagaatgttcttggtgaatctctttgttctttactctcttcgactccttaattaaatcgatcgacccctttttcattctgtttgtggaatatttatagtatttttctagggagatcggtaggaaaagggatcacttgcctttctgtgttagcttcttaggggcacatattcctagcagataaaaataagaaatatatgacctataccgtaggta

SEQ ID NO: 355902 - DNA, 571 bp, Cannabis indica
tgttcacagcatataagtaaataactattacaattactttaaattatttattttcatgtaatttctttctttctttaattcttttccatttaattgtttttaatttttttgtttatatagtaaaatataatttaaaaaaataaaatatttaaatgaataataaaaaaaaaaaagcatatgattcaatgtaaaagtgcgaggtaagaaaaaattactctatagtatagcatactataattaaatcaataatgtaaacaaaactctattttataactgtttctacaattttttttatcttttgtcttaggctaattagtaatttttcctcttgaactttaacatgtattaaattatgccctctgaacttttttggccgttaaaaattctttctgaactattgagattgttagatttaaagacttttgtctaatttcattcaattatactattgtactaaactatacttcccaaactttgatgtctaccaaatcatatccctcaaactttgatacgtattaaatcatgccccctgaaatttcatccatattataatttttttactaaaattaga

SEQ ID NO: 355903 - DNA, 450 bp, Cannabis indica
acttgtgagtagatctaagatacatgtaaaataatatccaacaggttttggatctcggtgtcatctccaatagttgttcgaacatttgttgctggcagaactccagtattgggaatacccagattggctactgaactggtatttccagtctcttccacaccgggtgcaattccattgaaaggggaagtcacaccatgatccacggttggtggttattcaggattcgtggctagtggaacccctgcatttcctagattctacagtgcaggatccactgtaggtgaatttgccggatcgatcacacctttacgagtttgtaccaccatcgtgtttatgatttaaaataaagagcgagtttgtgatccttgctctcaatgaaagcatcaaaatattgacctcgcttttagccaacgacaatgagtcttaattgtaagcgataagtgatataat

SEQ ID NO: 355904 - DNA, 844 bp, Cannabis indica
agcaaacctagatgtttttgcttggtcacatgcggatatggtcggaatcgacccttctattatttcacacgttctgaatatcgatcccaacatttggtcagttcagcaaaaatgaaggcaatctctgcatggtgagcccttaatgactccatctctctatctctccatttggcgaacatacgccttgttcttcaaacgcgagatttactgcagcgcgtagtttgtcctgatcatgacgtagggtattgttatgaccctgcatgagtccaagagcatcacagatattttgtaattcactggcatctccgatggtcgtcttggcattggttccaggcgaaacagttgtgttatgaatgccctggttgggtgcagaactgttattcccagtctcttgcacaccaggagcgatttcatctataggaactgtcacaccattccccacgttcggcggctgtccaagattaacagctggcagaacccttctgtttcctgggttctgcgatgcaggatccagcatctgtgaatttactggatcagttaggcttctacgagtttgcaccatcgtatttgcgattggatgttgaataaagagtgattcataatccttctctcaataaaagcaccaaaatgttgacctcggttttagccaacgacaatgagtctattttataagcgataagtgttttataataacaaatatatgataaagcaatgtaaagacacatgaattttatcgaggttcagccccgaggagttcggtaatagcctaatcctcgttacttgtattgacttaagatcaaggagaaagattccttttcttatagctcttacaatagtatctctg

SEQ ID NO: 355905 - DNA, 675 bp, Cannabis indica
tcctcgtagtccacaccttctctttgggtataaccctttgctataagtctagctttaaaagtttcgacttgtctatcagtacctcttttcttcttgtacacccattaacatcgattggatgataatcatcaggtgtatctactgttgggattttatgccctaaataaaactcattttaatataatcttattttctatcaatagaagattagaagtcatttaaatttacatgtagtttttatgattagggttttaatatacaatttttgttaatccagaacatattgttattcacaattacagtgatgacattacagtagaaagtaattgtgattatatacttcaaattatttggtcacatgatttattagtgtgttgaatttacactgacgtgataatcaacgataaagtttacttacacttgtatatgtggtatgttctttctagggcattagcaaagtatgctagtaccgaatgtatggaatatacattggactggactgatattgacagtggaaaaggtatcataaacttactgttatatctttctaagtcaatatcacttagttgatcttaggtcaatagatcttaatcttgagatggttaggttctgtcttaaatgtattatttgtgttctttgacttgtttgttaaagctgaccaaatggatcagccca

SEQ ID NO: 355906 - DNA, 853 bp, Cannabis indica
gatatagtctgaacaggatacctaatatgcatgctcgaagccaagcagtcagcaatccgcaaagagtgaccagacttagcaaattccacttttgcatcgtgagtcattaaggaaatccctataacttggggatcagattgcaagatatggcaagctgtccaaatcccatgatcggtgtattctgtatttactatgcaatctttctgcttatatccattgtaacgagaagggaaatacttcctccccaagctcatagccctataaatagtgatgcatattcactgggcaaattgtcgaaggattttacttgagagatattgtataagaatttatattcagagatattgttgtaagagttataagaaaaggaatctttctccttgttcttgagttaatacaaataacgaggattaggctattaccgaactgctcggggctgaatctctataaaattcatgtgtctttatattgctttattttatttcaatcgttataaactacttgttgcttactaagttagactcactgccgttggctaaaagcaaggtcaagacaacatatgaaaagatggggctccaactcaaagatttaaccccttgtctccagcccgtgtatggtttctccggccaaggagttgcacctctagggcaaattcacctacccctcactgttgggcaagctctgaagagcataactatactggcacagttcttagtattggacgttccatcagcattcaatgtcatgttaggtagtccggccttatatgacttaaaggttgctacgccaatatttcattcatgccttaagttcccaacaagaatgggtaggtgcctaagaggaaaccagcaag

SEQ ID NO: 355907 - DNA, 564 bp, Cannabis indica
tttgacttgcccgcttttcaccttccgcttgttgaatggcttcttcgagcttgatgaagccttcgactcggtcaaggaaattactcattgagtctactggcccattctttcttatatcctcccaaagttcaccgacgacttcgatgccccccagtatcttagataactttccatcctcggttacccgtgaaactttggtcgcttccgtcatgaatctattgatgtacgcacggagtggctcgcctggtcgttgcttaacttcgaccaagtctcccaaatgtaatggaagttggcgtgaggaggagaattgtgcatggaattccgaagagaaggttttccatgaactaaactttctaggagccaacttgaaataccattgctgagcggcttctgatagagtggtgcggaagattatgcagcatacatctccccatactccttgtaaatccatctgtatttcgaaatactggagatgggaaagaggatcttctctcccagtatacatcttccacatcggcattttgaacttgtggggcagtggcaggagattgatctctagtgaga

SEQ ID NO: 355908 - DNA, 524 bp, Cannabis indica
gtgtgaatatgcttattttggttaacatttatatgatattgtacatgctcaaaaggtcattctttcggccctttcaggatatgagtatgtaatgaaactgttgcatagttatgagagtaggtgttatgatttattcagaatggataaggacgtcttcaaactattttgcggtgttctaaaagaaaaaaattattgaagaacctctccctatctttttgttgaggagcaagtttctatgttattatttgtcattggacataatgaatgacaacatgtagttgctgaacaatttcaacactccacctcaactacatctgaatacgttatgaaaattttgaaggaggtatgacgtttatctaaagagttaattactccaccttcgtttgatgtagttcctccgaaattcaattcaattcaaaatattatccatttttcaaatattacctacatctctgctcatgttcccattgatgaacaaataccatatcaaggtgggaatggtgaatacaactcaaaacgtcatg

SEQ ID NO: 355909 - DNA, 523 bp, Cannabis indica
gggggaatagttgtaaagaccgcttagcttaaatttagaaattagcagataattagggattaatcacaaaaattatttattaattcttaattattaatgtacgattttttatttgaatttggaatgaattttatatgtcatatatagaaatttcataattttgcatgttcagagcccaacaacattggaacacggtgtatggcttagtagaatcacatcttagtatttgagtatggccgggcgatatagttagacattgggaatgtcgggattggtcgggattttagaatttcccaaattatcccttagtgatttttagtgagttttagtgttaaggggcaaaatggtcttagtatttgagcatgaactgttttatctttagtggttttaaatttaagcttataatttggtttatttgatttatgttggctgagatttattttaacaaaaagaaagaaaagaattagtttaattcattttttacaaaactaaggaaaagatcacattttctctctctctctct

SEQ ID NO: 355910 - DNA, 538 bp, Cannabis indica
gatataattaggagtgagcaaagaatccaaaaaaccaaccaaaccgaatataccgaccgtccggacaccgaaaaaaccgacattgaaaaaaccaccttaggttaaaaccaccttaacatggtcggttttagtgtcaatgacaaaacgaccgattaaaccgagaaccgaccgaacatatatattatatataatatatattatttttgtacatatttaatatacaattttattaaactagttttacttatatcttttttatttaaagtctcaattattcattgctttattttattatagtttgatgcatttacatattatatatacacattcataaaataatacaagttttttaatataactcattaccatattaatagcacaaataatttgaacaaatttaaaaaagtttattttacattatttatttaactaagaaagttttattcttaaattatatgatatttgatacaatactctaatttttttagtttttcaaataattataaaaaaatttaaaaaacttattttaaaaaaaaaa

SEQ ID NO: 355911 - DNA, 1247 bp, Cannabis indica
agtgtgtcacaaacttggccactactgttaccgtgtgccactacagatttgataaaggatttgttacacctaaatttggtgattctcgtgcattattgatagaattttaatgaatttgaaaagtttcaagctttattcatcctccatggtacttgactatgcaatagatcaagactagtatgttgatacagtggccactaatcacattgctcttagcatagaacatctttgaaaaggaacattcttatgctatcctgcagtctatagtttggtaaagtatgtccttctgcggttagacgatgagctatcgttggtttgaggaggttccaccactgattataaatatttgtatcattaattcatgagtgattctaatcactacgctaaaaaaaaatggcatcctattaacagactagatctaacccgattgagtcacaaattaatatatagcaacaatatcctaatgattaaacgaatgtatagagttttaattaccagatcaccactatacctagctactcaaaatttatgaacaataacatatttgcttggtggtagctctagctagctaccgttggattgattattacacttaatgctgaaagcatgggtagataatatatacataaatagatacatacatatcctttatactgatacagtattaataaatgtgttactgttactaccatgaagaactaacctgaatacacaacataatttacagcctaaccaacacaaattaaaatacaactacactcgtctagaactacacccactggaaaataataataaacttttgtgttactgagtactgattgacatatgaacaagtaacataaatacacataatattgtttgtgattgttcttaaccattagcaatttaaaacaacttattaaaaataaacacacatatatagttagttgtaaatgctaattacgacatcctcaatcatttaaaaattatttcctaacattttttgagaaattctctaactcatattataggaaattatctcgtacactattttttttaatttttttttcaaatttacgttttggatttctaaagtggttgcagcgctagttacagtaggagtttttatacgattttttgttacaatttaagttgcagcgctagttgcaatagggatttctatatagaatttcgtaaaaatgtgaaaaaaaaaaaaaacctgttttgaaatgtaaaaatgaaaaaagaattaccccatacactatttt

SEQ ID NO: 355912 - DNA, 605 bp, Cannabis indica
atatcatcacaaacattatcataacaaatatgttagattaataattaataaacattattatacataaagcaacatttaattacaatttcgtttattttttttaaacacatttttcaataactaataaacataagtgttatttagtgtttattcaaataaataaataaataaacttaagtgttttatttttaaattttttatgatattttaataaacaaattatatttattatcataataaatatactagattaataatagcgttataaatattaataatactaatcaaatgtttaataaacatatatatatatatgcattgtttataaaatataaataaaatttataaatatatttgtatattctttttttaatttcatattaaattttagtaaacatattattttagtaatatatcaaaatataaatattaacttttatatttacatatttagctttatgcatttttttttaaaaaatcaattaaaagtaatcaacaagttaaaattataagcacatatgtttatttgtaaatattcgtaaaattgtatagaattatgttattatattttgttgcacattttttgtaatattgtacatttactt

SEQ ID NO: 355913 - DNA, 771 bp, Cannabis indica
gggtgctattgatgctatcatagcagtacgaacatagtgccgatcccgcagtgcgatcatagtgctggtagtgggtgatatcatggtcaatagcaccaacctttaagaacgttcttatccatttggtgagcttaattattgagctcagggtggcttaatcacaaagccggcatcgcattacttatatatatgttttgcatatcttactgagtgtgttgactcatcagtttgctaccttgtgtaggtaagggaaaggcaaagctggaggaacagtgagatggagctcggcagtgattgtacatatcgcggcagtgcaacctggagggtttcggtcttttattattttggagtctgcattttgaagttgcatgttctcgagttttttaaaaaatatattatatgtacatattagtaaaacacttttaaattttattttgatactcgggatcccgacccatataagtatagagctataataaaatcaaattaacttctggatttgaaaatatttaaatacaggcgttacagtttggtatcagagccaccaggctgtccactgaagaccgtcaagatatgtacaatcaagggccagtgtcgagctcaactcacggtttcgtaagctttatttctttttgcaaactgttttaagatatgttgcatacatgattaaatagatgttataaaaccctaattgcggtcttggaaatattttgaccattgttcgacctacttgccttgcgggttagcaagctaagtcctaagtaatggacg

SEQ ID NO: 355914 - DNA, 530 bp, Cannabis indica
ctgggtagggaatttcaggcagagtattgatgtgactgcgccaaagtccaccaaggccggtcggccgaggattgcgttgtaggctgtcgggcagtccaccaccacgaatgtgtagtacctaaaagtgctctggggcgtgtccgggcacaaggtgactggaagcctcacttttcccattgggataagtgttgttcgattaaaccccgtgagttgggaaccactcggtgagaggtctaggtccatcaggcctattgcagtaaaggcctctttgaacagcaaattcatggaactcccgttgtcgatcaggactctggccaccaccttattggcaatgggggtctctatgacaaacagatcatggtgaggaaaacgcactgtcttagtgtcttcctccgtgaatgtaatgggttgatccatcagccggggcctttgagctgggagttgagtaacttcccaaacctcatcgtgtttcacagcccctgcataccacttcagctccttgcgggtagttcctccgatatggggtcctc

SEQ ID NO: 355915 - DNA, 552 bp, Cannabis indica
ttttacatttataatttaaaaaataataaaataaaattttaaagtaattgtaaggatttatactaattatcataaagtaagtgtaattataaagtaagtacaaatgagcataagatattgtaaaatagcataaaattaaatttttattatcttttcttgatctctttggttatacaccaaagataggatataacaattgtatttgtaattgtattatcacatagtgataattttttttttttattttacacatgcacgaaataccttagacccgtttggagaggctgagtcagtaaggactcttaaatacgcttctccaaattatccaggactgtttgtccgcatggatagtttgggcttgttttatacttatagtatgatctattgcttatttgattatttcattagtagatattttggtacaacgtcttcttacacgttcttgtaagtcggcaaacttaattactacaagtttgctaacttataagaactgtggggaggtgctgccgaaatttttacaaaaatgaaataatcttaagagcgtagattgta

SEQ ID NO: 355916 - DNA, 643 bp, Cannabis indica
tttcacgaatttgatctcttgaaatgctaaactcaacactattattcaaagtttcgtgagtgctttgtatagtagcatcttgtactttaatgtcttcatctccatcaaaatgtctttttttgtatttttccttataaaattgtgatatccacaacaggcaatcacaatgtaattctgtattttcagataatatgaaggcatttgcttgaaaatgggaaaacgagccttcaacaataaccacctcactatctgttcctgtcatctattcaatctacatgtaattacaaaactaatcctaaaatgtatataaaaaataataataaaattaatttaaaaagttacaaactaatgaaaactaataaatcataatcaccctacaaaattatctaatcgaaattcaaagatagataacttctcaaagatagtctcatgggaattagcaaaacaaacgcaattcatgccaaaacttatttggtgggagagactcactagaagaaaggcaatctgctgtgaataaaaagtcagcagagcattctgtatcagctctgatcataaacccaaacaaaactatttttaagatcatattaagggatgttatttattgggggagttttttgctgccttgctagcttaataggagtaa

SEQ ID NO: 355917 - DNA, 720 bp, Cannabis indica
aaagctaggattacgtcccaaagcagccgaaagaaagtcatcatggggaaaataacaagctttataaatcctggagacgagagagtcaggatgacacaacaacctccaaccttgcttagctaacatagccaggttaaaatcatggagaagacgaaagcctaagccaccttcacctttaggacgagagagtcggtcccaattcatccaaatgattccattgcctttgctgttcgtatttttccaccaaaattgggccattaatttttcaatttcatcacaagtgccgagagggataaggaaaacactcataacataagtgggaagagattgaaccacagtttttaagaggatttccttactcgcacttgacaacaacttaccagtccagctattgattctgttcagcacattattcttgagaaaaccaagaatagcctttttatttctcccaataatattaggaagtcccaagtaaaaactattttcagaggcttcaggcatatgaagaatggagcaaatactgtggagaagttgttcatgaacattagggctgaaaaaaactgatgatttggccaaattaatttgttggccatacgcatttttaaaatgctgaagcagggagaagacactaccagcagtaccattattagcttgacaaaaaacataactgtcatcagcgaacagcatatgagagaccattggtgtgttgggttttatgcc

SEQ ID NO: 355918 - DNA, 581 bp, Cannabis indica
ggtggtaacccaggtaattcctctagaaatacatccaggaattctttaactactctaacctcttcgggttcaagtaacaccgatttactggaattcactacaactgccagaaatccaacacatccactgcgtaacaaatccctagctttcaatgctgagattcttggaacacgagaaccctagaccgaaccaacaaagacaaaaggttcctcattctccggtttaaaagttaccattttccgtttacaatcaatactagcagagtatttggacaaaaagtccataccgagtataatatcgaactcggccaatggtaactccacaagatcagcactcaattctctatcttcaattctaattaacactgatctaacctactttcttgaaataattagttccccattaggcaataaggttccaaatcccgtttcaaaaatatcactaggtctatcaagctgatcaaaaactcttgatgacacataagattgagtggcacccgaatcaaagaaaacagtacaaacaaaatcgttgattagaagctgacctgtaactactgaggggctggcagctgcatcagcctg

SEQ ID NO: 355919 - DNA, 655 bp, Cannabis indica
gagttagaaagacttatggctaagtttttgtggcattcggattctagtagtaggaagggtataaactagatgagttgggataggttgtgtcgtcataagcatacagggggatggggcttcagatgtttgagagactttaatttagctcttctagggaagcaattctggcgactttttgtgaatgacagttcgttggtcagtaggatttacaaggcaaagtactatgcacatggtagtttattctcaactgagttgggagataacccaagctttatttggcgaagcatcatggaagccaaaagccttatatactcgggagctcgaagaactattgctaatggggtgaatgtctcaattcttgatgacccttggctccctcataacactaatggctttgttgaaacaaggcatcctgcccttgtataataaaactgttagttgcctatttcagatagatactcgggcctgggatgaagatgtggtaagagatctctttgtggctcgtgaccaagatctgatatttagcattcagcttagtgactcggctgttagagacggatagagttaaaagtttgagacttgtggcaattattcagtcaaaagtgcctataagttcttgtaggaaacaaaggagcttggagtgtggatggcaata

SEQ ID NO: 355920 - DNA, 560 bp, Cannabis indica
gtctgggcgttggttccaggtggaacagtcgtattatggatgctcgtggttgggtgcggagctattattcccagtctcttgcacaccaggcgcgactccagtaacaagagctgtttcaccattcaccacgcttcccgcctgtccaggattaacagcaggtggaacccttgaactccatgggtcttgtaatgccggatccagcgtctgcgaattttctgggtcaggcaggcctctacgagtttgcaccatcgtgtgggcggttcagtgtcgaataaagatcgatatatatgcgattctgctctcaatgaaagcaccagaatgttgacttcgcttttagccaatgacaatgagtctattttataagcgttaaatttatatgtagtaacagatatataataaagcataataagacacaagaagtttatagaggttcagccccgagtagttcggtaatagcctaatccttgttatttgtattgatttaagaataaggttctttttcttatagctcttacaacagtatccctgaatatataattcttagataataatatagtctt

SEQ ID NO: 355921 - DNA, 541 bp, Cannabis indica
ccaaccgcctctaaatggtataatgcaattttatacctacggtttttatcaaaaaaccgcctctaaatgtcaatttcgaacatagcgggtattttcacaccctttagcttccctttttataaatggggttgaaaaaaactgcctctaaaggctaacattgtagtagtgtagagagaatttgctgtatcaatgtgttatttaaaaaagaaaaattgagaatatacgcgcgccaggccccaccgattttaagccagggttaaaatgtcattaattatttatttttatttttttgaaaaatacgtttatcattaattaattaattcagatgtatacaatctccaactagagatgtacacattgtggtatatatttggtacaaacactaatttaagctattttgtatcaatttttaatatttcttttaggagtacacatggattggattagttggattagagctaatttaatgagaaatgcaagtaaacgatactatttttaaatttatagatagttaatgtaacaccctaactaatttaggcgt

SEQ ID NO: 355922 - DNA, 634 bp, Cannabis indica
tttttctttttttttttgttttcgatttgatggaccgacggtgaagagggggcctgggattcgtgggcttcgaccgtcagtgatgagggggcctgggattcgtgggaccggcggtgacctgggcttcgaccgtcattcgggttggggttaggattcgtgggtgccgtgggttgagcgtgggtgagggtggttcgggttggggttttcgtgggtgagggtggttcgggttggggttgatcgtgggtgagagtcggctgagcatttacaaatgggaggggtagttttggaaaattggtaaaatggtcatacattacaaattttaataagtatgcatttaagaaaaaaattataaagttttgtaggtatggaaattcaaatttctcaatataaattagtagatattaaaatttagagatataatttaacatcagtgataaattagtaaaattgaatgaaattaaaaaaaaaattaaaattaataatttcaataattagaatgaaattttaaaaaattcaaaatgatttattacacacacaaattaagtggcaaaaatcttaattatttttttttcaaaaaaaaaactaattcccatgaaaacttgtcgtttttaatagggctgagcatcggtcggtt

SEQ ID NO: 355923 - DNA, 552 bp, Cannabis indica
aagatcctggataaatataattccaacactgttaaccttcattcaccactgtcaatctacctttcctttgtttgatcgacaacagaacccccagtttcaacacttcattgtaagtttctcgcattccttgctttattgtttgtgtatatgtcttatagtaagagtatataccttacatcataataaccacatgatctaaaatcaatggtcaaaaaaatttcctaccggtagaaaatttttgttaggtcctaccatagtcttgccctaaatatatatgtcatttttgagcattttgtataaaattctctaaaataaaattatgattagagatggtcttaataaaatggtgtccatataagaattcttgattggttgagtgttttcaaaaacaaattttgaatactattttgagttttaggctaaaaaatgaaaacaccatttttatattttttgtgttttcaaatcattgaatccaaaaactctctaattattctcttacttttttattttgagattctcaaccaatcatatattcacttttttaaaactcaa

SEQ ID NO: 355924 - DNA, 872 bp, Cannabis indica
gtcatttttgacaattccgaagatcacttgtcagctataaggattttatatgtcaacttgctttaattgtgtcattagtagtcacctcaagaattcccatgacacttcacttttaatcctttttaagagagattttggtgactttagaacccttaatccaaacaagaaaggatgcttgtaaatatatccttaccactacaccacataaaacatggtattttttaattttttaagataatagtatgattattatttttttacaaaagatattattattattattactattattatcttccaaaaacaaatagattatacaaaaaaaataaaaaaatatgatataataaaggcatccagacctaaaaaacaacaaaaaaaaataaaataaagtggaaggccatttggtattgaagactttaaaactctttttcaagttgaaaaaggatcgttaattaaaatattcacatacatgacaacaacttaacaaacttggtttctaaaaaaaaaccttaataaacttggtacgataatacaatcacatatgatatgttggaacttttcactctaaatctacactaatttaaattaattaaacaaatcgtctttttttatttttaaaagaaaaacaacattaaaaaaacatttacgtataaattaccttataatgataagtacacacaatttatatataaacataacacacatagtgatagtggcaaattacttttgataattgtaaagcgacctattttaaataaaaataattaattaaaattacttgttacataaatgtctatttgtatataaataatatgccaacatattattattcataatttatatagatgtgtagaactcagtgaaaacactaa

SEQ ID NO: 355925 - DNA, 828 bp, Cannabis indica
tctgcttatctgattctgattcctttcaaccaagtttttcataataactaagatccataaagttagagaagttaaattcacaactttgcatttctcatttcgaacatgggaaacccactcggaaatgaagattttcgagtctctcatttctacagaacaccaacatctccgagaattggtgaccagctttgctagaacacggaaacaaactaagtgatgtcaaaatatcacttaggtctcttaaagttcatcccttggaaatttttacacttactcaacatccaaatttacgtcatatgttaacttgatgtcagtctgggtgttggatgtcaacttgagcgctggatcatgaactgtcttcagtaaaacagtcataactcactcaatattaatccaattgatgcgattacgcttacattttgaagctatttcacatttgtttagaaaaatcaatcatctacaagaatggagtcttaatttaatctttttaataataactccacaattctcgactttccattttgttggtctcatagaaatcccaagatattttaaagggaaaagaccttcttcaagctgtaaaatctaaagcagaatgactttgtctacctttaaaactccaccaaaaagactggaatttgttatggtgttagccttcatacttgtgctactgcagaagctatcaaaaattctaatttaatattttaactgattgttatcgataaaattacatgatttattaaaaaatatatatacacaaaataattaataaaaaaaatatatcaaaattctaaaatgaactaatttaattagaaagaaactctagct

SEQ ID NO: 355926 - DNA, 1016 bp, Cannabis indica
gtcgagcagctgttccattcaggttggtcgacacacctaaacttggaaacgaggtaagattagtttaatgatatgcatatgttcttacatgtttcgcgtacatgttagttaagcctgttagattacattataatagtggtatccgtatatttagtattatattagatatcgagaaatgtatgttggcttaagaactactcaacagtatcatattggtacgactagagtacgactagcgtatcgagtataggatgatattatggtcgatagtactatactacttgacagtatcacattggtacgactagagtattgctagcataccgagtataggctgatattatggtcagtagtactgtcgtacgaacattcttgactcagtactgtgttggacatagggataaagttatagttgggtgtatgggcacctgattataatgcaggttattgctatgttattggttatgcttttcgtactgagtttgtcgagtcacagatattttttgcatgtgtaggtaagggcaaggctaaggttgagtagccatgagagcgagcggagaagattgtacatgtcggggcggttaggcctggagcgtacggtctttgggatagctgggcatcttttgtatagtcgataggcgataacttttgtactatgcactgtaaaatttttgtaaatattttgttaacgggatcccgatttaatataagtaaattattttaggtatttataaatagttaaataaagttttaattattcacgatttttaataaactcgttgattagccatgagctgcacaattaagttaaaaatcacgttaacacgcctaaactagtagggtgtttcaatttagtatcagagcccccaggttgtctttcaaagattgtcacgacatgtgcaatcataatctccgatcagctcgactcatggttcagtaagacttaattgctttagtagtttattttaatagtatgttttaagaaaagcctgataggaagcatgttcgtagcctga

SEQ ID NO: 355927 - DNA, 557 bp, Cannabis indica
atagtatgttttaagaaaagcctgataggaagcatgttcgtagcctgatagctgaataggcgctttctttaattttccaaaataagcagtaattagtaagttattcttaatcgcgatctgaccaggttagctcttggtttgcaggcttttctaatagaatggatgccaggtgaaacactaggagtcagggtaactctgtcggatctagcggcggtcagggagctcagattcccccaatgttcgtggcataggcagaggccctagaggcagggcatgcggttggggagatattaacccgccacaggctgcctaggaataggaaaactggtttgcagcaatgcaaggcagaatcaacgaacaagaggaagaaatcatacggttgaggcaacaaggtgctcttgcaatgcctgctccagaaatgcaggtggctcatgcccctgctatgcaagcagggtcgattactgtagtgaaccggatggaaccactgtatgaaaggttccgcaagtaggcacctcgagtcttttgggtaggcccgatgtgatgaaagccgagcagtg

SEQ ID NO: 355928 - DNA, 876 bp, Cannabis indica
ttcctacttgttatggggacaaaagaaagcaagacaaaggcaaagccaaggccaatgttgctactgcaaacaaccacaaaaatgacattgatagcagctcgggtcacattgatctatcctctcaatgccaacaattaatttctctgttgagccagcaactaagcaacacaacaaatgcagaaccacctgcaatagcccctgctgcatcaaatcttgcaggtacaactttaaactcaacttcttggattgtggatagtggtgccactcaccacatgttttgcaatttcagttgtttttcatcattttctaatataccattccctaaatttgtgtctttaccaaatggacaatctctccctgtccacaacattggcactgtcaagattaactcaaaaataacaatgcagaatgtaccttttgtaccacaatttcagctcaatcttttttctataacagattacatgctcaatactcttaactcagtgttgtttcatcaaaattgttgtgttattcaggatcctactctgaatatggtgattgggacagctgaaaaatgtggcaattattcttgcttcaccaagaactgcctactacagcagctactactgctactactgccactacagcagccactactgctactactgtttcattttctttcaataaaaacaatgtaaaccaatggcataatcgccttggacatccatcgatgtgtatttcaagttttttcaataaagaacataacatttcacatcctaattcctctttacattgtcacatttgccatttagcaaagcaaaaacgattgccatttatttctaataataaattttccaaagacatattcgacttggttcacatggacatttggggtcc

SEQ ID NO: 355929 - DNA, 952 bp, Cannabis indica
taatttacaatataaaaaacaatgttcaaacagtctattatacacgcgtataaaataaaatagtcacgcgtacaacacactgtttgaatgtatttttcgacgtgttaaacttttctaaattttttaaaattttacaggatgtcttaaataactataacgtacatgactatgagaaagaatttgactaaaaaattattttgggtgctaaaatagataaggctgcatcaatatatctattttaaaggagtgcattgtagaattttccaataatttttaaatgttgttgttattaatgaaatttagagagattcatggataggggttatgtataattcattgggtggccaataataattgaggacacatatgaatatagtttggttggaaagtctataatttgaaagcatatccaaacaattaaaagcggtttctgtacttatccacactgttcgatcgatctgtgtagctaattaattaatataaactatttttcttacagaattaattaattataattatgttaaaagatctgtacaagtattacgtacagagaataaacattggcattcaagtatgaaaaaataaaatactacgatcaaaaaaacaaaagacaaatgatatatataaatgaaaaaaaaaaccaactaaatatatttatatatattataaaataatattaaatatagataaagaaatataagaataaaatattagattttttattttggatttatattagctaagtccgctctctaaggttattagctaagtccactctctaactctataaatacatatatattatttcatcacaatatactgtaagtgtcatgtctttgagtggcaaattatgtaaatactcttgtttagtatttctgcatcagtattgttttttctaacatcttttctgtggttagttgtcatctgatttcgctaaatcttttttagtgcc

SEQ ID NO: 355930 - DNA, 596 bp, Cannabis indica
agtctctgaattaacaaataaactctcaatcctcttttcttctcaattaagccattgtttggtgaaaaattcacaaacaatacatagtcttgtttagaattctaattgattaattaatataaaaccaattaattaagactacaaaataacattatcctagttagtgtggtgaccatggcactatgtaatcaagcttacaataagtagatcagaaatttaccaagtaaattatctaacttattaattcctcctgactcaactatagattcaaaattacactcttaattacatagaatactctattaccaaaaatagatgcaattttaattatcaattttttcaatccaaatagtcaaagaccctcaataaatgatctacatcgagtagggacaaatttatcgttcaccctttaatgtattttatccttaaagcacgttagctacttgtaaataatatttctgtaagttaatataattactgaaatgtgcgatcaatcatttatcacgttaagccaagctcgaaggaaattattgtttcacttctagaagttatagaagctatagattccgtatctatgattagtgctcccacttaat

SEQ ID NO: 355931 - DNA, 483 bp, Cannabis indica
atgaatagttttatggtatctctagtgattacttaatcttaagcaagtattgaacattaagttaaaatactagattgttatgttgatgacttagtctagaatgaacttacagtttcggaccaagataatatgtcacaacaagatatccctcaaaacaatagtaagaggttaaatgtacttctatgtatgattttgaccatactcctactgttgagtgggagctatctaagatgtaatcaaacaaggaacattaaaagacagtcaagaaagatttctgaaagtgacctatatgttagatgatagggatgtatatattagaagtccttatttctacaccaacccataaagaatccgagatgctggttactttaggggtggaggaattattctagtaggatataaacgtccatctataataatttaagctacatcagtgaagatacataactttgtaatttcaaaattactggaaagttattcaac

SEQ ID NO: 355932 - DNA, 628 bp, Cannabis indica
cataatatacaaactaagtatattagttgggtaaacacaaggcctaaaaagcgaggcacctatctcgttataggaaggagcactcctgttactttcaccaatcaacttcagacatctttcagtgagacttatagtcttgacaattcagaagttgatagtagaatgatggcggctgaagtactctttttgtcataaagaatcgtgactattaaaaattaagtgttatgtcttcaagcaaagaaacaacgagatgtatatcatcaatctcggaaggataggggaaacattccagcttgctatcaaggtcattaatgttgagttcctgtcgagacatccaaaaatgatgtgatttaaaacgtgtttaaatacacgatccttttgacccagtaaaagcggataagtcacaactgtgtgatattcaaataataaccacatttatactatgtgatatgtaatcaaactccatgatttcaggggataaacattgtaaagattacagttaactctataattaattgcctatatgtgattataaattgtggcaggttatatcaaaaaaagagacgaaaaaatcataagagaaaaaggtcctgaaaaactatcagaaatttaataagattgactcgtg

SEQ ID NO: 355933 - DNA, 1024 bp, Cannabis indica
cttaattacatagaatcttattaccaaaaatagatgcaattttaattatccattttttcaatccaaatagtcaaagaccctcaatagatgatctacagcgagtagggacaaatttatcgttcaccctttaatgtattttatccttaaagcacgttagctacttgtaaataatatttctgtaagttaatataattactgaaatgagcgctcaatcatttatcacgttaatccaagctcgaaggaaattattgtttcacttctaaaagttatagaagctatagattccgtatttatgattagtgatcccacttaattgtactatcatgttgctaagatgtatgtatatggaagatccactttgtcaactttaacaaacaattcaatgagaatgagtaatacattaaagccagaacttaactatttctagattcatatccattgacctaaggtcaactaagtgttaatgacttagaaagatataacaataagtttatgatgtcttagccaatgtcaatatcggtctaggccgatgtatactccatacatctgatacttgcgtagtttaccaatttattagaaaaagcataccacttatctaaggtgtaagtaaattttatcgctaattatcatgttagtgtaaattcagtgtactgaaatatcatggactaaactttgaaacataaaatcataattattcttcactctctggactacactattatcatgaataactatatcatctggatttaatagaatttatccattaaatatataatcatgaaaatattcttgtgaaccatgcaaaaaagaatgatttctaatcttttattaatttataaaactgattatattgaattaggttttatttagggcataaaatccaaacaagatccccagaccactggttaccgggatctaactattctcgccactggaccttcgtggtaaggcctgtcctcctttggtaaaagaaggtctgtaatggttcttgaagaatctggttggtcagtcgctgatagaccct

SEQ ID NO: 355934 - DNA, 913 bp, Cannabis indica
aaaaataaaaaaatatcaacaagtcacttacagtggaattatagtatggatgatcaatagcaaaacttgtagaagaaaaatactaaagagaggaaaaagaagaagagatgaaatacgtaaatatatccaaaagcgcgtgtggttatattgaatagaaaagagtaaaattgattgtggggcccaaataatttagtaaacagaaataaaaaattaaaaaattaaaataaaattaattttttgtccacattttgacataagtggacaggtgccgtatagcaattctcaagaaagatacattttattaaaaaaaaaataataaaacgagagagtcatcatgtttctcgcgccccaaatctcacttgaagcatttttaaaaaaaaaaagtcagtcacttcaaagaaaaaaaaagataagagactttttttttacaaatctaatttaatttaacttattcaatttaatctaattataaaaaattaaatatctaactataattaaattagattagatgctaaaaattaaattttaattggattgaatgtcaatctcaaaattcaattaaaacctattcaatctaattacatttaaatatgttaaaaaattattgagaaattctataatgcaccccttaaaaaggatacaccgatacatttccatctgttttagtatcggaaataattttttagttaaattttttctcatggtcatgtaaattatacttatttaagacatcctgcaaaattttaagaaattcagaaaagtttaacacaccgaaaattgcgttcaagtagtgtgttgcacgcgtgactattttattttatacgcgtgtaaaatagactatttgaacattattttctatattgtaaattattccgaatttcttaaaattctgtaagatatcttaaatagctat

SEQ ID NO: 355935 - DNA, 664 bp, Cannabis indica
tgattttcctacttttactgggtgaaaacaattgtgtattaaacacgtctttagctgttgtatctggagatgtctcgacagaaacttggttccagtgatctcaatagcgagctgggaccattcttccttccgaggtcgacgatgtatgtctggtgtcgatcgcagttcttatcctcaaagaattcttcgaggctcatttgaatgctatcttctggttcgccaggattgtaagcctcgctgacgctaacgggatgaagttatatgaagtcttccgataacgaagcggtcacctcgcttacttgttcttaagccgatctgacttttacacttagtctgttcattgtacgctaaggacttgcacgattgatacatgtcactttctttggtgcctcgctattcacatttagtgacatatggtttctcactaatatactaagtgccagttgtacattgactcctcgcctaagaccttacagtcagggggttacaaatatactttgatacttacataattaatgagttattccagaagaagcaattgcacaattcacattccctttatctcgacacgtgtcctccagccaaattttgggtacaataattaccccttaaaaagttatttttttagtaaaaagagctttttaataattacagaggtcatttt

SEQ ID NO: 355936 - DNA, 703 bp, Cannabis indica
atagatatttaagtaaccatatatggaacttttggtatgccgccaaatcgattataaggaatttatggagaacaaaagactacatgttcactaattagaaaataaaattttttagagatcattaagatttttaattttgatcttataaagcttttagttgtgaaatttttgtcacatatgactgtaaaattatgaatggtattgaaaactaataaaaatatatgttgtgactatacatcgatcaggttgcattttagtaacaacataagctctacaaggttaaaagcacattgactttgaactaattgttattaaaatgaagtttagagtaataaggtgtctatagaacatatccggacaaactctatgttttcagatccaaatcattaaggatataccacttaaggcttttcaggatcttgttgctcatgtatggatgtggtattatttaagattgtgctagtttagtgggaatttatatttgagatgttctatcaagcttacacatatatatggtttaattctccaaataaaatatggacttaagtttagagtattctctattgaggtttaagtataatgttagaaagaattaataaaggattaagcttaattaaggaggagcagttggaaataggcacgttaagatcacatttgcatgtaatttctatgctttgcatccatgattgatctatgttatttg

SEQ ID NO: 355937 - DNA, 1208 bp, Cannabis indica
acatcttatttgtatttttttctcctatttttgtgggcctccttcacctataaatgagagctcccctagctcatttttcacattcaaaaaactacaagtttagagcttctctctctagaattcggatcttctgacacttagcctattgttgttatacatctcgtgagaaataaaaactcaaagtagacatagctccattactgttgtgatacagggagtgaactactataaatttgttgtgtctctcttataattacttaattacttttttattctcgccaatctaaggagcgggtgtggcttaaaagtctagtctagaattctgagttaatacacggataaatatgggccgggccagcacaacatgcacgaacttacatcactaattttaatttagtttatttacataatttttttctctatgtcaaatttttaactatataattggtttctctatatcaaattccaacatccaactccaatatttaatttcgttgacgataatttttctagcgacgataacaatttcgtcaactttttggtaactttgttggggactatgacaactctgacaacttttttagcggtaatggtttcttcgacaactttttccataataatagccgctccgaagacttttctggtgatacttgttctaagaaatcttattaaatttatttatagacttttgttaagattcctattttttaatttcttttttttcctctaagattaccatattttatgacataagttttatgctcataaatatttaaactaacctaattgttcccatatttatgtaaacacaacatcatgagatggagcctgtaacaccctaaataattaggcacgctacccaagatacttatgaaaccctaatcccctaattgggattactaataaaattagcgcagaaattaaactttaattataaacggaattaaaataaaacttgtaataatttaaactttacaatctaaaagttacaaaatttgggatcccaaaaacatttacaaaatattattacaagtcttttttctttcagccagcctaagcggcaaaatagagtctaaaaaatacaacactggtagaccccaacccgcttggtctgatatggctcggacatgtgcattcttcgtccaggtccttgttaggttatatttagcttatgtttcgggtctttaaagttagcattatctcgtcta

SEQ ID NO: 355938 - DNA, 767 bp, Cannabis indica
tcatcagatctaaagagatttcagattgaagaaaagtgttaaagaagaacttagttgctgcataggaaatcttgtgcatacaaccaagaatcttggttgttgttggtaatacattactaattgttgtaaagattgtattaaattcctaattgtgaactggagattgtaatacgaatcttttggatttagtgaatgttattaccctagtttggggaacccaagcactagtcggctgagatttattctcagtgcagacgaagcttgtaagttattgtgttctttactgcttactcttcaatccgattcttgaatgtttaagttgaaattaatcaatctaatcttgaacaactcggtaacttgaatcatgaaatttggataaattgttgtttcagtaattgatttgaactttaaattcattctatatataattatcttattatcacaattaactaaaatataataattgaataaaaaaaaaacattaattttcggtttggacgagataacccaacccaagcgaccaatttcattgggcaggttactaatttcttttttcttaattggacgggttgcacttaatttttgcaacccaatttttacattcggttgaataaaatatagcataaactgaccaaaatcgaccgacgtacacccctatcttctatacaacccttaactaatctccaggtgaagtgtcttctttatccacgtgtcatacatagcagcggccacgtattttggctccttttgcctcagaaatggtaagc

SEQ ID NO: 355939 - DNA, 1050 bp, Cannabis indica
gtccaacgtacggtttcaagattcactaatagacaatttttttgtattatttttagcctactatatctatccttagcactcaataatatatatcgttatcactcaacaatataacaatataatattaatcctaactattaaaatactaattactgtacactgttgctaactactaactaatcttactctgaattactaactagaactaaattactaagtagtaactagtcctaattctaccgaagtccatggttaaatgtattagacataaaaattacaatttgttgtgactaaatatatttttagtcacaatacttgttgtgactaaaactaaactagtaacaacttgtatctaatattatgacaaaacgtgacatctacttacaaaaaattatgtgactaaaaagttatcactatagctattttttgtaatgttttttatatacgtaaatatgtatatttattaataatatttttaaaatgagtaaaatatattaaaatttgaaaaaaaaaaaaaaaaaacaaagaacttttggtgatgcattttaaaattgttgatatatataaagtaaaaatgttatgtaaaaaaaaaaaaaaaaagtttgagtgatttattttgaagtgatataacaataaaattttactaaagctgtataataacataataaaatggacatgcatgtagtaaaatttttatttgttgtcaatagtgatactaattataatattctatattacagcctccacatccaaaatcatacgctagatttttttttatttattatttttatagcggtattctttatagggttaatttcataaatgcacaaaaacaaaaaaaataacaaaaatacggttttacggaattttaaacattttaacgatttttatgattttatttacataaaatacggtctatttatgtagaaattttgttcatttgtctgttaattttttgttatatgtacgtaattttgtgttatttttttgtttgttattttgatgttattttgatgttacttttatgttgttttcttgttgattttatgt

SEQ ID NO: 355940 - DNA, 824 bp, Cannabis indica
tgagattgtttgtgagatattattggttagatttaggtatttttgtgaaaatgggattcggattacactgtgaatcccgactgaaaaatgggcttcggatctggggaagacgaccggcccgatggtccgattgggggtggggcccaagggcccaatgggggtgggtccgatggtccgattggggtgggtccgatggtccgattggggtgtgggtcgggtccgattggggtgttcgtgttgggtccgatgttcgtgcagggagattggaccgatgggtccgattggaccgattggaccgatgggtacccaatcgggccaatcgggccaatcggacctcggacccgattttaatttttttttttttttttaatattaatgatttagtaattgttttaggtattaatttattattatattatttagtgattgttttaggtattaatttatttttaatgacttaataagtattttttaattaattattggtaagtaataatttttaatttattattaattattaattattgttttaatttttattgttttattaattattgttttagtattaattagtaattattgttttagtattatttattaattattgttttattattaattattaatttttgtattattttttattgttttattaattattgtatttttattaattattaattaatgttttagtattaattattgtagtaatttgtattgtgttattatttattattttttactaattattagttattaattattaatttttattaattattaattattaattattgttttaatttgtattgtgttattattta

SEQ ID NO: 355941 - DNA, 583 bp, Cannabis indica
ggctatggatattgggccccactattgcaatttgctgttttatcatttctacatctcactttctcaaaaacgccaattttcaaattcaaccatttaaatgacaatttcaactatttaataactaaaagtaattattaaataatattgtcatttaatatatttattaattagactaatcaaaatctcttaattaacaaatatacctatgtacagtggtacaggtacagtgggtccatgcctatgtctgtgtcttgggttctgggtctgggtctggggctaatgtttgggtccaagtttgggggacaagactgggatcgaggtctgagttcatgtctagtactaagttttggttcaggtctaggggccaggttgcgattgagaaagggactaaggtccgagtcaggtcgtggccgagggctagtgtttgaggtccaggctgggagctgggagccgagagccgatgtcttgggttggggtcggtgtctaatcacagagtcagggtccaaaatattaatgaaagaaaatacaaaattataatttagaaaaaagaactttttaaaataattttttaaagaaaaaaaaa

SEQ ID NO: 355942 - DNA, 536 bp, Cannabis indica
tctaactttttcctgttggctgcgcgattgctgccgaggccggtcatctttccaagactttgatcgaccatgggtttaccatgtctgaatttgatgccatggaggaggtgatgaagaagctctgggaatacagaggaatagaaggaggctattcgaaatgaagcccaagagaaggaggccctcacggagtggaaccatcaggaggtgctgaaggccagggatgacatcatagcttcggccaggagggatctttgagattccaaggagtagatccaggaacttactgcgaagcataagtctttagaggagttggaccaaaccaatttggaggcaacaaccattttgactgttgaacttaaagagctttgtgaattctgggatcagactcataaagagggtgccaaggccaagagggatgcccttcaggccccaatcacttgtcagcattacgaaaagcgttttgatgacagggtgttcatgttagaatattattttaccaggatcttagatctactcacaagtatgttgtttaaaca

SEQ ID NO: 355943 - DNA, 534 bp, Cannabis indica
tcttcccggactagggctgcgctgaccgcatgctcggagatggctaagtataggaacaagtcctctccaagaatgggctttgataggattggtggcttggccatgtgctcttttagttttttgaatgcctcctcgcactcgtcggaccattcaaatttctaacacttcttcaagacattgaacaagggaatggatttgtctgtggattgggaaataaaacggctcagggcaccggttaagctctggacatctttgtgtttctttggggaaggcatgctcaggagagcttgaattttttctggatttgcctcaattcccctgtgactgacgatgaagcccagattcttccctgacttaaccccgaaagtgcacttcttcgggttgagtttcattccgcacgtccggaccacttcaaagcattcttctaagtcgtccgcgtggctagtgcatgcttttgacttgactagcatgtcgtctacgtacacctccatatttcgttccaagaggccccttgaacatccggttcaccattct

SEQ ID NO: 355944 - DNA, 547 bp, Cannabis indica
aattagggttattaatctctataagtgttattttgagcatgcaataatatgttatatgagagactatttggtatacaagttagggttattaccctaagattttatatgttacagtgtatatggaatgtatgtatatatatatcaagagttatgtgtataagacataacttggttagacctggtatatattatcaggataaaccactaaaagaacgtaatgtatggattacgtaaatatatatgaatagggttatgcgagcaaggcataaccaggttggactcggtaattataacagagataaaccttactaaggccttattgtaaatagagaaaattgtgcaagaaaataaagctaaaacttcaagcctgaatacgactatgtcctgcttagattttggaaagagtcaaaacatgaatgttctagatctgtcctttctctttctggaacatcttgaatcatctaattccgagcaatatcgagggagttatggccaaaatactatcagtcaacgcagcagaaaaatcacctcatcttctaatcctaag

SEQ ID NO: 355945 - DNA, 545 bp, Cannabis indica
gttttctaatcctaaggagaatatgtttatttctcttcagtgatttttatcttattttatcattttagtggctataaaagaagttgacttcaatagttttggtcaagcaattttagaggaaaaaatagtacgaatttcagagacaaaagtcaatactggaggcattctacagagggcttttcagcattattttattctctatcttcttctcttcttaaagttaatatgtgtgattttgcttccatgaacatatgtagctaaacacttaattatggttagatggatattgtttgatattgctttatggtattaatatgatttgttttccaccaatttctatgtattctatttcattcgtgcttaactacttttaattgtctgatcaccaattaactgtctatgattttgatgcgagatctgagatgtgagtgtcaattatgctataatgaaatagaactgaatttcgatataggacgagagtacctatatggtttagatagcttatagggtttctatgtttaatgcctgttgcatgttaaatttat

SEQ ID NO: 355946 - DNA, 569 bp, Cannabis indica
actacaaaatacttgtacgtaaactaaaaaaaatatgtaccataaaaactaaaacatagactatgtaacaaaaaaaatatgtagtaataaataatttgataacaaccccactttaacataaatagataacaaatttatattaagatgtaaattaattaggcatcaacaaatttcatcaactcaaaagaaactttaaaataacacataaattatctcaaaaaaaaaacctacaaaatacgagtgcattaactcaaaaaattatgtatctatgaaaataaaacatatactcagatagtttctacctggttgaacaactaaataataacgcgcaaacaattaaacagcaactctattttaatataaaaagttatttggcatcaacacactgtgttaacttgaaaaaaaaaacaaaaataaatctttaaaaaaaataataaaacaacattcttaatatatatatgtgtccataataataaactaaatatgattagacattcatttttttaacacaactagataacaacaacaaaaaaaaaattatataataattgtactgtaatatgcaaaat

SEQ ID NO: 355947 - DNA, 552 bp, Cannabis indica
actggcacatgtttttatttgagttgaatctgtgtagggagctagccagtcgtacaggcccagcttgacgaattgaagaatatgtttcatggcatggtcggacagcataataatgatcttgagttagaccgtgctcgcgaaactcctttctcaccagagatcaacctcctgccactgccccacaagttcaaaatgccaacatggaagatgtatactaggagagaagatcctctctcccatctcaagtattttgagatgaaaatggatttacagggagtgtgaggggacgcatgttgcataatcttccccgccactctgtcgaaagccgcacatcaatggtatttcaagttggctcctggaaagtttagttcatggaaaaccttttcttcagaattccatgcacaattctcttcctcacgtcagctcccattgcatctgggagatttggtcgaagtaaaacaacgaccaggcgagccactccgagcatacatcaacagattcatgacggaagcgaccaaggtgtcgcggttaaccgaggatggaaagttatcc

SEQ ID NO: 355948 - DNA, 503 bp, Cannabis indica
taaaattacccttattcttctacgagagattagaaaaattagaaaatgtgcaatgtaatataatttaactaaattgatattttaactaatttttttataacgcctctcagccatagattttgttccttgtgttgtagggtactgcatcttttttctattttctgcatttattttagaatgagcaataaactccgaactagtaaaaaattgacaaataggaagccattgctctgaagtcaattcactaggcgggtgggcaccttcattgtcctcgtgaataccgttgacaagaggtccatctatttccccgtgccaaatccacttttgttttctaattttttaatcccaaaatgaaagtaaaatttttgtttttgaaaaataaaaatgcgttctgtaaccattttttttttataattttaaaaacagaaaacaaaagtgtgttctgtcaagtttatttttattttcattttgttttattttatttaagtcgggtctaggtccgg

SEQ ID NO: 355949 - DNA, 707 bp, Cannabis indica
ctttaagatgattacctctttttgtgacttgcctataaatatcaaacagcattggcacatagactcattttcatcacccttttttgctaagtaagcttgagatcgaaaagagagattcttggcttcaaagttgtcgaagcgccttcatacaagctgcttgttggattgacgttgctcgaacccagacatctgactctcaagtaagtttctgatttcctttatgcttatctttgcatgttttttatttcaaatgcaccttctactttgctgtagaaaaatgtttaggaaaccctaggttcagaaacctctgcgattcttctttatcatgtcttcgtgtgattttaaagtcataatgcttgtttctgaactttgtaatgtctatctttcatcttgcttattctaagcttcatgaacttttttgtcctaactcgagaagatttttgacttcttttctgagttttcttcaaacataatcgttatttaatctgttgagtactcctggtcggcatatttgcctgtttatcattcgatattctgaccaaacactcatcttgtgtgttgtcttttgtagatgaactcaggtgagtcttgagaaaacggacatcggatcgaccaggacctgcttcaacttctgcacgaggatcatcctcgtctttgttctagtccaccttcctctagcaaagcacattcttcaaaccctataccca

SEQ ID NO: 355950 - DNA, 629 bp, Cannabis indica
ggttcgggtccatgtccaagttcaggtctcgagtgcgggtccaagtttggctcttggttaggatctcggtctagatctaggtccagcatttcgatccaagtcttggtctaggtccgagtccaggttcgtatccggatccctatctatgtccaagtgtgtgttttggaagggtcctagatttaggtccaggtccgggtcttagttccggtctagttacacgaccgtgtccggggccaagttccagtctcagtttgagtctgacgctaggcatgtcttcggttctaggtctgggtccgggtcctggtcacggtcctagtcgtgttttatggtcctggtttggtgattcttgttcaggttttaattttggggcccaagtctaggtctgggttcgggtttagttcttcgtcttggttctcgtcctagtatgcgtcccagatttagacaccgactactggtctgttccgggccctgttactggaatccccactcaagatctggatcaccgacacgggtctcggtctggttttggttcacgtcctaggtcccatttttgagtttgggttcgggatcgagacatgggtgcgggtcccgagtcaaggttgggttgtgatccgggtccggctcccaat

SEQ ID NO: 355951 - DNA, 595 bp, Cannabis indica
aagtacaacatgaaactgaatcccttaaaatgctcctttggagttagttcgggaaagtttgtaggcttcatcgtcaatgcccgaggaattgaagccaacccagaaaaaattcaagccctgttggatatgaactcgccaacaaaaaccaaagaagtgcaaagcttaactggacggatcgccgcactcagaagattcttgtcaaaatcaacggacaaatgtgttccattctttaacatcctgtgaggaaaccaaaagtttgaattgacagaagaatgtgtaaaagcttttcaagatctaaaggcataacttgcaaaacctcctgtactttctaaatctctggagggtgaggagctgggaatataactagctataagggaacatgccgtgagtgccgtgctaatcagagaagagaacaacatacaacacccagtctattacattagtaagagactcatcgaggctaaggagcgatatccgttaattgaaaaactcgcctactgcctcattctagcaacaaagaagttgaggcgttttttccaagctcatcctgttcgggtatataccgaccagccattacgacaaatactacaaaagc

SEQ ID NO: 355952 - DNA, 706 bp, Cannabis indica
taaatgttggaataatgccaaaaaatgtatagaacattccttagactgaataagcatctttcctgcaactttaacattcagtctctctctggtagacttagagacttcagatagatttttacacttctccaaaatcaccagtccacccctagagtaatcaccatctcatcagcagactttctagcactaaggcaagtctagaaatctgatgtggtgtagtctaagagtattaaatgcacccttatcgactaacatatagttcctcttcttaatcttaagattcacttaattgtcttctaatgttcctttcctagattaatctgatacctactcattacttgcactcaacagcaggtatcaggtctaaggcatactaaagcatattccatatttaacatacagtttgaattcattgataaaagatggatattaaacacttgtgaaagtgtaactgtattgtattctagaaacagaaatataagaaatttctatttgaaatatgaaatttaaagtcaaagacttaaatttataccaaatataatgagtaattcttctttcttggaccaccactacttatttaactctatgtctgatatgtccatacaagtaggagatttctaagattgatgatttatatcatttcgggatagaatgtcgggaatataaccatatgcatcattcaatttcttaagagaaaatagaatga

SEQ ID NO: 355953 - DNA, 378 bp, Cannabis indica
gagctttgtcagtctcaaactgctcgtcctctttatcgattttaaagaagacagacgaagaagaagatgacaagaggaagaagacagacgaagaagaagaaaagaaagaaaatattttcgacacgtggcaagaaaacggctacagttaaaattaggactaacggacaaataaaagtgtgaccttgaggactattgctgctatttttagaggttggggtactaatctgtatcaacgtgaactttttagggacttttgccgcaaatttccctattttttaatataaccaactttaagaaaatttctagaaagaacagatacgagaaaatgtaaccagatttatcataacatctctagatcgaattattattaagttttat

SEQ ID NO: 355954 - DNA, 449 bp, Cannabis indica
aaagttgagattggtgctataaagaatttcaccgtgactctaagtggactactaagatataagggtagaatttgtgttccgatagatgatcagatcagaagggaaatccttgatgagctccatactactccgtattccctacacctagggacaacaaagatgtatcatgacaccaaggcaatatattggtggccgggaatgaagagtgacattgttgaatacatttcaaagtgtttaacctgtctgcaggttaaggttgaacaacaacggctggcaggtttacttcaacccttgagaatgttggaagttattttaccaggaacttagatctactcacaagtatgttgatttaacaacctaaatatgaacttctaaaacgatgaaaattaaacacataaaagtatcagaaatcttactttgggtgcagcagaatatatgtctcctcccac

SEQ ID NO: 355955 - DNA, 510 bp, Cannabis indica
aaaattgttaaaattgcaaaattccatgtgtgtcccataaacacaatggccggccacttggagaggctttttgcaattaatattttcattattttaatacgaataattactaacctaaacctagtggttacctataaatagacaatgatggctcacaccaaaaaaataagagttttcaagtgattcaagagattgccttcagaaattggagccactcactatccttctatagcggaccccctctctctctcttttgttcttctaattttagaatatcttgagtgatagagtagtgtccacacacatcaagtggaacctcaatcatagtttggaagatggtgaagaatccaaattgaagagaaggacattcagactcaaatcttggttatactctgcgacagaaatggtacaagggttagagatctgattggaaggagacattatattccagtgcatccaatgtaaggttccctaaactttatatgtgtttattatcgtttttgaagttca

SEQ ID NO: 355956 - DNA, 637 bp, Cannabis indica
atcagaaatcattttatgttgcatggatgacatgatttcttttatgattatatttttactgtataaattctattaaatctagaacatatagttattcataattatagtgttgtcaacacagcagaatataacaatgagtgtatgtttcgacgtttaagtcccacgatttctcaatacactgaatttactctgacatgataatcaacgataaaatttacttacaccttggataaatgttatgttcttttcatggcattggcaaagtatgctaggataatgtatggagtaacatcggactagactgatattgacaattagataagatatcataaactttttgttatatctatctaagtcaatatcacttagttgatattagatcaatagatcttaatcttgagatggttatgttttggcttaaatgtattatttatgttctttgagttgttcaataatttgaccaactggttcggcccaatacttacatcttaggaacatggtagtataattgagtgggaacgctaatcatagatataaaatctatagcttctataacttctaaaagtgaaacgataattgcctttgagtttggcttaaggcgataaatgattgaggcctcatttcagtaattatatta

SEQ ID NO: 355957 - DNA, 501 bp, Cannabis indica
actctaaattaaccacacaaaaaaactaaaaacaaactttttattaacaataccttcttgttgctgaagagatcttcaaggtcaagggctccttcacgatgtcatctgccaaatccgcttctgcactggcgaagaagtatgctgcgaaaggctccgaaagcttgttgtgagagaggaaacacggttgggggaggtggggatgcagctgggggaggaggctggggtcgactgggggacggttggggggcgaggctgagggacgactggggtacagttggggaacggctgggtcgacttggggaggcgaagaagaaggaggatgtgaggggcggctggagagagagagagaaattgttttgagtttatttaggttttgaaaataaataaataaataataagtgtatttttggaaaaatgagaaattaataaattagtattgtacaaaatatttaagagagtattttttgaaataggagttttttttatgtatattaaatgaaa

SEQ ID NO: 355958 - DNA, 621 bp, Cannabis indica
catcaacttcctgaaggcaaaatctctaagaaagaaaggcatatggtacattatcgacataattgtagaaaatcggccataacagaaccaagggggtggattcttcttcaggatagcttctacagtcttctttgcaaacacttgtgtgggggttgagtctggtctctgggaaagattggctctataacgtattgctgcttcaaaaggcttatatagtttccattcaggcatcttatcatagccagccaaggcagaatttcctatgtttgatacaatagctcctggcaccacagtaatgacatcaattccaaaaggcttgagttcgaacctgaagtaaagattatcacaaaaataaacggacataaatatgattattttctctaaaatggataaagaaggctactacatgactaaacatataactttaccacgatgatgtaatcaatatgtgaatgagagtaacacatattagggaattatgcaatgttttaacaccttaaagaatcgcttaatgaatgaacagcagcttttgatgcagtataagcaccagtccatggtccaggggacaaagcagtaacacttccaacgttgacaattttcccttttctcctagatgccatg

SEQ ID NO: 355959 - DNA, 666 bp, Cannabis indica
caaaggtatgtggttttttttgtttttttgtttttttttttttagaaaggatttaaagatttattttgtttgagattgtttgtgagatattattggttagatttaagttttattgtgaaaatgggattcggatccgtgaaaatcggattctgactgtgaaaatagccttcggatctggtgaagaaggccggcccgatggggtgcaggtcggtccgatggtccgattgtgggtctgagtatgggtccgatggtgcctttggggtcgggtctgatggtacgatttaaggggtccgatgggtgggggttcggagtgatctgtatgggcagggagttatgtccgatgggtccgattggaccgatgggtccgatgggtaccctatcgggccaatcggacccgagataatttttttttttaaaatattaatgatttagtaattgttttaggtattaatttattattatattatttagtgattgttttaggtattaatttatttttaatgacttaataagtattttttaattaattattgttaagtaataatttttaatttattattaattattaattattgttttaatttttattgttttattaattattattttagtattaattattaattattgttttagtattaattattaataagtatttagtgattg

SEQ ID NO: 355960 - DNA, 506 bp, Cannabis indica
attcccaagaactggcctcagagtcatagtaatgatttactttcatgaaatatggatttaaaacgatgaatattgtttgtatgttgatttggatgtgttcatgttggtttatgtgattatttgatgattgaatgtgaattacgaaatttttctacgaaaataattttattttcaatctgaaaatattttatttagattccttgtgaaaaattaagcaattttggtttttacggaactcgattccgataaaaaattgagaaaccagtggtatcacatagtataaccagtggtttttccattccaagaacaagaccaagtcctgagaagaactttctaagccagacaagtttcctagaagtcttagcggtagctatgtatttggcctccatggtagagtctgacgttacggtttgtttagcacttctccaaacaactgctccacccccaagagtaaataccatcctagatgtagacttcctgtcatcaagacaagcttgaaaatctga

SEQ ID NO: 355961 - DNA, 583 bp, Cannabis indica
ttggccttttatgggagatgcgggggatgtagtgtaagtcgaattgacttaactccattgcccatttgaggagccttccggacgcgtttggcttttgtaggacttgtcggggcgggtgattggtcagtaccttgatcgggtgtgcttgaaaatacggccttaactttcttgaggccattaggaggtagaagcctagtttttcgatgatggggtaccgcgtctccgctcctatcatgcacttgctgacgtagtacacgggatgctgagttttctcttcttcccggactagggcagtgctgaccgcgttctcggacacggccagatataggaataggtcctctccgagaacgggttttgataggatcggaggcttggccatatgttctttcagctttctgaatgcctcctcgcactcgtccgaccattcaattttttagcatttcttcaatatgttgaagaaggggatgcacttgtctgtagaccgggagataaaatggctcagggcagcaacctttccggttaggctctccacgtctttatgcttcttggggacgacatgctcaggagagcttggattttttct

SEQ ID NO: 355962 - DNA, 657 bp, Cannabis indica
aattaacaaatattaatattaaattttgttattatatttttaaatatgttaatattttaaattaacaattatttttgtgataaattttaatttgagaataaaatgtaagattatttattaaactaaaataaaaaaaaaaatgttagaatgtaaaagaaaaaaaacaaaaattttaaactaagttggtgtagatttaaaatctaacaccattaatgaagtgaaagtgaaaattctacaaaaatttaataaaattatgtactattagagatgctatgatggtataaaatttaatgcaatacataatatgaagatttggcactaatttaggtggtgtttggtttatgagaatgtaattgtaatagtaataggaatagtaatggaatctaatggtaataataataagaatactactactatgtttggtttattttagagtaatttgcggcaaaacctcttaaagtggacaggtttttgcaactaaccccctaatctaaaattttggtggtaaaactacctaaaccactagtccgttagcagttagccctttccatccatttttggctgttaagtgccaggttggaatgtccacgtgtacacagtgtacacgtggcacaattttattagtccacgtaaataaatatttaaaaaaatgaaaaa

SEQ ID NO: 355963 - DNA, 754 bp, Cannabis indica
aaataatacaaccaagttgaacctaaccatatcaggattaagatctatagacctaagatcaaacattgatattgacttagaaagatctagcggtaagtttatgatatcttatctaagatcaatatcggtcccttccaatgtatactccatacatccaatactggtaaactttgctaatgtcctggaaaagacataacacttatccaaggtgtaactatacattatcgctgattatcatgctagtctaaatccagtgaactgacaaatcatggaaattaaacttttgaacatataatcatgattatattccacgctgctgacaacactataattatgaacaaatatatacatatttatatatgttctgaacataatagaatttatacattaatataataatgaaataaatcatgtgaactatgcaacatagaatgtgctttttgatctaatattaattagaaaacctgatttattgaattgggtttcatttagggcacaaaatccaatatagacctagtaaagcgttgggtgaattttctcatttgtatttgatgcaaatatgtaggaaatgtaactcgaccaactttttatgtggtggccgaccactgccactccattatggcagtggtctctaattttggggagcactgccatttccttatggcagtggtcgaccaagtagtttttttaccacttggtggcttttttttacttagttttgacatattattgatgaaaatgtattgttggcaaa

SEQ ID NO: 355964 - DNA, 554 bp, Cannabis indica
tgtattttctttaagatatcaacacttattaattgtgtatttgttgcagaaaaaagaaaacagaattcaagatctacccgccatcaagtttggttgaaattcgcgtaagaagaataatgtcctagttatggacttggatagggagattgccgcaaggatagtaagtgatatctaacacaattcaataacatgaatgtatgtcttgttattattataaagtactaacttttatcaatcatactgcataggttgaactcgaggaaaaagtaaactcgagtgaagttttagccagtggtcggaacgacatatattgactcaagcattagggacacccgagcaccctagccgggtcagagctgctgggtatgccactttcttgatttaatgttagattgtttttatttattttacttaattttttattgaatgagtattccaactgttatttgtaggttcactacaaaagccactaagatgtttggtcgaaagaaaaaggcaaaatgtagtgaatcatccacccaaaaataagaaattgacacgatacttgtactagt

SEQ ID NO: 355965 - DNA, 946 bp, Cannabis indica
atcgacgagaaaccatgcaaatgtaagtgtccatgacgaggcattaacctcgtcccgtggaggagatataataacaataaaaatacttagcgcatttgatatagaatacaaactaagtatgaacaatttggtggatcaagataacagacagcgaggcgtctatctcgctgtaagatgacatccacgcgagaaagatcatctcgacaccagaaactgtagttatcagaattaaagcaatatcaatctcgggaagttatatgacgagcaccagctcgccatcaaagttaacttggctccatacctagcgaggcattcccatgagataaggctaaccgtatatctttaatatacgttcatctcggcccaataaaagcgggatactcacagttgtgtgaattctaaataaaaaccacatttacttagcgtgatttataatcaaatcccatgatttgagggaataattagtgtaaagatcacagtcaacttttgtaattaactgcccactatgtaattataaatagtggcagacaagatcaaaaaggggagacgaaaaaactcatacgggggaagccctgagaaaaacaatcagaaatctaaataaggttgactcgttgattatgtagaattttatctgcaaaaccacgtaaaaaaccctgtgttcatatttttatttgtacaacttttattttttctgtgctaaatcaatactgtgaggtttaaatttagttaacgaaaatctgcgttaacaaaaactttgtgttctttatttttccttttactgctattactttctgtgcaaatctatcacgatataggctttaatttaggtgccctttggtaacacttttttaattagttttctgtttctaaaattgaacaagtaaaaataatttccaaaaacatgttctataaaactgtttttacattttaattttttaattgagaa

SEQ ID NO: 355966 - DNA, 508 bp, Cannabis indica
tttctgattaaaaaattagaaaacaaaagtgttaccaagcgacaccttagttaacgaaaatctacgctaacagaatcccactccaaaaaaaatgagaccgtctctgtaagcgtcacccaagcccagctatgagaccatcaaaatcgtcattgttcactaagctagaagcaaacattgcacgccaaacggctagatgtgaaccccattgatgaaccaccaccaactaactcccaaggacagtgacctgcaaagagaatagaagaactataaaatataatcagatctgtgtgattcaaataaaaagaaaataattttttgtatataaaatataatacaataatatagatacccaatagtggtcgacaatgacgttgtagtctcgtctgaaagttgaggaggataggtgctgcatggactgagaaagagaggaagaaaatattaatttcatgttatatgtgtttacatatatatatatatatatcattattaacaaaaaaaaaaaaaaaaa

SEQ ID NO: 355967 - DNA, 731 bp, Cannabis indica
gaaagaccctcagcaattaaaagaaaaagatagggagataacggatccccttgtcggagaccacgcgttgaatggaaagtgtcagtaagagagccatttatggatagacgaaattggaccgtggaaagacaacgcattataagagatgagaacgaagaaggaagaccaacatgattaagcaaacgatttaaaaaagaccattctactctgtcaaaagccttctccatatcaagtttaatagcagcccaaccaatcttccccgatcgtctagaatgaatggcatgaataatttcattcgcaaggagaatgttatcagtaatttggcgcccttggagaaaagcactttgattgatactgataatggagtgaagcacaagtcttaaccgatttgcaataactttggaaaggcacatatagaaagtattgcaaagactaatcggtcgaaagtcacgaacatgcttaggatttttctttttggggatgaggacaataatagtttgattgattggggagatgtccccctgatgattaagaatctgaagcatagccttagtgaaatttgtgcctagagtggaccaattacttttgtaaaaaagcgagttgagtccatcaggcccaggagctttgtccgcagagaggctaaataacgcatttttaacttcaacttctgtgtaaggttcagctagaaaagcaacttgatgagtggataacctattagtaatcccttggag

SEQ ID NO: 355968 - DNA, 740 bp, Cannabis indica
tgtattttgatttttatttttcatatttcaaatctaattatcagaaataaattaatttaatttttcaaaataaattttagagattagtgtaatttgaatttgaaaataggtaaaaatcatttttcaaggggcatgatttagtacatattaaagattgagaggcatgatttggtagatatcaaagtctggggagcatgatttagtacataaacaatcactgaaacagtaaaatataatgaaattagacataagtccttaaatttaacaatctcaatagttttgggagaatttttatggccaaaaaaattcagggggcatgatttggtacatgtcaaagtttgggaaaaaaatgttaattagcctattatttattttcttaaaaaatttatttattaaaaattatttttattaataatttttttttcttcaaattctactttaattatagaaaaaaatatttatactttattttgtttcgtactgcactaagatataatacttaaataatcgagcacttttggaaatgcaaattactgatctatttgtcaaaatatagctcgtattataaaaagtttgctccaataatgtattaacaattgatccaaatttttcacatagtaaaagctgatctaaatatagattataatatggcatgatgcaaaatttacatcataatagaggagagttggtggagctatgtaacgccctgatgctaaggcacgctacagtgctttttcaat

SEQ ID NO: 355969 - DNA, 894 bp, Cannabis indica
atagtggagtaataatagaattaataaatctgattctctgttgatgagattgatggcaagggttattagagctttgaaatatagttcatggtccctgagtcatctctatacaacactgtatagggaaggttttatttgatgaatgaatttcaagtgaaaattaatttttatgagaaataaattcttaagggcaaattagtaatttgaaaaattattattttgattaattatagcaattatgaaatgtataattaatagtatttaactatttaattttattagataaaactatattaattagttaaataatattattactaaataatattaaagagagaaatatgttaatttagagaaaataatatttattttaatcgttttaaaataagatattaatgagaatttataaattattatttattggtaaaataaataataaatcttatttgtggcaaaattaagaaatcaattttagacctttaaatatggcccacttctaaacatgtaggatgacatataaaggaccatgattaatttagtttaattattttattaagttaaaattatttaaattaaattaagttaactatcttttaattattaattaaataaataattcgatagttatttaattaaaaagataattattaaaataaaatatctattaatattttgatatttagttaatagatatttatatttgaatttaaattctgaattcaaagtaaattgaatatttatcttttattttaaataaaggattaaagactttatttataggatatataatatcataattaataaaccaagaattcagagcaattaacaggtacaaaaaatgcataacaaaatagagagaaaataggattgatttttctcttcctctctctctct

SEQ ID NO: 355970 - DNA, 1285 bp, Cannabis indica
ctctaagcgccgaagcccccatagttgtgattgggcgtcttctcgtctcgaggcagctggtggaaggtcccggaggctgatggtttgatgcctgccaccaccacaatctttttgagctggtgagcacaagttagtgtggagtggagctcatccgcctcccatccattagcatgggacttgtagttctcctgggctacgggaccctgcatgacctcgtccagggtggccagttgaacctctcccttcttggaagacttagaaccagatgcggaagcagacattttgattctgaaaaaattgagaaaatctagcagttaggcccctaaccaaaccctagtgttcaaaaaagggaatgggggtcccctaatcgctggaaagaggccccttctggacacttgccaaataagaaaaccccaaaatattttccttggcaagaattgggtgcaaaaatcccaaaggcagtgacattgcaaaagaaaaaagagagaaaggaaaaaaaaggcaagatctactctaagctctaaaggcattattacgtaaggtgaggatgattcctcaacagaaacgtagtaaaaaggagcaatctaaatgcaaaaaaggaggaatttaacgcatcgtacagaaactcaggaaaactcattcctaaaagttcgacatccaacccagaaatcataaagcatgctatataaacgaacagtaagcaagtatacagtatacgaagaacttacatgaagtttgaaggctgggggttggtgttgatcgccggtagaaggaagactggcaatggcgaaggaatagaagcaagtaatctatggtgtttgaaatttcttttctctctgagaaaactctaagaaaatttggtaaaatgctgaaagtaaccaaatgaagtaagaaggctggcttttataggccagaacaggtgtgagacagctgtgatcgaccatcatcgtacggtcgggatggcaaacgattcgcattctacagatccaacggttgggataagcgctcattaaggcggtagaaaatgtttgagtattcgactgacacccatttaatgcgtcgtaccaataaatggacagaaaatgaatcgatttctgcaaaaagcaaataactgcagtaatgatggtcataaatacatcccccacgcgccccaaggcacgtaccaagctgataaggcaaccggaggaatctaagcaagccttgtttacctttttaccaaacaaggcttggggggtaaatgttgcccctgattttgtccaaatacgtggaccaactggattgagac

SEQ ID NO: 355971 - DNA, 541 bp, Cannabis indica
aaatcacgtaatacgcctaagttagttagggtgttacagattcagaaatacactcatgagagaatagcgatctaagagagaaaatactcaaagatcaattgtaagagctttcaagaggaagaacacttaattcattctcttaggtcaatacaaatacaaggagagtaggctattaccattctcatgggaccggacttctttaaaatctggtgtttactttactttgctatttttactttctgttatttatcttatttaatcactttatttttgactcactgccgttggctagaaacgatgtcaataataatatttaaaattaaaaaaaaaaacttatctcctacaaatgattcaagatgtggtatattgatatttccatatctatacattgtcacaaaacaaaacaaaacaaaacaaaacttatatggtaacttaagataatacaacaaaaacttatatgattcaagaaattttttatgcatttgccaaacgcaaccttagcatttaagtgagacttttatcccggttttatgtaaaaacc

SEQ ID NO: 355972 - DNA, 673 bp, Cannabis indica
tcttggataagctctgttcggcgtcgtaatttccacagaatccgtggtgaacttcagataggagtcatgcagtttcatcttgtgtgacacatttgagtaatggcatcgagaatcctcttttgtacatggccccttctactatgatgtaccatgctgcctttcttctcattttccgagcttcatttcagttatctgggagttctccagacttgaggtaggctactattggcgtcatcctgtttggggatgtgtcaatcatttcgatttcttccatgccagtgatgctaggctcttcaaggaactggatagggaccaagtttgccttgtcacttacattgctgcttgccaatcgagctaacgtatctacagttgtattttcttctcttggaatttgtctgagaccgtagcttttgaattgtgcgagcaggtcatgtattttgctcagatattctatcatcttttctccccgagcctcgtattcgccggatacatgatttaccacctgctattaatcactgcagatttcaatgtgttcggccttcatttcctgggctagcttaagtccagtgattatagcctcgtactcagcttgattgttagatgccttgaatccaaacttgactgcagcgtgtaagtgttgccccccaggcgtgacgagggtaatttctgcacc

SEQ ID NO: 355973 - DNA, 612 bp, Cannabis indica
taaataattataaaatatcaacaattaatgcaaattatctttactaatccatattctaacatgcggtcattacaataattctgtccaataacagagaacatgtttgaattgtttgaagcattctcaacttcacgatctccacgagtttgagctcctctgccacgagccatattaggttgatggatatatatatactaggttgatgttacgtgcaatgcacgtataattaatttttttaattaggtgatttaagtgcaatacatgtatgtttatttatttttaattaggtaatgtattttttaaaattttaaataaggtttgagattttgatctttaaaaaaaaaattaagctattgttacattggtgtgtcatttggatatgattatatataaacgtattttttaaatttttaaattttcttaattaggtaacgtatctgataatgcatatattgtaatttactatacttttaaccaaaactcacataaccaaatttgagtgtgtttatatataggttggattcgtaaatttgatataaaggtcttttatttccaagctttacgaaaatatgatgtgtgaatcgatttaccacaactaaaatagaaaacaat

SEQ ID NO: 355974 - DNA, 737 bp, Cannabis indica
aggtataatgagtgtaattttttaagcaaatagaagagtatttatgttcctttggactctttgtaatatatattaaattggctaaattagctaaacattgtaattttattaagataataaaaaaagaatttatttttattattttggttgttttcttattttatttttgtgtgactacaaataattatataagctaatatatatattataaattatatttataaccgatattgcataaaagaaaaaagtatttgcagaaagttacgtgtcatttaagaactgacggcacaagttttttgtgtcagttttgaaatggcataactttgtttgcgtcacatccaaacagacgcaaaatgttataaagagacttttatattttgcgtcggtttcaaaatgatacatatagttttctctgtcattttataactgactcaaataatacactatttgcgtctatggcttatacgtcggttttagagaccgacgcaaaatctttatatgtcacttagtaaccgacgaaaaatctttatatctcaccctacacatctccaaaaatcgtgaaatttcacggagacgaagcgaagaccgttatccatcacttttatatcggacacgttaagagaaaatgtagttttcatgcactaactatcattttaatcgaaatagtgaaaatatcacatttctgatagtggtacccctttgtgaaatgtggcccgaacccatctcggaatattttt

SEQ ID NO: 355975 - DNA, 660 bp, Cannabis indica
gaaattttagagaactcttctacgaactaacgataataacatgccagatccaaaaagtttctaacttctataactaatttcggtctcgagcaatcccttatggattctattttccccagatcaactttaattccgtctttactgagaatgtgtccaagaaaggacacatgagatgtccaaaactcaaacttcttaaatttggcgtacaacttattttcttgaagccgctgtagaaccatttggagatgttgctcatgctccttactgattgagagtacacaaggatgttgtcggtaaatacaataacataaatatcgaggaaatccttaaatacccttttcataaggtccataaaagctgagggagcattagttagtccaaaagacataatgcccatacctagtgcgaaaagccgtctttggaatgtcccctgctcggattctcaactgatgataacccgatcagagatcaatctttaaaaagactgtcttcccctgaagttgatcaaaaagatcatcgatccttggtaaagaatacatgttcttaactgtcactttattcaattcccgatagtcaaggcacatatgtaaatacccatctttcttcttaacaaatagtacaggagctccccagggtgacacactaggccgtgaaaaccct

SEQ ID NO: 355976 - DNA, 778 bp, Cannabis indica
agccagtcttcagtattctctcatttcttgcttcctctttgcgcacaaacactttcactcttttgttgaattcattaatatttttttactggatgaccttgtaagtcatcctacaacttgcctccagctgttgataggtcggtcgtgatccctacttcaagagcagtaagttgaatactatcattgaagtttctaactttagcagcggttgtactaaagtgactcaagtaagccttaactgactcgcctagttgttgctttatgttagttagggatgatgcctcaggtcgcctatctctagttgccttaaattatttcttaaaatccttggacaactattcccaagaagttatcgaatggtgggtgaatttatctgtaaagaccgcttagtttaatttggaaattagcagttaattaagacttaattatgaaattattcatagatatttaaataattatttatgttgttagatttgaattctgaatgcatttttatgtcatatagtgaaatttcataattttgcattttcggtgcccgacaacatggaacgcagtgtatggctcagtagaatcacaatttagtattttagtatgttggggcagtttcttttagacattgggaatgtgaggattaatcgagaatttataatttcccaaaatacccttagtacctcttttgtgctattttagtgtggaggggcaaaatggttattttgccccaattatgttttgttctttagtgagcttattaattagtaattatgtgatttatttgatg

SEQ ID NO: 355977 - DNA, 880 bp, Cannabis indica
ttttaaaaaaattatacatataactaatattttaatattaaaaaataataatttaaaaatcaaatacatattatataaatacattttaaaacttaataatagatcaaatatatattccattctaatatatgattgaggtattttcttttttatttttacacttcaaaacaatttttttttttttttgcatttttacggaattctatatagaaatccctattgcaactaatggagcaacctaaatcacaaccaaaaatcgtatagcaactcacataaaaactaccagagaatccactttagaaacccaaaactgtaaattttttaaaaaaaagttaaaaaaaaaatagtatatggagtaatttccttatatgatttattattttgtaaatacaatttaaataaaattaaacatttctttctacatacacttttttcctttaaaaatttgttagttttttttttattattattttaattcgttgttggagacataaacaacaagaatttgttttgttttattgttaattatgtgattttaataataaattaaaataatttaatattgaaaagtgactaatcttgaattaaatttaagctattgtgcgaatgaaatattagatcgaaaatataaaatccagactaattacgaataaaatgcactataaataaaattgtgctaattaaattatatggtaacccaagatgtgttaaactaattggcatttaatattatatagttttaatatattatatatatatatatatatataaactagcaaaaagctacgtgcaagacacgtatactaaattttatgttaattttttctatgttatttgaaagttatacaattaaaaattaaagaaaaaatattattagtta

SEQ ID NO: 355978 - DNA, 542 bp, Cannabis indica
ttattatgttggattattaagttttaaattatacttttttatatatttttttcttttaaatggtagataaaatggattggatggatccaatctaatctaataggaaatcactcaatgcatccaatggttggaactgatccaaattcaatacatctattagatctcggatcgcatcagatgactcaattcgattggatcggatcggatgacaaaatttagtatccaataaataaatggaatggattagttgggtccaaatccatcaaatgtgatccaatgaacatccttaattaaaagtctcaacttttctacaaaattgtcaaatagaaatcatcttgcctttcaagaaaaaaagaaagcaatcatctttgtattattatcatttgcatttaattaattttggaaaatcaatgtacatgtctaattataattaatattattgttatgagtgatttattattattattttcaattgtagattggaacacaatattaaaaataaagttaattaggattttttttctttgaattttgacatatac

SEQ ID NO: 355979 - DNA, 540 bp, Cannabis indica
ctaggtccaatttcagttatgattccaagtccaagtcctagtcctagttctagtcccggtcaacttccagttttggttccaatttttggtcacagggtaccggttcgggtcaacttttgggtttgggactgggttcaggtccgggtgtgggttcgggtccttgtcaatggtcgggtccagggctgtgtccaaaatctagacatcgactacgtgttttgtccaagccttgggttcggatctggatcccgatctcgaggcctagtctcattccatttcaggtgccgggtcacgagttgggttctaggttcaagttcgggtcatggtcgggtactacgtcccggtcctatttttttcccaggtccttatcctaattctgggtccagttctcagttattgggtatgtttgggtcccggtctaggttggggtcgagtcctagtctctgctcgggtttaggtctttgtttgggttttgatcttggtacgggtttgggtttaggtcctggtcctgttcttagtcctagttcggttctagttccattt

SEQ ID NO: 355980 - DNA, 956 bp, Cannabis indica
taataaataacatcaaataattcaaaccagttataattaaaatagaaccggatctataacagtgttataatgaataaaaacaaataacacgaaataactcaaaccggttacaactaaaatagaaccagttatataacataatgaatacaaacaagtaacacgtaataactcaaaccgattacaattaagaacaaataataaatcaattcctaaaatactgaaacataaattaaaaacaaaattagttgcacaacaaaatacatcataaaacataatacctcatcaaatcggttataattaaaatataatcggttctgtaacataataaataaaaataaataacataaaataactcaaaccagttataattaaaatataaccgtttctataacaatgttataatgaataaaaaccaataacacgaaataactcaaaaccgaatataactaaaatagaaccggttctataacataatcaataaaaataagtaacatgcaataattcaaatcggttataattaataatagaactggttctataacataactaaactgctttttagaatagagaattgaatgaggaagtctatatgtctcaacctaaaggctacaaagagaatggaaaagaaaatttggtttgcaaattgaaatgatccgtttatggtctcaaacaacatctcaccagtggtacttgaagtttgataaggctgtgacactgttaggtttcatcgagaacaagtttgactagtgtatttatatgaagatcagtgggattcttcatattgttctttatgtggacgacattttacttatcagaaatgatttgtcattactaaatgagactaaaaattttatggctacaatttttgacatgaaggatcttggagaggcatcttttgttttggagaatgagattcatcgtgataagaatcaaaaaatttcttgacttatctcaag

SEQ ID NO: 355981 - DNA, 771 bp, Cannabis indica
tgttaggaagcatgttagtagcctgatagtagaatatgcacatgttttcgatttccaaataagcggcattagtaagtttttctttcatcacggtctgaccaaactagctcttggttacgcaagttgttcaaattagtatgaacgtcaggcgaaacaccaggagccagggcaattcggttggatcaagtggtggtcagggagctcagatttcccttaatatttgtggtcgaggtagaggtcccagaggtagggcacgtggttggggtgatgctaacccgccacaagctgcccaagaatgggaaaacagatttgtagaaatgcaagccaaaattaatgaaaaagatgaagagatttggcggttgagatagcagggtgctcctgcagtccctgctccagaaataccggtagctcctgcccctgctgtgaaagccgaacctattgttgcagtgaaccgaatgaaacccctgtatgaaaggtttcgtaagcaggcacatccagttttcctgggaggtcccgatgtcataaagtcgagcaatggctaactgtaatcaccagaatattaaattttatgggcgtcacttgtaatgatagggtggcctgtgccactttccaattccaagaagacgctctggtttggtgggacatggtatccttgattcatgatgttaccacaatgacctgggagaaattccaggagttgttcaatgccaaatattataatgaggcggtcagaagtgctaaaagaaaagaattcacccaactgactcagaa

SEQ ID NO: 355982 - DNA, 560 bp, Cannabis indica
tccacaaacgccactttccttgaagatgactatattaagaatttcaagccgcaaagcaaagtagtattgaaggaaatgctttcagatataactcctaatgttccgtcctcttctactcaagtagaggataatcccactccctcggttgaacctttgcaagttgatacaactgagaaatctaccactaatgttcctgtttagaagatcacggttcctcgtcgtagtgggagggtttctataaaaccatctcgttatggattggatggtgaaatcattatggtcgttggtgacgatattgaggacgatccattaacctataaacaggtaatggcaagtccgaaacagtaacaatggtcagccggcatggattcagaaatgaattccatataaaagaaaaaagtctgggaatatgtagacgcacatgatgattattgtccaattggatgtaagggggtcaacatgaagaaaagagctgctggaggtgaagtcgaaactttcaaagctagactggtcattaagggttataccgaaagagaaggtgtggactatgaggaaacttt

SEQ ID NO: 355983 - DNA, 868 bp, Cannabis indica
taaaatgagtgactaaccgtgagccagagagacccgcagggtcaatgaaagcagaggtgtggaatacaccacgacaatccttgaaagcttctgatagtaagctctcttcatctgttaggttcgccattatggctgatatgttattactattgttattcccactgttgtagtttgactccatttcttctattttagccagatcttctgtacattttcaaatcatatcatgtaaacaattacattaattgacaaactatataatcatcatacgcatatacaataataaatttataaatattgaagagctaacgccaccaaaacagttaacaatagcatattgctaagaatcaaaaacagaacaccaaaatagtattatttgttatatgaaaaataaaatcaattttcatagttgttgtgggtgaagaagaaaaaaagaaacgaaagaaagaggaattgattggttgtttatttggatttacctggattatcgacgatgattcgaacggagtagccacgaatcaaaaggcggttgacgatggcgatacctagaaaggaaagaccactggtaacacagaccagtccacctcgttcaccttcatcggtttcgtcaacagcggcgttgaatcgatgatcgtgctggtttttccggcgatgggcgccggcagatgccattaacatgcggcggaactcgtggagctcggcctttgtcctgtcttctgatctaaggatgcccattgttgtgaggtgttagcagaagagtggagtgaagaggaatttggtttgtggatggagataagatgagtccgaagcttaatgctaaaccccttaatatatatgttaatgttaatgaagagagagagagagagag

SEQ ID NO: 355984 - DNA, 602 bp, Cannabis indica
tgccatgatagttatgctcgtcggggctttccaacagtgaggggtagccagatttgtcctagaggtgcagctccttgaccggagaaaccatagacaggctggaggcatggagttaggtccttgagttagagccccatcttctcgtaagcagtcttgaacaaaatgtttgaagaagctccgttattgatcatggttctatccaccaacttgtttgctatctggacttccacgaccagcgggtcgttgtatggaaatctgatcttgacatgatcttcatcgttaaaagttatggttggctctcctgctcgtggaactttgggcttcctttcttccacggccaggatgactttttcttgctcgtactgagctgttcgggcatacctctcccgagctttgcccgaatctccaacgatgtgcgggcctacaataatgacttgcaggtgtccatctatcagtggaggtagcagatcctggttgttttgaccttggttagcattgacatactctgcaggtgcgggttgttttcttgatcagatattctatttcccgcttcaggttgtaacattcgttggtgtcgtggtcgtagtctccgtagaaccgac

SEQ ID NO: 355985 - DNA, 712 bp, Cannabis indica
tccataaccattcctataacaatattcagcataaagaaattaaaaaggaatagagaaagaaactgttggtggaatgactctggatcttcgctttgatttcctctgctcttcttgccgctttctgctgtgttttagggttccaaatcgcatcccctaattttcaatcgcagttttctatgtataactaatttttagggttcgtcggacgaatttgcccctggccgtacgggctcttgccgcggccacaatgttccttggcccgaccagatgagcttctgaaaaccgtgcttctattctgactttatggccgcggcgagggtgtatctcgctgcggcggctggggcatcaaaatttgtgtcctccgtcttcgagttatggtcgcggccacagtgatctagccgcggccaaaagtgcattaaacctaaaattggcgtttttcttggctccgctcatcttttattgcactcttgcaacccgaagcctctattactccgaagaacctgaaaacatagaaaacacgcataattccgtcctaaaacaatgaaaagcgaatacagatgcaaagtggagagatcaattacaatattagaggcattcttcagagggttttcagcattcttctcttctctattttcatctcttttctaaaagttaatatgtgtgattgtgctctcataaacatgagtacctaaacatttaattagggttagat

SEQ ID NO: 355986 - DNA, 1036 bp, Cannabis indica
tatgtcttatttatgaattttcactaagctagggcttgattgtgaagaaaagaggtttaaaggtttatttgttaattaagaaactttattaagtctaattaataaacatattaaatggaaattttatttgatgattaattttaattattaaataaatagttttggcatttaagttgttgaattggaaaatatggcatttgtgaaaggataggataaatagttaaaaaatagcaaaattacaagtggtgggcccacatcctacggtcggccactaatgcttgattttaccatttatttatcaattttttaatgccaaataattcaaacctaaacctagaaggattcctacaaatggatagtgatagactcaaaactgacagaaaatacacttaagcctttcagtaaaattttagtcttctatctatttctctccaaactcgaatccttctctttctctcttcaaatttttgagtcccttatagtgatagagtacatgcccacacatagcaagttggtacccaatcatagtgtttaagactgtgaagaatccaatcaactgaaggagaatcgggctcagatcttggtgatactctgctacaaaaatgatacaagggttagagatttgagcagaaggagtcatttaattctgctgcaaccaatataaggtttcttgaactttatatgtgtttaaattccattattttagaaattcacatttacgatgttaaacaatatacatggtagtaaatctagatcttggtaaaataagaccaacacaagaagcctgcttaagtccataaatacacctattcagttttcaaactttctcttcttgtcctggaatctttaaccttctagatgctccatatagatggtctcttcaagaattctatttaggaaaactatgctgacatccatttgccaaatttcataaacaaaagcggcagctatggagagaagtattctaatggatttgagcataacgaccaaactaaaactatcctcatagtccacaccttctctttgggtataaccc

SEQ ID NO: 355987 - DNA, 1460 bp, Cannabis indica
tataataatagttatcagagtaccattggtatggcaccttacgagatgttgtatggtaggaaatgtcgatcgcctatccactgggatgaggctggagagagacgttatcttggacctgaattggtccaaaggaccaatgaagccattgaaaagattcgatctcgtatgcttgcttcgcaaagtagacaaaaaagctacgctgatccaaagcgtagggatatcgaatttcaagtgggagactctgtatttcttcgaatatcacctataaaaggggtgcgtagatttggaaagaaaggaaagttgagccctagatacattggtccttttgagatactggagcggataggacaggtggcctatcgattagctttaccacccgcgttatccggggtgcataatgtcttccatatctctatgttgagaaagtacgtgtcagatccgacacatgttttgagttacgatgatattgagctccagacagacttatcttataatgaacaacctatccagattttagacagaaaggagaaagtacttcgaaataaaacgatccctctggttaaagtcctatggaggaatagtaaagttgaggaagcgacttgggaattagagtcacagatacgggagttgtatcccgagttattcaggtaaatttcgaggacgaaattcttataaggaggggatggttgtaatatcccaataagcttaataattaataattagggtttatatttatattatgagttaaccaggtaatgagtgggatgataatccaactaatttagttcaacataaaattttaaatttgctataagtggataaataagcgtgatttttaaattacggagatttatatagtatgtgtgaatgtaatatgaactatatgtggaataaaaatattttcaggtttgacaaccttggagactcgatcgggggctagaaatgtcataacaggcttaattgatagaattaatgagaatattttgataagttgataatataggtattggggtaattaggagtatgtagaatttaatgtagcgccctagaagtaaaagtttcttagtaactaagaaataataaaataattattaataataaaatttttattaatattattttattattatattattattattatattattataataatattaacgtaaaaaaaattaaaatagaatatatatatatatattaagttatatatataacttatcagagaacgaacagagaacgaaccctcgttcctccccttcaaccaaattttctctctttatatccattttctttgattttcaatccaaaacttagcgatctaagctccggtagtagcaggatagcgaattctcagagcgaagaagcttaaggtaaggtttaatttcgttttaagttaaaataataattgttttcgtataggagttttgtgaattagaatagttatgaaggttctcacct

SEQ ID NO: 355988 - DNA, 756 bp, Cannabis indica
aagaaagacttttgccctcgttctaatggttcctccactagtggagtgaaaaaagttgtcgagcttctgttagataatggcagctggaatatccataagttataaacagtctttttgataaggagactgtttcttcaatcctgaaaggggacattccgtatggctagggcaatgatagatggatttggactttgaaaaataatggtcggttcatgagcaaatcgatggactcagtaagaaaaacataaaacataaaaacataaaaatatattactaacttgaaaataggcgcacatacacctaccaacaaggcttcaaatgaattaagattgttgttaacataagtaacactacaagaaaaggcatttttaccggcgcagttcgtcaaatgcgccggtaaaggttgtcgagataaaacaaaatctgaaatctcacttccatttaggctttacttttaccggcgcattattgcgccggtaaaagtctggttttaccggcgcaatactgaatatgcgccggtaaaagttaccaaatgaagcgccaacaggcgcgagaagtttgccgcctttcatttcatttattgtggcgcttgtttacttttaccggcgcataattgcgccggtaaaagcctcaaaaaaaaaagaagggaaaacttcccgcgtggatttccttggcaggtgggaatacttttaccggcgcaccattgcgccggtaaaagtgttaaaggaaaacgtgtggattttgatgtgataagtg

SEQ ID NO: 355989 - DNA, 563 bp, Cannabis indica
tgccactgcggagaaacttttttgattccatgtgtctcacagaaatctgtgaacatctggctatcaaactgttttccattgtccgaaataatcttgtgcggaagtccaaaccgacatattatgttttttaccacaaagtccaacacttttttagatgtgattattactaaaggcccgacctctatccattttctgaaataatccactgcgactacaacatattgtacttcacccttgcccttggtcaattgtctgatcagatctattccccatatggaaaaaggccaaggactttgcatctgtattagctcattaggtggtgcacgggggatctttgaaaatctctagcatttgtcatatttcttcacgtaggcctttgaatcttccattatgaccggcccgaaatatccttgcattaatattttctttaatagactttgtcccactacgtggtcaccacaaaatccatcatgtacttcggacaggagtcgtacagcctcttcttttgtcacacatctaagtaatggcataaaaaaaacctcttctatacatcacaccttcaa

SEQ ID NO: 355990 - DNA, 784 bp, Cannabis indica
atccagtgcactgatgaatcaacggactattatcttttgaagtatataatcacaattaccttccactgtgttgacatcagtgtaattgtgaataactatatgttttggacttaacagattttgtacacattaaaccataaacatgaaaactacatgtaaacataaatgacttctaatcttctatttgtgacaaatcagattatattgaaatgggttttatttagggcataaaatcccaacagatttgaccttcgatacctactaaataaagtttatttgatttggtataatcatggcaaagctgaattcaaccattagaaaaatagaaagtcaagcttcctaaaaatagccaactttccataaagagaatttcttttcttgtaagacaagattcttaaacattaaagccaactgagaatacaactttccttaaatgaaaagagaaattaaagatgatggagcggagcaatggagattaccaccgtcaaatagtgtcaagatcaatgtagatggagctatttttgcagatacaaatgagttcggccttggctttgttgttcgagacgacaaggggttctttattgaagggaaacaaggcttttccatgggaaagtagctgcggaagtggctgaagctttgagcttaagagaagggctcagttggataaaaaaaattctaattggccacatgttattgtggaaactgactgtttcttgtggtacaatcattaaggaggtcctttagaatgatttctgtgtttggtgatttgattaatgattgtaag

SEQ ID NO: 355991 - DNA, 684 bp, Cannabis indica
ggggccgtcaaattcttgttagtaagacagtggtcgagagttgatgactgagatggttcaaattgggacagacatggaatgcttcagttgctacatgggtgtgtcaaaagggacgcacataaagaccaagaggccaaatgccgcaatcatcaaaggatggttgtacttggaggtgttcgcatgtgagttttatttgatccagatggaagcaccgagacagttgagtgggatgtgttggcttgtaaaagcaccagtgggcgtaagtcacacaaagacatcgataaagatgcagagttgtggaatgaaagcatcgaagaagctagcagagctaagaagaccgagcgcaagcattgagatggtgctagagtttgagtggaggccagggggatgtgctagtgagacttagtagtcatttgagcctgcaaaggtcaagaggagtgctagagtttgcatgatggccagagggctgcatcattggaacttagtacatcgtgggagtcgaaagggcatgatgcaagtgtgaatcagttggatggttgagtggatagtgcatgcatagggaaatcaatagggttgctatatgagatagttgactcgagagtcacatcctgtgggatgcacttttagatggcatggtgtgcatgaagagttgggcagtcaggcatttacgtgtgggcatgttgt

SEQ ID NO: 355992 - DNA, 572 bp, Cannabis indica
aaaagttaatatatattatatatgttacagtaaacagaaatgcgacgacgaacaaaatctttgttctctctgcttcgataaaactttctctttttatatttattttcttcgattttcaacccaaaacctagtgatctaagctccgatagtagcagaatagcaaatctttgaaaagggaatgcttaaggtatgatttaatttcgttttaagtttaacaacaattggtttcgtatagagattttgtgaattagaatagttatgaaggttctgaccttataggattattctcgggtagtcatgagactagttatgacaattacttgttgaatttgaggtgattttgagttagaaatcgagttttaaactttttaaaacttagtccgaacgttaatagcgtttttcatttaagggctcgatttttatttctgtgacataaggatggtaatatttatggtatacatgcaccttgtaaagtttggagtgatttggctaagttttggtagtatttcggtgagtgcgaaaattggaattttcgagtcttgtattttttagaaattcctaagagatcagaa

SEQ ID NO: 355993 - DNA, 496 bp, Cannabis indica
ttgaatctgaggatgatgggggttccactgtgtctgaagccaacagtaatcaaagacaaaatgcatatgaagagatgtttgctcagtgggaatatatgaccaagcagattagaggtctgaatagtgccaaggagcagatagagtctgaaaaagtcaagctggaggacactgttaagaatctcaacaaacttcttgatgagaaggacaatgagatctacaagctttcagctgaactcataagagctaaacaggctttagagtttatccctccaggaacggctgccatcaatcaaactcttcaacttcaaaaaccttatggtgatcgaacctctattggatacaagatgttgtataagcaaggagataacttgggggtagaagagtccactacaccagtgatcaacctggacaaaaaggctgacaagcaatcatcacttccctcgacacctgaatcctcagaccccactggaaaattccatgttccatctagacctac

SEQ ID NO: 355994 - DNA, 667 bp, Cannabis indica
atttcaaagcattaagtcagagtatttattagccgaaaaccaaagcgacgcccagtcagcctcacatcgagttacgaacagatgcgcctgacacgcgtcacccattcaaacgatggtgaggggcaaatgttatccagatttctgcactctgacgtggcatcacacgatggtgacacgtggagtcgactccaggtatctgttcgcaagatacaagccaaacaggatacctcatatgcttcctcaagatgaagcagtaagcaaaccgtgcagaacgacaaacacttagtgaatccacctttcgcatcgtgagtcatcaaggaaatccccataacattgggatcagattacagagatatggcaagctgtcaaaatccgacgatcagtgtattctatatttactatgcaatctttctgcttatatcaattacaacgagaaaggaaatacttcctctcaaagctcatagccctataaatagtgatgcttattcactgggcaaagggtcgaaaatattttggttgagagattttgtctaagaattcatatttagagatactgttgtaagagctataagaaaaggaacatttccccttgttcttaagtcaatacaaataacgaggattaggctattacagaactgctcggagctgaacctctataaaattcctg

SEQ ID NO: 355995 - DNA, 1140 bp, Cannabis indica
gggagtcagctggaatggggcaacctcaatgtgatttatatagtctttgaagtagccccaaagagggaggatgacccctgcacaaatatgctcaaggctccaaacgcccatactagttgaaccactagtgctagtctcaccagtggttcctaggttactactggcaaagcatgcagggtgtagcaactgaattcaccttctcgtactaacctaacctggcatgattgcccaagtgcaactccacaggtctttagcatgtcgcccgtatagcctgagatagatcacaccttcgattctattaactcagcctcgaaggtgacgctgagatcctgaggagttttagacatacgtggcttgggaggcataatctctccgtcactggttcaaaagtaattgtgacgttgggtaaatacaaaggcttccgcgcatgaataaaggacacgctgggtggctctggccaggctgcttctcacaagaatcgacgtctgcctttagatatttcttgtaagaagtgcctgtagcgactagaaatatcttcctgttgggttctcactgtgtgttccctagccctagcatcatttagttctaatttggaggtgggttttgagggattggatttatatgggatggccaattctgtaggaaaatcaaactctaaaacttctagacgataaattcctaaaccagagtgggacattgctaccagcaaaaagtagtcccaatccctggagagaattttatgaaatcagaaggtaatgagttggagatcttaaaacaacctacatattgcctgaatcctagtatgaacagttttaaccctaaaaaactaccaaaactagatgagatgataacgatacaaacgaatcaagtaactgatctacactatgtaataaacatgagaaagaagaaagtaacttaccatttgaagttagggcttgggacaatgcctgggaattctgtttgcaaaccttcgaacgaagcaaggatcgctttgaaaaaatgaagtcggaggaaactcgcaggaaaaaggtcaaagacaaggatggcatgcaagtcttcgaacgggtttaatggtgatccttaacgaagaagtttaagggttttctcaaactttctgaaatggtggaaaggtggttcctt

SEQ ID NO: 355996 - DNA, 525 bp, Cannabis indica
taaatattatagatgggtttttacatccttctagaataattcttccacccctagagtaaccaccatctcaaatatcaagttctaagttggtgtagatataaggattctaaatacaccctcatcatctaacatataagtcacttttagagattttttcttgattgtctccctatgttccttatttgattacatctttgatggctcccactcaatagtaggagtctggtttaatgcataaacaagtgtgcatttaacctcttactattggtaattagggacatcttgttgtgatattttatcttagtctagaaacaataagttccttttagactaggtctcactatagcattctagtattatcattaatgtaaaatacttgcttaagattatgtaatcactagagataccataaaatatttcataaggaccggtaattgtgcctaagtctttcgaataaatattgtaaaatttcctatcttatcctcataattctgataagttattactatccatatgaatggttag

SEQ ID NO: 355997 - DNA, 1308 bp, Cannabis indica
agagtcacgtcagtcaaaaggcaataaggacattccacataaaagccctacaacacctagggatttgaccatgcattacccatggtatattcattgggaatacccaactttatggatagttacagaaatacatgtactttaatcctgggaatcaccccaccaaaaatactataaataccccctcaaagctcattaaatggggtagagatttttgggttgcataagtgcaagaaagagtaaatactcaccaagaacattctctgtatttaatacactcttaaatacacagactcgtggactaaggctcattaacgccccaaccacgtaaaaatccttctcttaatttcttacagctctttaatcttttaatattttattggttgccgaaaacctcggtcaacaattatattacagaatcggttatattttaattattatcggtttgagttattaattttcattcatagaaccgtttatacttttagttatatctaagatatttacttctggtaacttttctagtgactttaccggcaacggtgacttttccggggatagtgattttttcggtaaaacttattgttgttttacaaatatgaaattttcacttttttttttacaaaaatatggcataaaaaaatccatataaatgtaaaaaaaaaaaaaaaaaaaaatccataaccctatagtgttatttatttatgccataaaaaaataaactataccctcaattcccatatttatgaaaattccccattcttcttggaatattttgagggaaaattatagtaaatgaactcaaatcatgactatgttagtaaatgtgttcattttaaaatttgtaacaaaatattctcttttttttttttagattatttattatttatattattttttgtcacataaaaatcaatttttttaaattagaaacaaattacttaaagattatagtatatttatattaattttgtcaaaatcttttttatttgaaagttatgtccattttttttaaattttttattgagttgttgtgggttgttagtatatagattttattatatagtatatttatattttgttgtatagtatattatttttagatgatatttattttttattttgctatgaatatagtggtatatagttttattagcacaatcaaatatttcaaaatatgtatataattttattgtacatgctacatatattttaattattattttttatattattttaatggtatgatatatatttattttaaataatatttaattagttttcatttttcttatatacaatggtgctata

SEQ ID NO: 355998 - DNA, 695 bp, Cannabis indica
gaagggatttcaggttgaagaagtgtcgaagaagaactcagttgctgcacaagggattgtgcactagcaatcaagattcttgattgctgttggtaattcattactaattgctgtaaagtttgtattaaattcctttagagagaattggaaattgtaatacgaaactcttgagaattagtagatgagattaccctggttcggggaacccaagcactagtcggctgagatgtgttctcagtgcagatgaagcttgtaaatctttgtgtgttttactgctttattctcaattcaagtctgaaattcatatgttgaaatcaatctacttaaagataatcaactaggtaatctgaatcattaaaatcaacaagttgtactttcaattggtatcagagcttaaaattttctaaaaatttttgttagatcctatacttgtctgattcttgatcattgattcttgattcgtatttgaggattgattctatcgtcactaaccacctcatagttctctctcggagaactacagaacaattgtgtgtctgttctctactcctttgtgcaggatggaaatgtttagagaaggaggatcaacctcgagacctccgatgttggaaggagccaactatccatactggaagaccaagatgcgtgatttcttgagagctgtagatgaaagagtatggatgtccatagaggaa

SEQ ID NO: 355999 - DNA, 609 bp, Cannabis indica
taagctggaaaggagagacgtcacaacaagaaagaatgtccttcacgaaaggatggaagggcagtgtcaccccggattgaagaatatgaattaaagccaccatgttctgtgttgggatgatcgcagattcgtgaagggaagatgaggtcgttatgttggcaaaggcttggaagtagccatgtgaaccaaatttaacctcacatatgttgacaaatcagatttcttgacccgggagactagatccttgtaggagaaaggttcaattaggtgagcgttgtcaacagaatctatcttgctaccttcaacttcctccttttcctttatttcacggtcaggtaactcgaagtcctcaccatttcttcgacttcggtgtctggggcatgtcgcaaatggatgagataaccttgggctaatattgtagacttgctatcacacacttttaatgtcactggttccgctaattcctgaaccattgtctatcttgtttgtagataacaagccctcgcgagctctagctacaggagcttcatcctcggacatcgaggttgggatgaagttgttgttcctttctgattcatccgtgaaggccccctctccagagtcatacct

SEQ ID NO: 356000 - DNA, 629 bp, Cannabis indica
taatgatcttaagttctctattaaataatattgttagtttacttttaattttttttccgggtaaatattattttagattttgggttttgcaaaagttactaattggatcttctattttgttaaataacaaaatagaccttgtattttttaaaattacacaaataggatcctgaattgatttttgttaaaataaaacttaataataatcttatctaaatgttatgacaaaactaattacatttttgtatttattcatgttaaaaattgtcttcaagttagtcatattaaaaaataaattgttgaaaattgagttcagagttccatttttaccattttggaaaatatagaatgcattttgtcatttaacaaaacaaaagatctaataaataacttttacaaaacacataatccaaaataatatttaatctttttttaaaccatccttaattcatatttatcgtcaatataggtacttaaaaattaactcatgcactaaaggtaggagataaatcaatttggataaatgatttttttatcattccttattgatatactcaatcctgattctttttaataaattattcattgtttgaaaaaataacatatatataaaaaatttaaaaaaaaaa

SEQ ID NO: 356001 - DNA, 518 bp, Cannabis indica
atagcttttatgaatgtaagttattacggtaacaagactgttctgaccaataaacgaataaagatgtttatttccattctaattgtgtcaattgtataagcaagttataaatttaccattaaatgtgtacaaaggtctgcttaaccaaatagccgatagacaaaaaccatacttgtgaagtgcaagtgatcaagagttataagtttgctcggtcgcttggggggcaactatacccgtacaaagcattggtaaaagtaaatagcaagctcaaaaaaataaacataatagtttgtacgaatattatcaaaacaagagaaaaaaatcattaaaaaaaagacaaagcatggtaaacccaggattaaaggctacccgatcagccaattgtctcaaaataaaatgaaatattacccaagtttaaaaaccgctttgccggtcattttttctctaataaaggcccatgggccaaacagatatataaaaagaaaaaaatgattattattattttagacagcaggggt

SEQ ID NO: 356002 - DNA, 646 bp, Cannabis indica
tcaaaataaaatgaaataccaagtttaaaaaccgcttggccggtcattttgtttctaataaaggcccatgcgccaaatagatataaaaagaaaaaaatgattattattattttagacagcaggggtcccaagcttcttgtaaggatcaacttggccttaaggggccagaggctcaacactctggacggtaggggtatcagtgcattggtcggttggacctgtagaattagctgcgtcaaggctttctttggctggctgacccgcacagtaattaagatatgcctctttagaatctctaaggtaatcaaagttgcctggcgggtttgcctaccaaaattcataggagtcagggcaattcggtcgggtcaaatgaaggtcagggagctcagtttcccctaaatgctcggggccaaggtagaggtcccaggggcagggctcgtggtcggggtgatgctaacccgccacaggctgcccaggctgcccaagctacacaggaagcccagaattgggaaaataggtttgcagaaatgcaagccggaatggaggaacaagacagtgaaatccagcgactaagacagcagggtgctcctgcagtgcctgttcctgaagttccaatggcacctgcccctgttgtccaagccgaacc

SEQ ID NO: 356003 - DNA, 612 bp, Cannabis indica
tgcgtatacttgcgtagtgcttataatttttgcaacaagtaatacggttgtagagattgttgcgtatgtaagatctcgacaaattgttgagtctgcggacgaaccaaagtagtctgttgttgttgctaattttgtggacgaaaaactgaccatacacgggttgttgtggagatctccctatttgaccatacataggttgttgttgttactgtgatgacccaaattgaccatacatgcgttgttgttgttgttgttgcggtgagcctccaaaatggccaaccataggttattgtgtctgacatcctcctctggcgttcaaaaaatatattggaggagactatgagggatgcttgaacatgtaatgtaattaaggcgactgtggagagctaacagacatctcaggagaattttgttgattttgttgaaagaattgagacatctaggaggagctaacagacatgttaggagacatatgttgtggttgttgaaaaacttgttgttgtggcactgacattggacgtggggttcgagtagacgtagtaccttggtgttgtgatggtaaaaacttttgtaaaaaaactttcaaactgtgggtcatgtagagaatggtca

SEQ ID NO: 356004 - DNA, 631 bp, Cannabis indica
aaacaactaaaaactaaaaacttaaagatttaaaattttaaaaaacgaaagtataaaaataaaaatttaagttcacccttaaactaaagtaacatattgtccccaatgccacatcagtatggcggtggtggtggtggtggctggtatggataccatggctgtggtggagaaaagtgatttggagcatcggggttcatcatccacatggagaaagtaatattcaacccctgaacttgcctttgagcaaactcattctactactgaagataagagttatagtaggtagcttgggcttggttagactggatgatgtattgattctgcctgatgatgtagtttaatctatcatatgtgcactgagtccgagagtccagtggtggttcaatttggagaagagacggaactgtctcacttgtgcccgtttcaacatgctcctcttcctcatcatcatctccaccttgtggagcatcacccttctagcattttcttacctcttccgagggtgtcaaagatgctagaggaaattcatagtaatgccttctagacaggggcggacccacattgtagcgaggccccccctgaaaaaaaaatcgagaaaaaaatgcatatgtattttaattagttacaacat

SEQ ID NO: 356005 - DNA, 601 bp, Cannabis indica
actcttatacattcgcttgaccacatcaatttcttctcttaagttttaataagatatattgcttaattaaatttgaattgtacataaaactatacaaattaataataataagaagaaaaaataagaaaatgttagaaaataaagaattgaaaagaaagtccatatgtcatgccacatcaccaaccctaataatataattatatagatatatagataggcatttaattatagttagtttttaaaagttttcatttacccattgaaaaataatctatatatattttattgaaagtcttttaatggatgctttcaactttttttatcaagttagtttgtagctatgtatgcaataatttctctctagaacttttgtcattcataatatttttttggtatatttaaagtaatttggttttagaaaaaaatcttttacatattttaacaaataattatagttgtaattaatatatagacattaatataataataattcaattaaggctaattaggttttttgcctcttgaactttgacatgtaccaaatcatgtcccctgaacttttaaggtcgttaaaaatgccccctgaactattaagattgtt

SEQ ID NO: 356006 - DNA, 788 bp, Cannabis indica
ttagtaaaaaataagatattttatatggttagaatatttaaaaaaataataataagtttgaaaaatatatggtttgaaaccctaaaaaatctattcaaagtaaactaaccaatttttcaaatcttcaagttatttttaccaaaatataattttaataaaaaaaatgtctaataaaataaaatgttaaacctaacatattcctaatcttataattataattaataaaatatatttcaaaaaataagaaatttgaaaaaaaaaaatatgatatggttagcaaactttgaaaaatgaacaagatttttttaaaagataatattgtaatatcaaagtaagatcatccaaatttaataaaaaaaaaacataatctgatcttataattaaaataaataaaataatctaaaatttcaaagttaactataaggctcctttgtgagaaatcaaattttcaaaattcaaaagttacgaagaaaacaagtttggtgcacaggggtatgcattgcacacccctacgcgcgcggaatggcccatatgaccgagacaagaggccgcatgcagcctccatggccaagaaacatgggcgtgacacaggggaagcttcccccaaggctttgtgtgaagggattttcacatgtgcgcgcgtgcgagtgtgctttcaaaccctgatattttcgttcaacttcaaaaaatcataactaattcataaaaaatccaaattaggttctgtaaaagcctaaatttattatttttttgtctactttccagaaaaataattcaagatcgaaata

SEQ ID NO: 356007 - DNA, 703 bp, Cannabis indica
taataagttttgctgaaaaagtcgccgacaccgtaaagtcgcaggaaaggtcatcgtcgctagaaaagttagtgttatcgaaaaagtcaccatcgctagaaaaagtcactagaagtagatgtctcaaatataagcaaaaatagaaccaattctataacataatgaataaaaataaataacacaaaatacctcaaatcggttataattgaaatataaccaattctgtaacataatgaataaaaattgttaaaccattttttattattaattattataacaaaaaaaataataataataataataaagagaatgactcgttcagcaacataaagaaggaaaaaaaatattattaattaataatattttcccacttttctctccactaacttttaactgcccaccactcacctatccattctctgatcaatatatcgtacaaaagggtctataaaaaaagaaaaaaatcagacaaaagagagaaggagaaaagaaagaaaagaaaactgccaaaatttacaaagaaatattatgacgaattttggagtatttatattctcatcttcaagagatctccacagggtaagtattaaggggttgctcttacttttcttttcacattaaacttcttttcttccaatgaattcttcacagacatttttatgattcattttgattcactagacttcagaaaataagtcaatat

SEQ ID NO: 356008 - DNA, 581 bp, Cannabis indica
taatgtaccacggaatacattccgtaaaaatacatcacgagacaaaatcgtgtccctacatttttattctcatatcaatacaaaaaaatcacaataattaaatcaatatgcaataataatcaacatagtaaatagtaaatttcatatagggtttaaacacaacaattgagtacaagtaacttctctatatgaaatataagaccaaaagtttatacacttacaaaaaagtaaccaaatctttatatgagtagcaagaatgtacaatattaatagttaatttcctcttacaacaacccacccaagcaaaaataagataatacaataacttataactcatctaaatattacaagaaacaaaaaagaaagataccctattagcaactctagatgctaatgatatgtcttttttttttatacattatataaagattttgattaattaataaacacataccatctcatttatgtagagtagagaagaatagaatcacttttcaagcataaattaaaaataaaaaaggtggaaagaataatgtgcttgcaatccaaatattgctgcaaacaaataataataaattgat

SEQ ID NO: 356009 - DNA, 504 bp, Cannabis indica
ctaacttccaaaaaaagactttacatacttaatcactatttgatttcttaaagcttttatttatttagttttcaaaaatctaaataaatgcacgcgaatcacgaattaaatttctaatttatgatataattgtacatattgtcaacaaataattaatagttatattttaaaacaaattaaaagagtttatttataaaaaaaaaaaaaacaaattaaaaaaaaggcattaggatgaaaagaaaaagttatgtaccaattcaatatagcttccaaaatctaatttagtgtataatttagcatatttttaaagtgaaatggtgttaagattctatctaaatttagcaaaattgtacaccattcaagatagggctgtataaaaaaaatttataaaccgtccaaactgaataattcgcccaaatcgaaccgaaaaaactgataaaattacaaaccgaaataacccgaaaaaattacaaatcgccaaatctgttaattgggcgggttgaa

SEQ ID NO: 356010 - DNA, 462 bp, Cannabis indica
gcccgattacccacatcaatcggtttcttttgcagatcaaacttaagtgggactaatgctcaaattatcaatggctggaggtatttcgatccttaattatagtgcatatatgtttttattgattccgcactttatacataatcatatatgtttcagtttatacatataaatgtctaacaaatagtacttcaaaaaacttatgttattattagtttgtgtagtttggcttttggaacatttggagtgattatgatttagacaaatttgtgtttattttagtttacgtaacgcgccttttggaacatttgcgaccatacaactatcaaatgattataatttggagttgggtgattgttagtttatgtactgggtctttttgaacaaattaattttttagttatggtaatgatattatttttgtacttcactccaaatttctatatcgtggatgatattaacaaa

SEQ ID NO: 356011 - DNA, 982 bp, Cannabis indica
gagctggagcattgactggggaagtattcccctgttggaacttcggctttaaaatctgctgttgtaactgttgctggtagagatactgagactggtgggttttgagattgttgctgttgttgtgggacctgttgccttccttgcacttgtctctgagtattagcataccctactggattctgtgaactactagacatattttgcatatttggattttggccaacaacatttgggatagaagtctgacttaagctagtggggggaggaagagtagatgatatgctggaagaactctgaacagcagcagaattctgaatattctgagatagtagttgttgtcgtgtttgactctgattagatgacagtggcattacaagtgattgcccttgattgtgtacttgaggtggcatgacaatagaacctatccaaaaacacaatttctacaaataatgaaacactatttttcagacagcattacttatcaaaacaaagttatatactgtatatggaacttaaccgctccatttggaagacattggaacaaattaaaatgtgattcaaatacatatattttgtataccataaagaacacagttttttggttcgcacttaagaatgtattgcctacctggatctgtgggtctgctattagcagggttggatggcaacgggttgggtatattattgttctgggacttagtctccattgtcagcatcttcagtgaaattttccgtaaataatcagactgccatcacatacaaaataccagttaagagagagcaatcgataaataaacacaaaaatatttcatagaatgtgcaagtacacaaaacataacatgtcaacataagtacatcatgtcagcattaaaacgtaagtaatacatattggtgactaagtgaaaaaaaaaaacgaaaagggtcagaaatacagaagcacctggcttgtggccgcactgtaaatcttttcttcaaacctttc

SEQ ID NO: 356012 - DNA, 530 bp, Cannabis indica
  modified_base (479)..(479): a, c, t, g, unknown or other
gtagatgtagtccgagaccgcctggtcatactgctttttcccattctccttctcagtttccaagtcgcgagacatctcttcgaccttcgcctgtgcattcttggcctctagctcaactttctccttggccttgcggagttcctcgagctccttgtccttagaagacgcatcttgcttcagcttcttattgtcttcttgaagctgagcaatatgtttcttcgcgagttcaacctctttggacccggtagcaaaagccttcgagaacatggccatgaactgcgaagctggctccgcagaacgaggcagcagctcctcagtaggagtcttgtcaaccttcgaatggaactcatcgctgacaaatctctcctgaaggtacaacacatggcgagctcgaaccgctgggtcaatcacaacattcttccctttctcttgaatgcccttagcaggcctcttggaagaatctgcgacaagagtaaccnccacatcgcttttcctcttctggcaggtgataggggaagtcgctgctgtcc

SEQ ID NO: 356013 - DNA, 618 bp, Cannabis indica
gtttcaaacctttgatcaatctaacacctggctaggttcatacttgccttttcggagctggtatcggtgaattacagctgagattgtataagctaggccttcaatagtcacactctccctacattgtaagttttatagacaaagcaatagatcagatacaataaaacttgaaaaacaacctagaagagatatcatgtttatatgttcccaaactcacaacttaagttggacctactaatccccattaatgaatcaaacatgaaaaacaacctagaagtgttaacatgtttattgctaacttttttttttctttattggatcaaaatttttttcgcagggaaaatcaaagtttattcatacaaggccaccactgtaaacaagttaaacaatcaataaattactcaaacataaaaatcacggtaacagatgcaactctttcaacaagagaaattcaatcaattaaatcacaaatacataatcagctcagctgttttcaagttacggccagctctattgagccttcacacaagcccggagaaaaccgaaagagcaaaagaaaccatgtttgaattgaaattaatcttttttttaaaaaaaaaaaaattgagatatacttac

SEQ ID NO: 356014 - DNA, 545 bp, Cannabis indica
cgacgtcattggcccttttacgccaccctcttctaaagcccataagtatattttggccatcacagattacttctctaaatgggctgaagccgtaccactaaaagaagtacgggcagaagatgtcgctgattttataaggacccacgtaatttaccgatacggggtgccttcaaaaattatctccgacaatgccctttatttcaaatgtaaggcaatggtcaagttgatgaacaagtacaaattcaagcacagtttcaaataccttataacttggtgtttgggtctgaggcagtgttacctttggaggttcaaatgccttcactaaggattgctacttaactaacagacccagatgaaaatgtgcaagtccgtctagccgagcttgaagcattagatgaaaagcggcttgctattcaacaaaagctcgaaatttatcaagcccaggtagctggggcattcaacaagaaagttaaatttcgatctttttcggttggagatttagtgcttactgtgaaacgccaattgtcataactagaaggatgaaa

SEQ ID NO: 356015 - DNA, 610 bp, Cannabis indica
tttagtcacaacataaatttgttaaagttacttgtgactgcaatagtatttagttacaagttgtcactaatttaattttaatcacaataaatattgtgactaaaaacacatttaatcacaacaaattgtaatttttgtgactaatatttttagcatggaactttcagtcacaacacaataatgataatttataattagccacaacttttatacgtttagtcacaaattttattgtgactaaaaataagatattttgtagtgaaaaatgacctaaacggctaacaacttgtaaagtgccatattaatatggtattggatactataaaaatacgtatattaagacacatataaatatatatcatacaaaactagttttaaaaaataaattatattaatcattttttttttgttactttttaccataaaatagataattaatttaaataggctattgggtttgggcttatttttcaatttcaacttcacaattttttattaggcttaataataagagaaatatcacatttttctaataagtaaaatctaattatcctaatttaatttatacattattatgtttatttttttctttttctaaaaagttaggggg

SEQ ID NO: 356016 - DNA, 578 bp, Cannabis indica
tgactttgagaatatataatccaccattgcttaggagtatctgtgatgcctagctgatatctctatacacatgttatgttattttacattcggctagcgaaacttcctaaaagttattatattaaattatatagaatttaaaatttagttggactaatatcgatattaacacataaaagggtgctaggcaccactggtctggtgccctttaatatttctctatataatgtaatgagaaatactaaaaggtaccagtatatttagcagcctcctacatgattaatatcgttattggtccaattaattatcgagtctcatataatttataataacttttagggaatatcgctagtcaatcacaaggcaacacgtctagaaagtggtagcaccactagtgcccaataacaatatgttcataatgtaatatacaacacacccctaacatctcgtttggaatgccgtattaggtcgtattgtattgtattgtattatattgaattagattatacattatatttttatataatactatgtcaaactttaagttatactaaaatattatatatttaagtgtccat

SEQ ID NO: 356017 - DNA, 555 bp, Cannabis indica
cttgcttgcttgctatttgaggtgaaatagtaaattatgcatgactagaaaagtgatttaggcatttttctggatcgattgtgcctttcaagtcatccctataattttatcctagttaccctttttgagtcttagcctattctttgtttaacacatattgagcctaaaaagataaacccatgaatatccataatttaaccctaattataccagaagttgatctttagtttgggggaattttgatgagaagtttgttgtatgtgtgtgaaaattgagagaatatatatatatataaagttggcaacaactagtgtcaaatctagagaaaaaaataataataaatgtaaagttgttgcaatcttgttgaagaaaaatatatctctcatgtacttagaaaaaggggtattgggattgtgtggaaaatattttgggtgacatgattggagaagcttatggtatagtaaagcctaaatgaccatttcaactacctttaccctaagcctaacattacaagcctagaaagaccttttgattcttagttgtgcattaatctat

SEQ ID NO: 356018 - DNA, 461 bp, Cannabis indica
ttgtatcctgtctatagcagggtatcaccaagatctgaatccgaatgtccttctcttgattctggattcttcatagccttacacactatgattgagttaccacttgatgtgtgtgggcacttactctatcactcaaggtatgaaaaatatgaagagaggaagagaaggtttagttcgaaaataatagaagagaaggctcaggaaaatttgattgaaggtgaattttcatcatcatttagtgtgagccatcactatctatttataggcaaccacgtaggtttaggttagaattaattaggcattaaaatattgaagacattaaatggaaaatccttcccgagtggccggccataggatgtggacccccactttggtattttcccaattttctataattttttccttattttctcaaaaatatcatttttccaattttagccacttaaatgccaaaactattt

SEQ ID NO: 356019 - DNA, 556 bp, Cannabis indica
aaataacacgaaaacaacaaaaaaaaaactacataaagtaacaagaaaataatttccaaacaatattgttgcccctgattttgcccaaaatacgtggcccaaccggatgacggcgcgtggataggaaagggttggcatttaaataaaatagctaagtcttcttcgagcaagggattatcctggacatgcctcccggagaaggcatgtaaggcctcatatgctctcggagagcatgatggcatcaaagcatctccgggtggcgtcacgcttcctctgaacagtcatctcgcatttaatggtgcatgggaggaagcgtattggaactgccacacgcaataaagtcttacgacacaaccccgatctatacctactaggctatgactagtaaagtctagtgacgactattctatgaggaatcacatcagtcaaaaagggattaaaggacccactttcataaaatcccctatagcacctaggggattagacccatgcattaccccatgatatattcattgggaatgtataactttactgagagttacagcatgcatgtacc

SEQ ID NO: 356020 - DNA, 935 bp, Cannabis indica
tactaaatttgagaaacatataaagagaaagtaatacgagcaaaagaatgagccataatattattaacctggttacaatataaaaaaagacagaaacatgcttaatgacattcacaattgcaccaaattcaataaaccacttatcattgctcgaaattacttgcaccaaacaaacacaattagagaaaacaacgatctcaagtagcaaagccaaacacaaagaagcatcccctgcaacaaagttgttgcctctgccatgtgagaagcatcaccagcgttatagtcgagttgtttattcgattttttattaaaaaaatttacacaaaatactatttttaataaattttatacactacgtacaatttatatatatatatatttacagtattttttaaaaataaaacgaaaacaataaaaaattacatgaacacaacataataaggctaattaggaattttgccccctgaacttttaaggtcgttaaaaatgcctctgaactattgagattgttagatttaaagacttttgtccaattttagtaaaaaagtctaacatggatgaaagtttaggggacatgatttagtacattttgaagttcgagagacatgatttagtatatatcaaagtttgggaagcatagtttagtacataagcaattactaaaatagtaaaattgaatgaaattagacaaaagtccttaaatccaacaatcttaatagttcatggggtatttttaacgactttaaaagtttaggggacatgatttgatacatgtcaaagttcagggggcaaaaatcataactagcccaaaaataatctacaaaaaataaaaaaccaaatacaatttaattaataagagtacaacataaaaataatataaaaacattaaaagaccgtataaactataaataaaatcttaaaaaatatttaaaatt

SEQ ID NO: 356021 - DNA, 771 bp, Cannabis indica
ttccataaaaactaaagaggaaaaaccaccaagaacattctctgtaataaatactatcataaatatacaggctcgtggactaaggctcattaatgccccaaccacgtaaaaatctctctcattaattccttatagctttcttaaatattattattatattggttgccgaaaaccttggtcaacaatgagtattaaaaataataaataataaagaaaatacctattaaatcatgctttttggccacacccatgagcgttaactgtaactgatgagcaaaacaatagacaaagaaagcacattcattttccttcatgataatactctttaaaccgttaaactctccactcatgttactagctctatcatacccttgaccacgtaatctaaatatgctcaacccatgctttgaatatagcttatcaattgctatttttagtgagattgctgtagtatttggaacatgttcaatctcaatgaatcgttcaattacataacatttcttgtccacataatgaaacattacgaccatttgctcttttatagttacatcacaggattcatcaactaacacagaaaatatagcatcaccaatgtcttcaataataacattgattgtttcaacagcacatgcatttacaatatccttttgaatctttggtgaagtcaatttaagattttcaggagcattcttcaaagcaacaactctaatttctttattatgatcagccaaaaagttaaaagttcaagaaagttaccttgattagtagaat

SEQ ID NO: 356022 - DNA, 464 bp, Cannabis indica
aatttaagttggtcttaaattgacaaatttctgacttaaatataattttctatttaattaaattcataaaaatagaaataattaagcatctagaataaattcaacttaattattaattttaatttaatatttaagaaaattatctaatttaagatagtccaaaattagttaaaaattaactttcaacttaaatatattttctaatttaattaaattttatgaaatagaaacaaataattaagtatcttgaataaaatcaacttaattattaattttatttaagttctaagaaaaatattctaatttaagttagtctaaaattaataaataattaattttcaacttaaatatatttttctacttaattaaatattagaaactaaaataaactagttactagaattttcttacaacaacagttatcagagtacgatagggatgactccctatgaactgttatacgg

SEQ ID NO: 356023 - DNA, 724 bp, Cannabis indica
ctatacgaccgtcgtaaaatgagaaaaataggcgatagttaaaaatcgtcgctaatgtggacttcccgacggtttcccaacagttttaaactgtgaggaatgtaagaaaaagagaaaaatctgtattttctcccattttttttcctgcattagttttataatcttacctaaattaaaataaaacgactaattaattttattacaataacaactaactttaaaacacattaaatttatacaataacaaaataaatatatataataaataaaaaaatatataaataaatacatgtatttataccgagcttggagagagagaaagacagacgggaggtggtggtggtctgacgtatgcgacggagaggagagggagaccgacgagaggaggtgggtggagatcgatggacgagagaaacgagaagaaaggaagatcaagagagggaggagggcgatggtgcggatgcgtgggtggggtttcggagagttaagattttcgttttagggtgtgggaaatggaaaagaaataggtgggcatttaaaaaatagaaaagaagtaggtgagcacgtgggaaatatggcgagaagtaggtaacaattttttattaggctcttatacccgacggtttaaaaccgtcgcctatactataggtgacggtttaaaactgtcgcctcctataagggcccaataaattttatgaattccaattaaaatcatcgcctattc

SEQ ID NO: 356024 - DNA, 488 bp, Cannabis indica
aatagcgaaggaaggtcaataagaaacctatggtgtttgaaggttttctggttccagggtttctctctctctctagaaaatttgaagaaatttggtgaaagtctgaaagtaaccaaatgaagggagaatggtggcttttataggccgaggtgcatgtgaaacaggcgtgatcacctaccaatcatgcggttgggaaggcacacgattcgaattcccatgatccaatggctaaattggtttgtcatcgaggcggtggaaacgcttgactgtctgtctaacactcattaatgcgccgtatcaattaatggacatgaaacgaatcgacgcctgcaaaaagtgaatcgctacagtaatggtgatcattaaatacaccttcacgtgcccgaagcacgtgtcaggaaaccgaggagccaaccggaggcatctgaacaagccttgttcatttcacaattaaacaaggcttggggggtaaatgttgttggaaatta

SEQ ID NO: 356025 - DNA, 956 bp, Cannabis indica
ctttttaccacttttcctgaaaataacataaaatttaaagtaaattaaatatttccaataaaatttaccattaaaattatgaaatatttaatttatattaatttaatatgcataatgaaaggcttaaaatgtacaaattcaagctttaatcacatactattattttagttaattgcttttaataaaattccatgatttattcaaaaagaaacacaaaatgtactttgattctaataaaaataatatagtactatatatctctataaattatcagaaaaaaaaagattatatcaagatcttaataaagtaatatttgtattaaattaactaaatgattagtttaaagtaaggagttttttgataaatgtagaaaaatgtagtaaaatttattttaatatagcataaataaataatacaaaaaaatataaaattcaaaaataattaaagctaaaatatgggaaaataataaataaatttaataacacttgtaataataagttgccgaaaaagtcaccggcaccgtaaaagtcgtcggaaaagtcgccaaaaaattgttatctctggaaaagtcactgtcactaaaaaagtcaccgtcgccagaaaagtcaccagagtagatgtctcagatataaataaaaatagaaccggttctataacataatgaataaaaacaaataattcaaataggttattattaaaatatagccggtttcgtaacataatgaataaaaaaagacacaaattaactcaaattagttatcattaaaatataatcagttctatatcagtgctataatgaataaaaataaataacacgaaataactcaaaccggttatagctaaaatagaactgcaatataacataatgaatacaaataagtaatacacaataactcaaactgattacaattaaaaaaataaagaggaaattagtacctaaaacactgaaacataaa

SEQ ID NO: 356026 - DNA, 953 bp, Cannabis indica
cgtggcagagctcagggtggtcgccctatagatccaccacaagctcctccggattgggagcaaagatttgtggaaatgcaagatcggatccgccagcaggatgaagagattcagaggttgaggcagcagggtcctcctattgagcctcctcaacaggtttcacaggtcgttgcagttccagcggtgccagcagaacaacctgttgttggcaaccgtatggagccgttgtacgaaaggtttcgaaagcaagcacctccagtgtttctgggaggtcctgatgtaatgaaggctgagcagtggctcacagtgattgagcatatccttaactttatgggagtagttggtaatgatcgggtgacttgcgccactttccaatttcaagaggacgctctcgtgtggtgggagtgggtaaccctcacaaaggacgtcacagtgatgacctgggaagaattcaaggagttgtttaactctaaatactataatgaagccgtccacagtgctaagcggaaagagttcactgaattggtacaaaccgaggggatgtcggttacggagtatactactaagtttgaccgtctggccaagctcgctgtgggaatcgtgccaactgatttttgcaagaaagaaaagtatttggccggtttgagtgcgaagattagacacgatttggtcattactaccactgaaggaacctcatatgctgaaatggttgaaaaggctttgagagccgagggtgcggtgaaatttcttcaggagccccgagtgactccgagtgtcggtggaacccccacttttcctactcctgtctatggtagggatggtggtgactccaccactgatcagaaaaggaaagttacctcagcttctggtggttcgggacaaagtaagcggtttcgtggaaaccacggtagaggtggatgctagggttactcctaccctgagtgtcctcgttg

SEQ ID NO: 356027 - DNA, 818 bp, Cannabis indica
agggtaagaaattacaaactcttaatttttacaaggttcggtagaacatagccacctacttccttggtcttcaaagctaaagacctagttttgagttctactattgagccaagctaacgggcttgactaacccttacaactgagaatttctcaccaaggaatttccaaacctcttacaatagttttccactacaaaggactatcaacctcttttttggattgttgtagtgtcaatctcactctagccgggttgtttacaataccggtaccaacctcacctcaataaaaatttgaaaatatatttagaattacaagcaaactcactctagaagtatgatgacacaatgaagaacctagagtgattagcaagcacacttataagagataaatacaaattttagctcaaagtgtgtgacaagtgttttgttggattttagacttgggaactcttaaaatcacttgaatgtgtttggtatacaaaataactgctcaatcaacatttatttttgagtaaaaacaaagtttatatagtgttagagtgaaatatagccgtttataactattagacacaaaaaacgagacagccactaggagtttcggtcaaccatttccaaacagtaagctagtttctcagagaaacggttcactgttttggaaacagttaatcaaaaccttacaaatggtaaaaagtccatttttcggcacttaaatgctcataagtcctagctcgtttatccaattttaaaaattctaattgcattctcttagtttagtgataagtgacctaaaaaatcaatttaaaaaatttagatatcatt

SEQ ID NO: 356028 - DNA, 976 bp, Cannabis indica
tttagaattcatattaagatgtaatgaaacacacttggtagtaaatctagatcttggtaaaatatttccaacacaaacctgcgcctgaagacttttgcgccaacctctttctggtatcgaggagtttcctgaggttgggaaaaaaatctcagcttgaggaaatgggatcttctaatgatgaggggaatgaggtatgtccagagatgaaggctctctacgtgtaaccggtctttctcaagttatgtgtagttggtctttctccgagctacgtgtagacgatctttttcaagctatgtgcagacggtctttctcgagttcatcggcttcccctctcatcctttgtttaggagaatgacttaatggtttgcccctagtgacattttttgtaaagataagtttgtaaccagtcttaggtttttcttatcttaaatgccttgtattgttttcattcgaacttaatacaattgtatttgcttgcgtttttattcacaatgtaaacaactatattttgatcaaatatacaatacttttaggtttctccattgctcgtaatcttcctgtttaagtagttagtaatctaccaaactttatgatttttgagcagttgtcaattctgcctcgcaattgcagttataatctgccttaagcaaacttaaatatacttaaaggattttatcactttctatatttttaatttgctcgtatgaatagttgcataaaactcaaaccaatcaacaaaaccagctgctaggaacttaaatcaactcaaatgaaccctaaaatttgaaccctaaaaaactctaaccctaacagcccctgaaactcaatttcacatacataaactaaagaaaaagctttaaaaatacaaaacaaatggtctagggttaccttttgttgattcatccttgaatttctagctaaatcccagagaaatggaaaggaaaaactgatccttgcccttgttgggttttatgcc

SEQ ID NO: 356029 - DNA, 798 bp, Cannabis indica
taaaatttgtacggaatcaactctacttttataataatattcaattaatacttttctatattgttaaaaaaaaaataaaaaaaaaaaaaaagaaaagaagaagacttttcttcaaaataaaaattaatccactgaaatttaaagtaaataaaatatgatatactatgatcaatttccagatctttcaacaatgaaagaccatgtctttaggcatttacccatcattacagctacctaagaacatcaaactgatgagacagtatttgtttcaatgtatataatacctgctctgcttcaaaagacagttaactaacttcgtaatgataggctgattatattaatcgcttaatgcttttttcgactacagcctattattacatattaatggtcccaaagctggccctattagatttaaattttattttaatatattttgctgaagaaaaagtagatttaaattctaagggtagcacaaacacactccttcaatcacatgtcatagatattgatggcagctcattaaagttgttccattgacagaacttgagttggggttgatagaaaaatatatatatatttatatataaaatattagcctcgtgaacattttaaaaggatttttacaaaaaatattaaattttaaataaaaattcggattttttaattttttttaaatatttataattattttttaaaactattatgtggactactaaaaatttgctacgtgtgcaagtgtgtacacgtggacagtctaccatggcacttaagtgatttttggacggaggtgtgcagagc

SEQ ID NO: 356030 - DNA, 428 bp, Cannabis indica
aaaaagacaatgcacaaggttgacgcatctgaccctcaagtggctcggcacgccactttgcccagcgccgaacaagatccaggcgtccaggaggaaggagatcatgaaggggacgctgaggtccaggagattgaaaagcaggactatgtccatcctagcagtccctctgaggcggaggaagaggaagaggttgcaccctcaaactatgggggatacaatgaggctggggagccagttgacgctgatggtgacatcctagttgagggcgtggactacgtcagtgaggaacttactgccgcggttcctcatagaaggcaaggtacctcgggtgctaggtgggtgagccctccgtccaaggttactgaggcgcgtctgcgggttctcgaccaggacggctacttgggcaaattggtgttggaaattatttt

SEQ ID NO: 356031 - DNA, 515 bp, Cannabis indica
tttagttctgggtctaagtccttcgttctgatcctggtctgggttcgagttttgctccgggttggagtctaactttgggtcagattccaggtgtgggtttgatttcgggtccgagtttgtgtccgggtttgtgtccaaatcttgaccccgatctgggtctaggttttggtccaggtccaagttcgggtcccgaatgcgggtccaagtttgggtctgggtcatgatctcggtccagatctagttccagcattttgatcctagtttgggtcttggtccgagtcaagcttcgtatccggatccctatctaggtccaagtctgtgtttggggtcggttcccagatttaggtccaggtctgggtcttagttatggtctgggtacacgaacatgtccgggcttgagttgcagtctcaatttgggtcggaggctaggtctgtgttcggttctaggtctgtgtccaggtcctggtctctgtactagttcccgattgcagttctgtttcccaggtccctatcct

SEQ ID NO: 356032 - DNA, 638 bp, Cannabis indica
agcagctttttagcttaatttctagaaatcaagcttgaattcaaagtgtaattggtgtaggtaagccctagacactctttccttattgatttctcaaggttttagttagtttgattatgtgatttgtaaaataggagctgttagggtttgattgttgtataatctgatttctaagttgattttatgttgattttacgctttggatactagtcttggtgtatggacatagatttgagcaagtttgagcttagaaacctaaactttgatctttaatgacatatttgaatttagtggttttttctggaattttttggtttgattatattgtgtataccctaattaggtactctagaaggtttggttgcatttggttgagttttgagcaagaaatataaatttttgggtgaactggtacaaaccaggtaaccgggtttactagtacctgtaaaatcggttagccggttttggcagggtaccccgaatgttctatttcctcaattctcgtccatttcaatgccttagttgggtgtttccttatttcttgagttagagtaatccctagggagtataacgaaacctagactggtgggtttgggttttgatcatgtgatttacccgatttcattatgtgattaggg

SEQ ID NO: 356033 - DNA, 914 bp, Cannabis indica
tgttggaacaagatggtgcaaatgtatctgttcttgtacagcgtgctctcttatatgaaagcatggaaaaatacagacttggggcagaagatctgagggctgttcttaagattgatcctagtaacagggttgcaagaagcactgttcaccgcttgaccaagttagcagactagagatttttcttcattattctttccaaacttcatttcattatatgtttagtgttattactctctcgaatttataccattttccatgttactaccccaaaaaaaatatggggaaaatataaatttcttggttgagaatacctggacaatttttttttcattctttttgatactctttggtctcatggatgtaatttttttacttgtatgatgatgtactttagttatttctttgatgtgagtggtaattgtttgtgcttacactaaattgttagtttcttttttaccctctttttttgtccgtgtgattatcactgttgttatttgttgttcacctcataagaaagctcccaatttaatccatgacgaactatttatttaagagtaaatattattttggacctttttgcaaaagttactaattgaattttttgttttgttaaatgacaaatagatcttatattttttaaaatggtaaaaataggaccttgagtttaattattaataattttattttttaatataaccaattgtaaaacaatttatattatgaacatatatagaaaatgtaattaattttgtcatgattattattaagttttattttgataaaaaatcaattcgggtcttatttatacaattttagaaaatacaaaaattactaattgaattttttgttttgttaaataacaaaatagatcttatattttttaaaatagtaaaaataggacattgagctcaatt

SEQ ID NO: 356034 - DNA, 579 bp, Cannabis indica
gacccggaggggggacactccggctgtgagcaatgactctgagattcctccggaagtggaggtgtatactgtgccgcacgacattgtgctgaccccggtccctgtggatgaggagaggcaaatgctccgcgttgccaaacacaactacgccctagacgagttcagtcgggggcatgctgaggtggaggccctgaagaaggttctgcgggaggagcaacataacattttgcacgaggacgccttccggaatccttaggacctgaacatggaccctttgacggattggtttaaccgctttgtcaggcctaccctagcttccttcgcctcggagatgaccagccagtttgtctcccacctgactcaattcccagccaagagatacgcggcttgtgcctccatgaactccgtatactaggtgcaagacatcagctctgctctggtcgcggtgagtacttgtaatttattcctttttcttatattttgtctacggcatctgatttcattcttgtttcttttttcagattactgtcgagaccggccgcctttctaagaccctgatcgatcatgggttcgtcatgt

SEQ ID NO: 356035 - DNA, 549 bp, Cannabis indica
aaacaatggtgggagctcatgaaataagaatgacattgactctcgcctaaacaggacaacgtcggattctcttttcgatcgaataaaaggttgctagaatgtttatcattttagatgagttgactactctattcaatagatgatatctttgactctctcctaaacgggacattgtatcagtttgttggaaaccttagaaaataattaaataggttttatttaggtatttttacaaacatgtttacttaattgttattttctgaacttgtgtatgaatttgagtgaaccaaatgatttatttttgtttattgatatttttagtctcaaaatggataacccacaccccgaacctctccttgaacatgcctttgtaaatgaaccctatagtgtgaaaatgcttcctggtaagagcattaattcacacctaatgatgatgaatctgaagttccagaaagcaaatttgctgggaattgatttatcaagagaacaatgggttcaattcattcttaatagtcttcctcttgagtataatggattttttgtatctta

SEQ ID NO: 356036 - DNA, 590 bp, Cannabis indica
tgattaaaaatatttataatattttaagtattttaaatttaaattaatttttttatataaatttatttttaaatatatataataatataccgaatccaacggacatgattaggttacgtggaatctctagattaaaaatactgtagaacgcccatcatcttaaatagcagtattctttttaaaaataaaatattcattttgtcttgtcgttttgacatgtctggtatgtgatttttgctattgagtggtgtattttgcgagttatgagtttgttgagttggaattactgtgggcttaggaaccctcaggttgttcaattccttaaagaaacagtttttcaaaagagacccaatttaatttttttgtgtgagacaatttgcaagaaagacaaagttgattgtgttggagctttattgggctatgatggaagttttgttgttgaggcccgtggacatagtgggagtcttgcaatgttgtggaaaaatcaagatgatggcaaacttcttagctttagtaataatcacattgattaggagttgaagcttgacggataccctttgtttcgtgcgactggcttttatggtgaacct

SEQ ID NO: 356037 - DNA, 336 bp, Cannabis indica
atgaaacttataaaaaaacacagtaaaaaagtaaaaaataccgtctggcagtatttttgtaaaaaaaatagcaaaaattagtataccatgtaaatttctctttggattttatggtcgaattgatgggccttaaatattattgttattgggctttggaatggatgaagactcaaaacttcggtccaatattattgtttagtagctaattttgactaagctcacataaaatggtttcgtggtgtagttggttatcacgtcagtctaacacactgaaggtctccggttcgaacccgggcgaagccattgcttatctgcttttttttttttttttttttt

SEQ ID NO: 356038 - DNA, 557 bp, Cannabis indica
gcttgagttgatcaggtcaaaacaccatcccattttaatgggagaatattctgaaataactaccctacgcttgttatgggaagtttctcctttaatcgcgatataatattctagcccaatctgacagctagaatttccttatttataggggaaaataaatagggaaaccggaagagtcttctgagaacgcaactctttttccctccaggctcatgataccggagctatcttccaagttggatctgccgagggcggaaggtactgtgaggacgaaactaagacaacacccggaaggtgctatacaggtgggcttggcccattatatccatgatgagagtcctactgataagtcttaaatgtcaacctggaggccatgtgtccagtcccaaaaacgcggattacaacttgcaataggaggattggaataattttctactttaacgttatctgtggggttaataatttgattaaaaaattaaaatatcatttgttattagtaattgagtgaaaaaccgtgtttttgcaaatgtcagttgtatataagaaaatataaaaac

SEQ ID NO: 356039 - DNA, 582 bp, Cannabis indica
ggtggaggaattattttagaaggatgtagaaacccatgtaaaataatttaagcttcatcagtgaagatacatagctttgttgctttcaaaaagcactggaaagttatgtaactgaaggaagttcttaactatgttatctctattccattttggatagaactagagacatgtcttctgtttattcagatgtacttaataagcagtaaataattcagtatccttagatgagtaatgcatatagaatatgatgttgcataatattttatgaacacaaagaaagtaatggtggagaaagcagtagcttaccacagacttacagttctaataatttgggtttagtcaaatacactacacttgatctggatatcttgacaattgattgaatgaaatgcactacttgttttatgttagttcaagtgggagtttgttgggatttcatgccctaaataaaactcatttcaatacaatctgatttgttatcaatagaagattacaaatcatttatgtttacatgtaattttcatgtttatggtttagtgtgtacaaaatttgttaagtccagaacatatgttaattcacaat

SEQ ID NO: 356040 - DNA, 875 bp, Cannabis indica
attcttcacaatcttcgacactatgatttagtacttgacttgatatgagtgggcatggtactctatcactaaaggcttcaaattttatgaagaacaagaagagatattcgaaaaatcacttaggaaggaggctctttctagttgtctgacaaagaatgaaaactaggttatttgagatggatgggaatgagagccatcttattccttttatagtatttcttctagggattaggatttaattatatggattaaaaaaagcataaaatattaggcaaaaatcactaattggccagccatacaaggtggattcaactagttaccattttgccactttatttcataattaatcttttctttcactaatgtcatatttttcaatttcaatcctataaatgtcaaaactatttatttaatatttgtcatttaacttatttattaattagaccttacaaagtctctcaattaacaaataaaccctaaaacctcttttcttcacaattaaatccttgcttattgaaaattcatatataagacatagttttatttagaattataaatgattaattaaaaccaattaactaagtctacaagcagtactatttcaattagtgtgatgaccatgagcctatataatcaagcttgtaataagtagatctaaaatataccaaacaaattctctaacttattaattcttccttgctccactatagatttagaattgcactcttaattatataaaacgctctatatgttccaagatattgatacactagtatttatccattattataatccaaatagtcaaaaatcctctatagatgatctacatcgagtagggataaatttaatgttctatccttcaatgtattttatcc

SEQ ID NO: 356041 - DNA, 615 bp, Cannabis indica
acctcacaaaggacaaaataccccattgggaaaaaagactaaaatgcccttgtcctcacaaaaccattctaaaaaatacaaagggtattttgggaaaactctaaattcccgactaatcttgacattcccaatgtctaactaaagtgccccactatactaaaatactaagatgtgattctactgagccatacaccgcgttccaatgttgccgggccaaccatgcaaaaatatgaaatttcactatatgacatataaaatgcatcctgaattcaaatacatcaacataaaaaatcaatttaatattaataaataattttcataattaaaccctaattatctactaatttccaaatttaaactaagcggtttttacaattatattcccgacattctatcccgaaatgatataaatcctcaatcttagaaagctcctacttgtatatgcttgctttaggcaaattagacttagagttagattagtagtggtggtccaagataaaagaatactaatgtatatttctatttccagaatacaatacagttacactttcacaagtttttaataaccattttctatcaatggattcaaactgtatgttagtatggaatatgagt

SEQ ID NO: 356042 - DNA, 528 bp, Cannabis indica
gttgcaaaggtttagtgaaaacaatatctaaataaggaaagggaaatttatgaatttttcttttacaacaagcattacgaaaatcaataactgttttatttcctttaggaatagtagaaagttgcatgatagattgtacagccttagcagcaggatgggcaagtttcttatgccacaaagaaaaattattacatgaaaacacagaggtggcattcacagttggggaagtaacaacacatacgacattgggattaaaggactaatcagacttggtgatgtgtaattgggaaggctctctgacataaagtcctagcttaatttgtcttatcattagtgtttccttcgaattctagtctttcacattacaaaatgaggataaaactcaaagaccgcattattatttgatgcaaatttaaagacaaagattaaatttttggtgatatttggaacatgtactattcagtttaaaacaagtggtttaggaagcatgttagtagcctgatagtagaataggcgcatgtttcgttt

SEQ ID NO: 356043 - DNA, 938 bp, Cannabis indica
atggggtttgaggggcaatgttttacatggctgaataaaaggcaaggtgctgcgcatgtacaggaacggcttgatcgattttgttgtaaccaggactggcataatttatttccatcggttagagtcattaatggggatttgctacattcagatcatagaccggtggtggctactttggaaaatgtggttcgagttcagaagaatgataaaaagaggtgtttcaggtttgaaactcattggttgaaagatgatgagtgtcatgacattgttaatcagacatggttggagcctgatgttcctctggatagtcaagacagtattatggatatttttgggagatgtgccgagaggttgggggagtggaataaggataagtttggttcgattccgaggagggtgagggaaactcagaaacagttggatgatctccttagtgtagccgctccgttggttcgaatggatgaggtaaaaaggcttgagactactcttaatgatcttttgtctcgggaggagtgctattggaaactgcggtcgagggcggattggttggctatgggggataggaatactaaatattttcacaataaggcgacgggtagaaagaaaaagaatgctattgtggaaatgatgactgaggatggccgaaagttaactcttgaggaggatattgtcagtgagattgaacggtattttggtacaattttctcttcggcttctccttctgtgcaacaagtggagaatgggatcactagtattgaagccagagtaacttcagaggaatgcgacatgcttctagctcctttcacgaatgatgatgtgctggctgcggttcgggctataggtgctacaaaggccccggggccagatgggtttcatgctatattcttccacaaattctggaatattattggtccgagggtctcagctgtttgtcttgc

SEQ ID NO: 356044 - DNA, 532 bp, Cannabis indica
attcaaaattagggaactatacacaaacaagatatgtgatgaaaaatcaataataataaacaaaaactgacattaaaactgctgaggcagttatcagggacagttccagattataaaactataattggaactggggggagtagtgtttgggggggaaaaactggacttggaaataaaatggcccaacaaaataaaggactgctaaaaggcccacattaaaagggcccattaaaataaatatacccaagcccaagaatataaaaatataagcccgacccgatataaccaaaccaccaattgtcaatccataaggggacactacggacaaaaaggagaaaaatgccaaaaaccagggaacaagtaaagggaatgccgacggaagcagaagaaggaacaggaaggaaagagacgccgacggaccaaggattgactaaggaaaaatagtatagcaggaccagaagaggcacctggatacccttccgacggaagaaatacctgagagcgccgacggagaaaaactaaagcgcaaaat

SEQ ID NO: 356045 - DNA, 611 bp, Cannabis indica
gaggaaatcctggttatttcgggagggccacatattgcaggggagagcaataatgacccaaaaatgatatgtgaaagagataaagaacgagaagtcggcatttgctccagaaccttccaagaaggtgaaaactgaggaacctccaattatagtcacgaaggaagatgagaaaaacatgagatatcctcatgtcgatccattagtgattaccattcaactcgccaataaaaggataaagagggtgttgatagacaatgagagtttagtaaatatcctttataaggaaacgttgacaaagatggggctcgaaaaagccaaattgaggccttgtatggtaaatctttacagtttcactagagatagcattgtcagtcttagcataatcgagctcgcactaaccttgagcgaggcacccctatctggcactgttatgcaagacttcttagttgtcgacctgccatcggcttgggtcgtccaacattgatcagactaggggcagtcagttcgatcaagcacctatccttgaagttccaaacaccagaaggtgtggaagtggtgtggggcgaccagatgctggctctcgattgttatcacatagagttgcagcatag

SEQ ID NO: 356046 - DNA, 638 bp, Cannabis indica
gtatttcacagaaaaactcaatgaatcaaattatgccattagagatcaaagctttgaactcaaagctcaaacttgcacaaaacctaaaccaaacaccaaaaccagctgctaggaactaaattcaactcaattgaacccaaaaattcgaaccctaaacatctctaaccctaacaacccttaaaacctaaaaccaccactcaaaccaagtaaaaacttgaagaattccataacaaaagtttctagggttaccttagcctcaagaatgctcaattccttagcttcaatctagaaaaataccaagctttgagggtgaacccctctggtttgcttcagccgaaagagagaaagagagagagttctctatttttaggtttttctctaattttcctctttttccttgatttcttttaattttcccaactagaaaaggatttttaattaatcctttgctgaaactaacttgccaaatgtcactaagctaggcagccacctcaaccttcactttacaaaatgactatattgcccctttacttataacttaagtatttctaaagctaggggtaaaatggtcaaaatttcataaccccgcttaaccccgatattttattttctctaaaatatttccctcttagaaataa

SEQ ID NO: 356047 - DNA, 1309 bp, Cannabis indica
tttgtagttttattatagttttgctacttgcatatgttatttgattatattttctttgtttgttaaattgcagcactgggttaaaaatacagtccctctaatttctgtagttcgaaatgtgtatgtacgagtaatttctctgttattgataacattgagaatactttgtttgtcaatttgttatctatgttccgtgacacccagtttggtcattttttggatatacctgactttgtttttcatccccaagttgtccatagcctaattttgagggcagtatacgagcccaatccaaaagaatttcgggctaaggttgttggccgttgtatacagttcagtgctgaggagttttacttaatcactggtattgattgctttggtgattgcaacaaactgattgttttcctaggaatcaaaccaattaattgaggtttgttttcgtggcgtaaaaaccatagatcgtaaagctatagaggatgctttcttggaaagtaggtggggacaggatgaatccctaggtttgaaactatctattttgtatttcatacaatatttccttcttagcaatactccagataaggaagtttctaggtttaatctagatatcgttgatagcggtcgttgggatgagtattgttgggatagggagtcgtttgaattgactattgattctttcaaagaaagaatagagcatgagattaaaataaaaataaaaaagaggagaagggaggtcaatcctatgatggttggtatagagcgttgggctgtccttgggtgtttattgtttggttttatgaatgttgtcctgcgatggtaaacaccttttgcaaaaagagtctcatccaggattccaagaattctgaattggatcaataatgttgggaccaaaaatccaacttttagagacttgaagggcaagatttttgatttgccattgaacaaggtgattttcagtttctttactgttttattattgttttgtgctagtttattaacctttgttttttaattcttttttgtttcatgttttgtttttttgtttatgtttttcagttgaagattaagaacattcgtcctactgatgaggagaggcaaaagttgcaattggaaggcttacttttagatgaatctatatctgattgcggtacctctaagcaaaaattcgagaatggttcatcttctaaaaagtctgatttagaggacattgaattgttgaaatctaagttggagttggtcatttccaatcaagaatccttggccgaagactttattctttgaggtgttttgttgaccttaatttcaagtctgt

SEQ ID NO: 356048 - DNA, 521 bp, Cannabis indica
tatacaaaatacttaagccaaattctttttttttcctccaaaaactttttttcttaattttttcaaccgataaaataattctgactcatataatataaaaatgaaagattttttaattagatagaaaaacaaagcataaaaatttaaattttcataatattactcatgaatgggtaatacccattaagagtacatccgtttatgtatatattttaaaactatgtgtatttatgagtattattaatgggtactagtagtgtttactacctctagatatgtcgtcttgcgattggttaacgatactccttaaaagttattacattaaactatatgagatcggatacttaagtggactaatagcgataataacacatagaaaggtgtaaagtattattggtatcttttacactacaagatatgtcacttttaccagcacagtttactactgcgctggtaaaactttaaccagcgcatttcgcaaactgcgctggcaaagaggtcaaagttttacaagcgtacat

SEQ ID NO: 356049 - DNA, 532 bp, Cannabis indica
ttttatgccatattttgtaaaaaaagatagaaatcctatatttgtaaacaataataagttttgccagaaaagtcaccggcgccggagaagtcgtcgaaaaagtcaccggtgccggagaattcgccggaaaaactatcgacaccggaaaagtcgccacaaaaattgtcgtcgccggaaaagtcgcactaaaaagtcattatcgtcgaaaaagtcacagtcgcaggaaaaagttatcagaagtagatgtctcaaatataaacaaaaataaaatcggtcataattgaaatataaccggttctgtaatacaaagaataaaaccaaataaaacaaaataactcaaactaattataattaaattataaccggttataactaaaatagaaccaattatataatataatgaatacaaacaagtaacacaataattcaaatcaattacaattaaaacataaatgggaaatcggttcctaaaacactgaaacataaattaaaaacaaaaataagttctacaataaaaaacctcataacacat

SEQ ID NO: 356050 - DNA, 733 bp, Cannabis indica
atcataaatataatattaacatagtatatagttttgtggaatatttattttttcaaatttaattttaaattaaataaatataagttggttataaatttaaaactttaattcaatatctataattatattaacacaaaagttattttaaccctaaattaaaataataaatattattattttaatacaaaactaatatgataatatagttgtcttagacaaagagtttatttaagaatgaatcaatttaaaattattttaatcaatttattggttataatttattttaaataaatagtttatttaaggattgttgcccttaattttgtccaaaatacgtggactaacgcgactgcgacacgtggatttgaggagtaaggttttgagataattcgactaagtccttttaatcaagaggatcagcaagaaacatacctctcggagaaggtatgagggatccacatactcccggagggcaaagctatagcaaagcacctccgagaggtatcaaaccccatctgaacagtcacctcgcatttaatgccgcatgggagaaggtgtattgaaactgtcataagtattaagtctgacagcgtaacccccttctgcagctattacgctatgactaataagcctagtgacggatactttatgaggaatcacatcagtcaagaagggataatggattacatccacctaacccctaaaacacatagggtatagaccatgcatttcc

SEQ ID NO: 356051 - DNA, 549 bp, Cannabis indica
ttgtgacgaaaaagttgtcaactaaaaataatagtttttttgtagtgtggtaatattatagatgtgcatgacaacctagatccatcctagatctgttcacgtgtgtagcgcgcacccaatgactgacccatgatttttgatctgtgggggcttaattgttataaatatatttattatttattttacattaaaattataattattttgtgaggactttttactattttgttgtataattatttaactaaatagaagatatttaattttttttttaacgtactaatttttttttgtactgggggctatagctcccacactatcattagtgtgtccgtccctggtagcaccctctcctacatgttaatatcgctattggtccaacttagtatcatgttctatatagtttaatgtaataatttttaaagagtattattagtcaatcgcaagacaacatatctaaaaggtctgatgcctaatagcaatgtttttaatatcacgtggctatttgcatggtagagctagagattagtcaattataattataatgac

SEQ ID NO: 356052 - DNA, 1828 bp, Cannabis indica
aagaattcttattcagagatactgttgtaagagctataagaaaaagaatctttctccttgttcttaagtcaatgcaaataacgatgattaggctattaccaaactgctcgtggttgaacctctataaaattcttgtgtcttcatatttgttctactatatatcgattgctataaatcacttaccgcttactaaataagactcattgtcattggctaaaagtgaggtcaacatttggtgctttcattgagagaagaataaggaatcgctcttcaacaaatacattggtggtgcagactcgtaggggtcaaggggatccagctaattgacagacggtggatgcagaacccaggaaacacaaggattccgccagctgttaatcttggatagccggcaagcgtgggtcacagtgtaatgactgctatagatgagatcgcgcctgatgtgcaagagactaggaataacagttctgcacccaaccaaggcattcataacacagctgttctgcctggcaccaacgttcaaacaaccattgcagatgctactaagttacaaaatctccgtgacgctctcggactcatgcagggtcataacaataccataaatcatgatcaagaagagctccgcgctgccgtaaatctcacattcgaagaacaaaggcatatgtttgctgagtggagagacagagagatggaggcgttaagggctcatcatacagagattgaaaatcgtagtcggaaagctaccgtgttgatacgaaagcctaccaaattgtaggtcagcaacctccgaatgtcattccactaggtgagacggacaaagatccaacgatgaatacttccaagactacaaatggtcagccacccaatccccgatcacgagttccgcttgtgggccaagcggtaggcgggcagaccttgtctagtaattcatcgggagagatcatacttgatggttccaaccagatcaatggtgccatcccacccgtcaaccaagaaaatcaatcgctaaggcagctaggcgcttttgtattcgaaaggttgggggcgactcatgacctaaggaatgatctgaacagaagcagttcgacagccaatcctttactgacttttgtacgaaccatggtatcatcaaaagtttctccgcagtggcacatcctcaagaaaatggtcaagttgaagcagtcaacaaaaccttgaaggatacactgaagaaaaaacttgaagatgtcaaaggaaattggccagaagagcttcctgaagttctatggtcatatcgaacaactaagaaaacgacaaccggacagaaaccattcgcaatggcgtacggttatgaagctatgcttcctgtagaactcgagccaccttcccacagaagattgatgtacaatcaagataccaatcacgtactcctagcagaatcacttgatgaaatcaaagaaagacgaactactggaaacttaaagttgatggcccatcaacaaaaagtagctcgatatttcaacaaacaagtgaaagctcgaaaatttttcgtgggagatattgtcctgagaagggtattcctaaacaccaaagacagtatgacaggtgtccttgaacccaaccgggaaggaccatatcaggtggtcgaagttctcaaattcggagcatacaagttaggtaagtatgacgaagaaatgcaactcattctagtaccacggtattggaatgggaaacatttaagaaaatactacaaataaagtaccaagtcagatgaccacattaagtactgaatgaacatttacttttaagtgaatggcctgttgggtgaactacgctcaaaggtttcgat

SEQ ID NO: 356053 - DNA, 929 bp, Cannabis indica
gtcctccaactcgtttatccgtaattggattagatcctcttgttttggaccaagctgttggcgaaggttaggtttctttcgattcaagtgctctcacagatctggttgagagtaattgctgatagaccttgtcttactcacagatcgcctcctactcatagactttgtcttagagtggcttgcggatttactggttcccatagtttctcgatcattagctcgttgagtactttcccctcttcgagttgatcgactatgggttcttgaccgcctcaaagtcacgcttgcttcttcacggtctattctttcctcccaagagcagtttgtcgtattttccccatcagggtccgtacgagtcctcgctctatgggtttgagaataacgttgatgatttctagcaggtgacctccgttctttcggttgagtccgaagatcttcctcattctcatgagggatttctgattcatcagtttccggttgtctcccatctagccgttccaactgattttcagagggtgtctcattttccccgggctgttcttcccgggcgtgagccacgaggtctgcctcgcggtcttctcactctaggttcaagttgattttgagcattcatcccctgtgccaccctggccgaggatgcctcgcgttcaaactctcgcgttcccctttttttggtcttgtttgtcactatttataattacatagtggacaattgattacatagttggccgaaatatgtttatagcaatcatccctaaaatcgtgggatttgatttcatatcacgtagtgtaaatgtggtttacgatttgaaaatcgtatagctgtgattttcttgcttttactgggtcaaaataatcgtggattaaacacatctttagctattgtatctagagatgtctcgacaaaaacttggttacagtgatcccaa

SEQ ID NO: 356054 - DNA, 547 bp, Cannabis indica
aaaattccacagcctcttcagatatgtagcactcaaccatagatgcttctaaccgatagtggttatgcacataacttttaagtaccttcatatttctttcaaatggatacatccatctcgcccaaaccggcccacacaatcttgcttttctcactagatgaaccattaaatgtatcatgatgtcaaaaaaagatggcaaaaataacttttcgaggttgcataatgttttgactacatgttcatgtaatgcatctaacttatccagttctaattccttcccgtacaacttattaaagaaaatgcaaacatgtgtcaaacactctcgaacatttttcgacaaaactgatctaatgaggattggaagcaaatgttgcattaacgcatgacaatcatgtgatttcataccccttagtttcaattcatcctcatttaccaagtttttcatgttagatgagtaaccatcaggtacttttatatttgcaaatgattttcaaaccatttgttttcctttttggtacaaagtgaaacaagcaagaggcaaatataa

SEQ ID NO: 356055 - DNA, 651 bp, Cannabis indica
aattctattaacggtagatacttactccaagagccttcaaaatccataacacaagctcgtaacttatcttccagtatctgaatcgtcctttcggactgcccatctgtctgaggatgaaatgctgtactaaattttagtttcgtacccatggctcgttgcaaactctgccaaaacttggaggtgaacttcggatctctatccgaaactatagactttggtaccccatgaagccttactatttctttaacatacaactccgccaactaatccacgtaatatgttgttttaactagtagaaaatgagtagacttcgtgaatcgatccaccacaacccaaatagaatcgaacgatcctatggttctaggtaacctaaccacaaaatccatcgtgatgtcctcccacttccattcaggtagggttaaaggctgtaataaccctgctggtctctgatgttcagccttaatctgttgacaggttaggcatctcgatacgaattctaccaaattcttcttcataccgctccaccagaaataaggtttaatatcctgatacatcttggtggtgctaggatgcaaggaatatgaggtagtatgagcctcttcaaggatttcatttctgagttccacactatttggaacacaaactctagct

SEQ ID NO: 356056 - DNA, 823 bp, Cannabis indica
ccatgtcaaaaagacaaaactaattgaaaactaaagtagtttcaacacataaacacgatcacatcattaaaattaattaaggaatgaactccttataattctaaccccataaaaatattaattggaattaaactaataatagtaaattaataaatgaaaacaaaaatctgaaaactgaggacgtcgttgagccgaaccgaatcactctcaaacaactacttttgaacccctcacagaagaagacgttgatgtgggaatgagaaaaactttagcatcaatcaagaagatcaatacaatagttttctccttcggtaatatcttgtcctcaagtttattgtctataccacttgccgaaaaactctccaatttaaatgtgtgtgcatgaattcttgaatgagagagatggtggacagccaataaaactctccaatttaaatcaatgtttttagttgatctatcttctttttttgatgacttttagttaatctatcttcacatacatacaatttttttttagaaaaaaattatatacttaattaaaaacaaatataatcccatttaatggaaaataaatcaactttttttcttctttattttcatcaaacaatgttgatcagattggctaaattcttgaacaaatacattaaaaataaagagagaagtggcgtatgccaaaaaaatccgttcaggataagtgatttttttactccatatgattataatcaactattaatcagatgctataaattaattttagtgtttgcaatgtttaaataagattctctctctttttcttttttattaaaaaaaattatatatatat

SEQ ID NO: 356057 - DNA, 717 bp, Cannabis indica
tttagctcaagataggttaattgcatgattttagtgatttgaggttctgtagtgtgcatctagtttgggtttgaattcttgggttaagataggtttgttttaattgattttgtgctaagatagctagttgtgctacagattactcaaacttgaaattagagagcttaagttggctctctaatggtgtttttaatttctaggctatttgatgtgttctattgcttgaaatggatttagtatagtatatgcaagtgttctagagagtatggtagagtttgggctcgatttaagttgtggaggacatttttggggttccctgcactgaaccggtcgaccggttcaggggagcctgtaacaaccggtcgaccggttgatccccaggtaccggtcttccagttgggaaccagtctgctcgttgggctttttcagaaccctaccttaaactaagttgaagaataagcatactatgaatgtatattatttactagttcacacatgattttataaataatgtaattgatgtaaataataaattttatatctaaattttttaaatactttgaagattataatcttgaaaaataaaattaattaatataatatgatagaattttaaatttattaaattaattgaaatcttaaactaaatataagtaaagaaaagaaaagaaaatattacttctaaagtattgagctcgtgacattttaattatttta

SEQ ID NO: 356058 - DNA, 372 bp, Cannabis indica
accctgaagctaagcaaattatgctagaggtccatgaggggttctgcggagatcatacaagaggcccgagtctctcaaagaatatattgagacgaggtacttctggccaaccatgaaaaaagactttaaagactatgtccaaaaatgtgattcatgccaaagattcgcgaacatgccaagagccccccccccaacgagattaccctgatgactagcctgggcccttcgcggtctgggggatagatcttattgggtccctaccaacaagaaagggagaggaaaagtatgccatagtagcactagactactttacaaagtggacggaggccgagccagtgaagactgtaattgctaaaaaagcactagactttg

SEQ ID NO: 356059 - DNA, 564 bp, Cannabis indica
atatttaggatgttaaaaatatacttgttagtaaatctagatcttggtaaaagatattccaacaactggcctcagagccatgggaattgatttactttaaagaaatatggatttaaaatgatgtatgtgtgatttggatgagattcatgttgatctatgtgtttattgatgattgattgatgtttgtaaattttttacgtaaaataattggatttttgttcttgaattattttattggatagtatgaaaaaaattaagtaattcattttttttacagaacttaatttcgattttatttgaattagttatgaatttttgaaaattgaaaaaaaaatcaggcattgggtgcatcaaacacgcgcgccgacaccgagtttcacttggtcagcatgcgtgttcggacagtgtcttccgaaggaacatgcacgggctgtctacacagccccatcccgcgcgtgcatatgctgctaggagcctccgtgtgcggcatttcacgcccaacacccatgttgtgcgcgccataccatccgcaccaaatgcaactttttcatgctttttcatgga

SEQ ID NO: 356060 - DNA, 665 bp, Cannabis indica
atgaagaaatttagagagcggtggtgtgtagatttgttttacgagaatttagcatgaacaattatgtttttttaattggtatttattaagataacaatgtaattagtttttaaattggtatatttatattctcttattagttcataaaaactttaagcctttctttcatgcaataaattgtaataattatgtaaatataaaatatcacaaatttcaatgtttaaagtagtccaacattaattcaataacaatacataatagtccaagacatcacaatataaataaactaaaaattcatttttaacctcggtagctgcaagtgtttctgttgtgcaccttggcaccgcacttgctataatttcgtgatttgataatcttttcaccattacaagcagttcggttgttcttaattcttccaaccttttgtttcttgggtcgccctaatggttgtttctcaacaggcacttcaactgtcatgttctttatgtcatcagacaattttcaatcatcctcgtcaccaattggcataattgtaccttcatatgtctaatattttgttgtgtaatatggcgagcatagtgcgtacacgctataaattcgctttttgagatgcagcacatgcataaggaaaaaaattttatgcactggaacaagccgcaagtgca

SEQ ID NO: 356061 - DNA, 555 bp, Cannabis indica
ttttagtgttgtggttggagtagaaatactttttgacgttaaatttagtgatagtgtaacactaaaaatgatgtatccttggagatgctcttagagcatctacctctagctatgctctctaaatataattttttacaaaatagagagtgagacttaaaaaagtaacttcaaccataacaataactctctataataaacaatgaataaggagctttccttattcatttttgttaatattatttaatagtatttttatcaaaattactattatttttataaaattattttatatttaaaaaatattatataatgttatacaaataattaaatataaattaattagagtgataataataaaaataatttttattttaatttttagctattttaactataaaataaataataccatttgatgctcttatttttggagatgacaaatataaataatttaacatattttttaaatataattttatattatatcttttatatttttccatttattttgatattttgtatgtaatattttttttatacgtgtaaaaataatag

SEQ ID NO: 356062 - DNA, 815 bp, Cannabis indica
atgcatttctgaattccgtaaataacagtaataaattatttaaatagctataaataatttcataattaaacataaacagctgctaatttccaaattaactaagcgggctttacagtcacagtagcatccctaagaaataaggcgttacacagatgctcatgtctagaatattttttaataattttcggatgaccacactaggagcactaatatcagtaattatctattatgttaataataaaattatttttaggtggagcccaatatttaatatctaagtaaaatataattttaaataattagggagtagccatatcatctttaattatataaaattatatattaattaaaatttaccttaatggatataatttgcaaataattatataggtataataattttttccccacataaattttattatatttatataattaattaatataatatgttaaattagttttcttaatttactcagagaagttaggataattattttaataatattatcataaatttaattaagatagacaacaatttttttttcctaaattaaatgtttgattaaatctaggataaataccattttggactctgtgttttgtaaaagttaccaattggaccatctattttgttaaatgaaaaattggaccttatattttccaaaatggtaaaaataggacactaagctcaatttttaataattttttttaattataactaacattaagataatttctaacacgaactaatatagaaaatgtaatcaattttgtcatagcatttctagatcagattattattaagttttaat

SEQ ID NO: 356063 - DNA, 978 bp, Cannabis indica
tcaaatcccatctaacactttctcgtagttgtttttcttacttttttgcttcaccaaaatctttgctcttttttctttagccaatagattgtccaatatgctgcaagagcaaccagctagaatgaaaagtgcaaaataaaaaattacactattgtctctatcgaagcaaatgaagattgaaatccaccaatgactatcattagttttcttatctacaatttttagacaaatgctatcttcaattatcaacaatttagagattgatttttaattttctttttatcttacacccatttaagtaatgtttctttaagtattggaacatcaatttttaatttatttttggattaacttaagaacatatttaaatcatcaagctttcttaatatattacattcggtattcacttttaattgacaaaattataaactataatatttagatacacataataataatctcacctaataactaataatattttttctttaatttttaattatatcacttttaaataatataaaaaaaaaactagcataaaatttagtatacatttcgcaggtagcttttttgctaatatatatatgtacttgctttttaatatacaacatgatcagctcttacattacatcgtgtattccaatgattcttaaagatctctacagacaattcttaaaaaaaaaaaaaaagagcttaatgttattattattacaatttgcctttcttaaatattagtagtataaatgtgtttggacaatattccataaggccttctgattatagtttacaatccatatatatatactagttaggacactcgtgcttaaaaaaaaaattaattaattttgaaaagaaaatatattattaatattattattagaatatttttttaaaccaaaattaaaaaaattaaaaaaaaaacaaaataaaaataaaaaagaaatacaaacaattacaaaaataaataaattttaaaaa

SEQ ID NO: 356064 - DNA, 778 bp, Cannabis indica
catagatggtcttatcgtcggtagtgatcataaggtcatacttgatcttcacattaagtccatccagatatttttctttcttactgaaatcggttggcacaaatcccgaggctaacctcgccaaccggtcgaactgagtagtatattccgtcatgctcatattctctcgctgggtcaggtgggcgaactctttcctcatggcgcttctgaccgcctccttatcatgtttagcgctgaagagttcctggaacctttcccaggtcatagtgatgacgtcatggatctgagacaccatgtcccaccagaccagagcgtcttcttgaaactggaaggtggcacacaccactctgtcgttcccggtgacacccataaagttcaggattttggtgatcaccgttagccactgttcggccttcaccacatctggacctcccaagaaaaccggaggtgcttgcttccggaaccgttcctaccaggtttccattcactttgccgctaacactacctcggcctgagcagcaggggcgggtgccactggaacttctggcaccggcactgcaggagcaccctgctgccgcaatctctgaatctcattatcttgctcctctattctggcttgcatttcagcaaacctaacttcccaattctgggcttcctgattgccctgggcagcttgtggcgagttgacatcaccccgaccacgagccctgcccctaggacctctacctcggcccataacacttgggggaaaaactgagctcctcgaccttgatctgac

SEQ ID NO: 356065 - DNA, 593 bp, Cannabis indica
accaattggcaatgagtggagtagctcatgttcttatatatggctcaattctctaccatttattccatgtgggacattgtccacaatactacctcaacacaagcacaaagattaccaaaccaagctttgattcaagcaacaactcacacattcaacaaagaaagagataatttaagagagaaaagggggttcgattttgagaggagaataacccagaaaattacatatccaacaatgccaaaatcctcatttcgcaacatagcacatttggtcaaatgaccaaaatgcccctagggtcttaaagaagcataaacaccaaataagggcaaataggtcaatatcatataaaacctcatttcaattaatttaattacaaataaataaaatactaataaatcatatcccaaaattgtatttcggttcggtccgaaatacccagttttgactatactgcgccaacttgtcagaacacacctgaaaaaagacaaaacaagcatactatataataatatagtccataagcacgcaattaaattaaatatataattttaccctttttgggtcaaaatcactaaaatacctctagctcacca

SEQ ID NO: 356066 - DNA, 546 bp, Cannabis indica
ataccttggtactagaacgagtttcatgttttcgtcataccgtcccagtttgtatgctcctgagtctcgatcgtcaaccacctgatatggtccttcccagtttggtctgagcacacctatcgtgctgtctttggtgttcagaaatactcttcttaggaccatatctcccacaaaaaactaatgtgcctttacttgcttattgaagtaccgagccacattttgttgatgggccaccaactttaggtttgttacagctcgtttttcttcgattttgtcaagtgattctactaggagtgcatggttagattcttgattatatgtcaatcttctgtgggacgaagattctaattctacgggcagcatagcttcataaccataggccatagcgaatggagtttgtccggttgcaattttttcagttgtgcgatatgacaatagtacttctactagttcctccggccagttccccttagcatcgtcaaatcattttttcaaagtatctttaagtgtcttattgactgctttttgacttgaccttttgcttag

SEQ ID NO: 356067 - DNA, 458 bp, Cannabis indica
tttcaaagtatctttaagtgtcttattgactgcttttgacttgaccttttgcttaggggtgtaccactgcaggaaaacattttacgattccatggttcgcacaaaaattggtgaacaattggttgtcaaactatgtgccattgtttgagactatcttgtacgccagtccaaatcatcatattatgtttttcaccacgaagtctagcacttccttagatgtaattgttgcaaatggctcagcttctgtccatttagtaaaataatctactgtaaacacaacatactgtactccccctttacgtttaggcaattgtccgattgatcaatttcccaaataacaaaaggccaaggactttgcatctaagttagttcatgttgggttttatgccctaaataaaactcatttcaatacaatcagatttacttattaatatagatcagaaataacatttaatgtt

SEQ ID NO: 356068 - DNA, 505 bp, Cannabis indica
attgaataagattaatttaatcaattacccaaaaaggagaaaaatataaattttgatacaaataaaattgacaaaagaaataatttatttttatagagaatatgtattatcctactatactttctaaataatatgagattactaccaaaagtaagcttagtaaataatcatattttttaagaacattaacatggcaatctcacaaaattagaacaattgaaaagaaaaaaaaaaatatagagagcacctacattatttttaggtttttatttatataaatatatagatagatatgtaatattgtcctactatactcagtgacgaagccagaaatttagttgagtgagggcttgaataaatatttagtcaaaactaataaaaataatgataaatgtatctttcaaatttttcatcttcaacaaaataaaataatactgttgacaaaaataaaataaaatattgtcaatggtattattttattttttaataaagtattatttttttt

SEQ ID NO: 356069 - DNA, 1457 bp, Cannabis indica
atcaagtggtcgaagttctcgaatccggagcatacaaattaggtaagcatgatgaaaaaatgcaactcgttctagtaccactgtattggaatggggaacaattaagaaaatactactaataaagtagcaggttggacgaccacaccaagtactgaatgaacatttacttttaagtgaatggcctgctgggcggactacgctcaaaggtttcgacaaaaggaaaaacaaaagtactcaggtcggatgaccactatttaaagtacaatttcctatttctgcaatttgttttatttcatgttaagctaaaagataaaattagatcaaatagctctgatgtaagttactacggtaacaaacgcatttccgatcaataaatgaataaagatgtttatttcaaaattcaaattgagtcgaaatcatcagcatgtttctaagttaccatccagtgcgtacaaaaggtttggtcgaacccaaagcaccgaacagataaatagcatacttgtgataaacaattgaccaagagtcataagtctgctcggtcacttgggcggcacctatacctgtataaaacatttagtaaggataaaacaatcacaattgcacgatgattataaacagagaatgaaattcattaaagataacaaaagtacttaatactgggattaaaggctacctggtcagccaattgtttgtgaaatgaaaaataattccaagtttaaagaccgcttggccagtcatgatgtcttaaaaaaggccttgtggccgaataagatatataaaaagagaaggataaaagaagaagtacttaaacagctggagtcccaggctctcggttcggatcttctaagccagtaggagatggaggatctgttgtttgaacgggaggtacatcagcattttggccggaggaaaaagcagtcgcatcaggcttaccataagccacttgggaagcgcgaactcgagatacatgcctttggcttcacccaagtaatcaaagtttgcctgagggttagacttccaaaagtcataaaagacctcgaggccggctgtctctaaggcatggaccttttctcccatcttctccacctagactgtaagctcctcctccttagacttcttctgctcttccacccgacgaaggaaagctcgaagagacgtcctttcatcctgaaggctattcacctctgcagataaggtttcgatggtctcctcaagtcgctcagaagccttgagatccttagtcaactcagttattttcttctgagcagtaaaaagcttcttgttgacttcacccagctccatccgaacatctccaagttccaccctggcgtcatcagcgtccttcctcgctaagtccacctccgccctcatggttttggacaaagccgcattcttgcaagcagcagacttagccgggagtatgtgtcagccaatttcagaccagcctgtgcagagaa

SEQ ID NO: 356070 - DNA, 816 bp, Cannabis indica
ccgaccttctcgagtatctgaaatggcctaatgaacttagggtttaacttacccctcttcccgaagcgtctaataccctttacaggtgaaactcgcaagaaaacatgttcccctgcctaaaatgtaccatctctgcgctttggatcagcataacttttcttcctactttgggaagcaagcatccaagccttaatcttgtctatggcttcattggtcctctgaactaattctagacctaagtacttcctttctccagttttgtcccaatgaataggggagcgacatttcctaccatacaacatctcatagggagtcatcccaattgtactctggtaactattgttgtaggagaattcaattaaaggcaagtacttactccatgaaccatcaatgtccatgacacaggctcgcagtaaatcttccagtacctaaatggttctttctgattgcccatcaggctgagggtggaaagttgtgctatacttcagctttgtacccatagccctttaaagactcacacaaaactttgatgtaaactttggttgtctgtctaaaacgatggatttaggagctccatggagacgaactatctccgttacatacagttcagcatcctgatccactgtatacgtaactttcacttgtagaaaatgagctaattttgtgaatctatccactatgacccatactgaatcatacattcctgtagttctaggtaaaccaaccacgaaattcattgcaatgtcctcccacttccactcaggaagggctaaaggttgcaataaccctaccggcctttgatgctcagctttgatt

SEQ ID NO: 356071 - DNA, 1144 bp, Cannabis indica
aaagccaggaaacccaaatattcatacgttctatgagctcatgacagaacctaatctagaaatttgggaggactggtatgatagtgaagaggatttagaaagtacatggcaaacatgtactcggaaaaaacctgcaaaaatttcatctcagaagccatctggaaactccggagtcaaattttggagtagaccaaatatagaggatcaaaagaataagaaaaagatcgaaaagcaaaaggccgtttccaaaagaaacgaattcgaacaaccaaaacaaaatctagtaactctggaggagtttttaccaaaagagttacaggacaaggcagctggttgtgatgacagtgtatcggattgctgcatgaatttgttaacaaaagaagatcctgaatctacctcacctgaaagtgaaaaagaggtagatgaaattacgctgcaagatatgcggtggaaaatttttgcaaagaaggaaaaagaagcaaaaaagcttgaaaagctaaacatgaccttcaaaagccttcatcttcgaccaaccgggaattttataatgacaatcgaagaggcaaaagcaccggtgaagatgaaatgacgcgagcaaaatatgatatattgggttatctaaagcgcatccctactcttttaagcgtttatgatgcactgcaaatgtctcctgagcatagaaatgcatttgttgtcgcattgacaagtccagaattttatacggagaaaatagagccattgaaatctacatcacttgaaatgcatacctcttgtatagcatgcataacttttgatgataaggatcgtcagttgggggctgctttacataatcggcctctctacgtgacgggtatggttgctgatattcgcgtaagccgtattatgttggattgtggatcggctgtgaatgtactctccttataatccttgagagatgttagtttacacccacgtcaattgtcttcgtcatcattgaaaattcaaggttttaatcaagctggagaaaaagtaaggggaagtatcacactaaaaattgaaataggtgagttaaattctaaagcctaatttcatgtcatcgattcagatacatcctacaatgtgttgttagggcgactgtggcttcatgaatatggagtcattcctt

SEQ ID NO: 356072 - DNA, 802 bp, Cannabis indica
ctttatttgttgatgttatgatccatttttcttcttctttttctataaataattagtcccatgtaaatacacctcaaaatatataagttttaatgtgtatacgaaaagacttatatgttactatttttttttttgacaaaagatgaatgttactattttcttttaattgcttagtattaatagttaatattaaattgaaaaaaaaaatattaacaaaagtctacttgattaattagagttacatatatttttttaactgaatatttatttaaaaaattaaaatgatacacttaaaaatatgaaaagacacatatattattacttttatttaattattttttttaattgcttcttttgtaactgaatatttatttaaaaaattaaaatgatacactcaaaaaatgaaaagacacatattgcttcttttgtaactgaatatttatttgaaaaattaaaatgatacactcaaaaaatgaaaagacacatatataattattttttttaattacttggcattaatgtaattagtagtaaatagaaataatattaagaaaaattaaaaaaattaaaaaaatagagagagcaagaaaaatataagaatgtttgtagaggctgccatgtcatcatccctaacaacaacattatatagatatatagattaaatcagttttttttaaagttattttggttgaatgtagtgtagtaaaatcaaggtttttctcatttattcaaaaaaatagaaaaaattagaaagttggaaaattctctctctttcaatctctctctctctcacgaaatccct

SEQ ID NO: 356073 - DNA, 1188 bp, Cannabis indica
ccccaaccatgaaggagaggtgtcgtttgtgttttgttactgtttacagtataaaagtaaatatattgggcctggacagtataaaagaaataaaaatgggcttggacagtaaaaatgtaaagtttaccatgtcccagcatttttgaaaacatttggtaaaaaatcagtatttttgtaagtttcccaataaaaaaacacctattgggccttgtttaaacagaaacgtctaaaaaatatatgaagaaaaattattagaaaatagggctatttacaaaaatatgggaaaaaaattataagttatgatatatatggcataaaaacttaattacactaaatatggtattctttttaaacaaactttaaaatatgggaaaaaataagaggaatgccatataaaaactttaaattgtgtttctcttttttttatttgttttttttttcttttctttcaaaaaaaaataaaaaataaaacactgtaataaagaaaaaaattatctcacctgagatttttttttatagaaactcaaataatattaaaataattttattagcacattaaattaattaactaattaattctatgtaattaaaaattaatttttgaaccaaaaaaactagttccaaataccaaaagtcatatataaattttacatgtttcttagaagctctaagacttgacctccaagccactaccaaaactaaaatcaatacaagacaaaatttaaaaccagttacaagttttcgagaaactccaagactcgaccatcaacccactacacaaaacaatcactgtctactaaaacaaaatatttgccacaataaaagtagaaaataaaatgagaacatttgaaaaaattgctatcatcgtcgaaaaagtcatcgctaccaaaaagtcatcgtagttagacatcgaagttgtcaccaatgttggacgtttgagttgtcatcggagttggacatttgaatttgacaatgaaaaatcagtaatatttatcagctaattaaaaatatgataccgagaaactagttatgtagattaaccaaattaaaaactaaaccttagaaccagctatgtattataacaaaaataataatttaatatagaaaccaatttcatattacaaataaataaaaagtgaacaaacatatgaagcctaaagtaataaaaagatatatcaattataaaaa

SEQ ID NO: 356074 - DNA, 275 bp, Cannabis indica
cgagatctgcagtgactcacaactagtggttaatcatgtatctggcgaatacgaggctgaaggagaaaaaatgattgcatatcaaagcaaaatacatgatctgctcacacaattgaaaagttatagcctcaagcagattccaagggaggaaaatacaactgcagatgcgctagcacgtttggcgagcaaaaatataagtgacaaggcgaacctggtctcgatccagtttcttgaagagcctagcatcactggcacggaataaatagaaatgatag

SEQ ID NO: 356075 - DNA, 701 bp, Cannabis indica
atttataaaatagagaaaattgtgcaagaaattgaagctaaaacttcaagactaaattagactatattatgatcaaattttgaaaaaagtcaaaacataaaagttttaggtctctctcttagctttctggaacatcttaaatcgttccaaacaatatggagagagctatggctaaaatactattagtcgtcgcagcaagaaatttttgaaaaaaaaaacatagagctacgatttttatcttatttaagtttaaattttaaatctttttagtatcttttaggtatctttgttagcctatataaacacattattattagtatttttagtacgttttttagagctaaaaaaaactcaaaagctcttaattagccagcaattgaggagtactacatgtttcgagattgatacaactctgaaatttttctccggtcgtgggggtagacatttcttgagaagattgatacaactaactcgaaaatttcctgatcgaagctaaagaaaccgtgcttgttaaggtcgcttagaaccttactcatatgaaaaacagaaatctagcagttagtccccaaaccaaaccctaacataaaaggagggaatgggggtcccctaaccgctggaaagaggcctcctccggatgtctgccagaaacgagaaatccagggattctcgtaagcaaacatcgggtgcaaatatcccaaagg

SEQ ID NO: 356076 - DNA, 877 bp, Cannabis indica
ttcatatttaggatgttaattcaacatacttgttagtaaatctagatcttggtcaaatattaccaactaaacagccatgtgatgacagtcttctccagcaatgtacatattgaccacaccgtcttgtgtgccgattttccaggagttgttttagactggctgtgtctactgtattttgaatttgttttgaattgatgttgtatatagtcttttttgtaaataatttatagtagggatccccaagacaccattttactacagttatgatgtccatttttagtgttttgttttagtcaagttttttatattatcacggtttttaataattaattaatttatcagtattaaactagtttatcaaatcacacacgttgcgtccctaaagattagggcattacaacttagtatcagagtagccatggttgcattggtcctgaagactagtcgaatatgtacatttactgcgaagatcggttgactcgtggtataataagtgcttatgttatttgctattggattacatgcctaggctatgataaagtatgttgggaaaagtagtatagtgatgattatgataagaatatgtgtatggtatatgcatattgatgttgatatctgtctgagttctaaattcttagaagatgtagattaaatgtgtgacaagttatacagtaagggcaatcgaattgcctgattagtgaactgtctaggcccagggcaaacgataaggaagagaatcctttattgccataatattgggaacatgtaaatttcgctatgcatgatatgattagacaacaatgggaaatagatccaaaatctgagagaataatgttggaagttattttaccaggaacttagatatactcacaagtat

SEQ ID NO: 356077 - DNA, 542 bp, Cannabis indica
tcaagggtattattattgtcatacctcacctatataacatgatactaggtttgatcccaatatgtttgttgtatatatatgataaatcaaataatgggctaactactcacttttataaataagtgagtctgcacaaaatttttttataaaagatatatgtcaaataaaattatatctaattctcacacaaaataaaaatatatattaaaaaagataattgataaatctaaaaaatatacgattcaaaactgctaataataatattaataataataacgtgtgatagtatagatatagtatatttttttaaaaaaaaatattaaaataatataaagttattaattttgtaaatttatagtctaataaaatactaaaaacgagagaattaatgaaataggacaaaatagcttattaaaataattgtataaaatatcaacttgtagatttatgctctaataaaatattaaaaatgagagaattaagaaaagaagagaaaatagtgttgacgcgatttttcgtcaactgatctaagaagatcgtaa

SEQ ID NO: 356078 - DNA, 590 bp, Cannabis indica
gcagctttccttctcatttttcgtgcttcatttcagttatctgacagtttcctagagtcgaggtaggctgctattggtgtcatccagtttggggatgtatcaatcatttcgatttcttccatgccagtgatgctaggctcttcgaggaactggataggaaacaagtttgccttgtcacttcattgctgcttgccaatcgagctaatgcgtctgcagttgtattttcttctcttgaaatgtttctcacacaatagcttttcaattgtgcgagcagatcatgtgttttgcttagatatgctatcatcttttctccttgagcatcgtagtcttctgatacatgatttaccaccagctgtgaatcactgcagatttcgatgtgctcggctttcatctcttgggctaagcttagcccagcgattagagcttcgtactctgcttcgttgttagattctttgaatccaaacttgactgcagcgtgtaggttttgcccctaagcgtgacaagggcaattcctgcacctgatagttgatctgtagctgacccatctacatgtagtttccaggtcagtttgtcctcattgtgacttggct

SEQ ID NO: 356079 - DNA, 461 bp, Cannabis indica
catacttgtgagtagatgtaagatcctagtaaaatagtttccaaagaagacacctaaacatattcaagagaagcatcagtagttagttgcatcatagcaccaaacaaaatatcacgaaattgttttgaaaacagttagttgcatcatagtcacatagaatatcaaagaattgctgggaaaataaacaatggcagaatttatggataattaagcatgaaaagttttcagatcattcaaataaaccagtaattattctagtattgctttagtgcaacaattttttagtctgtgtacttcttgtaaatgcttctgctttgtcctctctacatggtgtaggaatggcacataagttatttttagtgttttgttagttattttttgtttactttctaaaggaaaattacactctgtcaattgagagagagagagagagagagagagagagagaggagagagagaga

SEQ ID NO: 356080 - DNA, 712 bp, Cannabis indica
atggtggtagccccactatcaactatccagatattattagagaaagatacagatttaccagtgagattagatgccattggaatgttgacatcaatcgttgattgggtctgttgaatctgtttggtaagttgagaaatcatttcttgcaacgaagtaagtttgtccaagacagagtgagaagcggaagcttgattagcagccggtcctttgacttgggaaccccgattcgaagtggagcgctgtgtagaatcaaatttgcgcttatcaaaataaacgggaggaaagccatggagaacatatcatttctcctttaagtgacctgatttttggtagtgagtacaaaaaggttgcattttttattgtgagggggatttgatggctgagatgaagtggcggcgatgaggttcgggagaagacgaagtttcttttgtcgctcatgctgaatggtagtagagaacaccttcgagagggatggaaaaggttcggtgattaacacttgatctcaaactgcctggtatgattcattgaggccagtgagaaaccgaaacaccttttcttgattctgaaacttggtgttatcggcagaagcttaacaagtgcaagggagacgaggtcgaagctcattgatctcatcccatttagcccgaagcttggtgaaatatgcagtgacagattcatcaccttggcgtaaacctgtaagagattcttgaag

SEQ ID NO: 356081 - DNA, 642 bp, Cannabis indica
tcaaggtactaaccaaccacccgctccggcaagtcctccaaaaacctaaagcatccggaaggctcctcaagtgggcaacggagttaagtcagttcgacttacactacgttccacgaatctccataaaaggccaagccttggcagacttcattaccgaatgcaacgaagccgaggcaaccgcaaatgtgccagcaccatcggtccccacatggagagtgtttgtggatgaagcctccaatgaaaatggatccggagcaggagtgacaatgatatccccgaccggactgcgactccaggcagccctacagtttgacttcccagcttcgaacaatgaggcagaatacgaggccttgatagtagggctgaggttagcaaaacccataggggccaacagagtggaagtctatagtgaatcccagttggtcgtaaataagatatcgggagagtaccaaacacgcggcgagcgaatggccgcgtatgtaacaatagtccgggagctgctccacgagttcacggactacaaaatagaaagaatcccccgggaaaagaacgctcacacggactgtctggctaagttagcttcagatagtgaaatcgaagggctgggggtagtaccagtggaacgcttggtagagccaagca

SEQ ID NO: 356082 - DNA, 599 bp, Cannabis indica
agattaattacacggtatgacaccaaagaaaatattagactaaacatgcatggtattaagttaccctaatttcatcacttttctgtgtttttggttagaaaagtaggtgactatattcataattgccatgaaaaacttgttaacagatcaacatttaaataagtagtactaaagagaggccattaactacttgttaacaatttatgtatgtaaaacaatcagcagtcaagttttatctaaattataaacaagtatgaagaaaacaagtaaaaagctcgaagctctaccgaagagcataaaataaatggaatgcaattaaatgcaaaacaaatgctattagttacagataagtcatcattagaagaacacaataaatggataccaatgaagaagacacatatggtgcagccccaacatcattgataacagaattagttctaaatccatacacagttacagataagtcatcattgataacagagcttcatataagtcatatatatgcatatacaaaaaaatgactcaattcacacaactagcagataaattttctcaaaaaacaaacaatatatatagtgaaaatacctgtagaaagcaaa

SEQ ID NO: 356083 - DNA, 882 bp, Cannabis indica
aaaaaaattattttgaatgattataaaattaaaaacaatattaaaattttgaaattaattaagcaattttaaaaattatttatcttttactaaaaaatccagttagatattaaaaaaatatgtattaaaaattcaattttttgtaaaaattaaattttgcagacaaacttgaatctattttattcttctaaaaaatgtagatttgtttaagtaaatataactttttttttaatttaaattctaactcttttttgaaataattttatattattattgaatttttaattatttttctttatttgttaagatatgagtttataaatgtaaataagcttgattttttcttcaaaaaaatttagtttgtttaaattatttattgcattttcaataattttgatttaatttttaaagatacatgtttatacataaaataaagtttgaaaatatttttctatgaataatttaaattaatattttttaattgatttttcttattataatcaacataaagaagagccctaacagatttgaatcgcctcctccctctctcttgttttatcggctgtccaccatctctcccattcaagaatttatgcacagagtttttcggcaagcctgaggcaatggtatagacaataaacttgaggacaagatattaccgaagagaagactattgtattgatctccttgattgatgccaaagtttttctcattcccacatcaacgtcttcttcggtgaggggttcaatagcagtcgtctgagagtggttcggttggctcaacgacgtcctctgtttcaaatttttgttttcatttattaatttactattattagtttaattccaattaatatttttacggggttaaaattataaagagttc

SEQ ID NO: 356084 - DNA, 455 bp, Cannabis indica
ttaaacgattgtttaaaaatgtcaaaaattatttttgtagtagtgatatctcaatttttttcttatagatgtatatatatatactagaaaaaaattacgtgcgagacacgtgtacatagttttatgttagttgttatatatgtaattgtaaattatacaagaaataattttatatagtttaaattattagtatggtctaattgaattgttgtaatgaaaagtgattaaaccatgaaatataaatataaagattttgtggggtcaatttttatgtatatttaatttgtagttgttggtgttgtaacctaaaaagtgaatagttaatgcaatttgttagacataattatttgaaaaggctaattaggatttttgcctcctaaactttgacatgtattaaattatattccctaaacttttaaggtcgttaaaaatgccccatgaactattgagattgt

SEQ ID NO: 356085 - DNA, 1533 bp, Cannabis indica
tggtttcggttcatgtcccaggtgtcgatctgggtctttggtctagctctgagaccgagacttgggtgcagtttttgggtctggatcccaattgtggttcccaagtcctgttccatgcttgggtttgagttcaggtctgggtttgggtcccaagtcccagttcgggtttggattcaagtttgggacccaatcaaacggtgggtttgtgtccgagtccgggtcctggtctagttacagttttgtgtatgggttcaggtcctagcactagtcctgtttctcggtcccgatctccttctggtttcggctgtagtttcaagtcacggggtacgagttcgggtcgagtttgggtctgtgtttgggttctagtcttgatttgggttcggggcgaggtttaggtccgtgtttcggtctcagttagggtttgaggttgggtccggttttgggtgccgatccggggttaagagccagtctctttctaagatcctagtccagttctagttcaagttttaattttggttcccgagtgtgggtctgggtctgggtatgtgtccaggtcttggtttgagttcgagtttgggttcgggttctggtctgattcccaaatccaaacactgactatgggtcaggtccaagcatcgagtcccggatcccaagtcctgaggtgggtcctaggtcatgatttgggtctcggccaggtgccggatcctgatccaagtttcgaggcccaaattttggtcccagtttagggtttcaatttcggggtttgggtcccccatctatgtccaggtcctaggtgtcgatctgggtccaagtttgtgtttcgattcgtgttcggatcttgagtcttggtctgagtccaagtcttggtttgcgtttgggtcccactcccagtgtggttctgagtttcagatcctaggtccgagtctggttcttaggtcctgggtccagccgtagtttttgggtctgggactgggtctggctctgggtcccggtctgggtccaggtcccgatctttgtttaggtcccaagtcacaggtcccaatccgggtccaagtctcggtatgggttctagtctgagttttggtttaggtttgggtcctgctacttcccaggtctgcgttctagtccttgacctggtccgattcctattctgattctgagatcgggtttggatcccggtctgggtctaggtctcgttctgggtacggatccgggtccggatcgtggattcaaacacttactacgggttaggtcgaagcctcaagtctagattcggatctcgatcttattccagtttatgtcccaggtcttgggctgcgtcctatgaatgtgtttgggtccaggttcggggttgtgtccctgtagtcaggtcttgggcttcgggtacaaggttgtgtcccgtgtctcgagtctggggtcgagttttgggtctcggtcccagttctagggcccagtttcgggtctaagtcccccatctaggtccagatccttagtccaagtttggttccaggttcgagtttggggcctaggtcc

SEQ ID NO: 356086 - DNA, 559 bp, Cannabis indica
ggctgcgaggactcgttcgactcgtggttcggtaagcaattaataaataatttttttaattatctgattgcttgattatttaaattgtgttaataatggaattgtgtgggaaggattatgatacatgaaatacttatcagtattgttattacccgaaatgtgaccgtaggtgtatagattatgcacttgaggcagactggtagaggtaactgcgagctagctgggctttgggttgctggtgatggcgagaaccctccaccacaaccaaactaggaagagttatatgccgcgatgcaagagactatccgacagtagggtgacaaaatctgagaactgagaaagcactgagctcaaccttctctaaactctaatcctgatcctctggcatctttggtagtgccaccggatgtcgagaattgtttggaaccgttgtatgagcagttcaggaagcaaaaaccgccagtctttgagggtggtgctgatccactcaaggcagagcagtggatgagtatgataacatccattttttattttacgcgggtcaaggataatgaccggg

SEQ ID NO: 356087 - DNA, 613 bp, Cannabis indica
tttatttagaaacgaaaaaagtaatgaaaattcgtcctaattgaaaaaatcacagaaagcacaacaaaacagtagattcaatcaagtattatgaaaataagagagctaataaagaaagcaataagagctaattaaggcatatagagagacaatgttgtagttttaactataagaaattagacaaacttatctgaattagaccgaccaacatcctcgctcgcagtgctcatccaccccgtccccactgccacgatgaccttactgaaactttaacccctgaaaccacatttgaaacacatctcttttatgcatatatataaatactgacagtgtatgaaatgaaggcaattattaactaagaaagctcatggtaatgtgtatgcatatgtatagctaattaaaggccttagaataactctcacaacagaacacaacacaacacaagaagttagatcatggtatgtgtatacaaatagctaattaaaggccttaaactaagtctcacaacagaagacaacagatgaactcaagatcatggcataggtacagtatgtgtatataagtaaatgcatttaacaaacttatttgtggttatgaatgatgttgtctaagc

SEQ ID NO: 356088 - DNA, 632 bp, Cannabis indica
atactaaacatgtaatcacatatgcatataactatactaatcttacctcgtttcctaattcaagtgtttcggtcaacctgaatgaaaattcatgtgctgaacagaggctttatgtcacaatgtaaaatggataagtatttaattactctagaacacttctctaatgcccgaatagaacataggattttttttaccgaactataaagtgaaaacacccttataaaaaatacatagttcagctctaacttatatcccatatggtagagcttatcacaagcttaaaaacaatatatagaacgtctaaaaccgacatctgagtgtacagttatggccaaaatacaaaatttgattccttggtaaagtcccattttggaagctctttcgatcatggaagcttctccgatcatggaagctcctccgatcatggaagctctccgctcatggaagctccttttgttagcccaagatatgtttccaagaggggggcgaattggaaatttatactaatttcggtaaatcaaaacttttaacacaaaattaagcgattagccacttaatcaaataaaagcaagtaatatggcaagtaatatattatgacaaataatcaaacttgtaaagtaaagagtttaagg

SEQ ID NO: 356089 - DNA, 575 bp, Cannabis indica
gggccgggccaaagtgatgtcgggccgggccgggtttgtggcgggccgggccaggcccggcccgactcaagcatcagaatagaagaagacattacaagattatctctattgtcgatgttagaggggaaagaatagatgatcgagataaaattactgaagcttttcttgattattataaagggttgctgggacacataatacaagggagaaagaaggttaaggcaactgtaattgcagagggcccagtgatatcagatacacatgttgcaacattgatgacagagtactcaaaagatgagataaaagctgcaattttagcattccaggggttaaaagtccgggacctgatggctttgggagttttttcttccaagacaatggggagcttgttggaaatgatatatgtgatgctatagcctagtttttgaagtcaggtaaccttttaaaggagattaattcaactgtcattactctaattcctaagatcaagtgtcctaataaagtgagtgattttaggcctatatcttgttgtaatgtgctatatgttgggttttatgccctaaataaaacttatt

SEQ ID NO: 356090 - DNA, 661 bp, Cannabis indica
ttatggtgaaaatgcgagatttatactgatcataagagtctcaagtactttttcacccaaaaagatttaaatatgaggcagagaaggtggttgaaatcggttaaggattatgattgtgagattttatatcaccccgggaaagccaacgttgtggcagatgcactgagtagaagaggtcccaggcagattttcaccactgttatgatagctcctcaactggccttagagatggttaatgcgggaattgagtttgtagttggaaggttgcataacttgacactccaatctgatttactaaagagaattagagaggcgcagttagaagatcccaagctagtcaagactccagatgaggtgatggctggtcggcctaaagacttttcaatctcgaataatgaaatgttattgtataaagctcaagtttgtgttcctaatgttgatgaactcaagaaggaaatccttgatgaagcccacactacaccttattcattacatcctggaaccaccaaaatgtatcaggatttaaaccctacttttggtggtatgggatgaaaagagatgtggtagattacgtgtccaagtgcttaatctgtcagtaaatcaaagctgagcatcaaaagtcggcagggttattgcaaccattagcccttcttgagtggaa

SEQ ID NO: 356091 - DNA, 706 bp, Cannabis indica
tactaatcttacctcgattccgaattcaagtgtgccggtcaacctgagtggaacgaactgcacgacgatttacaggctcctaaaccataacaatcacaacactgataagtgatacgctaaatcacttcccggggacttaaattagaaactaaaagtttccctatcgataaaaagcatggcaataccctaaacaacataaaaatggaaagaactagggttcccaattttttccccaaccggtagaccggttctacaaccagaatttcggttctggaaaatcctagaagccccaaccggtagaccggttgctgcaggcttcactgaaccggaattctggttcagtgcaggagacactcaaaaattcatacctcactcaatttgatcccaaaccatgcaaaactctccagacctattctaaatacctcactaaacattttcaaagcatcaaaaccgagcttcatgcaaaaatacacaaatcaccatgtgagctccaagctttgagttcaaaactcaagcttggctaaaactcacttacaagcactaaaacctgctcaattcaccaaaaacaaccatattataaccccagaaatcaaacccaagcacaattaaaaaacacagcaaccaattcctcaattttccatagaaatcatagtttttgagttaaaaagatccaaacttggctaatccatctagcatgcatcaaacc

SEQ ID NO: 356092 - DNA, 976 bp, Cannabis indica
tgaaactgcgcctggtgtgcaagagactgggaataacagttccgcacaaagccagggcgttcataacacgactattccaccaggcatcaacgcccaaacaaccatcggagacgcaaccgaattgcaaaatctccgcgctacgctcagactcatgcagggtcacaacaatactttgcatcatgatcaggaagaattacgtgctgcagtaaacctagcgtttgacgaacagaggcgtatgttcgccgaatggagggacaaagagatggaggcattaagggctcaccatgctaaaatcgaagatcgtagtcggcaagctactgtgctgatacgaagagcctatcagactgtaggccagcaaatgtcagcgtcattcccctgggagaaacggaggatgacccgacgatgaattcttcccagacaaccaatggttagccgtgcaatccccggtcacgagttccactcgtgggccaagaggtaggcggacagaccttgttcgggaattcatcaggaggagccatgctcgacggatccacgcagaataatagagccaatccacctacaagaagcccgggcccatgacgaaagataccagcaaaagggacatgacgaaattttttcagttccatggagactacggccacgacaccaacgaatgttacaacttgaagcgggaaataaaacttctgatcaagaaaaataacctgcacttacagaagtatgtcaaagccaaccagggtcacaacaaccaggatctgatgcctccaccaatagatggacacttgcaagtcattattggaggcctgcacatcgctagagacacgggcaaagctcgagagagatatgcccgaacgacttagtacgagcaagaagaagtcatcctggccgtggaagagaggaaggccaaagttccacgcgcaggagagccagccataacattcaacgacgaagatgcaatccaaataagatttccgcacaa

SEQ ID NO: 356093 - DNA, 350 bp, Cannabis indica
gaaataaaaatattttctagttcaccgatcctggagccctaattggaggccaaaaatgtcacaccggttttagttagaattattgataggattattatgataaattgatttaaaaataccaaagtattttggggtactcagagtcgaccaaatacccttaaaatatagattttttaacggctaagaaataataagataactactattaataataaggtttttattaatattatattattatattattaatattatattattattaataatatattgatattataatattatttttgatggaaattattttaccaggatcttagatctacacacaagtatgttgattaaca

SEQ ID NO: 356094 - DNA, 607 bp, Cannabis indica
taaatctaggacaagcatctgtccacaaatgacccccactaaaactaataacagacttagctagtgcgtgggccacaccattcgcatcacgcgaaatggcacagcaagaaccaccaccaacagcagctaaaagagaaataatctcctcaacaattggtttaaacataagaatatgatcaggacaattaatccaagaacacacaacagaggaatccgtctccacacgcgtcaaagaaaaccccaaccgaaccgcccgcatcagaccctcacgtaaagccaggagttccgccaccgccacttgaaaatccccgagtgtaccccccgcccaaaccgcccacacaaccccatcacctccccgaatcacccccccaaacctcgcaaagcctcgccccggcgtgaccgccgcatccacagagagcacaaattcgccctccccgggcgggtaccaccgacctctcctcacaccaccacccccacccccaccccccctcggccacccacccccaccaccaccggcccccaacccatcggcagcagccaccgggtcacccaacactcgaccgcccgcactcacccccaccccatgaaactcctccaaggcttccaa

SEQ ID NO: 356095 - DNA, 917 bp, Cannabis indica
ttttatctgttcggggttttggtgtttgaccaaaccttttgtatgcactcgatggtaaattagcaacatgttagtaatttcgactcaatttgaattttgaaataaatatttttattaatttattgattgaaagtgtgtttgttaccgtagtaacttaaatcagagctatttgatctaatctgatcttttagcttaacatgaaataaaacaaattgcagaaattagaaattgtgctttaaatggtggtcatccgacctgagtactttttaatttttgtcaaaacctttgggcgtagtccgcccagcaggccattcacttaaaagtaaatgttctttcagtacttaatgtggtcgttcgacctggtactttattggtagtattttcttaaatgttccccgttccaataccgtggtactagaacaagttgcattttttcatcatacttacccaatttgtacgctcctgatttgagaactttgatcacctgatatggtccttcccagttaggtctgagcacacctgtcgtactgtctttggtgtttagaattactcttcttaggaccttatctcccacaaaaaatttccgagctttcacttgtttattaaaatactgagctactttttgttgatgggctatcaactttgagtttgttgtgattcgcttctcttcaatttcatcaagtgattcggccaggagtacgtgatttacttctttgttgtacgttaatcttctatgaaatggtggctcgagctctacaggtagcatagcttcatatccatattccatagcaaatggagtctgtccggttgccattttctcagttgttcgatatgaccatagaatttcaggaagttctttcggccaatttcctttggcatcttcgagttcttttctttagtgtatccttcagggtctt

SEQ ID NO: 356096 - DNA, 885 bp, Cannabis indica
ttttatcccggtttttagcaaaaaaccgggataaaagggtttaactaaagcctgtttggcacttgctattgttttatcctactttaagagagaaaaatagatttttaacttaccaaccaaacaaggcccttgatatacataagtcatttggagcttgtttggttggtaaataaaaattcaatcttgaactcattttttactatggatttttttttaatgttcaaccaaacagggcccttgtctaaaaatattatatactatttttgagatgccaaatccaaaagtgggataaaaattagaaacatatcttttatcccagttttatttttgttaaggataaaaagtgggataaaaggtctcatttcttgtagtgaaccctccttggacaaagccaccttggttttgggctataagttctggcaatatgtgtttaagtctcgagcaaaggatttttgtggctaccttgtatattacattgcagcatgctatgggtctgaagtcacttggagagttggggcatttgactttgggaataaatgtaagtgtagtgtagttgatttcctttaggatgtgtctcgagtgaaggaaagatctaactacatcacatatgtcccccttaattaaatcccaattatcttgaaaacagtagcttaaatagccatccggacctggggccttgcttcccggaatagcaaaaaaaagctttcttaatttattcatttgttacagcatgtaaagtcctttattggcaagttagttgacaaaataatttttccttttatggtaagattgttgtgcattcatattcggattcttccttataaattcggttcttagttgctcttttccttgtttgaaaagttgcactttcagctgaactttcct

SEQ ID NO: 356097 - DNA, 754 bp, Cannabis indica
gtggagattgatggacgagagagatgagaagaaagggagatcgagagaggagggtgatggtgcgggtgcgtaggtgggattttggagagttaagattttcgttttagggtgtgagaaatggagaataaataggtgagaataaataggtgggcatgtgggaaatagaaaaaaaataggtgggcacgtgagaaatgtggcgagaagtaggtgacaattttttaatggacccttataggcaacgatttaaaaccttaccgtcgcctatagtataggcgaaggttttaaaccgacgcctataagggtccattaaaaaaatcgtattttattaaaaaacgtcgcctattttgtttactaagattttaaaccgtcgggaatactaaatttttcctgacgattttaaatagttacttaatttttttagcgacggtccccgaaaaaaaatatttttaggaccgtcgcgaattcttatatttgtagtagtgcgtacagagaatacaaggtacaccctaaaataggcatatcattacctccttatagctcaatactaaaatcaaaataaaataactaaaggtttaattggataagaacattgataacttttattatatttttgtgatagtcagtagttccgtgatctgtaaggggaaatactaggtaagttgtgcaatcccacattgcctgaggaaggtgaagtgggatgattctgagaatgtgtaggtatggaactatacagttgaagagggcttaaatggat

SEQ ID NO: 356098 - DNA, 1067 bp, Cannabis indica
tggtaaaatatttccaacaccgtgaggggtaatcaaggagaggccaggcgatgttataatgttgccgcccacttaccaatattgatggtccgtgaagttatcgagccgggaacggcggaagaagatgagttgggtccccgtgtgggatccgaaaaaattgtagattccatggaggatgtcgaggaagtgccagtatgcgaccttgaccctaccaagatcctccggctgggaaagagtctagagccggaggaaaaagaaaaaataattaaagtgctaagggcagccacagatgtttttgcgtggtgccaaggagccatgaccggcataagcccccatgtcataacccatgtcctcaacattaactcggatatgccaccagttcagcagaagcgacgtcccctcgacccagtgaaggcggaagccttggagaaagaggtggacaagctactaactagtggcatgatccgaaatgtgtattatccagaatggctggccaattcggtgctggtgcctaaaccaaatgggacatggcaggtatgtatagattttaccaatctaaacaaggcctgcccaaaagactgcttcctcctaccgcgaatcgaccaaatggtggatgccacctccggattcaagctattgtccttcatggacgcctatgccagctacaaccagatcaagatgcacattgcggatcaagaatgcactagttttagggccgataagggggtatactgctacctggtcatgccttctggactaaaaaacgctggtgcaacatatcaacggatggttaaccggatgtttaaaggccttctgggatgaaacatggaggtgtacgtggatgacttgttggtcaagtcaaaggcatgtgcaagccacgcagatgacctcgaggaatgctttgaagtggttcggaaatacggaatgtaacttaacccgaagaagtgcacttttggggttaaatcaggaaagttcttgggatttattgtcagccaacgggggatagaggcaaacccagaaaaaattcgagccctcctgaatatgccttctcctaagaagcacaaaga

SEQ ID NO: 356099 - DNA, 224 bp, Cannabis indica
aatcatggaaaattatttatagctatttaaataattatttatactgttattattgaattctgaaatgcattttatgtcatttagtgattttcataattttgcatttccggtgcccggtaacatggaactcggtttgccccattactgttttgtcctttagtggactttatttagttaaattatatgtttattaatattaattattggctaaaataaaggttggg

SEQ ID NO: 356100 - DNA, 570 bp, Cannabis indica
tatgattttttgaagatttggaaaaagatgaggtgatcacctatcccacgcgcgcacggatggcccattccctcggccagatgcgtgttcggacaggattttgtccgagcaacacgcacaggggtgtctgatacccctttccaggcgcggaaatcctgctgggacactccaacaccgaggtttctcggccaaatctcattgtggcgcgtgcggatgtgtaggcaacagcatacctgtaacgccctaagtttttcataacttactaatttagttacaagcgttaaaatgcggaaaaaactgtaatgtcgcttttatttataaacataaaatatttcatatttgagctcagtttggacttaaaagacataataattaataaataaaaataactgcgacattaatttaataacactaattaaaataatggagcgtgccctagaccaccctcagttatatggtcctcagcgagttcacacacaagcctccaaggtctcacttgccaccggctctctaagttttagaaccttaatctgcacatggtaagtttgataagggtgagctactaaactc

SEQ ID NO: 356101 - DNA, 447 bp, Cannabis indica
aataacatgatgattttccaagtgctaaatagtgctctcttaattttgaaatctatcgaatcgtacttctaaactttgacatataccaaattgtaatattccatctttaagccgccattgtgtactcgcacgtttcttgaaaaacttcacaggaggtcacccatcctaaaattatcccaaatcaagcacgcttaattgtggaatttttccgtgatgagctaccagaaaacaagatgcaccttattgatattggcagtaccaatcaatcaattgatgctctcttcagctgtatagtcccaaacctacacagtctcagaatcatcacacttaacattctctaagcaatgtgagattggatatcttacttggtatttttcttgttacaagtctccattgagcccttacatccacagaatgatctcttatcaacgaataagaccaacacga

SEQ ID NO: 356102 - DNA, 835 bp, Cannabis indica
tcatccagtgacttcgtgggcggtatctatttccatgatcgcctcttgatttattgttgggtgtgccaatacatccactggaattacatcaagtaattcggcttctctagtcgaggccaaacgggccaatgcgtctgcgtgtgaattatgagcacgcggtactcgagacacgactactttcttgaatttttgcatcagttcgcatacaatggctagatacttaaccaatctcccgcctctggccagatattctccattcacctagcatactacgatttgggaatcgctgaaagcctgtagatactcgattctcatctcgagagcaagcttcaatcctgcgattaaagcctcatattcgacttcattgttagatgtagaaaattcaaaacgtaaagcagcgtgtaccttaaaattgctgggactaatcagtaggattctaccaccagaaccttcgctatacgaagccccatcgatgtacaacgtccatccttctccattgggtacagaagtgtcaaccttgtcgtagatgagtgccactttggtgcttgggaactcgaggataaaatctgccaaggcttgccccttgatcgcagtcctcggtttatacctgatgtcgaattggcttaactctactgaccatttcaacaatctccccgacgtctccggttttgctaagacttgcctcaaagggtagttcgttaaaactgtaatactgtgagcctgaaaataaggtcgcaactttctcgatgatattaccaaggcgaacgccaatttttccatttgaggatagcgggtctcagcatccagcaagtgtttacttacatagtacaccggg

SEQ ID NO: 356103 - DNA, 1231 bp, Cannabis indica
cgcctaagatagttagggtgttacatatacttagaactctcaagagatacaacttgaggaaactgaggaaaatgtgggggtacaacctgggatacgtggaacatcgaacgaaaattgccaaccctctcttcaggttcaacagaaagaaattcgcatgaacccatatagggacaataaggtgaaccaaaccttaagcggaagagcaaggtccaatcgcagtcacgacaggggtgatctacgggagcatctgaacttgaagaagcctgaccttcgtcaacgactcagtccaaaacaaaatgattcactctatttgtgaatggacgagttggagaataagttcaaaatgcatcaagtcacgaaaacaggaagacaacttgggcatgaaactgttggagaacttgattcggaagcctcaggatcaaagtgaaaagacaattccaaaaggctacccaaggataagaaacccaacaattataaccctctttatgctgaatataccgagttgagtgaaactcgggaaaatatctacctcgcacaagtacaagaagccatttttagcgagccaaaacctatgaaacatgcgaggcctataaggaatccaactaaactgtgtgaatatcatggagctattggtcataccacggaagaatgttgtcagctgaaagatgagatagaaagtctcatatcacaaggacgctttcaacgatatataaaggggcaggacgatgtccatgatcagctcgatctgcccaataactcgagcgacccaagattataaccctcctttgtaagaggaagggacacctcagttatctcaaaagggagcgattcacaagaatacaaggggcagttactccagtgaaacaaatttgtaaaagaattgcgacctgattagatattggctcactatggttgccatatcaagctaccgcgtggaaaactggacgtcaaccagtagcagtcgaagacaaaactaaaacctgaattactttacctggaaccccaggatatgtcagagattgaccatatcgaaacaattgtgggagtatgttagggatcgaccatgaacatcaaaacccgttttatcaaaaccaggtgctcttggaggattgataaaataagcgattaaactggggaagttcttttgagattaatgattgtaaatcacattgctaatgaaatattttgaatttcagttgtgaataaaataatcatttctttcaaacaagta

SEQ ID NO: 356104 - DNA, 511 bp, Cannabis indica
tgcctcagcgattgatttgcttggttaacgggtggaatggcaccatatatctggttggaaccatcaggtatgacttctcttgataaatttactagacaagatctgcccgcctatcgctaggcccacgagtggaactcgtgaccggggaatgacattcagaggttgctaacctacagtttgtctgcccgcctaccatttgcactctgggaagtattcatcgctggatcttcgtttgtctcacccaggggaatgacattcagaggttgctaacctacagtttggtaggcttatcgtatcagtacggtagcttgccgactacgattttcaatctctgtatggtaagcccttaacgcctccatctctctatctctccactcagtaaacatacacctttgttcttcgaacgcgagatttaccgcagtgcggagctcatcctgatcatgatgtagggtattgttatgaccctgcatgagtccaagagcatcgcggagatttcgtaactcagtagcat

SEQ ID NO: 356105 - DNA, 620 bp, Cannabis indica
atgcattgatctgagttggctactgtcccctaagtccacattcagaatgtagttgttcacttgatcgtaatagccagttgacctcagcagatgtggaaacagctgagtccaaggtagcatgatgacatcaaactctgcgtcggtggtgcacgctaaatcattatcgtacacccgaatctgccacatatcaaaatctacctcaacaacaacccaatgtttttgataatcgaagtacaggacgaagtatatgaagttctgatccttccaacatggcatgtaacggctctccatacccagatagtactggttcactgcatctggccattcaaacgtacttctgtcaccagtctcgcagccccaaatgcctatgaggaattgtggaagtgttgtgtccaaaatcacacctggctgagggtacaactctggaaaatgaaggcgtctcctcctcatcaagtgtgatatggcatctatgtgctgcataaaaataagagaagattaatcaaagtcgtaaataaagtcgcgacacgtcgtgaacaacgtcgtgagaagaatttaactagtgtcgcgacactctcgtgacaatgtcgcgacatgtcgttaaacagaattgagtaaaaatg

SEQ ID NO: 356106 - DNA, 772 bp, Cannabis indica
aagaagcattcaatcacctcttgggacaaattgtcgagtgattttaaaaaagaatttcgtgctgccaggtctcgaaaacctgaatgctcttccttggccaatgtaaaacaacaacccggtgagagtctaaaggcctatattaataggttcaacatcgaggcggccaaggtgaagaacgttgatgacagtgggagactcatggccttgggggcaggcataactcatggatctttactatgggatagcctccaagggagaggtgcccccactattgacgaatttatgaaaagggcccaaaaatatataaacattgaggaagccaggttagctaacaacctgcctcttccctcaggacaacctgtttcagctactacaacaacaacttccaccaatccaaaagcaacaactgccaaccctccagccaccaataactctgggcacaataataagagaaagggcgacaatggaggagatcagaacaatgccaaaaagagcaaaggttatcagtccatgttcacaatatactccgaacttgtggagacacaagaaaccatatatgtggcaaacgaacatcgggtggcctttcggatacctgaacccttgaaaggaagtcgtgcgaagagagatccatccaagtattgccaatatcataaagacattggccataccaccaacgagtgtcgaaacttgagggatgagatagagaactctatacgtaatgggactcttgctcatatgcaaggaataggcagtacaaccaacaaggagcaaa

SEQ ID NO: 356107 - DNA, 565 bp, Cannabis indica
tatttttcttttttttttatgatttaaatagatttaaaaattattctgtattatttttaatatttaataattattacataaatctgacccctcatgttctactattcatcttcttcttctagtatttttttaagcacttattgtgaagtgtgtggtttctattttttttttcaaatttgtgcagtttttttatttttcatcttaaacttccctatacatttcccacatttttttgttagaattcttctataaatattgttttttctcattaacaatggttcttacctgatcttcctcccctgttgccaaaaagtccccaaaacaatcccagaaaaataaaacacgagcatcaatggacaagaagagtttgaaagataatcctcctagccatacttccccagttcctgctaaaagaaaactaggtgatggtacttcgaagagcactaaatcaaaataccctcaatctgtgttggagaactccaactctgattttgagttggagctagaattccaaaaacttccaaatctgataagggtttttttctattgatcttgtgttgtttta

SEQ ID NO: 356108 - DNA, 638 bp, Cannabis indica
aaaaaaaaaattaagaatataattaagtatatgtaaaatgtatataatattaatatatgacaacctgttccattagttatatattgtttaataagcttattagttacattacttatattctcaacaatagcttcccaaccaattagctgcgtatgtcataacatcataaacccttaagtgatgttaacatcaaatttgcaatataaaaatgtagagttttattatctgaattaatttatgtttattgtaataattcctcttaaactatacaaattcattataaataccctttcaaatatttaaatttttaaaacaatttatttatgccgttgtaagttatagctatagtatgagaatttatttaattaacaggtttaaactaaactaacatttaatttattgatattaaatataaaaatactaactttaaaaatacatatacatattcttatattttattattagattgttatttatgaatttattttactcttgaactcagtcagattaatatatatatatatatagggatatgattttgtcccgtgatgtacttttacggaatgtatttcgtggtacattagatgggtttcagggtacattaaatgagtgtccgggtacgtttttactttttaacc

SEQ ID NO: 356109 - DNA, 1104 bp, Cannabis indica
tgaccagaccaatcacaaaacttttccaggcaatgccacataccccttgcttcttcaaggtttgccctgccaacaaggatcaaatcatcgacaaagaaaagatggggagtttggggccctctctgcttagctttataccccttgtgcaaccgtatcaagggcgtgctcaaggatgcgcgagaggatttcagcagcccagataaagatgtacagagatagggggtctccttgtctaataccacactccggggtcaaactattaaatttccttccattgagaaaaaggttgatagaagttgtgatacattggcatacccagtggcagaacttgtcaggggccttgaaactacgcataacgtggtcaataaattgccaacttagtttgtcgtacgccttaactaggcactcttgccaaggaaggactaagacgtttcgtgccgagataaactcgaggcaacgcattccgagataggccaaaatagcttaaattcgagataaaccaagaccataatcatcagagatagctaaaaagttttccaatggaagaagtatgagtcggacccaaggaatgacgtgtaccctagacaacactcaagctcgagtaaagacactactgctcaaagccgagataggttgggctcaaaaccttatttcggaacaggccgaggacaatctcagatcaaagaaaggcaaacctaacccttcgccgagataagacatcccactagagaaaaggccgccttagacagactaatattaagaaactgtagacataatgccattctaaaatactgaacaaaaactacatcaaataagacaaaacatggcctaaaaacgaaataaacaaaatttagatatcaataaatgatggaacacaactagcaaggacaagtgtcaatcagagataacaaaaagaaactaaagacgcgtgtcaatcgtatgcgttaaataaaaatagatcagccatgcatgcaaaagaacgtaaaacataaaaaggtagggttgaaaatttagacccgcaaacccaaaaacccgcccacccgccccgaccgctgccaaaaaaacgaaaaataaaaacccgtatggtcgggtcggatctaaccc

SEQ ID NO: 356110 - DNA, 483 bp, Cannabis indica
ggtttgttcgattccatctgggttgtggtggatcgattcacaaattcttctcattttctgccagttaaaacaacctactcagtggaccacttagaagaattgtatgttaaacagatagtaaggcttcacggggtaccaaagtctatagttttagaaattagcagatatttaaggtttaattatgaaaattatttatagatatttaaataattatttatgttgttatatttgatttatgaatgcatttttatgtcatgtagtgaaatttcataattttccattttcggtgcccagcaacatggaaagcggtgtatggctcagtagactcacaacttagtatttctagtttagtggggcggtattgttagacattgggaatgtcgggatttgtcaagaatttagaatttcccaaattaccccttagtaccctttatgttatttttgtgtggaggggcaaaatggtcattttgccccatttgtatt

SEQ ID NO: 356111 - DNA, 646 bp, Cannabis indica
tcaaagggaggatccgagctggcaaagagtggctctgagcagatgtaggctcctaccccaccttcgtcagtgctcccggaggccaagagaggcaaggtgatgctcactcattacatgaaccagttggttcctgaggtgagtgatctgctggccggcgctgacactgaatcttccttggagctgctgatgggagaagtcttgagggaatttaccagggtgagtctttcttgacaattttctttaatccttctttacttggctcggattctaaagtttttcctttgtgtaggctggtctgaagtttgcttacacctactcccgagctaagtctgccgcctccaagaatgctgccatgtccaacaccatgagggcggtggtggacttggccaggaaggatgctgatgatgcccgggtggaactcagagttgtccgaatggagctgggtgaagtcaataagaagctttttactgctgagtgaaaaatagtggagttgactaaggacctcgaggcttctgaccaacttgaagctatcatcgacaccttgtcggcagaagtgaataaccttcaagaggaaaggggagttcttcggactgtcttcgtcggctggaagaagaaaaggaaaactaaggaggaggagcgttacagc

SEQ ID NO: 356112 - DNA, 625 bp, Cannabis indica
aactaggacagggacccaagacctgaccccaaacccggacttaaatctaggaaccaactcgtgactcgacacacgaaatggaacctgaccgagacccgagatcaggatccagatctagacctggggcttggaccgaacctgtagtcggtgtttggatctgtgacccagcctctaactcgaacctagactgggacgcgaaactagacgcagacctcaacccagtcccaaatcgcaacctggacccaaacccgtaccttgtgagccaaaattagaaccgaaattggaagtagactggtacccgggaacaggttcggaaccaggacttggacttggacctggaatcgtaatcagacctagacctagacttggaaccgtaaccgaactaggacccaaactccaacccagacctagacccgaacagaaacccgtacctagatcccaaccgaaacctaaacacgatgccgaacctggacccgaactcagactcaaacatggaaccagacttgggacacaaaattagagccgagacctagaaccgcaccccaatgtcggtcctgaacttgatttgggactcagaccaggacccaaacccggcccctgacccaaacctaggacccgaaaatag

SEQ ID NO: 356113 - DNA, 566 bp, Cannabis indica
agaaatccctattgcaactaacgctgcaacctaaattgcaataaaaatcgtatagaaaaccttattgcaactagcgctgcaaccacttttgaaacccaaaccgtaattttgaaaaaaaaaataaaaaaatagtatatggggtaatttcccaatattttatataaagaaatttaaatttaaaatattataaatattttaaggggtaaatgccataaaaagcccttgattgacaaacgccactaatgttcggacttaaactataaaaagctctaaactcaatttctaacccaaaatgacctcaatttcagcaagaaaatatcggaactagtcccatacccgataacaatcctatgaggtcagaactttcataactattctaattcgcaaaaccctatacgaaactaattgttttaaacttaaaatggaattaaactttaccttaagctttcccgctccgagaattcgctatcctgctactactgaatcttaaatcgctaggttttaggttaaaattcgaagaaaatagataagaaaaggtaaaggtttgtcaaaggacgaagctttat

SEQ ID NO: 356114 - DNA, 654 bp, Cannabis indica
acctaaacctagtagttgcctataaatagaaagtgatggctcagtcaaaaataagcttttgtcaaaaaatcaaagattgcctttttcagaaaaactgagccttccactttctctttctatagccgaccctacctctctctcttttcttcttcacaatttcgaaccctctagtgatagagtagtgcccacacacagcaagtggtacctcaatcatagattggaagactgtgaaggatcacacacaaagagaaggacattaagttcatatttagggtgttacacaacatacttgtgagtagatctaagatccttgtaaaataaattccaacatctaaggcataaactttctcttccagcctcgccacctcagccataagctcctcctccttagacttattctcctcttccagctgaggaggacaaatcgaagggacgtcctttcatcttgaaggctatgcacttctgcagataaggtctcaatggtctcttcaagttggttagaagcctcgagatccttagtcaactcggttattttcttttgagcagtaaaaagcttcttattgacttcacccagctccatccgaatagctccaagttccaccttggcgtcatctgcatcctttttgcccaagtccacctccgccctcatggtgt

SEQ ID NO: 356115 - DNA, 715 bp, Cannabis indica
aggaagcatattagtttataattgtttattttatgcgttgccttgaaatctacaagagcggtattaagtttgtttgatcgctgtctaacctacatggcttatgggttcatagactacgtcctatgaaatggacgcccagcgaaatacaagaagtcagggtaatagggtcgagaccggaggcggtcaaggaaataaaattccttagaatccttgtggtcacggtagagaccggcagggttattacaaccattagcccttcctgagtggaagtgggaggagattgcaatggatttcgtggttggtttgcctggaaccacgggaatgtattattcggtatgggtcatagtggacagattcacaaagtcagctcattttctgccagtgaagactacctacacagtggatcagtatgttgaactatatgtaaaggagatagttcgtctccatggagctcctaaatccattgtttcagatagggatccaaagtttacatcaaaattttgggtgagtcttcaaagggctatgggtacaaagctaaaatgtagtacaacttttaaccctcagactgatgggcaatgaaagagaactattcagatactagaaaatttactgtgagcctgtgtcatggactttaagggttcatggagtaagtacttacctttaattgaattctcctacaacaatagtataatatccagtttatatacatatattg

SEQ ID NO: 356116 - DNA, 940 bp, Cannabis indica
aagtacttaccaccatgcaaaaaaactatcattgcataaattagctaccatgattttatttaaatattagaagtgatataaaaggaaattcgtattgcacattttattgtagtagaatcaacaaatacatcataaacattgattttaatacttaacataaaaaatttattagtttattataagtaaaatagcaaaaaaaaattggtaaaatgagtacataacatgattttagtatacgaaataatattttttggacaaaatagtatttttttggacaaaatagttggccgaaccgccgtaggctgtttaggatgagtagaacgcgaaaaaaacccaagttaaaaaaatcgcctcaaacggacaaccgaatcaaaagttataaatgttcaaagtttccaaaaaatttcacgcaaagtttagccttcatttttccattattttggtctttacattattatttcattttattggtcatgaaaaattatataaaaataagtgatcacattactaaattaattaaaaattattttttgttatgacattcaaaagttactaagtgctcttcactcacctcactttctgcaccccagcacatactcgaactcatctcaatacgatacccaacgttgaaattataaaaagttacacattatttattattcaatatactaattgttatacaaaatataacttaaaaaaatgtaaaaatgatactaatatactacaaaaatacaaacacataatataaaatagggtaaatattattttagaccttgtgttttgtaaaagttaccaattggacactctgttttgttaaatgacaaaacggaccctgtattttctaaaattgtacaaatatgaccctaagctcaattttcaacaattttattttctaatataaccaactttaagcaaatttttaacacgaacagatacagaa

SEQ ID NO: 356117 - DNA, 856 bp, Cannabis indica
tttaaaactaatattacgtggaccactaaaaattttccacgtgtacaagggtgtacatacacgtggatattctaccgtgacacttagctgtgatttttggacggaggtgtacagagcaaaacagaatcagggtttaggtagttatgccgccaaaagttcaatttttgtggttctgttacaaaccgtaaaattcaattggtttagccgccaatatccctataaaaattaattttataactaaaaatatctacaactaaaataaaatttaaaaatataattaactatatatattgtacataatatttttttttgaaacaaagattgtaattttattaatgcaaatcaactattaaaatagcttccaaaccaatagagacaaaccccttactgggaagacggtcaggacatgaaccaaaagaacgagctaaccaattagccgttattacttataataatatagaatattgcactaaactccagatctaaaatcaagaaaaattagtactattcgacacaggttcaagactttttgatgcattcaaactcgaaattcagattcaagcagtacaaaccaagacacattaagcacatgttcaaccattaaaatggagaagaactacgtttaagatgtcaaacatttaaaataatatattatctcattatttgtggattacagtataaaatttcccttattttaatttaataaataataactgaaactactaattaagggtgatgttagagcttgaaagttgagatgctaaatagtaaatagaaagtagcaaatttgaaataattttttctcctgtaacttgtacatgtagtaaatcgtgctccctgaacttttttggccgtt

SEQ ID NO: 356118 - DNA, 976 bp, Cannabis indica
aaattttaaaacatgcggtgcggtttaaatcgcggtttaataatttataaaccgcaaaccgcaccgcaccgcgtggtttggaaaaaattcaaaccgcaactgcaccgcgaagaatttcaaaccgcatttttttgcggtgcgggcggtttgatgtacacccctaccccggggtgctcaaaatcaactttctctaattctgattctgatgcctcaaatatttctgtggtatgtctagttgatgtcccaatgcaactttcgacccatttgccctaagacggtcctagagattgaaaccctagttgggaatgtgaacttggggaccgggtgaaaccctaggtgcccaggttggcttccaggtcgtaggttcatataatttcatctcacatggcttggaataggtttctccatgtcttcatggtacataatactgaaagaaagtgagttagattcaaattattgaagtccaaactttcatcctagaattctcgaagtcaacctaagcgtagggctagagactcctcccgattcgacttgctatgactcgggactactcaacttcgagatgttatctttcttgccacgtgtcaaacattgatgtccacgtcatcatggctactcttggtgttaacatttacccctaagtcaactttacacttgtatgaggttgacttaatgacgtgaattaagctcgtctctcttaaaactaccaagtgcgcatcaatttagacaatcttggacaattgtctctgttcttcaagcattcccactgagagtaggattttgaatccctattccctgttgaataatggattttgaaattttaagttgatgactgattgagtgatttcctttgatttaagatacttttgaaatgtgtcaacattggactatcaacacttactctgatctttggttgttgtcttagcattgactctcttgtcacactgtctatttatgtgaatattgatgtagtctt

SEQ ID NO: 356119 - DNA, 827 bp, Cannabis indica
ttccaattacacagttacagtgtaattatatggtcagacaaacatgccaaattatataattactacacacaaattcaattacattggggctttccaaatgcaccataaataacatttattatattatgtttattacaattatcgagaaaaaaaatattatgtttattacttacttattttagggaaatttacatgatacagatatactaacttttgctttttttttacaaaaaaactgtcaaacggtattttttaattttttattgtatttttttataagtttcatactgcagtatattgtgttaagttttcacaggtgttttttagttgttctactattgttttgagttgttctgttttgtgttttactggtgttttataaaaacacgagtatttttgaaaactttttcgtgtgacagtatttttataaaaattaattcaaattctaattttttttttgtaagtttccctttattttattcttatacttactaacatatttacattttgaataatatatattttaataatatttaacaaagtatataaaaagttcttattttaattttaattatcattatttttaataatattatattattttctattaattataaataaatatttaggattttttttatttttacactttcaaaataatttttttttatattttttacgaacaataatccctatagcaattaaaagaacaacctaaatcccaacccgaaatccgtatagcaactcacatagaaatcaccagagcaacttaaaactgtaaaattttaaaaaaaaaaaattaaaaataatagtatatggagtaattt

SEQ ID NO: 356120 - DNA, 667 bp, Cannabis indica
cttcattgttcttcaccattctaaaccttgagtgaaagagtgacgtgcccacacatagcaagtcaagtactgaatcatagtgagtaagacggtgctaagcaaacccgaaagagagaaagagatccaggttcagatcttgataatgctctgcgacataaaggaatcaaaagctagagatcttgaacagaaggagtcattatattccgctgcaatcaatgtaaggttttttgaaacccttatgtgtttaatttcattattttagagaattcatatttaggatgttaattaacatacttgttagtaaatctagatcctggtaaaatattcccaacactaacttcacaacgtatccattgtgtgtgaacgtggtcagcaacacaacaataggcaacaatccatcattctttgaaatgagcaactcattagttgcacaaacaaatgcaatagcaacaatgatagacagtgcaccatcaacagaagaatcaacaactcaagaacaaacaatgcaaggcacaatgctggaagatggtgaaataatgtttaacttcatggactatgcaaaacttgtggagaggaaatagttgagcaactagaaaacaacccagacagagagggaggaatcatagattatgacgaactactaatcacagatccacaacatcctgaa

SEQ ID NO: 356121 - DNA, 672 bp, Cannabis indica
cacagatccacaacatcctgaaacagaagaagcacaattatacaatgacaaagaaacactacaaagtgtgcttagtttctatgcaattataaataacttccaatacaaagtctaaatgtcttgcgcaaaaacatacaaaagttattacttagatccaaagtacaagtggacactaatggcatctagcaaacgaaccaaccaagtctttcataatctgtaaatatgatagaaaagtgatacacacttgtgagctaaacataagatttgcagacaaaagacaggctacaacaatgttgattggaaacacatcaagccaaggtttacaaatataaaaataactcaaacgccataagacatcagaggaaaaatgaaacgtatggcgtaaaaatgtactacatgaaagcatggagaagtaaagagcacacgcatgaagaattacgtgaaaaagcaaaagaatcataaagtctgctgccaagtttttttgcacatgccgcaaaaaactaatcctggagggacattgcttaaatcaacatatggagggacattgttctcagcttgtacacaagatgcaaatggacacattttccccctagctttttctattgtggattcagaaaataacaactcatgataatggttttttacaaaattaagggaagcatatggggtcag

SEQ ID NO: 356122 - DNA, 480 bp, Cannabis indica
atatatatatatatataaatcatatctcaagttgggtgaagtaatgaacctaacatgagtattagattagaagggtgtggcttaattaactcatagattggcgcctaccttaattattattaaaatacattatcatataaattgttaggtttgtctcttttgtgtcaaacttttctcactttttttttggtgaaaaatcaaaatatctttgtgtcaacttaatgtttgcttttataatctgtgtacttatcacaataaatataaggttggctatgaaatttagtgagaaaaaaaaaatacttttggatccttattaaaaaaatatatattgtattatttaaaattaataaaaaaatatataattttaaaagaagaataattttttttagtctctaaattagatggactctagatataggcctaaattgtccatggctagaaccaaacctgaataaatttaagggggtttttttttttttt

SEQ ID NO: 356123 - DNA, 750 bp, Cannabis indica
aaacaaaaataagtgagcaaataacactacttgtgataaggtgattcaaaattggtgagcaaaaatagccaccatcttgagggagaatattggagtctcacatagatcaaatgtaaaaatattatataagaacataaactactccactcatcactaattgattttgagatagaaccctataattttctacaagattcacaacctgcaaaccaatagcaaaattagcataatgtaaacactaaggtggcgtttggttggaggtaataaaatggaatggaaatgataattttcattccattcctttgtttggttgcattttaaagtatttaaatgacattccaatagaatgcgctttctaccattttagtagaatgactactctattttaaaaaagaaggaaagaccattccaatataataagagaaaaatatgcattttaaattttattctattttattcatattctaattctcatttccattcttattcttaaatttttattcctctcaactaaacatcacctaagtgatctaaattgaatgaataaaaaaaaaaacacaaacagattacttgattcatatcggagtcaatgtgacagtcctactccaataccaatgccttagttaattcacaatgatgaattgtgttacaaaactaactcgtctccacttgtagcatagagacctaattggtccaaagcaataggagccaaatatgtcacacatacataaagggaaatttacaaaaata

SEQ ID NO: 356124 - DNA, 489 bp, Cannabis indica
tgtatggagtatacattagattaagactgatattaatcttagtaaagatattatcatcatactgttgtatctttctaagtcaatatcactagttcatcttagttcaaaagatcttaatcctgacatggttaggttcaatctcaagagtattatttgtgttctttaagttgttcgtcaaagcctaccatttggttcgggtcacacgtacaacttgggaacatgatagtacaattgagtgggagcgctaatcgtagatatggaatctatagcttctatctacacatagaagtgaaatgatgatttccttcgagcttggcttaatagaaataaatggaagacttttatttcagtgattatattagtttttctgaaatatcatttataagaagctaagtgttttaaggataaaatacattgaggggtaaaacagtaaatttgttcttactcaatgtgtaacaccctaactaacttaggcgtattacgtgattt

SEQ ID NO: 356125 - DNA, 931 bp, Cannabis indica
atcttgatctggttgtagccggcatagccgtccatgaaggacaatagctcgaatccggaggtggcgtccaccatttgatcgatccgcgggggaagcagtcttttaggcaggccttgtttagatcggtaaaatctatacatacctgtcatgtcccatttggtttaggcaccagcaccggattggccagccattcgggataatacacatcccgaatcatgccactatttagtagcttgtccacctctttctccagagcttccgccttcactgaattgaggacatgggctatgacatagggacttatgccggtcatgtctccttggcaccacgcaaaaacatcggtggctgcccttagtgctttaattattttttctttttcctccaattctaggctctttcccagccgaaggatcttggtagggtcaaggtcgcatactggcacttcctcgacgtcctccataggctctacaattttttcggatcccacacggggatctaactcatcttcttctgccacttctggctcaataccttcacggaccatcaatactggtaagtgggccgcaacattgtaacattgcctgacttcaccttgattacccctcacagtctctactccagcttcctgggtaggaaattttagacacaagtgccggatagacgtaactgcgccaaagtccactagggccggtcggccgaggattgcgttgtaagcagttgggcagtctaccactacgaatgtgcagtatttaaaagtgctctggggtgtgtccggacacaaggtaactggcaacctcacttttcccattgggataagtgtggttccattgaatcgcgtgagctgggaaccgcttggcgaaagatcccagtttgtgtggcctatcgccgtgaaggcttctttaaaataataaattcacgaaactcccattgt

SEQ ID NO: 356126 - DNA, 765 bp, Cannabis indica
ttattttaattataagatcataaacttaaattttaattgagtgatcttattttgatattaaaatactaataaaatttagaaataatttagttaaagtttcaaatttgctaaccatatcatattttcaatcatattttcgaaatatattttatctattttaaaaaaaaatataatatttaaaatatatcttaactagaattaaaatttaggttgttaaaaaatatttaaaatctaacaaatttcataaaatatcctaaattctaattgaaattcaaatatttaacaaattttcaaatttttaatttatttaaaaaaattgaattaattaaatatctaataagataatataatataatatcttaatttaaaaattaaatatttctaatcttataaattaatgaattaaatataacaaaaaataaacaatttgaaaaataagatatttgatggctaggatattatcaattatatttaataattaaataaaacaaagtatcctaagtttgaaaattttatggttagaaactctaaaatttctattcaaaccaaaattaacaaacttttcaaaatttcatgttattttgccaaaaattaattttaattaaaataaatatctaataagataaaatgttaaaactaacgttttctaatcttataatttaatttaagaaatatcttaacctactttccagttatctgttacatgtttgttatgtttgtttatatatttatgtatttattcaattttttttttactaaacttat

SEQ ID NO: 356127 - DNA, 520 bp, Cannabis indica
cgcctaagatagttagggtgttacaccattagtttttaaaaagtgtttttagttttaaaaaacaaaaaacagtttttaagttatgaagccaaaaaacttctaagttatttggttgtgttttaaatttttagtttttaaaattgtgtttccaaaattgataataaaaaatttgtcatttaaaaaatttagtggtgtttgactaatattttctaaaaactgttttttatatttttttttactaagaaaaataattcaatattctacaccacgctacgacacaaaccccgaacttcgaatccaaactcggacccaacctcgggatctcggccccagacccagaccaagacctcgaccgtagacccagacccaagtacgtgtgagaaaatataaaaaaaatatatgttagaataaaaaataaatattatttttgaaaatataaaatattttgatattttcttattttcacattactacgaaaaggggctttatcttcgatttttgactagtctatctttggtta

SEQ ID NO: 356128 - DNA, 511 bp, Cannabis indica
tcaccaagaacattctctgtaagaaagactctcattaataaaaaagactcgtggactaaggctcattaatgccccaaccagatacaaaatctcatgcattaaacttcctacagcctttcctatatatcatttaatcggttgccgaaaacctcggtcaacattttggtgctttcattcagagctaagggaagtgtcttcaaatagacaataatcttataagttgaagtagcaatggtggaaactcgcaacacacgccagcccgtcctcctcaagatgcttaaaatcccgaagatgaggaagtggcctcaagagtcaacgttgattctgtggagcgagaagaggacaacgacgacgaatacgaagaaaactttaatgagtatgactcctacgacgaaggcagttatacagagctgctgctcttaagggaaaagctgctgatgatgaagttgagatcgcagcccaaaaagaacaaaacaaaaagatgcaagaggtgatggtcgccatgcaaaaa

SEQ ID NO: 356129 - DNA, 520 bp, Cannabis indica
ggaacttaccccatagctcattagaaaaaattatacacattaatttaacaattacttgcttatgacgccgataatataccaatgcgtaacctttataaaaaaaatatatatttttacttttctgcgtaaaaaggcaactttttagttactgatgagattataagattcataggctaccaataaattatattttcatgaaaaaatcaattttaagataaaaataatttaatatacattttagttacttttttgtttagttacttttaaaattatgtgttcacttttagattatattatattgttttgttgattataaaatttccacattactttctttttatcaacatttgtgttacctacaaacttatttaagaaactaatgtgttacaataaaataaaataaaataaaataaaataactacataacttattagtaagatttgtaaatatctatgttaccaactgttattttaaaattatattatggttcttaatatcatttaagatatatttttggtaa

SEQ ID NO: 356130 - DNA, 1158 bp, Cannabis indica
cccactaaacagcaaactcacgaaaagaaaaaaacgtaagtcatgaagggttttggttttaatatatatcgaagggaaaaaaattaatgatgcaatatactatacaataattatattactttcaaaagctatcaaatcattgatttaattgttaaaaaatataaagattacttaaaattctttcgctaattaggatttttgttcctgaactttgacatgtacctaattatgcccccagaacttttaaggtcgttaaaaataccccctgaactattgagattgttggatttaatgatttttgtctaatttcattcaattttactatttcagtgattgtttatgtactaaaccatgtttcccagactttgatatctaccaaatcatgcacttcgaactttgacatgtactaaattatgtccccctgaactttcatccatgttagacttttttactaaaattagaaaaaaagttcttcaatctaacaatgtcaatagttcaggggacatttctaataactgtaaaagttcaggggacatgatttggtatatgttaaagttcagggggcaaaaatcctaattagccaaattctttttaacttaacagtcatcactaaatttctcaaaaatctaaactttcttttcatctttcaatataatccgttaatggtaatacgtctctttccatttgaattaattaaattggtgaaaaagattcaactttcaaaaattatgtttataactaaaaggagtcgatcatgaacattattcatacatacaaattgaaagagatggaagtaaaatgagtttaattttaaatgaatatggggtgtaaagattaacccaattttggaaatacaaggggtgtagttataaaaaaatgaaattttaataaattaaatggggtgtaattaataatgggggtgtagaaataaattttgggagtgtaaatttgatacccctaaatcttattaaaatttttacattaaaaatataaaatgataactttatacctaaataccactacacggtaaactaaacatttatattcttcatctttattttattactaaacattttgtatgtggactgtatatatctagatatttatatttttttgacgtagtgattagaatcactcatgaatatatgatgcagatat

SEQ ID NO: 356131 - DNA, 516 bp, Cannabis indica
gtgtagatactgtgatattggagtataaggaaaaacatggcatcattgattccacttcatcaatgatattgacaaataaaccaccaatggatccatatatttcatcaacaccatattatatcctctatgagctacgaaaggcttctccccaggctcattatccaatgtcttatgttattggtgctgactttggttcaaactcatcgcttgccaagcttgaagacaagtacaacaacaattttcaagttatcttgcatgacgctaattatgggcgtcaaccacttgccgacgtggcgctcaagtaagtttcctttccttttctttaatgtcacattggggacaatgtctcactttagtttgggggtgacttaaattgacttaatttttttttgtttttaatttttaatgtttagtttttattgttgtgagtccatttgcttaatatgaattaatttgaaagtaggaagatatcatgatttgaaaagttcatttatttttcgaaaaaattcgtgtgct

SEQ ID NO: 356132 - DNA, 815 bp, Cannabis indica
gtcccaaatgtattcttggatagaggttctactgtatatcaattatatatcaaatgtggttatgtaacagaattattggtttaacagcgtttttagattttttacgttaactttagcaaaatatctcaattacttaacaacatatttttttttattaattttataaaattattatatatatttaaaaacaaacatcgtagatattttatataaaaaaaattaattttaatatatatttaatcataaaaattacatctatataatatatatatataaatcttaatttcaccgcaaactttttgttttaaaaataaataatgatattgttaaaaaaaaaaattgattaatgatatatacttcttataatcaaggtcagtccaaagttgaaatgggtcataggactaaaaaaaaagaatattggacccttactataaagataatgatatgtataataaattattaaaaaaatatatatatttttaaagggtatatggcggcaaaatccctaataattttattttacttgcaattaaccccccgaactcaaatttggacggtaaaaacccctaaaactacgatatcgttagcactttacaatttccatccaaatttgatagttaactgccatggtggattgtacacatggacatagtgtatacatggcacaattttattggtcaacgtaaataattatattaaaaaaataaaacaaaaaataaaaaaagatatattttttttctaccatatcatttttaaaaaaaaattaaaaatttatttctttgttttttttttcattttctgatttacctctctct

SEQ ID NO: 356133 - DNA, 755 bp, Cannabis indica
attcaatgaggccaatggccctagaatttttcagctgcaaactcaactcacccgtttgcagcaaggtgatcaatccgtcaccacatatttcacaaagctcaagtccatatgggatgagcttaaggaattccaaccgaacaccacatgttcttgtggtggaatgaaattgtttcttgattactacaatcaaaatcaagtcctacaattcctaacgggtcttaatgagtcttactcctctattcgggctcaaattttactcattgaacccattcccaatctctctcgggttttctccatgattgttcaagaagagagacaaagaacccttggttcctcatcctcatatctgtcttctatggctgcctcagctcgtccttcatcctctactaatcccaaccgccccaagaaaccaagaccctcttgcacaaactgtggcaaaccagggcactatggttacaagtgctatatccttcatggtttccctccgggatatggagataaaaagaaatctgagaaaaacaaagtctctgccaatcatgctactgtcaatacagccgaaaacacctcaagtaacaccacaattgatctttccacacaatgccaacaactcttatctcttctcagccaacaactaagtcaaggacagccccgtgaggactcaactactgctgatgccacctctaatttggctggtaaaaagtcttttttcattctcattcatggataattgatagtggagcaactcaccacatgtg

SEQ ID NO: 356134 - DNA, 485 bp, Cannabis indica
ctcgatcccaacaccaactacgggtcgagtccaggtccgggtcttgggtcttgagtctaggtctaagtctcgagtctgggtcctagtccgggtcttgggtctgcgtcttaggtccggttctcgagtttgggtcttgagtttgtggcttgggtctgggtttgggtttaggatccgggtctgggtttcgggtttgagttacaggttagggttagggtcccagtttgggtctggacccaggtcagggtctagtacaggttcaagtttgagtccaaagtcccgggtctaggttcgggtcccgatccaggttcgtgtctgagtctagcctgggtctcgattcgggtctgagtccgggtccaggtccgggtctgggtctgggtcttggtcccgagtccgtttcaggtccgagttcgggtttgggtgttggtccaggttcgggtccatgtctaggtcctggattcaggtcccgggtgttgggttttatgccc

SEQ ID NO: 356135 - DNA, 643 bp, Cannabis indica
tcctcttaaaatttgatttcttattctttataatttgtttaattgttgatcatgattgtttttcaaatcttagtttctttatgtctttggcccttatagataaataaaaagggggagtatttgagattttaattttgattgtatgctcaaggggaagttgaggtttatttgggattttaattttgattgtttactcaactgtccaaggggagttgaggtttgtgtttgtgtttatctttggtcaaagttagctttttattttggtttaatgttgtaaatttcatagagaatttttatatttgttttgttaactttattttgtaggtctttgttaattaaaaatattttgattatctaatgtgccaaagagggagattgttaggtctttttttggtattttagttgtcaaaatattttttaattaatgtgcaattttattgagcatttaaatagtttttattacatttatttgctcttttcttctaaggagagattccttctcaaatggtctctttttggtttaggaaacttcttgtaagagaaggaattctcttatggaaagttgtctaactttgggaaacttgactttccctttttttaatggatgattcggttttgcctttactagaacaaatcaaataaa

SEQ ID NO: 356136 - DNA, 1263 bp, Cannabis indica
ttaattatccattgttataatataaataatcaatgatcctctatagatgatctacatcgagtagggacaaatttatcgttctacccttcaatgtcttttatccttaagacacttagctacctataaaaaatatttcagtaaactaatataattactgaaatgagtacttcaccatttatctctattaagttaagctcgaaggaaattatcatttcacttatatgcatttatagaagctatagattctgtatttatgattagtgctcccactcaattgaactaccatattcttaatttgtaattattgggaagatccaattggtcaactttaacgaacaaatcaaagaacataaataatacaacctaaccatctcaagattaagatcattgatctaagatcaactaggtgatattgagttagatagacattgaggtaagtttatgatatcttatccaagttcaatatcggtccaattctatatataacaatacattcaattcaagtttactttaccaatgccctaaaaaaacatagcacttatccaaggtccaagtaaactatactagtggaaatcttgtgtattgataaatcgtaggactttatttaatcacataatcttgattactttccactgtgttgacaacacagtaatcaagaatatcaatgtaataaggatttagataaatttataaatcaaacaaataatcatgaaataaacatgtgaactaaataatacattaacaattaatgaaataatctttaatgataaaggaatattcaagattacattgaaatagagttttagttagggcacaaagcccaacagtaaataacaaaaaaattaacaacaaattaacgagagtacaatataaaaatacattaaaatactaaatttttgtaaataaaatcataagaatcataaaaaaaattaaaattctgtacaactgtattttcgtaattattttcttatttttgtgtatttgtgaaacaatccctatttgtaatcaccctattagaggaaaggggtaaataagtttgacctctattactcaataaatacgcattgtgtaacgccctgtccaacagggacgccacctgtgtgcaatttaataaaatacttatatagatactatataattatgccaaaagtgtggttaattaaattttgataattaaaaattaactatatgataaaagataagtggtattatgttgggttttatgccctaaataaaactccatttcaatgtaatctattttat

SEQ ID NO: 356137 - DNA, 539 bp, Cannabis indica
tgaaccaaatgacacattaaataagtgatgaaaatacttctatctctttattgataattaaatgataaagattacattgaaataacgttttatttagggcacaaagcccaaaaaactcccacttacactaatataaaacaatcagtataactcaattaattctaaattcagtcggtgcttttcagatacagtttcggccaaaactttggtgaatggatcagctaggctgtcctcagtgtccactttctccactaatacattccctcttgccacttactctctgatgatgtgatatttcctttctatgtgtttgcttctcttgtggttacgaggctctttactgttggctattgctccagtgttatcacaaagcaaaactagtggtttttccattataggaacaacatcgagtcctgtgaagaactttctaagccagacaagttctttagcagcctctgcgacaactatgtattctgcctccatggtagagtctgagattacggtttgttttgcacttctccaaaccactgctccacccc

SEQ ID NO: 356138 - DNA, 837 bp, Cannabis indica
cagtgtccattgcacccttccaaacatgggtgtttaagggcctgtttaaccgattctggttcagcaaaggttgataaggctttggatgaactaagataggttttaggtcgaaaaattctagcttttcctcgagtgaccatgggatgagtaggctgcaaagcagtggcaagtgttggttgtggttctgtatcaggttcagtacctgaagtggcaccagatgcagcaatctctggttcaggatcaggcacaccagcagggtcaataatgacattttcagttgaaccaaaaccaaattgatcatcaaaatgaccatatgcctcccctgcctgacctgaaataggactgtgattagtggaatacgaatcagtaaaatgtgactgaacctgtggtgatcgaggtgatgcttcagaggatgctgcaggagtggaatttacagaaccagaaggagaaaaatcagtagactcaatagaaggaacaggagactagaccaggttgagctatggattataacaggttggggtgtttggtagtttttgaggaagccctttttgaagggaaactcaagttcattgaacacaacatttttggaaatgtaaatacgacctgtgggagtgaggcatttgtaccctttgtgggagttgctataaccaagattaacacatttcagggagtgaaactgaaacttatgtgtttggtatggccttatgcaaggaaaacaagcaactccaaaggttttgaggaaattataatcaggtttttgattatagataacctcatagggtgactttgttaggttttatgccctaaataaaactctttacaatctgattagttatc

SEQ ID NO: 356139 - DNA, 506 bp, Cannabis indica
tttttgttttctgttttggagaaaatatgctttgctttctgggttcgggtaatttaaaggcttttttaggaatgtatgctagtgggtgtttatgaggctatgtgttttaggtaagtaaacctgggtaaattcgtagaatatgacctgggtaaaggcttttttaggaatgtatgccatgcatttaacggtgaagctgaccaggaggaggacagttttctccccacttcgctttctgaagaggaggccgctccaatagagttaggtccgatgtcttctgtggacattgagaagatggtgcaagaactcgcagaacctgggaccatcgatattcgagacagcgagtccacagtgtcggcacgcgactatcttatacattcgaggcatgctcctgacatcgaggtcgaggagatggacgaggaatggacgactccagttcgtgagtcaggtggggaagaggaggaggcggaagggagtgggacagattcggtcgacgattcccagctaaa

SEQ ID NO: 356140 - DNA, 520 bp, Cannabis indica
tcatttcacccgaacctttgggcatgatctgcccagaaggccatttacttaaagagtaaatgttctttagattttgtacttagaatggtcatccgacctggtacttttattggtagtattttcttaaatgttcctcattccaataccttggtactagaacgagtttcatgttttcgtcatactgtcccagtttgtatgctcttgattctaaaacttcaaccacctgatatggtccttcctagtttggtccgagcacacctaccgtgctttttttggtgttcagaaatactcttctgaggaccatatctcccacaaaaaattttcgtgcctttacttgcttattgaaatactaagccactttttgttgatgggccaccaactttaggtttgatgcagctcgtttttcttagatatcgtaaagtgattctgctaggagtgcatggttatcctcttgatcataggttaatcttcagtgggacggaggttctaattctacgggcagcatagcttcataaccata

SEQ ID NO: 356141 - DNA, 1341 bp, Cannabis indica
gtctgtccggtcgctattttctctattgtgcggtaagaccatagtacctctagaagttcttccgaccaattccccttagcatcttcaagtcgtttctttaaagtatctttaagtgtcttgttgactgcttcgacttgaccatttacctgtgggtgtgctactgtaaagaaactctttatgattccatggtttgcacaaaactcagtgaacaattgactgtcaaactgtgtgccattgtctgagactatcttgtacgggagttcgaactggcatattatgtttttaaccaaaaagtctagcactttcttagatgtgattgttgtcaatggctcggcttccatccatttagtaaaataatccactacaaccactgcgtactgtactccccctttacctttaggcaattatttgattagatcaattccccaaatagcaaaaggccaaggactttgcatctgagttagtttgttgggcggtgcatggggtatcttagaaaatctttggcatttatcacatttcttaacataggcttttgaatcttcaatcatagtcggccataaatatccttgccttagcattttctttcataggctttgcccagctgcgtggttaccacagaatccatcgtgtacctcaaacaaaagttgtgcagcttcttcttgtgtaacacatctgagtagtagcatagagaaccctcttctatacatgactccttctacgatgatgtaccatgcaacctttctcctcatcttccgagcttcatttctattatttggaagttctccagagttgaggtaggctgctattggtgtcatccagttcggagacgcgtcaatcatttcaatttcttccaagcaggtgatgctgggttctttaaggaattgaattgggattagattagccttatcagctatgttgctgcttgcaagtcaagccaacgcatcaacagttgtattttcttctcttggaattttcctaataacgtagctcttaaattgtgcgagcatgtcatgtattttgcataagtaggctatcattttctcccccaggcctcatactctctagacacctgatttactaccaactgtgagtcactgcagatctcaatgtgttcagcatgtagttcccgagcaagttttagaccgacaatgaggacttcgtattttgcctcattgttggaggctctaaacccaaatttgaccgccccatgcaagtgtttccccccaggtgtgacgagggcaatccctgcaccagacagttgatctgtagccgacccatctacgtgtaatttccaggttggtttgtcttcattgttgctcggctgaggttcttgtactggct

SEQ ID NO: 356142 - DNA, 684 bp, Cannabis indica
attccccaaatggtaaaaggccatggactttggagttaactcgttggcggagctcgaggtattttgaaaatctctgccatttgtcacatttcttaacataggcctttgaatcttcaatcattgtcagccagaaataaccttgccttagaattttcttagataaactctgcccggtggcatgatttccacataatccatcgtgcacctcagataaaagtcgtgcagcttcttcttgagtaacacatctgggcagtggcatggagaaccctcgtctgtacataatctcctctactataatataccgtgtagccttccttctcatttttcgagcttcatttcgattatctgggagttccccagtgttgaggtaggctgctattggtgtcatccagtttggggacgtatcaattattttgatctcttccgtgccagtaatgctaggttcttcaaggaaatggataggaaccaagtttgttttatcacttgcattactgcttgccaatcgagctaacgcgtctacaattgtgttttcttcccttaaaatttgtctgagaccgtagcttttgaattgtgcaagcaggtcatgtatttttcttagatatgctatcatcttttctccccgagcctcatattctccagatacgtgatttaccattagctatgaatcactatagatttcgatgt

SEQ ID NO: 356143 - DNA, 734 bp, Cannabis indica
cgatgaactaccacaagtactttcggtcacagaacaactgagaaaacagcaatagggcatactccattctcgctgacatttggctcagaggtaatgctgccagtagaagtcaatattgcgacccataggcaagatttctataatcaagaagaaaactaagaactctagaaattgtccttggatctgcttgatgagaaatgtactgaatcacaaattacaaatgcagcataccaacaccgagtgacaagatatttcaacaaaaaaaatgaagaaaaggcttttaaacgttggtgacttggtcctaaggcgagtgtttgcaaatacgagagatgcatctgcaggagtatataacctaaattgggaagggctttatgtgatagaagcaatcgtgggaactggggtttataaattagctcgactgaacggctcgctaataaagaaccactggaatgtggagcatttacgaccctactaccagtaaataatgttgtaatttatctttctgatgtaatattttgaacttcaagtattcataaagttgaattattttcaagtaattacaaagttttattctttaaaattacttgaggggcatatatatgtgcatgagcaactgaaaattatctggaaacacatagtatattgcgaaccccccattttaattttcttaacagtagcagttgtagatgagattcaactcataaaaacaacgataagctacatacgaagctgaa

SEQ ID NO: 356144 - DNA, 799 bp, Cannabis indica
atcttttaatacttctaagatgtcattgaaagagactttcccatttccatcagaatcatataccttgaaaataactaacagagaaaaagtgtaggaaaattagtacaccacctaaatatcagaagaagaggaaagacatcattattttatgttaagttaagccacacttactttcagctttctgatgaaaactagctttagtactgaatgcagataagaaagccacaaaatctttgaagtttaatccatccaccatttttagaagtctctgaacaaacccaaaaggtcatatcaaattcatgaaattttatgtttggaaatttcaaccaaaagtatgatttcatacctgagaaagtggattcattgcaaactcaggaactgataaaaactcatcagcagaaatgaaacctttggaatttcgatcgagttgacaaaatctttggtataaggacactatttcttgctgagaaactaaagggagaagaaaaatcagtataattataattaaacaaactcaaagagaaaatcatcaaagagagaaaatattaagaccccacatagataatcgcaatgttcttgaacttcttcaatgtcatattgagtcagcatagatgatgaattccccattgattttcgctgtgaaactacaaaaaaaaaaaaaaccccaaaatacccaaataatcatttaccgaagcaattaaaaaaaaaacccattaactgaaaaatccaaaaaaggaaaagaaaaatagaaactttactgcaaatatccacaccttgctagtttgaattctctggtttg

SEQ ID NO: 356145 - DNA, 975 bp, Cannabis indica
gaatatattaaatggaaatattattgaataattaattttaattattaaataattagatttggcatttaagtggttaaattgaaaaaatggcatttttgagaaaataagatgaaaattagaaaaatggtaaaattgcaaagtggggcccactatccatggacggccacttgggaagcaatttaccattttattttttcattattttaatgccaaataaatctaacctaaccctaagtggtttcctataaataggtagtgatggcctcaaaggaaaagatgatgcaaactctttccttcagtaaaattttgagccaccttctctctaccatttctcataaccaatattttgtagatatggtcaaacccgtttatctaaggtgttgagctctttcatgtgatatttgaatttttgagctatgtatgcacttcctgcacgagaaaaaggcttttcaaagaaccttgcattttttaatgttaatgttagattgttgagtaggtgatacacacaatatccatgttctacttcagggaagatttgttgggctgctttgattatactttcatatctatcagatataagacactgttcttgtctaacaccaaatgtaacaccctaagatttaggcacgctacccaatatgattaagaaaccctaatcccctaaacgggattactaataaaataagcgtggaaattaaactttaaacgaaaacggaatgaaaataaacctgtaataattttaaccttacaaacaaaagttaaatatttcgggatcccaaaaatcattttacaaaatattacaagtattttctccttagccgacctaagcggcaaaatagagttacaaaagtttcaacactggtagaccccaacccgcttggtctagtgtggcccgaacatgtacatacatcgcccaactcccatactcatggctgatcagagacagatttaccctttcctgcacagtagagcacc

SEQ ID NO: 356146 - DNA, 521 bp, Cannabis indica
tgtttcatgaaatgcgaagtgtcatacatcgtcaagaggaagagttgcaacgtttaaggcaacaagctgccccagttaatcaagggttacaccagctcctgtgccagtggtgggtaaccaagggtatattatgtcgcaccgggactctttgttcgagcagtttgtgaagctgcaaccttcgacttttctgggaggcattgatattattaaggccgatcagtggatgagcactgttacccgtatcctcgataatatagggttgacgggaactgatagggtgaactgtgcggcctttatgtttaaagatcatgcccgcgtctggtgggacatagtgaatcaaactcgggatgtcagtgtgatgacatgggaagagtttaaaaaactttttgaaaacgttgcattaaggacttcacaccaagaatattttgtgaagttgactcaggggaaaatgtcagtggccgagtatactctggaattcgattggttatctaaatttgctggtgatctggtgcctacagatt

SEQ ID NO: 356147 - DNA, 886 bp, Cannabis indica
ttctctaagccaaggtcagccttccaaccatccgagtaacaatgggctcatttttcgcgcgaccgtgtgcctcgtgcacacttacgtctctcgaacaattcccatcaagtcatgcttgcaagcatccatgagtgcatccatgcatcgaggctctctagccaagatactcccactgtctataggttctcactatgataagaaaaatcccaacaccgacactcaccttgtcactcgtgaccaaggtagcatgtgtggcaagatgccaacaccaagtcaacgtgccaacgcttctatcatgccccattcgatactgtcccaacagtctccctcgtcgcctaaggacttccataagtccatggactaattctcaaggtgccatgcctccacgaatgttggcaggcccccgagacaagccaccaaattagttgcatacgctagacttctgtctctttccaacattgtgcatccgtcccatgcgcgtatacaaactagccaacgaatgactactcgtgtcatcttgtgttgagactcgtggccaaggtgcaccacaacatctcttggaagtttaggccacgtctcatgcaagcggcataccagaaagccactagaaacgtacccattaacctctggcagcttcttaaacgcactaccgggtcggcccaataatgtccatgagtactccaactcatggagacatatgagtccccttgtggtcctcatatgcctgtcctactaatcccgctgtccagtagtagctcacttagcaccaaggtgccagggggtgctggagagctgacaccagggtaccctcttaaagtgcattctaagcttttagccttctactaggaacatacatgattttggctctgtagacatacgaccaaac

SEQ ID NO: 356148 - DNA, 682 bp, Cannabis indica
ttatttaatttacgtttagtacctcgtgattctacatgcaaggtttcattataggatgcaattgtttctagcaaataaatattttcataagaatttaaataaccagttttaatagatacatttgaatttaaagacaaagtaaactgattgtttccaaatgaacaagaatatccaaatttgtcacggatactaaatttcgtcaaaaagacggcacaacaaaagtgtctttcaaatccaaataaaaaactagttcctaataacaatatgaaatgcccaattgcttccccttccaccgattgtccatcgcccacaaagatgtatctttcaccatcacttggctttcggcagctcaggcaaccctgcatagaaacacttatgtgagtagtagcaccaaaatctatccaccaagtgtttctaagtagtgaaactaaattaacctcataacagaccaaagcaagattaatacctttctttacacgccatgcatgatatttggcacaatctttcttcacatgtccaggttggttacaaaagaaacaacccttagaatcctgttgttgtttcttttgaactggacccttagtagcttcattctcaaatttccttttcttgcccttatccttaggggtagttgccaaatgagcactttcggttttgtcatttttcaacctttcttcctctt

SEQ ID NO: 356149 - DNA, 847 bp, Cannabis indica
atgtagacataaagcagaaaagcttctatgaaagattcataacgaattatttttatggacgcatcagaagtagtgtttttgcttacagcatcttcgtacctactatagataccttcatttggtccattgaaaataacccagtgtggacctgaactcatacttgatatatgtaatgctaataactaaattacaagttaatttctctataaacttgatgctggattggaaaacgtctcaagtgtgttatataagtcgtggagaataaccctatagtacgttttttagttagctgtactctattgggatgtactccattgggcacatctgatgtgtcaaaagaggggtggttaaatttctgaattacacagttaaatacacgtgtaggcgtacgtagtatggtcaaatgtcaacattattcatcaatcccgttttcccaaaaaacctaatgtactacggtactgttctaacgtacaacgatggtttaattcataagaagatgtaggtgaagggcccattaatatcagcccaacatatataaatgcccaacatatataaatgggagaaactacccattctactaaaaaatgtcatcacttcaaccaaaaaaaaaaacatccttacttttcaatctttattttccacaaataaaaaaatgtactattacttttttcctgacgtacgaagtggtttaattcattaaaaaaggttggtaaaggcccattcatataagcccaacaattttaaatgttaccaccaacccatacaactcaacaaaatatctaaacccaaaaatcatacaataaccttattttccaattaatttattcaaaagtaaatgtaattgtac

SEQ ID NO: 356150 - DNA, 580 bp, Cannabis indica
acaaaccataataaacttataatcatagttcgacatttaaaatcttactaaaacaatacctgatgaacacctctgcagtactccaggatataatcctcccacacaaagtttctcctgggacccttgtgattcgtccatgcactgttgatcatgctggtaacgaatgtagagagaatgataccattttgaggaaatgttagtggatagtcggcgcatcgcctcctcagcatatggactgctgcatctatatggtgcatataaaggttagagaaagcagttggacaccaaatatattaattatagattagttgtaaagtaaagtaaaattgtaaattagtttacttacgtcatctgtaagccattcctgtagtgtcaacagcttccaaaagaacgatggaccgtaatcaccacttttcaaatcccgaagccagtggttgggaatgagttcagaatatcactttcggaaagtatccaacaatcgttcatccggtggcgccaggggatcaaacgtcgaagaaggcctctgtttcttcttcatctccgtgtagtcacgaaaccatacagggggatttctcttcct

SEQ ID NO: 356151 - DNA, 678 bp, Cannabis indica
aaaatcatatcatcctgaaacaaaacaatacataacacaccattagtgaaaattcaaaaaatcactaaacaatcaaagccaaacagcttaataaagaaaaaaaacttacctcatctgattcttctatctcttcaaccttctcttccatctttgactccgcggcagcagcaggggcagcgtcgactccacctgcgagtgcacagaaagcaacaacaccaccacaaatgggactgatgctagtttctcccttccagatgcaattaacgccgtcagatctttgcccttgacctcagacaaaagaaggttaatcttctcatcctctgcctcaattagatctgggaattttcaatgaaattttgtttgttgggtagatctaaatatacctcaaaatctaaatgcatcaacccatcttcttctcttcaataccatgaaatttttttcagccaaagatctcaaaaaaaaaaaattctcagattgaaaatttccttctccatcgtgatttctggtctctgtcaaccatcactacaagaatgcattctccctcctcacgaagcttaaccctctagtctcgaagctcgctctctcggtccaacttgacctggcgaactgtggaggctgatgatgaagcagcagcagccattggtgggggacccagtggtgcacctctataagccattg

SEQ ID NO: 356152 - DNA, 681 bp, Cannabis indica
agtttacaaaatctctgtgacgctctcggactcatgcagggtcataacaataccctacatcatgatcaggacaaactccgcgctgcagtaaatctcgcgttcgacgaacaaaggcttatgttcgccgaatggagggataaaaagatgtaggtattaagggctcaccatgcagagatcaaaaatcgtagtcgacaggctaccgtgctaatacgaaaagcctaccacactgtaggtcatcaaccgtcgaacgtcattcccttgggtgagacagacgaagatccagcgatgaatacttctcagattgcaaatggtcagccgcccaatcctcagtcacgagttccactcgtgggccaagcggtaagcgggcagaccttgtctagtaattcatcaagagaagtcatacctgatggttccaaccagataaatggtgccattccacccgtaaagtaagcgaatcaatcgctgaggcagctaggcacttctgtattcgaagggttgggagcaacccatgacctaaagaatgatttgaacataaggaggggagtagaaaatcagaatgttactacaatcttgcagctcgaaacccgtactaaaattcctgctcaaaatgatgctgatgtaattaaaattgaccagaatgccaaggaggttagcccagtcgtacaagctcagctagacgaa

SEQ ID NO: 356153 - DNA, 545 bp, Cannabis indica
gagaatcttgatgatgatgggatcactcaacaaattgtaatcccatcatattggcagatgatcgagcaagggctataagggagtatgctgcccccatgtttaatgagctcaatccaggcattgtgaggcctgaaatacaagcaccgcagtttgagctcaagctagtgatgtttcaaatgctccaaacaatggggcaattcagcgggatgccaactgaagatcctcacctccatctccgttcattcttggaggtgagtgactctttaagatccaaggagtgattgaagaggtgttaaggttgaagctatttccattctcactacgagaccgagctagatcatggctcaacactttgcctcctgattctgttaccaattggaatgaccttgctgagaagtttctcaggaaatactttcctcctactagaaatgcaaaattcagaagtgagatattgtcttttcagcaacttgaagatgagtccacaagtgatgcgtgggagaggtttaaggaatttttgcgaaagtgtccacatcatggcattccac

SEQ ID NO: 356154 - DNA, 546 bp, Cannabis indica
ggagatctaatttggtgaagcatcataccttcgccaacctattaaacaaatccacaacatttggcaccaggtatttgttctttacggtgaccttgttcaaagctcagtaatctacacacatcctcaacgaaccatctgctttcttttggaacaatactggtgcaccataaggagccttggatggctgcataaacccactatcaaccattccagttagttgtctccttaactcttttaattcagaaggtcccatcttgtacaatgccttggtcagtggaactgcccccaattctaacttaatcttgtaattgatcgccctccttggaggaagctctttcaaaaaaaattcaggcattgtgtcagcaaactcctccaacaatgaagctatctcattgggtactttgacctatgagcccatttggtacgcaggactggattgaattagacaggttaatttgtccaatccagtgtttgggcatggcagaagtttggataactaatccaactaatctcatctgtctgggattatttatcccatccagcagg

SEQ ID NO: 356155 - DNA, 805 bp, Cannabis indica
atcactgttttgaaacatgttgtgtctgagactcctcctcctgccaagataaaggatgaactcgagaagcatgaaatgtagtttaaggaaaggaactcctaggtaaaaaataattttctgtgtaagaattttattttgaatggtctatctaatcaccacaaaaaaaggtttaactcggcgagcccgatcccccgttatttctctatctgtgtgatccttgcgcactgagaatttggttgccgagattgaataacggactattcgatagtcctgacccattgtgatttctatgcaatcttagcaggctttttaaggtccatcaagataggtacaattctaacacttttttcgacatttctcaacatatttacatacctatcttggtgagcttgacctcccgagattgatcaatcttgacagtgcacatagagcccaccaatatagactttttttatatgaaaagtgttaacgcagatttttcgttaactaaatttgagcctgaatagtgataaacttgcacagaaaaataaaacagtaaaaaaataaaaagaaaatgatgaacacaaaggttttttacgtggttttgcagttaaaattctgcatagtccacgagtcaatcttattagatttctgatactgttcttgggcccttttcttttcttatgaatttttttctctctcctttttcagtctaacctgcatctatttataattacataattaggcagttaattacagagtgactgatttctttacaaaaattatcccctaaaaacaggggattcaattacatcccacgtaaaat

SEQ ID NO: 356156 - DNA, 573 bp, Cannabis indica
ttttttttcaattttttttacttaatttgtattgtgcatgcattgtagtacaggtccacaagctaaatatataacttttttttttttttgaaaaggaaatatataactcgtttaatttgtgttaaatttgacattaatttagcattaattagaaacgatataagagcattcctaattataaagtgtcaaatcattgacacattgctaaagactaaagtatatatttcacaaaatagttggttctattagtgtgttcaatgtttaagaaaagaaaaatggtgtgttcaatgttgaatttggcaatttagtataaatataacattttgtaaatttaattatatcagtattaattggctattttttatggtaaggagatctaggtgcttctaaacaccaaccttggagctaaactgctaaagtccaaggcggtggtttgttttcctctctttcacagcagcattgctataattcatatataaatactatctaatgaatgttctattaatcatattatggtatatctataacttatataaaagtgtcaatatttttgggctttctcacattgaatta

SEQ ID NO: 356157 - DNA, 798 bp, Cannabis indica
tgagcatagttatctacgagcagatttatctatgattgtagttatctacgagcacagttatctacaagcagatttatctgtgatcgtaattatctatgaatagattgtattttggggcgtatgagtgaacaagactttctcctttcataactttgtaccaatttggctttagaaattatatatatataaatcctttgacaaccacttgaatagtacagtaagtgaacaacccgaacactttttatttagtattgaacgttgacatcattcaacacttctctcgtatatatagatatatatatatttattttgtatatatatgaatatacgtatatataatctttttcttatatatatatatatgaatatacgtatatataatctttttcttatatatatatatgaatatatgtatatattctatatatgctattttggtgaccaaagacttatatatacttcacatataatgatgtgtaaagtagacaagaattttaaaaatgtttccggcatgttttgacgataattagcataagaagattccattagactcttaattttaaccaatttcataattgggattgtgaagatgatgaatttgaatctcttcctcttgaatctcttgaaatttttttcttttagtgaaagcaccaaactgttgacgcaatttttcgtcaacttaatctaagaagattattaattcaagaataaaccaagaaaagaaaatacaaaaaataattaatgaacaccaaatatttttatttagttttgtagttaaaatctacatactccacgagt

SEQ ID NO: 356158 - DNA, 706 bp, Cannabis indica
tataaatgactccttatttaaccccttctctaacgttttccttgatcattgaactactttatttgtctatcttcctttttcaaccaatctttctcaattctgataagattcctttctttaaatattttgaacgttacgtctactttttaaagtgttcaaaatgtataatatttttaacattgttcttgttgcttgatgaggttataactttaatacaatgcttaaatgtggaagagaatcgtaacaagtcttttgtaatagatggttctgatactttattgcgattttttaaaaaagcaatggatgtggttggaccattttggtataacgagacgaataagaaggaaaggaagaagacaatattttatttgaatgatgaaatcgaagatgaattagttcagcatatcatcaatgaagttcttcgtttcgaggtaagcttttttagtcttgaatacatccctctagagatcaaaaaactttattaaaagtgtttcattcaaaaggtagaggatcttgaaagtaaggtttccaaagacaaaattgaaaaagaaatccaataataagataaatgagcattggagtaatgtatgtatcaatatttggaccaagaaagtaaatgatggtgatagctctgattatgtttttgtatcagttggatttttattttctctaagtgttgagtgatgggatttaagaaatatggagt

SEQ ID NO: 356159 - DNA, 947 bp, Cannabis indica
tatgtcttatttatgaattttcactaaacaagagtttaattgtggagaaaataggttttagggtttatttattaattgatagactttgtaaggtctaattaataaataagttaaatggcaattttatttgataattaattgtaattattaaataaatatttttgacatttataggattgaaattagaaaatatggcattggtgaaagaaaagataaattgttgaataaaatgacaaaattgtaactggtgaggcccactatgtatggccgaccacttaagctatttttagccattatttatcttttaatccatataatttaaatcttaaccctagttgaaatactataagaggaataagatgactatcattctcataacctaatccaactcaaataacctagtttttattctttgtcagacaactagaaattgagagccttcttctatagtaatttcgaattcctctttccttcttcttcatcaatttcgagccattagtgatagagtacatgcccactcatatcaagtcaagtactcaatcatagagtgaaagattgtgaagaatccaaccaaactgaaggagagaagatctaggttcagatattgataatgctctactatagaaaggaatcaagggctagagatctgaatagaagcagtcattatattccgctgccatcaatgtaaggattttttaatctcttatgtgtctatttcatcgtattatgaaatttatatttaggatgttagattatagaattataatcaacatacatgttagtaaatctagatcctggtaaaatatattccaacaactggtattagagtcatggtaatgatttactttcatgaaatatggatttaaaacgatgtttgtatgatttggatgtgttcatgttggtttatatgcttaattgatgaatgtttataaattacgaatttccca

SEQ ID NO: 356160 - DNA, 1050 bp, Cannabis indica
atttgttttagcacccgaaataattttttagtcaaattttttctcatgatcatgtacgttatatcctgcaaaattttaagaaatttagaaaagtttaacacgccgaaaaatacgttcaaacagtgtgttgcacgcgtgactattttattttatacccgtgtaaaatagactgtttgaacattgttttctatattgtaaattattctgaatttctcaaaattttgtaggttatcttaaatagttataacgtacataaatatgaaaaaaaaaatagactaaaaaattcttctggatgccgaaacaagtcaagggtgcatcagtacatcccttttaagggggtgcattgtagaatcacccaataattttaacatgtgttgcaaaatttgcaaaataaaatagagtgtttttataatttattctattaaaatgggtgcatggatgttatttctaactaggcaatatagccgctcttcgcgcagctaatttaattttttttagtatgataataaatatttacttaaaaatataattctaatatatagtaaaattataaatttattatcttatttcatattattataaatagttttatttattaaaaactaaatacacaatattattaattattatttaaaattatttattaaaaagtttaaaatttattataggtagtattttaaattactttgttaaaataaaatattttataaaaataaataaatagggtggtgtagaaaaaaattacggtgtttctcattgtatctcacttattttcatcaccgtatctcacccgttgtcatcattgtagctcatctcttgtctttaccgtagttcacttgtagtcatcactattgtatttctcaaatctatttcttaatcttaaatttcatctcaaattttaaataattttttaaaattattaaaaactttggaaaaaaatttacattagtttgttcttgttattattaatcaatatattttaaaaaaagtgattattatttttaaaaatattaatataaaaaaaaaaaaaaaaaaaaataaaaaaaaagt

SEQ ID NO: 356161 - DNA, 606 bp, Cannabis indica
acagatgataaaagaacacgatggaccgaaaagttccaaggaacttacaaagtcatagagtgagttcgagttgtatacttgctttattgagtacatagaaaagctacgctaatttaaagcgtaaggatattaaatctcaagtcggagactcaatatttctttgagtatcacctatgtaaggggtgcgtagatttggaaaaatggaagattaagtcctagatatatcgatcctttttagatattggagtagataggccaagtggcctatcgattagctttaccacccgcgttgttcgggggtgcataatttcttccacatttctatgttgagaaagtatgtgtcagagtcgacacgtattttgagttacgattatattaaactctagacaaacttattttattaggaaacgacttgggaattagagtcgcagatgcgagagctgcatcccaaattatttaggtaaattttgaggacgaaatttttaaaaagaggggattgttgtaagatcccaataaacctaatggtaagtaataaggatttataattatattatgggttaatcatgtaataagtgggactatcatcctactaatctagttcaacat

SEQ ID NO: 356162 - DNA, 577 bp, Cannabis indica
gtaataacaccctatatcagtgtatgatgtacgagtgttatcagctagcttatcatgtaatgtaattctcttcttcctccacccccacttttttttttctttattttctttccaatatattttttcttgatctgtgctgctggcccttgtaagttcagaaaacattgattttagtttcacatttatttgtacgttctctctctctttctcactattggaataaaagaagaaatatgtattcatataattattattgtttttctttattgaacaactataattcttattgtaatgtcttcgtttttctgacaatgctcaaacttggaaaagttgatgtaaataaagcattgctttcctctatcatttaaaatagattaccaaaatactactttatttatgaacttctctatttgtcttttacatcatttaaataattttttttttaaatatcttcattaattaaataataataaaatggtaataaagaatacaaaaataatgatatcaagtaaaaaagaagagaaaaacaaataaattgttataaatagtattaattatgtggatgtccaaatctttt

SEQ ID NO: 356163 - DNA, 1186 bp, Cannabis indica
aaagaacacatggctaagccaccgatcctatcgaagtctgttctcggagaggacttgtttctatacttggctgtctccgagaatgcggttagcgcggccctggtacgggaagaggaaaaaactcagcatcctgtgtactatgttagcaagcgcatgataggagcgaaaacacgatacccagtgatcgaaaaactagttttttgcctcctaatggcctcgagaaaattgagaccttacttccaagctcacccaatcaaggtattaactaaccacccactctgacaagtcttcaaaagcaagaggcatccagaaggctcctcaaatggccaatagagttaagccaatttgatctacactacattccacgcatttccataaaagggcaggcgctagcagacttcatcacggagtgcaatgaagctgaagctaccgcaaacatgcctacaccatcagtcccggcgtggaaggtattcgtggatggtgcctccaacgagaacggatccggagcaggggtcgcgatgatatccccgaacggacttcgactccaagcagccctacggtttgaattctcaacttctaacaatgaggccgaataagaagccctgatagcagggctgagattagcaaaaaccgtgggggctaaaagagtagaagtctacagcgattcacaactggtagtaaaccgggtgtcgggagaatatcagacgcgcggagaaaaaatggccgcaaatgtggcgatagtccgggaactgctccacgagttcacggactataggtagaaagaatccctagggaaaagaatgctcacgcgaactgtctggctaaattagcttcagacagcgaaatcgaaaaactgggggtggtactttatcgacctaaacaaagcctgctcgaaagattgtttccctttgccgaggatcgaccagatggtggacgccacctccacattcaagctactgtccttcatggacgcatacgccggttacaaccagattaagatgcacatcgcagatcaagagtgcactagcttcaggaccgataagggggtatactgctacttagtcatgcctttcggactgaagaatgctggtgcaacttaccaaaggatgctgaactggatgttcaaaggcctcctggagcaaaatatggaagtatacgtggacgacatgctggtcaagtcaaaggc

SEQ ID NO: 356164 - DNA, 513 bp, Cannabis indica
aaacccaagatccctacgctcccgccaagaccccaatgggagagtggccatgatcttcggtggacccctattgggggaactaccagaaaagagttgaaacgctacgctggagccattaaacacgacgaagtgtgggaagtcacccagcttccaacacaaaggccccgactcatggatcagcccattactttcacagaaaaggacgccaaactggtgcgttttcctcaccatgaccctctggtcatagagacccctattaccaacaaaattgtggcaaggacattggtcgataatgggagtttcgtgaacctgctattcaaagaggccttcacggccataagcctcacagatagggatttgtcacccagtggcttctagatcacaagattcaataggaccacacttatcccaatgggaaaagtgagactgtcagtcaccctatgcccggatacccctcaaagtacttttaagtactgcacatttgtggtggtagatgttggaaatttattttac

SEQ ID NO: 356165 - DNA, 599 bp, Cannabis indica
atatgtcaacctgggcgctggatgtcaacctgggcgctatgccatgtattgccttcagtaaaaaagtcataattcactcaatattgatctaattgacgcgattcaacttgcacttcaaaactatttcaatgatctatcaagttgtgtctcacacttcaatcacaattctgaagctatcaacactaaatttcacccaaagagagttaacaaaataagctctgggttacccgcagcgggtttcactgggctccgaaaaataattatcaccatcagaagctaatttctactgttggatcatcatctatggtcaaaaatatataatttgtaattttctctatttttgtgggcctccttcaactataaaaggagggctcccttagctcattttttatattcagaaaactaacccacaaggtcagagcatctctctttagtttctctctctagaaactagagcttaaacacttagccttttttgtaattctcgggagaaatgaaaactcaaagtagacgtagtttcactaccatcgcgacatggagctgaactgctataaattttgtgtgtctctataaattatatacttacattcattattcat

SEQ ID NO: 356166 - DNA, 494 bp, Cannabis indica
atatgcaaattttctactttcgtgataaagtaaacatgcatgcaacatgcattaaacacaaaaatcctataagctatctaaactatacatactctcgtactatatcgaaattcagttttatctcactatagcataattacacacttctcaaatctcgcatcgaaattatagatagttaattggtgatcaggcaattaaaaataattaagtacgaatgaaatagaatacataaaaactgagggaaaataaattatattaaaaccataaaacaatatcaacaatattcatctaaactttaattaaatgtttagctatgcatgttcattgtagcaaattcacacatattaatttaagaaaagagaagagaatagagaagaaaagaatgctgaaaatctcgttgaaaaagccttcgcgattgatttttatctctaatttcgtcctccttgattgcttgtgaaaaactattgaagtccaattcttatatagccaaaaaa

SEQ ID NO: 356167 - DNA, 496 bp, Cannabis indica
tgtggttggtgtgtttatgaaaagatgataattctttagcttagaacacttagaatgatgttatatgatgaatagaagctcaaccaaccttaatttttgagtaaaaaatgactttatatagtgtaggaatgaaaactagccatttatagtcgttggacgcaaaaaacgagactgccactgggcaaaccggttactctctttgaaaccagttaacctaaatctaggcagtaggaaaagtctagttttttgcactaaaacgaacataactctctacttaattatccgatttcagaaattccaattttgttctcttagttaaatgaaatgtgatttagaaatccaatcgaaaacatttttaactatcgggtgagaaaacttggtgcacaagttagtgaatgggctaaaatttgtacttataaaccctagtgtactatgcaaatcactttaacaagacgcaaaattataccatttgattgtgtgtagtcttgatgtagat

SEQ ID NO: 356168 - DNA, 761 bp, Cannabis indica
aagtggcatctaccatctggtcgatcctaggcagcgggaagcagtccttcggacaagctttgtttagatcggtgaaatctatacaaactcgccaagttccgttcggcttgggcaccaggaccggattggctagccattccggatagtacacgtcgcggatcatgctgttcgtcagaagcttgtccacctctttctctagggcctcggcctttaccgagtcgagggggcgtcgcttttgttggactggtggcatgttcggattgacgttgaggacgtgggtgatgacatggggacttatgccggtcatgtcctcttggcgccatgcaaaaatgtcgatggtgcccttcagtatttttgttactctttctttttcctccggatctaggctttttcccagccggagtactttggtggagtcgaggtcgcacactgatatttcctcgacatcctccatcggttccacaacttatcttcttcagccattcctggctcgacagtttgccggaccatcagtacaggcaggtgggttgcaacattgtaacattgccttgcctccccttgatttcctctcaccgtccctattccagcttctgggtagggaactttaagcacaggtgctgaatggatgtgactgcgcaaaaatctaccagggccggtcggccgaggaacgcgttaaaagcggtcgggcagtccaccaccataaaagtgcagtatttgaacgtgctttggggggtgtccgggcacaaagtgacgggaagcct

SEQ ID NO: 356169 - DNA, 741 bp, Cannabis indica
attttaaattaataatgtttattttttaatagattattattaattttatgattttttgaggtttaaatttaaaaattgattattttattttaaatcatggtcaattttaaaattttgttaatttctttaagatttatatattatttaattataaggttagattttttaatattggacatattttaaattaaatggtagcattattttttaattttaaatattatattaaaattatattataggataaattaaataattaataaatttaaaattaacttagatatttctatagatattttaactataatattttcaaattgaaaattagttatttagttaaatatttaattgtttataaattataagttagaaaaatgatatttatgctatattatatcatttttacttattagaaatttataaatagtattttaaatatttaaataatcgagatattttcgtagaaatttgaaaaatgcttaatttgagatattttgacatataattaggataattattatttgtttattattttattctttaaataatagttgcctaaccatatctattttaaaattagtttattttgttattttaattttattaaattgtaagactaggaaatgattatgatattgaaaatatctatttggttattttgaaatgatttatcttattagatatttaatttaatttaataaaaataattcaaataaacctagatattttaaataagtttga

SEQ ID NO: 356170 - DNA, 485 bp, Cannabis indica
gacatttgagttttgttctcttgagatttgcttgattttgaaatgattgaacttttccaagttcttccgaactttctctagatacctggccatttttaagcccttagcctggtattcccctagaacttgatttactattagctgtgaatcactatggcatatgagatttttaactttcaacgctttagctatccttaagccaatgatcaaggcttcatattcagcctcattgtttaacgcgtcgaattgaaatctcaaggcatagtgaaacttaaagccttctggcaaaattaatatcacccctgcacccgagccatgctcattgattgcaccatccatgtataatttccaagtatccacgtctcgctgaacaagcagattttcctctagagttattccttctaccaggaaatctgccagggcttggcccttgatggatgttcatgggtgataagtatgtcaaactgccccagttagattgacca

SEQ ID NO: 356171 - DNA, 602 bp, Cannabis indica
ttttcaatttgatcccgcaactggattctgtcacaccatactgaaggtagccattttctatagtagtgcatcatctttataactcttaattacaaaatttcagcttactcaaaagatggctttcacacctcagtatgggtagctctattttagcaagaggcctaataagaaactgaaacaaaaatcacttaactctatacattaatactttagtttatcttgatcacacatatgtaagtaacttgaatcttttaacccaacctcaaatgtatgaagagtaccagaggctaagctaattatcatccaaaagcataaacttgttctgtcaacaaagaatgaaagaatgatagatgcaagataagaactactaaaaattttggacaaaatggagaaccaaatgaaaagaattaaataatgcgaaccccaaaagatttttcgagggagtcaaactgacttgaatttagggctttagtaaaaatatcagccaatggcttttcagtatcaaaatattccaactgcaatgttgggttgtcaaaaagttctctaataaaatgatgtcttatatcaatgtgttttgtacgagaatgttgaacaagattttt

SEQ ID NO: 356172 - DNA, 533 bp, Cannabis indica
ctaagtgttggtcgctctgcgcgcattgttgatctctttgcttcaggcatgcctacgaggcatcctgttcggactgtactttccgagcagatactcgaagttgattccacgtgtcaccatcatgtgatgccacgtcagattgcgaaaattgggataacatttgcccccaagtctgtacgggacttccaaagttgtgtgcagacttcatccgagctgcttctgcattttaatggggacacgtgttgagtgcatctgttcgagacttgatgtgaggatgactgggcgtcccttcagtttttggctaataaatgctctgacaattaatattttgaaattcaattttctctcaccacggttgacggctgcactcgattatttttatttcccatattcgcttttaagggggaaccgaggtgtctaaccctaaagtggcttggcacgccactttgcctaatgctgaataggatccagccatccaggatgaggggggatcatgaaggggacactgatgttcaggagattgaagagcagga

SEQ ID NO: 356173 - DNA, 616 bp, Cannabis indica
ttagaaagttcatatttacggtgttaatcaacatacttgtgagttatgtgtataagacataacctggttagacctggtatatatcatcaaggataaaccactaaaagaacgtaatgtatgaatatgtatatatgagcagggttatgcgagcaaagcataatcaagttagactcggtaactataaccgacataaacactactaaggccttattataaatagacgtgtgagcgtaacacgtgggtctatgctacatagacataaatagagtgtgagcgtaacacgtgggtctatgctatatagacataaatagatgtgtgagcgtaacacgtgggtctatgccacatagacatatataggcgtgtgagcgtaacacgcaggtctatattaaatagacaaatagtgcggtggcaccattaattatgtgttatatatttattgtgtacatggttatttatactgtcttgctgggcttggctcacgggtgctctactgtgcaggaaagggtaaatcagtctgtgatgccatgagtgcgagaccttggcgatgcttgtacatgttcgggccacactagaccaagcaggttggggtctaccggtgatgtattttgtaactcca

SEQ ID NO: 356174 - DNA, 512 bp, Cannabis indica
cataaattgagtacaaaatacttacagaggtgtaacattgcagaatacggttccttctgtttagtgatttaatccttggtcatgtctgtcgcagagtatgatcaatcactaaacttagattttcaatataaaatttatagatctttgaattatttttctaatgccaccagaatcacctcaatcagagttatacaatttcatacatggtcattttactaaaacagtttttaaagctgcgaatttctctaaacatacgaatttcttaacattaatgtcattataatattatttaataccacatatacaattaattaaacccactaaataaattatgggtaaattgtggcataaatacttaatgtttcagattttttacacttaaatacttaatgtttatttttggaggcaaaaatacctaatgttacaattctcttacacatttactaccacttccgttaattcataaatatagacacgtggagagttcagatacattacatttatttttattt

SEQ ID NO: 356175 - DNA, 663 bp, Cannabis indica
ttgaaatgtttgagaagtttcatgaatttctggcaaatggtaacaataattaaggtaggtggttaaagatcttgcgagctgatggggtggagaaatatttggttatgcagttcaaagatcattaagttgaacttcgaagtatatccaaacttactttcccagaattttggattgcatattgatgaaaatgaaaatgaaaggtctatgattagttactagtagctgtccgagtccttcagggaaataccctagtaataggaaaaattttagaatgatagaatggttgtgtacttagtgtataccattactggattcagggatgtcctgatcatgaacttaagaaaagctagaactgttaactaaggtttgcaagtttgatagctattctaaagtgattaggggtagaccatcctatgatcatcaagataagaaagtatttgtttcaacaaaaactacttttctaagaatatgactaaatatgagaacaaagtagcaaagtagatgagatattttttattttaaagcgttctatcatcttattctacacaagatgattccactacctttgttgtcttaatacaaccgatgaggacaataccatcaatgttcctagacagagagtcacgataccttattgtagtgggatggtttcaaggaactcac

SEQ ID NO: 356176 - DNA, 531 bp, Cannabis indica
aattagtttaattggatgttggatgtattgaatttttatacactccatccaacatccgatccgatccaattggatattcaaaaataacatccaatccgatccgatcacaattggatatccaatgttcggtggtctgttgtgattggatcggtcggttgtcattggattggatcaatttatgcacacccctaacaatatctacaccacccaatgaacacgaaaaggtaacatatatatatattattatagtcttttggattatactatgaatttttataattttatggataaaagaccttgaatttgctttgaataaccataaacgatcttaaatttgctctgaataaccataaacgaccttgaatttacactgtgcgaccatcatagtcttttatgttcttcaactaactttaaagaacttgaattttctctgaacgaccataaacgaccttaaatttacattatgcgaccatcatggtcttttatgttcttcaaccaattttaaagaacttgaatttgctctgaacgacc

SEQ ID NO: 356177 - DNA, 691 bp, Cannabis indica
aattttaaggcctgtccccaagcgcttaatgttttttttaggacctgttattgggcaggacatcttttcacttaaatatataattttctttaatttttcctaactttctggtctgctttacatttgtccatgtagtataccttacctactacccccctgagtggcataaaaaaatgtttttaaggcactcagctttattcattaattcagaggttacatatactttttggtacaaatttactttacagaacataaattttacattttctggctattgataatacttttgtaggtgatcagcgttccaggccctaggcaccatggttccgtccattctctttagcttgtaggtcccggagccgatctcatcctcgatttcatatggtccttcccagtttggcccaagtacccccactccgggttcttgagtggctgggaagactcttcttaggaccatatcaccaatagcgaattttctacttttaaccttggagttaaagtacttagtcaccttcttttgataagccgccattcgtatttgagactcatcccggagttcctcaatctgatccaacgcttcttgtaataaagccttgtttgttgttggatcataagttgttctcctgtgggatgggaataacgtttccaccgggaccattgcctcacaaccgtatgccattgaaaatggcga

SEQ ID NO: 356178 - DNA, 589 bp, Cannabis indica
tggtaaaataaattctaacactgtttccactagaattgataactcgggggcttctggttcaaagagaaaggacgaagttaaggaaccgtcgaaggataaaaagaaacagaagaagcatgataagtaagtgccagtgtatattatttatgccgagcgtaatgaaactcgggagatatttacctcacacatgagcagaaggtggccttcggcaagcctgagcccatgaagaattcgaggagtaagagggatcctaacaagtattgtaaattccataaggatattgggcatacgaccgaagaatgtcgcctattgaaagatgagatagaaagtctcatctaatgtcgcctattgaagaacgtcgcctatttaagcagtacgtgaaaagacagggccatggatacaaccagcctagtctgcccaataacccaaacaaccaggggttacaacctattcacgttgagggagaggagatcttggttattttgggggggccacatatcacaggggaaagcaataatgccaaaaaaagatatgtgaaagagataaagaacgagcagtcggcctttgccccagaaccttcgaagaaggt

SEQ ID NO: 356179 - DNA, 474 bp, Cannabis indica
aaaaattttaaccaaatgtaagcataaaaaatcaaatttccccctcctaataggttattctagtagacatcttaaatattatttatttagacatttaacaaagttttttagtttaatgttttattataattgtgtacattgtagttatttacaattatttataaattttttaaaattttcgaataatttatagtgccgaaaataatattcaaatattttattacacgcgtgattattttttcttatatgtatggtaagtcattgtttgaatcttattttcatcattataaattatttataatattttaataatttacaggtggtcgtacaaagccataagaaaaactagactaaaaatctcttcttaatatcgaaacagatataaaatttatcaaaatgtcatttggattgtacctatagacttaccctaaaaatataaatttctttttaaaaaaaaaaatcaataaaagaaaa

SEQ ID NO: 356180 - DNA, 734 bp, Cannabis indica
taaaaatactaatttttagcgataaaataaacaaaacctaacagaaggggcataattatgtaattgttatattttagagagaatttttaacaagccgtatattttacggggcgaaaattaggtagtgccgaaagttcatgggacaaaaatgctaattattctaacaaaaaatagctaaaaccggctataattgaaatataatcggttctgtaacataataaataaaaataaataacacaaaataactcaaaccagttataattaaaatagaaccggttctataacagtgttataatgaataaaaataaataacacgaaatagctcaaactggttataactaaaatagaaacagttatattttatttttttttgttatgtctattgacatagtctgagagtattctctggttttctccgaattctgttactttgtgaggagtgtgatcgtgtacatggcgtcgtctagtggtattatgaaacaaattgaagagttgtgtgcccgttactattgatgatgaggaggaagtggaattagcatatgatgatgtggaacaacatgtggaggatgtcgattaccggtgggcgattgtgggaacatttttaactaaaagagatattgatttcgatgtcatgcgccatatgatgtcgtctttgtggcagccgggtaaaggtatgtatgttaaagagctagaggcaaatcgttttctttttcaattctatcatgaactcgata

SEQ ID NO: 356181 - DNA, 652 bp, Cannabis indica
ataattaatcataattaactgataatttccaaattaactaagcgggctttacatccctagtgcttagagataggggaaataagcttttagataaaggtgtaatactttgttcaagttatggtggtctccactaatctacactcgaggttgtgagtgagtgtattatatatattcttcttttactacgtatatattatattatatgtgttgtattcttcttcttctacctttcatatatatatgcaatatatatagtgtatatatgtgtattgtaacatatatttaatcaatatcttttattgtgcttgtattgtttttacaatggagttgtaatgcatctttattttcttccattgtaataaaatctctaacaattaaaagcttatcccttttcaatagaagaggagataaatcaagattttaagaatacaaggataaaagattttgtatgacaatcattcatgggtgagcatggtggtgtatattatgtaatttaccataatatatgatagtaatatatatatgttagttatatatatgtggcatatatgttatcatgtgtttatatcatattaatatatatagtaatatataatatgatatttgaatttatatcatgtaattattgttggaatttattttaccaggatct

SEQ ID NO: 356182 - DNA, 679 bp, Cannabis indica
actctagccatattgatgtgacaacatcaatcagtatttcagccaacatacatttatctgtaatcagtacaactctaagtataccattactgctatcaatgtaatctaacaagcataaacaacatgtatgctaaacatgtaataacgtatgcatgacattatactaatcttacctcaattctgaattcgggcgtgccggtgaacctgagtggaacaactactcggcgaattacaggctcctaaatcacatcgataataacaaggataagtgacacgctaaatcacaaccagggacttaggttttaaaccaaaaaccctatttactgcaacttaacatggtaataccctaaactagcagggaattaaccaaccaaggctccgaaactagcacgaatcgacaacatgaatttgtcggggaacccaacaacaaatttgggtaaccagtatccccagaaaacccaaacaaatccataactcaaccaaatcaattccaaaccttaccaaaccttccaaacctgcatattatacccaatagacatattccaagcaatgaaataattacccaggctcagcattaaaaaacaccattaaagctccaagtttgagttctaaaactctaaacttgcttaaactaacagccataaaaacatgctcaaatcaacatataaaaccataatct

SEQ ID NO: 356183 - DNA, 841 bp, Cannabis indica
ctgtctgaagctaacttagccagacagtctgagtgagcattcttttctctggggattctttccactttatagtccgcgaactcgtggagcagttctcagactatcgctacatatgcggccattctttttctgggtgtttgatattctcccgacacctggttcactaccagttgggaatcgttgtagacttctacccttttagcccccacggtttttgctaatcttagccctgctattagggcttcgtattcagcctcattgttagaaactgagaagtaaaaccatagggctgcttggagtcaaagtccgtttgggcatatcattgtgacccccgctccggatcaattctcgttggaggctccgtctacaaacactttccacgctaggactgatggtgtgggtatgtttgcggtagcttcagcttcattgcacttcgtgatgaagtctgctagcgcctgcccctttatggaaatgcgcggaatgtaatgcaagtcaaattggcttaactccattgcccactttaagagccttccgaatgcctctagcttttgtaagacttgccggagcggatggttggtcaataccttgattgggtgagcttggaagtagggtcttaacttactcgaggccatcaggaggcaaaagactagcttttcaatcactggatatcgcgtctccgcccctatcatgcgcttgctgacatagtacacgggatgctgagttttctcctcttcccgaactaaggctgtgctgatcgcattctcggatacggccaagtataggaacaagtcttctccgagaacggtctttgataggattggtggcttggccatgtgttctt

SEQ ID NO: 356184 - DNA, 424 bp, Cannabis indica
tttatcatcatgcatgatcttaattctctctgttacaagagcataaactcatcaataaatgtggaatattctaatatttatatattctataaattattaataaaaaataatttaacaatcaaatataataaattacttatttatttaaaatcaaaatgtattttcataagatttctaatggaagtaactaagaagaaaataatcagtgaagacgggctggtgatggaacttgtagcaagatagatagttaaaagcctgctatgaaaatacttgaagagtcgtggagaccatgcaagaatttttaaaatgggcaaatgggttcatcaagctagaagaagttaagagaagagcagaaggatcaaaagagggaaacaagaagacaaatgaatcctctgatgatgcaaacactcaaggatgaaatgag

SEQ ID NO: 356185 - DNA, 578 bp, Cannabis indica
acaaaaataaatacataattaaaataaaatatacattaaaatatttgacgtttggttagagataataaaatagaaaaaaataatttttattttatttattagtttatttatatattaaagtattagaatattattttaatggaatgatctttttatcattttagttattctatatttttgtaagtcaattattctattttaaaataaaaaaaattatttcaatgcataattaaaacaatgttattcataaacttcaagatgctaatggtggttgggttgaatggggaagaggttttgatcaggtcttgttgaactactttatagtcatcttttctacatctggttattctaattggaatgagataactgattgtgttcttccattagtctcggcttctcaaaatcaagagctccttaacccggtttctgctgaagaagttaaagcatcattgtttgatatgaaccccgataaatctccaggactggatgggatgactccagctttttaccaaaaaagttgggccattgttggggcggatgttgtggctgccgtgcagaatttttttgcttcgggtgag

SEQ ID NO: 356186 - DNA, 556 bp, Cannabis indica
catattaacaaagtatacttctatataagaataattacatcttaataaaatatatacatatattttatgaaattatttatataaaattagtaattttattccaaattgtaatacatgtataaatattatatttactcaaaaataattctattatgatataatattaatgattgtttaatgtcattgttgttacattgatatttttttatattttgaattttttttcctagtgtaactctatttagttataacctttcaattagaatataattttcttagtcccaagtgtattcttagatagaggttctactgtatatagagtgattacactcatatacctaccgttacttaaaatgattctctcacccttatttatacttttcttactaaattaaagattattttatcaatttactagttattctaatgttcattctaacaacaaactaaatatagcaataaattcttagggtgtcactacaaaaaatctcactttcagtcacaacaaaatttgtgactaaaagtgaaaaaattgtgactaattataaataattat

SEQ ID NO: 356187 - DNA, 1903 bp, Cannabis indica
cagcaaaaaagcagtcccaatccctggagagaattttatcaaaccagaaagtactgtgttggagatcttgaaaaaacctacatattgcctgaacccaagtatgaacagtttaaaccctaaaaaaataccaaaacgatatgagatgatagcgatacaaacaaatcaagttactgatccacacaatgtaacaaacatgagaaagaagaaagcaacttatcgtttgaagttagggcttagggcaatgcctgacaactccgtctacaaatcttgaaacgaagcaaggatcgctttgagaggatgaagtcggaggaaactcacaggaaaaaggtgaaagacaaggatggcatgcaagtcttcggacaaatttaatggtgatccttgatgaagaagtttaagggtttttctcaaactttttgaaatggagaaaatggtgcaaaggtgatttcctttttccttattttatacccatggtagtggcttcgttagatcagaggaagatttgatcctatggacatgattcaaagcgggagtggaaaagatggtcattaattctgatgtgcctcgaaaccgcacaaccaccaaaataagtggaacatgacagaaatacccttttgtaatcattaaaaagctctttttaattaaaaagaactttttaaggggtaattgttatacccaaaattcggtaagcatatcagaggaagacacgtgtcgcgcttggaataacgaagaactcaaacacgcaaacgaaagtacacttggcatggaagaactcgttggaaacatattcaaagagtatgtttataaatcggctggctcaatagccttctacgagacagaaacgtacaaactgctaacttatgtattgacgagaaatcatgtgagtgcaagtgtgcatgatgaggcctcaacctcgctgcgtggaagacaaatgataacactaaaaacgcttagtgtatattacatgatatacaaactgagtgtcgatagtttggctagtcaagataatagacggcgaggcatttatctctctagaagatggtatgcatgcgaggaagatcatctcgacaccaacaaatatagttatcagagatgaaacaatattaatctcgacaagtcagatgacgagctactgctcaccatcaaagttaacatagctccattctcagcaacgcatccttatgggataaggtttactgtatgcctctaattacgcgttgatctcgcccaataaaagcgggatactcatagctatgtgaataataaaggcctcatttacttagcttgatttgtaatcaaatcccatgatttgagggaataattgctgtaacggttattgtcaacttttgtaaatcactggccactatgtaattataaataatgaaaggcaagatcaagaggggggacgaaaaaactcatacaagagaggccctaaaaaaaattagtaatttgaataagattgactggtggactatacagaattttaactgcaaaacaacgtaaaaaactctgtgttcatatgttatttttctatatcttttattttttctatgttgaatcattaccgtgaggctgaaatttggttgaagaaaatctgggttaacatctgcatttaaaataaatgcaatttgaaattaacgggaaaaataattaataaattaaaatacaaacatattttgaaaattattctaatttatgttgatcttaaattaaaattttcaacttaaatgtaattttctgaaaaataactaatgtttaagtgtctagaataaaatcaacttaaatatttaattatctatttaattgaatgtattagaattaaagacaaataattaagtatcttgaataaaatcaacttaattattaattctaatatctaagaaaaatattataatttaagttggtc

SEQ ID NO: 356188 - DNA, 737 bp, Cannabis indica
taggtgagatctttcatcaaagtatctggaattaattgtcagaatattttaaaaattaaatcgagtaactgaaatattaagtatttaaaatgaccataattagaatattttaattaattattaaataattaattatattttctaaatcaaatcaaatcaaatatttgatttgttattatataaaaatattctaccattgactcctgaaaatagacaactattttgtcaatttgttaaaagaatcaagtttctcgatggcttctattcaaatttaaagagcaaagtttttacagatgagtcaaatattcttgggtaaaaatcccaaaattgtcatgtcatgctcgctttaacatctgactcagattatttagcaaccttttacaaaggttgtatagtaaatggtatttaatttattacggtcgaaagagatgaaaagcaaaacacacaaaatagaggagttagtgttgctagaactaaagggttttatcattatggcaaacttgaaaatgtattaaccatgtcttatattggtacatataaaatgacattgattgaatgtaggtactataacactaatccaataacaaagaaaaaaatcactgaatataatataaccagtataaatatacgagaatttcagtatcaagatgagtcgtatatacttgctaaccaagctaagcaagttttctattttcaagatccacttagagatcacgattggaatgttgttgaagatg

SEQ ID NO: 356189 - DNA, 746 bp, Cannabis indica
ctggatgtgttggtgggcagagtcttgaggagctcaccacagttagtctttttttatacttcccttttaacttttcacacttagctccatatgctgactttttcctttgtgcaggccggtttgaagttggcttacacttactcccaggctaaatctgctacttccaagagtacggctctgtccgacaccttgagggtggaggcggacttggccaagaaggaagctgaggaggccagggcggaaactggagctgttcgacatgagttgggcgaagccaacaagaagctgttagctgccgagaagaagatctccgtgctaacaaaggacctcgaggctgctgatcgctttgaagagaccatcgagaccttatctgctgaagttaacagtcttcaggatgagaggagttccctgcggcaagtttttcttcggctaaaggaggagagggacgccaaggtgactgaggcggaccaattgaaggagaaggtcaatgctttggagactgccggcctcgagctcttctttgatttttggaaggctaatcctcaggccaatttcgactacttgggcgacgctaaggaatgtactttgagtactacgcggcccaagttgcttatggtgggaaagaggcggctgctttaacttccggccaagcttctgaccaggttgctgatgcttctcctgctcgaacaaccgatcctcctgctccagttggctcagaagaaccgaaccaagagcctggaactcca

SEQ ID NO: 356190 - DNA, 833 bp, Cannabis indica
tttatgccctgatcgcccattcgaggatcacggggctcttcgacatcctgaggcgtctgggagcacgccttgaagacaacgttaaggtgatcgcgtagatcgcccctgtgaacctgatatcgtcctccttgcggtatttccaccgaacctgatctagtgtacctgctaggtgtgcggccatgcgaggatgaggaggcggattcaatgtcgttgtctcacgtctgctgtaaggattgcgtcgttcagggtcctcctcagtctgcgcctcctaattgaagtgtcttatggattggtccctcgacgttggttggttcaaagtgagtccctctgggttggccctctgttccctctgagtacgattattacggcgtctagaattagttacctgagggttttctgtgggagtagcgggtactcggggaggacgtcgagtcctattttgtccatccacctcggcctgcagagcacgcagctggtcttgaattgcattgtactgatcggtggtcagttggataataccttctgatacaaccgctggagtaaaaggtggaaaatgtcctgttgtggctgtcggtgtagacatttccctgtcgtgagggcacgtagtttcagggaatagattgagaggtcttacattaccctgacctattttgccattaatgacatctatgggagggactctgcttccggacagtggaacgttcatcattccgatattgatggattcattgttaagacctctgtttgcttggtttccaaccattatgattctctctctaaatcagcaagaaagtacttctcgtttcccacagatggcgccaaatgttgttgaa

SEQ ID NO: 356191 - DNA, 629 bp, Cannabis indica
tttcttagtgggatgtatgttggggaaaatagaataacaagtttgagcagggttatggattttaaccattttacccctagtcttgaaaatgcctaagttataagaagaagggcaatttattaattaaccaagggagtgatttggtggctgccttaggtgttgacacctagcttatttattttaagcaaggattaattagacaatcctttttcatttagagaaaaatcaacaaaagaccgaaaatagagcaacctctctttcccttctctctctctcttcgaacagccaaaagcaagagggtttgctgctgatcattagtgttttcagcaaggaattcaaggggaattcaagttgaggtaatccctagatcaattgttcttagtttttcaagctttgttgttggtttgaatttgtgattttgagttataggtgctataagcatttgatttgtgtttggttcgaattgtgagctttatttatgttgattttaagctctagatgctagtttagatgtatggtgatggagttatacaagtttgatctttgaaactcaaacttaggtattcaatggcatgttttgattcagtgagtttttttgagttttaatggttggaatatgttgtgtatgc

SEQ ID NO: 356192 - DNA, 654 bp, Cannabis indica
tcatgaatctactgatgtatgctcggagaggctcacctggtctttgcttgacttcgaccaagtctcctaaatgcaatggaagttggcgacaggaggagaattgtgcatggaattctgaggagaaggctttccatgagttgaactttctaggggccagcttgaaataccattgctgggcggctttcgagagagtagcaggaaaaattctgcaatatacgacaccctgcagatccatttgcatctcgaaatacttgaggtgggaaagatgatcttctcttccagtgtacagtttctaggtgggcattttgaacttgtggcgaaacaccaggagattgatcttgggagagaaaggggttccacgtgctcagtccaactcgagatcattgtttctctgctcggccatgccttggaagtttgtctagttttgcttgcacagttggactaacctgttcggcattttggccaatttgagtcacgtcagtatctttctgagcgggaatttgagcacgggttctgggctgtacgatcgttgtgccaagttgatcgtctacttctctccttctattcagatcgtttctgagatcatgggtcgtcggtgttaggttatttttagtattaattttggattaagtttagtatatttttaattgagtt

SEQ ID NO: 356193 - DNA, 719 bp, Cannabis indica
taattagaaaccgggattagggttattaccctaacatgagtggtttaatggcctacggttattaccctagtgattattaatgtgtaaatgctatgtcatgttaaatatatgtgtatattgtgatttagggttatgcattcaagtcataatcgggtgggactcggtaaccagaaccgagatgaaccgttctaaggccttattgtatttagacgtgtgagcgtaacatgtaaatttatgccacatagacataaagaggcgtgtgagcgtaagacgcgggtctgtgtcatacagataaatgtgaaatggcattaatatttatgtgttattatgattattgataattatactgtcgtgctgggcttggctcacgggtgctctaatgtgcaagaaaggataaatctgtctctgatcagccatgagtgcgagagttgggtgatgtatgtacatgtttgggccacactagaccaagcgggttggggtctaccagtgatgtgctttttgtaactataattttgccacttaggtcagctagttggaaagccttgtaatattttgtaaaatatttttgggatcccgaaaaagtaatttttattgtaaagttaaagttattacaagttttgttttcactctggttttgtttaaattttaaattttcttgtgcttatcttactagtaatcctgtttaggggattagggttccttaatcacctcacgtagca

SEQ ID NO: 356194 - DNA, 608 bp, Cannabis indica
aaaaaaatatatatatattaaaacgatgagaattaacttatgaccaaatttaaatttgtctggtgagtgttgtgataaatttaacatgcaagtgtacgtatcgatttaacaagtaaaatttaggtaagtgagatcgtttctacgagaattgtagttaagtaccaatcaattaaattcttttttctatttgacaatcgaataaataaattttgaactaaataaactaagaaaaattaaataaaaaaaataaaatatttaacaatggatgttgaattagggagatgatttcaattgttttgattacccaattgctaacactaattaaccattcttcgtcctcctatgtgatgacagattataaattaacctaaactcttttcagatcataaaggtcctaaattgcatgacaactactggaactagggctgaacatttagacccgcaaatccgaaaacccgaccacccgccccgacccgctgccgaaaaaagccgaaaaatttaaaacccgtgtagtcgggtcgggtctaacccaaaaatgctcaacacgggtttcgggttcgggttttaaaataatgtatttttttattcgggttttaacccgatacccg

SEQ ID NO: 356195 - DNA, 633 bp, Cannabis indica
tatcgccatcgttttttcttctttttcgggttccgggcggtggaacatccgaaactcctcacggagtggattaggattcccccttacaagcggaccgcacctactcaggtctttctttggagagcccaggccttcgcctcttatgaccgggcggacctcgacgtcgggggcctggttacgacggagaattgcaggaaggcaaaactcatcctaccgcaccaatccgtggacgactctaaccttttccgcgttatctgtcccaatgtgagggtgcttgccgcggagaagacgttccgggacgagatcatcaccactgccaagaagaagtaccaagactatctctaccggaaggctcaggagaaagcctactccaaggctcaagcagcttctgggaggccacttcgcgtggggagcccggtcgagaggagaagccaggcgatcgctgggaagccctttcatattggggactcggcggagagaaggggtcccaggccaaagccttcggctcaggagccgaacactggggctcctggcgccagcacttccggctccggtaagtctcctttagcagttcattacgtcccttttgttggcgagtatgccagtcttaggcctgtagggttcgatgagcgt

SEQ ID NO: 356196 - DNA, 1183 bp, Cannabis indica
ttagcgagaaaccatatgttgctgaatgcaaatagtgaggcatcaaggaaagcaacacatatcaactgcaaaagcccttagtgtataatgtacaaactaagtgtaacaatcggatcgactcgaaaccagataagcgaggtgaccttcttactatggaaagacttcctataacttcatccagttacgttagcgaggcttataaccccagcgagttagaagctaacattcaaatgagcttcgaaaaactctttgtaaataagaactgtgatcgtcacaagacatgcatcgacctcagaaggcaaaatggccccagctagctattgagatcactggaaccaagcttcttcgagacatctctagatacaataattaaagacgtgtttaaaatacaatcattgttgacccagtaaaagcgagaaaatcacagctatatgattttcaaattaatatattaaaattaccttatatgataaattaaataattataaatttgaaatgaacctaaatatttttatagatattctaatcataatatttttcaaattccaaattggttattttgtggaatatttaattgtttataaattataagttagataaatgatattttatatcattttacttaaaatttataaatagtaatttaaatctttacataacctagatatttttgtaaaaattttaaaaaaagcttaatttgagaaattttaacatataatttggataattaaaggtttttattattttaatcttaaaataataattgtctaacaatatctattttaaaattgatttattttgttattttaattttattaaattataagattagaaaataatattgaaaatattttcttggttattttcaaatcattcatcttattagatatttaatttaatttgataaaataatttaaataaacctagatattttaatattagtttcattttgaattttaaatttttgaaaagatattttaggttgtttttaacaaccctaaattttcaatagttggttagttaaataataatttaattatttgagtttatagatatcttacttcacatattgttacatggacattgcttgtttatttaaattgtttattcaaaaacttttttttgacaaacctattatttatttgatctaaattgctatgattaacttgttgacagatccaat

SEQ ID NO: 356197 - DNA, 632 bp, Cannabis indica
acttttctttttttactacaaaaatttcattttattttttcgttttttttttttggcattaattttgatgataacgtggcattttcatctccaaattatcaaccagcaagacttattagtcgtataaaatagctatttaaatcagaaagagatcatgtaatttgctgtagtgcagtggtcacatatgatcaataatagaagatggcatgcatcaagtgaacttgattattaccccttttagtttctccttctctttgtccgttccagggtttaatagctcttttccttcaacaacctaactcaacacatgaaatgtttcattgacactaagaccaaaatcttctcaaaaagaaaaagaaagaccaagatgaactagtacattatatttcatcaattatttgtctcaataaaaaaaagtcccatctaaagtagtttaatatatataatccatatgacatgtcttattttagtgattaatggtaaaagtaatacatagcaaaatctttatttaataatttgtatgcacctccaccatacaggtagcgcaagtttctatatctattctatataaagtgtgtctatataactgaaattcttggtttatgagaaattcatggtgtgactttttattt

SEQ ID NO: 356198 - DNA, 605 bp, Cannabis indica
ttagtaattttttaaaaaaaacatatgttctttgaataaagggccaataattaaattttttcttatgacccaaaaaatctagggccggcggccttgtgtacctataccgctagaaaaattattatatttatgtcaattaaaatatcaaaaatttaagtacttatataccgtaattataaaaaacttacacttttaaaaataagtattttgaactaataaaaataatagtaaaccttataataatgtttattgttaaaaaagagaaaaatatatatgtatattaatcaatgtctcgatagattctccattatataaatatatgagaaatgttaataaataatattggtgcctaatcgctattaatgtaataaagtatgtattgagttctatataacttaagaaaatagattttaaagaatatcgcaaaccaatcgtcgaatgttatctataaaaggtgctggatagtggatattattagtgtccaataacaatactacaaatatatatatatatatatgtgcattcttaatgggtattacccatgaatgggtaaaattaaaaaattttgagcttttaagcttaatttttctttctaattaaaaaaa

SEQ ID NO: 356199 - DNA, 785 bp, Cannabis indica
agttgaataacttgatttgcacaagagagaacaaccccaatttaaatagcagtaactttgtgaaccaaaatataattggctaatacatgagtagctccattagccttcctataaataaaaccaataccagcaatatcatcatacaataagagaattctaatatgatctagcaaataattaacatctcgacagccatcttccttttttttttggattaaattgacagtttccaaacagtttgacttgatgctaaatcgtggtagcttacgttgaatgcccatctgcttaaacctgcttgaatagccataagttcaagctgaagtggagagtgctcctaaggcaagacaataaaagaagcacatacaacctgacctgtatccctttgcaccatgcaacctattctagaacagccaccatcttttttcacacccgcatctacattaatctttaccattcctgcattaggaggcttccaaactgtcctgctccttttaatagcagtagccccacttttgttctctccacaaaaatctacaatgaaggtgttacaccattccaccatgtcctcttgtctgagtgaaatacacccatcattaacaaagtttcttatataccaaatattccaagtaacaaagtgtatgtttggcatcataactaaaaaactgttttttgtttttaaaaacagaaaattgtttttaaaaacaatttggcttgtttggccttgttttttaaaaacagttttcagaaaacaaagttacaaaaaacaagaattttgaaaacaacaa

SEQ ID NO: 356200 - DNA, 774 bp, Cannabis indica
aatgctctggaaagaacatagcacttatccaaggtgcaagtaaactatgttgtagatttacatatcagttaaaccctgtgtactgataaatctaggaatatatctttaatcacattatcttgattgctttccactgtgctgacgacgcaataaacaagaaaataaatgtgaaaagggtttggataaacttataaatcaaataaacaagtaattgataacatgaaccaaatgacacacagaagagtaaaaaaataattctgtttctttattgatattgaataatagagattacatctaaatggagttttatttagggcataaaacccaacaaactcccacttgcactaatataaaactaatcagtacatatcaattaatcctaaattctaacggtgcttttcgaatgcagttcctgccaagaccttggtgaatggatcagctaggttgtcctctctgtccactttctccactagtacatcccctcttgccacatattctttgatgatgtgatacttcctttctatatgcttgcttctcttgtggcttcgaggttccttactgttggctatggctccagtgttatcacaaagcaaaactagtagtttttccattccagggacgacaccgagacctgtgaagaactttctcagccagacaagttcttcggcagcctctgcagcagctatgtattctgcctccatggtagagtctgaaatcacagtttgtttagcacttctccaatccactactccacccccaagagtaaacaccatc

SEQ ID NO: 356201 - DNA, 709 bp, Cannabis indica
gacctccgataataatctggtgaagtacggggctctatctcgaggacttttctcctaagccgtggcggggaagaagaagaagtctgatgctggccgacctgaacaagctcataaggagaatgagctgattcaacttaagcgcgaggctaagttaaaaggaggtgtcaaggccaagcaatatgctcaggagcctttgaatcctgaagatgaggccgaggacgagcaggtgaccccactgaagaggaagaagaaactcctggccacgcccaggcctgttgaacatgcaatttgcataaggagctcatttcacctgttcggccatctcccccctttgtcggcaaagggaaggctatcatgtatgagataaaatcgacgtcaggtgatgatggacttttgagtctctgtgcgggcggtcaccttgcattttactttgttcttgtgcttcttgattttcatgtcttgtgttttctgatggctatttttctaaccatactgtttttgttctgtgcagacgtttctcgggagatgaccgatgctctgaggaagataatgggcagaagctctagcgcctctcctccggccaagaagtccaagggcggtgaggggtcctctttgacggaaaagagaccttctaaagaggtcattgatctttgtgaggagctgactgctgcaaacccctctacccccaagtctgccaagtccaaggagt

SEQ ID NO: 356202 - DNA, 552 bp, Cannabis indica
ttacattgttatcttaataaaaaaccaactaaaaaaaacataattgttcatgctaaattctggtaaaataaatctacacaccaccgctctctaaatattttcatactgcatcgttcacattatcaaacgtaagatccagcatactatgctcgatgtgttctatcacatacatcccccaatcaccgctgtataagataaaaacaagtaaataaataaaagtatgcataaattcaagttaaataataaaaaatcacttgtaattaagttaccttgatttcgtctgtcgtacaatgctcccgtcgatgacttttgaactaaaagttctaacctggctctttgagacggttagttgaagtatgacaatcatttcatgaatctcaaataggccagattgcaacatcaatgttgggaataactcttccaacaatgtcaagtgactcttcaattcatccgggaaaatcgatccaaggctcgagtcaaatatgctcaacatccaacgatcaagatctgtctctaatgtcacccaatgctttgcactatcgaagaagaggg

SEQ ID NO: 356203 - DNA, 622 bp, Cannabis indica
ggaaaaacatctagaaattcccgaaccaccatgatgtcttctggccgaatagagtcacaccgagtggtatccaagaccacggccagaaaccctagacatccatctcgtaacaattctttagctgttagtattgaaattaccgggattcgagatccctgaaccgatctgacaaaaacaaacggttcttctccttctggttggaagtttacaatcttcctcttacaatcaattctggctgagtacttggacaagaaatccatttcccagtataataccaaaatctactaaattcatttatattaaatcagcgctcaactccctatcgtcaattctgatcggcatagacctaatccaccttttagagatgactaattctccgccaggcaatacggttccaaaccctgattcataactatcgtgcggtctatccaatttactaaaaattctagccgccgcataggaatgagtggcccgagagtcaaacggcacatagtaataagagttgttgactgagagctaacttgttaccactgaagggctggcttctgcattagcttgagttatcgcgaacacccttgctggagtgggttttgttgtagtcttcggtgcttcagtcttgagt

SEQ ID NO: 356204 - DNA, 713 bp, Cannabis indica
aaaaaataaaaagggtttgaatgttactgggagtgatgattctgaaagtagtgaagatgaaaaagaaaatattgctctagcaagtgttttgtcaagaaatttgcaagaaaaaggaaaattcatttgcttgaataataccttgatcgatgacaacaaggaagaagttggatttgaatcagatgagtcaaaatttgatgagaactctatggctgaatcttacaaggtaatgtttggtaagtggttggaaatttgtgttgaaaatcgttccctggttaaagataataaagacttgtgtaacaacatcaatgaggttgaagaaaaaatttaatgttgtgaatctgaattgatcttaaaagagtgaaattatttctttgactaaggaacttgaaaacattaaaaagaatgtcaaaatgttaaatccaggttcaaacatttttgaaaagattcaaaagtctggccaaactaatcatgctggtctaggttatgtttctactcaatctgattccaataccaaatttgttaaatctaatatttttgcttctggaagaactgtttctaccttgcagggttttgtcacttcaacaaaacgctctgctattatagaaaagaagcagcacggtaagttttacaattctaaagggaatagaagacgatacattcctatttgtcatttttgtgggataaaaggtaacattcgacctaaatgtgttact

SEQ ID NO: 356205 - DNA, 567 bp, Cannabis indica
attcggactaagctttaaaaaattccaaactcgatttctaactcaaaattacttcaaattcaacaagaaaatatcgaaactagtcccatgacttctcaagaacaattctataaggtcaaaaccttcataaatattctaattcacaaaacccctatacgaaaccaattgtttttaaactttaaacaaaattaaacaataccttaaacttttccttttcaaggatttgctgtcctgctactatcggagcttagattgctaagttttggattgaaaaattgaaaaaaatagatataggaagagaaagttttgtcgaagggagagaacaagggtttcgttccttcgttcgtccgtactgtactgttgtaacttaaaacttaatatatatatacatatatttgaaacaaaatgaaacagaagttttgtttttatatatgtataataataataataatataatattaataaaaactttattattaacagttatcttattattccttagccactaagaaatctctatttctagggtatttggccaacttcgagtaccttaaaataccccgatat

SEQ ID NO: 356206 - DNA, 566 bp, Cannabis indica
ggtcaaaccgcctaccgcttggcccacaggcagaacctttgaccgagaatttggcggctgaccggtcagagtttgggaagcgttcccagctggatcttcatctgactcgtccagcgggatgctggtcgcaggttgctgattagtaactttgtaggctcttcgtattagtacggtggcctgtcttgttcggtcgttaatggctgcttgttgagtccttaacgtttccacctctttatccctccattcagcgaacagacgcctttgctcttcaaatgcaaggtccactgcagcacgtagctcttcctgatcatgatgcaaagtattagtatagccttgcatgagtccaagagcatcacggaggttctggatctcggtgtcgtctccaacggttgtttggacatttgttgctggtggaaccccagtactggcaatacccagattggctgctgaactggtatttccagtctcttgaacaccaggtgcgattccattcaaaggagacgtcacaccatgacccacggttggtggttgcatgatgggttgttcaggatttgtgactggtggga

SEQ ID NO: 356207 - DNA, 368 bp, Cannabis indica
ttaagttcagggatgctagaaagacaactaccacgtgcaattgtagagaggcacaataaaatatttgaaacccgttggcgtagtacaaggttgattgggtagtccatactgtatgcttggtacactaggccaagttttcctgagtgacatcgtaaggcgcaagtggcacttttattgaaaaggaagcttgttggcatgtgtgtggaagtattacagaggcagtaaaattcttgttagtcacaacaattgtcaagagttgatgaacgagatggttcaagtttggatagacatggaatgcttcagttggtactgttggaaattattttaccaggatctagatttaccaacaagtatgttttattaacatc

SEQ ID NO: 356208 - DNA, 713 bp, Cannabis indica
aacaaggaattaataagtcaatggatttacttggtaaattcttgatctgcttattggaagctcagttatataggcccatggtccccatactagttgagaccatactgcctgtaaggctcagttagttgatcttagttaatcaattataattctaaaattagactatgtctagtttatgaattttcactaagcaagggcaaaattgtgaagaaaagagattataggttttatttattaattaagagactttatatgtctaattaataaatatattaaacgacaatattatttaataattatttttagttattaaataattagaattggcatgtaagtgattaaattagaaaattggcgtttttgagaaaattggatggaaaaatgagacaatggcaaaattgtaaagtgggacccaatccacatcctatgggcggcaacttattgtgaattttactatttatttttctattattttaatgccaaataattctaacctaaacccaggtggttacctataaatagatattgatggctcacacttaatagtttttgatgagatttcttgccttcaggaaaattgagccatcttacctataccatagccgaacctcttcctctcttttcgtcttcatattattcagccttgagtgatagagtgagtgcccacacatatcaagtggtatctcaatcatagtgtgtaagactgtgaagaa

SEQ ID NO: 356209 - DNA, 896 bp, Cannabis indica
acaagtgctggtaacaccatgatgtactttcaaacatcataacctttaccaatgcactctgtattgcaaccgtacaagtgttggtagtgtatgaatcacaacatataagcatgcatatacactaaacatatacatacattcgcatatccatattacaaattatacagttcttaccttctttttggattcaagtgtgctggccgacctgaatggaaagtctcgtgctagatggatgccctaaccacataacaaaacagggtaagtcacatgaacgaaaccctaatccaggaagcccgaatctacaactctaggttttgttatattcattgagaaaatggtttgttcggggatcctgccaaaactaggtaaccagttttacaggtgctggcaaaccggttacccagtttacaccaagtctccccaaacaagctccaacttgctcaaaactcatccaattgccaccaaactttctagagtacctaatccgtgtatatgcaacatattccaaccaataattctcagaaaaacacattgaatcataatattccattaaagactaaagcttagggttcaaagcccaaacttgcacaaatccaatcccacacaccaaaatgaggtgctagaagctaaatctaactcaaataaacgctataattcaaacccaaacaacccctaattttcaaaatcatattttcaatcaaaccctaaaattcaacaactaagagatagagattctagggcttgcattggcttgatttcccttgaattccttgctgaaaacaccagaaatcaacaacatttcaccttgttccaggctggttcgaagagagagggaaggaaagagaatgttttctcttgaattttggtttttctcttgtattttttctaaatgaaaa

SEQ ID NO: 356210 - DNA, 1177 bp, Cannabis indica
aaaatataagcatgcatatacactaggcatatacatacattcgcatatccatatcacacattatatacagttcttaccttctttccagattcaactgttctagccgacctaaacgaaaagtctcgtgctagatggatgccctaatcacataatgaaaccggataaatcacatgatcaaaaaccctaatccttggaaacccgaacctacaattctaggttctgctatattctctagggattacattaactcaggaaatagagaaacacctaactatggcactgaaatggacgagaattgagaaaatggagcattctgggaccctgccaaaactggctagctggttttcgaggtactggtaaaactggctagccagtttgcaccatttcaccccaaactttacattttttgctcagtcctccaccaaatgtaaccaaaccttccagaacacctatacaatgcatatacaacataatccaaccagtatttcacagaaaaacatacaaaatcaatttatgcttttaaagacctaaacttgagtttcaaaactcaagcctgctcaattccctcaccatagctcaaaactaataaccagagcttaaaatcagttcaaaataagcttagaaatcagagtacacaatctttaaaccctaacagccactaacttcaaaaatcacaacttaaaccaagtaaaaacttaaggaattcaataacaaagcttctagggtttaccttggttaagaaatcctttaatcctagcagcaattcccccttgttctgagctggttcaaagcgagatagggaagggaagagagctctttctatttttggtcttttctttgatttttctttaatttccttataattttttctaaaataaaattaaggttaaatgaattaaccttcctgaatattttaattgctaggtgtcacaagtctaggcagccacctaactctccatttaacaaaaagaccaaaatgccctttaacctacaacttaagcatttttaaggctaggggtaaaattttcaaaaaccataaccccgcgcaatcctggtattttattttctcaaaaatatttcccactaaaaaataaggttctaaacttacccatgtgatcgaactagccattcatcccattttccgttgtcgccgagcaaaaattacaaaaataacata

SEQ ID NO: 356211 - DNA, 1446 bp, Cannabis indica
gattccttctagggttagggtttaaattatatagaattaaaaaaagataaaaaaaaaaatggctaaataaacacttaagtggctggtcatgcttgtggaccccactagttacaattttgtcattttattttaacaacatatcttttctttcacaaatatcatattttaattttaaacctttaaatgtcaaatctatttatttaataattataattaattatcaaataaaatttttatttaacttatttattaattagaccttacaaagtctcttaattaataaataaacccaaaatctcttttcttctcaattaagcccttgcttagtgaaaatttaaaaataagacatagtctaatttagaattgtaattggttaattaaaactaattaactgagtctacaatccaatattaactagtgtgggaaccatgagcctatataatcaaacttctaataagttgatctagaatttaccgagtaaatttcctaacttattaattcctcctaactctactataggttcagaattgcactcttaattatatagaacgttctatatgtttcaaatatagattacactattaattattcattgtaataatccaaataatcaaagattctctatagatgatttacatcgagtagggacaaaattactgttctacccttcaatgtattttattcttaaaacatttagtttcctataaatgatatttcagtaaactaatatatttactgaaataagagctcttctatttatctctattaagtcaagctcgaaggaaatcatcatttcacttttatattaaatagaagctatagattgcgtatttgtgattagtgctcccactaattgtactactatgttcccaagatgtaagtattgggctaatataattggtcagctttaatgaacaacttaaagaacaaaaataacacaattaagccagaacctaaccatctcaggattaagatatattgatctaagatcaactaaataatattaactcaaaaagatataacggtaagtttatgatatcttatccaagttcaatattggtctagtctgatgtatacaccatacagccgatactagcatacttttccaatgccttcgaaagagcataatacttatccaaggtctaagtaagctttatcactaattatgacatcagtataaatctagtgcactgataatcataggacataaactttgaaacatataatcacaataaaccttctactgtgatgacatcactgtaattgtgaataacaatatgttctagatttatcaaaaattgtatattaaacgataatcatcaaaataatatgttaacttaaatgacttctaatcttctattgataacaaataagataatattgaaatgagttttatttaaggcataaaatcccaacaaactctcacttacactaacataaaactag

SEQ ID NO: 356212 - DNA, 729 bp, Cannabis indica
tgtaattataatctcgtgagaaataaaaaatttaaaataaatgtagtttcattattgatgtgatacatagagtaaacaaatataattattaattgtgttatgtatatgataaaaagagtactaatatagtatgtgacgtactaattaattcttatcattttattttttattaagagttagtcccacattgctaatgtgtggaaataaattgtgatatataagatgaaagggctactcctcccattgccaattggttttgggatggaacctcattcatcttatcctcaaattctaacatggtatcagagccacttgtgatccgttgtgagcccaaattgccaccggtccaaaaagccgtttgtgatccgttgtgagccaaagtgccgccggtccaaacagatacttccgctgtctccctttaacctccatttgggacctttcggccaatgtgtgccaattttcagtgttgggtctttgacctgtttcaaaatccacaaatttcccgacgtgtacacccacaagtttcccgatatttggccttgtgggattctttcaaatgtcacgttcggtcctgtagtctcttaaaggtcgttcgttatacccacactttccaggcccaaacgtgaggaggcactactacaatgttagcctttagaggcagttttttcaaccccatttataaaaagggaagctaaagggtgtgaaaatacccgctatgttcgaaattga

SEQ ID NO: 356213 - DNA, 885 bp, Cannabis indica
ctcagaatcgcaaatggaactagaacaaaactaggactaggaccgggaccagtacctaaacccaaacccaaacacagatcaaaacccagacagagaccgaaacccgaacccagactaggcctcaaacccgaacctagaccgggacctaaaccctcacaataactaggacctggacgcagaatcaggatagggacctgggaaacagaactaggaccgggacctagttaccgacccagacccgaacttgaacctatgacccaactcgtgacccgacaccagaaatggaaccagacagggacccgagattgggatctagatatggacccagggcttggacaaaacccgtagtcgttgtttggatttgggacctgccctcgaccaaaaccctgacaaggacccgaacccacacccggacctgaacccagtcccaaaccaaaaagtggacccgaacccgtaccctgtgatcaaaattggaaccaaaacgggaagatgaccgacaattgaactaggacttggacttggaatcataacttaaattggacctagatcaaaaactgtaaccgcaccaggaactggactccgaatcagacctagacccgaattgggagcccgacccggatcccaaccgaaaccatgactcaggacccgaacccgaatttcagcgtagacccaaacatggaacaagactagggacaccgaactagggtcgggacctagaaccgcacccatgtctcgatctcgaacccaaactcagaaatgggacctgggacctgaatcagaaccagaccgagacccatgacagtgatccagatcttaactcaggattcgagtaacggagcctagaacagaccagtagtaagtgtctagatctgggactcagactag

SEQ ID NO: 356214 - DNA, 742 bp, Cannabis indica
aatccatttctaaatccatgctgctgaccattgtttttgttccggacttgccatttcctgtttataggttaatggatcatcatcaataccgtcaccaacgaccatattgatttcaccatccaagccataacgagatgcttttgttaaaaccctcccactacgacgaggagctgtgatcttctgaacaagaacattagtggtagatttctcggttgtatcaacttgcaaaggttcaaccgaggaagtgggattatcctctacttgagtagaagacgatggaacattagaaggagttatatctgaaagcatttcctccaatactactttgctttgcggcttgaaattcttaatatagtcatattcaaggaaagtggcgtttgtggaaccaacacttcatcatcattgcgactatgaaatagtccacccttagtctccttagaatttccaacaatcatgcaaacctcagttcgcttttctagtttgccatctttctttcttaagacatgagcagggcatcccagattctgtaatggtgtaaacgaggtatacgaccattccataattctaaaggtgtcttagggactgatttagatcgaacaacatttaaaatatcagttgctatctgaatagtatatccccaaaagaacgtaggtagagttgagtagctaagcatggacctaaccatttccaaaagcgtgcgatttcgtctttctgcaactccattttgctgtggagtgctagg

SEQ ID NO: 356215 - DNA, 737 bp, Cannabis indica
aaacatatttcaattcaagctgggcctgtacggctgggcttacttgattggcgttctggttgatttggattacgtcagcgtctttctgagcggggatttgagtatgggctccaggctgcacgatcattgtagtattctgctcgtctgtcccccttcttctgtttagatcatcccttaggtcgtgggtcgctcccagcctatcgaacacagaagagcctggttgccttagcaattgactcgcttggctgacaggtggaatggttccattattctgattggatccgtcaggtatggcttctcctgatgaattctcggacaaggtctgcttgcctacctcttggaccatgaggggaactcgtgaccggggattggacaactgaccattggttgtctgggggcatctatcgtcaggttatcctctatttctcctaggggaatgacgctcggcgttcgttggcctacagtctagtaggctcttcgtatcagcacaatagcttgcaaactacgatcttcgatctctggatggtgagcccttaatgcctccatctctttgtctctccattcagcgaacatacgcctctgttcatcaaacgcgagatttactgcggcacgcaattcctcctgatcatgatggagagtattgctatgaccctgcatgagtccgagcacagcacggagattttgcaattcggttgcgtctccgatggccgtttgggcgttgattcctggtggaatag

SEQ ID NO: 356216 - DNA, 877 bp, Cannabis indica
tgattttatttaagtcaggtccaagtccgtgtttgggtctaggactagggactgggggttgtagtttgagtctgagacttgaactagggcgagagtttgggtctcaagggttcaggttgggatcacagtctaaagtattgattaagaaaaaaatatcgtttaaaaaattgtgaaagtaactttttctttgttttcagaatttttaaaattgtgattctcaattaaaaaattaaaaagtgaaaacattatatagaacatgtttttagaaaatatttttacttttctaataattaaaaaacaaaaaacttattaaaatggtgttaccaaacccaccctctaataaaaattataaaaatacatttactatatattatttatttaaaaatatatatataataattaaatgaagttatataattttttagtattgcatattatcatattatagcaaaaatgaatcaatatattagatcattaaatatatacaacaatatttgatatattgtattactaataattaatatactgtaacaataaaattatataccactataaaattataacaatactaaattaatactcaaaaaatatatatatcatgctagccaaattatgtatattactattaaaatatgtatacatataaaaaaatttatatataataaaataaaaattaaatatcatcttaaagaaatgatatactatagacaacacaaaatatatatacctacaataaaaaataaaataaaatattataatattattaaaacaaaaattatatataccatattcacaaaattacatgtcacctttacatataataaaataaaaactaaaacatgcatgatgttcacctcgcttctagccaacaacagtg

SEQ ID NO: 356217 - DNA, 570 bp, Cannabis indica
tttgaattgcgttatataagaggatcggaagttattttgttatgacccttttgagaattcgattcaattaaatttgatttctccattgttattatttcagaggttcaataaggtgtaatggttgatgtgtaatcgtcaaaattcattcttttttgttcttttttttttgttttgaggaatcgtgtaggttgtacttgtagaaactgattgtcgtttgggaaaccttaatatatttttatcactctgtttgtgcttgaattgtctcgtgagaatcatggtaattgacatagttattgaaatcataggtgaaggaaaaactttccacgcttttaatttctaaggacatgaagcaaaaattggtgaatgaaattgtcaaggagtattgcctcacacctgatatttaagcacatgattactattatgattgggcataacagaaggtaccttaaattttctgtttaatataaaataccatgtgacattttcttttctttctctttctctttactaaactaaaaatttcatgtcttttgttccataaatgatcaatagatgaagctaacaagcagt

SEQ ID NO: 356218 - DNA, 527 bp, Cannabis indica
tctctgtctgggttttgatctgggttcaggtttgggtttatgtcctagtcttggtcctagtcctagttcggctctagttctgttagcgattctaagttcgagtttgggtttgagtttgggtcggagttcgtgtccttgtcagagtttgggttcgagtttggatttcagtttaggtcttgatcaggctctttgtgtgagttcgcatcctgggtcttggtctaggttgggtccgagtcccaagttccattcccgatctgagtctggatttagttctgggtctatgtacttcgttctgatcctggtttggtttcgagtttgggtctgggttcgggtctagctttgggtctgattctaggtgtgggtttgtgttcgggtccgtgtctatgtccgggtttgtgtccaggtctggaccgcgatcttggtctaggttcgggtccagctccaatttcaggtcccgagtggtggtgcaagtttgggtctgggttatgatctcggtcccgatctaggtccagcatttcgatcccagt

SEQ ID NO: 356219 - DNA, 724 bp, Cannabis indica
aactataagtaggttccttttccaatccttgaaattggtcccattaagcataggaatagaattaatgttagcagatattgaggcagcagaagatgaactagctgaatatagaacaaataaaacaagctcacattaatatgcataattaaacaataaattcaaaaattggttaatcccatctcaagataccaaacacacattaatatcaagtctttggacagtaatattaactgtaagcggtactcttggtgtagcaatcaaatattgacaataaaactgtgtcaaacaataggttaatctttggactaacgtattgctcacacaaaataccttataattgtcacacatttatcgccacaggtatgtttgaaatctagcaaaatattcacttacctttgggctagtcaatataagcatcaattacaaacacacaaccatcctaatatttaaataaattaatctacacagaggtcactttggcgacatattgtttcaattaatttactcaaaatattagtcataaaccaacaccaaaatttgaattaaattgtttgaaccaaaatatataataatactaatatatatataaatatattattttatgaggtaaacaataatatacagcaactatatatagttaaatctgaagccaagcccaatacaattcaaaataaaagattgataatataaactaaaagggaaatttgattttatatacttaaaa

SEQ ID NO: 356220 - DNA, 1072 bp, Cannabis indica
atgatcgcactacgggaccggcattatgttcgcaccattatgatagcatcaatagtacctgaaagtataattggccatgatatcactattagtcagtacgatacatatactgctgaatcgacacaatgattgtgtcgctatgatagagccaattaatactttctgaggtgaatatcactcttaaccagtacgatgattgtacagccgaaccgacacaatgattgtgtcgctataatatcacccagaacatatacaatcacaagcacaatatgtatatatcacacatacatgcattcacatatataatatgttctatactattcttaccttgttttcgaattcaaatgagttggtcgacctgaatggaataccttgtgctggatggatgccccgagcagttcggtaatagcctaatcctctcgacttgtattgacttaagaacaaggaaaatagtccattttcttagagctcttacaacagtatctctgaatataaattcttagataagtttttcctcccttttgcccaatgagtatgaatcactatttatagggctacaagcttgggagagaagaattttccttcttattataactgatataagtagaaagattgcatattaaatacagaatacactaatcaagggattcggacagcttgccatatctctgtgatttgatcccaaaatcataaagatttctttggtgactcatgatgcgaaaatggaattctctaagtgttgacgtgctgttcggactgctcactgcccggctaggaaggctttgtccgagcgaatgtatgtggtgccctgttcggcatctctattgcgggcagatacacaaagttgattccacgtgtcaccatcgtgtgatgccacgtcagagtgcaagaattgggataacatttgccccccaagtctatatgggacttccaaagttgtgtgtagactttatccgagtcggccttgcattttagtgggtgacacatgttaggcgcgtctgttcgcgattcgatgtgaggctgaccaggcgtcccttcagttatcggctaattaatgctctgacgcaattaa

SEQ ID NO: 356221 - DNA, 505 bp, Cannabis indica
ctagttccatttgcgattctgagttcgagtttgcgtacgagttcgagacggagttcgagtcctggtatgtgtttaggttcgcgttcggagtaaagtctaggtccagatcaggctctgggtgtgggttcgcatcctaggtcttggtctaggttaggtgcgagtcccaagttctaatcccgatctgagtctggattcagttctgggtgtaagtccttggttctcatcctggtctgggttcgagttttggtccgagtccgggaatagctttgggtctgattcttggtgtgggtttgagttcgggtctgagtctgtgtctgagcttgtgtctaggtatggaccccaatctgggtataggttcgggtctaggtcaaacttggggtcccgagtgcgtgtccatgtttgggtctgggtcacgtcctcgatcttgatcaaggtgcagcatttcgatcccggtctgggtctttttctgagtccaggttcgtatccggatccctatctaggtcca

SEQ ID NO: 356222 - DNA, 1032 bp, Cannabis indica
agcttagttgtattatttatgttcttcaagttgttcgtggaagctaacaaatggttctggcagatatttacatcttggaaacatggtagtacaattaagtgggagcgcttatcatggatacagaatctatagcttctataagtatttagaagtgaaaggataatttccttcaagcttggcttgataaagatgaatgattgaggcctcatttcagtaattatattagtttattaaaatatcatttataggtagctacgtttactatacagtattcagaatcgaaataaattaagaaagaaatgtaacggaataaatgaaaaataattggaatcaatatttgtaatatgttgtttactaaaattttttggaaatgaaatagttgtgatttatcttgtttactttattaggaaacgtaatcggaatgcttaaattgactaaattgcccttttgagttaaattatattatatggtagttattttgtaagatatattataaaggacaaaattatcgttgtatatttaatattaaaaaataaaattaaaataattaaaattcattacccttaatgacattccttataaaattggtgggggaaattctccctttcttttctcccttatttaatcaagttcttcctttcttaattttaatattataagtaaacaatgtaagggaatggttaccttactattgattctcattactaattagtaaacatgccataagtgttttaaggataaaatacattgaagggtagaacaataaatttatccattttcgatatagatcatctatagtggatctttggctattaggattgtaatattggataatcataatgtatctatatcttggtacatatagagcgttctatataattgagagtattcaattccaaatctatagtggcgcaaggcaaaattaataagtaagagaatttatttggtaaatcctagatctacttattagaagctcagttatataggctcatggtcccctcactaattgagataatactacttacagactca

SEQ ID NO: 356223 - DNA, 1410 bp, Cannabis indica
ccccctctggatatcccagaaacatgcatcttagagcccttggctttagcttatcttgtttgatatgcacataggttgtgcaaccaaacaccctcaaatgttcaaactttggtggcttccctgtccacacctcttgaggtgtcttaaaattatttggccctgatggacacctgtttattagatagcatgctgttttgagagcttctccccaaaatggtctctccaaaccagctcctacaagcatgcatctcaccctctataacagagtcctattcattctttctgcagtgccattctgttgtggtgtgttcaccactgttttgtgcttgaaaataccttcttgagcacaaaacattttgaattctcctgagcagtactctaggccattatctgtcctaagtaccttaagcttgttacctgtttggttctctagaagctttctccactcaatgaaagtatccaaggcatgattcttatttttcagcaagtaaacccatacttttctactgaagtcatctatgatgctcatgaagtagtgtgctcctcccatggttggaattcttgatggtccccaaaggtctgagtgtacataggctagtttttctgttgttgtgtgttctcctttgctgaattttaccctgcaggccttcccaagtacacattcatcacaaaattctaacctttcttgtagtttctccttgaacaacccttgtttgtttaactcttcaagtcctctttggctcacatgtccaagtctcagatgccaaagtctgatttggcttgttgcaggattgtgtacagcaggtgctgcacttccagtaatggttttaccatccaagaaataaagaccattatttagtttacctgtaatgagatcttgtgttccatggccaattttcatcacccctccttcaatcttgacagagtagccagatttgtcaaacatcccaatcgaaggtttcttttgagttcaggaacaaacctgacttgttgtagggtcagcaactttccagcatggttttcaattctgacagtgccaattccttgaattgcacatgccttgttattccctaggagcactgttccactgtgttcttctgagaaagagctgagcaattctttgtttggtgtcatgtggaatgaacaacctgagtcaagcacccattctccacctgaatcggaacttgatgcaactagaacatcacatgtctcacaaccatgtacaagatctgcttcaccatgatttctggttcttgattgttgactgtccctttttagtttagctttcaaggctaggcattcatctctaaaatatccttctttcttgcaatagaagcattgctttccagtgttgcccctcgaatttgatccccctgcagagccctttgcaccagttttgaactggtttgg

SEQ ID NO: 356224 - DNA, 745 bp, Cannabis indica
tcgcttggttcttcgacctgaagtctacccccaagcaaggcaggtcggggtatttttacttctctcagccaggcttcaagtggttgagcgggacgacaacaaggccatcagcaaaatagggcgttttgttgatgagtacttcatggtgaaggatccgaacatcacccggactcggtttcagcagattccgacatatcaccgtcctcccctcactcttacccttagggatagggctcagaagcttgcccggttgccggcggaagacagggatataatccagttgacctccgatgcaaatctggtgcagtacgggctctaccctgaggacttttcttctaagtccgtgacggggaagaagaggaagtctgctgctgctcggcctgaacgagctcatttggaggatgagctgattcaacttaagcgagaggctaagttgaagggaggtgctcgggcaaagcagtacgctcaggagtctatgaatcctgaagatgaagccgaggctgaggctgaggctgagcaggtggcccctttgaggaggaagaagaaactcccggccacgcccaggcccgtggaacacggcattcgcataagggagcccatttcacctgttcggccatcccatccttatgctggaaaagagaaggccgttacggctgagataaagtcgatgtcaggtgatgatggacttttgacttcctgggcgggtagtcactctgcgctttacttctttttcagcttcttggct

SEQ ID NO: 356225 - DNA, 1092 bp, Cannabis indica
ggagttcttctcgccagtttcctttggcatcttcgagtttcttctttagtgtatcctacaaggttttgctgtctgcatcaacttggtcgtttgcttgaggatgtgccactgcggagaaacttttgatgataccatggttcggacagaaatcagtgaaagattgtcgaactgtttgccattgtctgagattattttgtacagtagtccgaaccatcatatgatgttcttcactataaagtcttgaactttctttgatgtaatggttgcaagtggttcgacttcagtccacttagtaaagtagtcaactgctaccactgcatactgcactccgcctttacctttaggtaactgcccgattaggtcaattccccaaatggcaaatggccacggactttgcatctgtgtcagctcgttgggtggagctcttgctatctttgaaaatctctggcatttgtcgcacttcttggataagctctgtctggctgcgtgatttccacaaaatccgtcgtgaacttcagatagaagccgtgcagcttcatcttgtgtgacacatctgagtaatgacatcgataatcctcttttgtacatgactccttctactatgatgtatcgtgctgcattccttctcattttgcaagctccatttcagttatctgggagttccccagagttgaggtaggatgctattggtgtcatccagtttggggatgtgtcgatcattttgattttttccatgcctaggatgctaggctcttcaaggaactggatagggacaaagtttgccttgtcacttacattgctacttgccaatcaagctaacgcgtctgcagttgtattttcttctcttggaatttttcagagaccgtagcttttgaattgtgtgagtaggtcgtgtattttgctcagatatgctatcatcttctctccccgagcctcgtattcgctggatacatgatttaccaccagttgtgaatcactacagatttcaatgtgttcggccttcattcctgggctgcttaactccagcgattgagcctcgtattcggcttcgtattgaggccttgaatccgacttgatcgcagcgtgtaggtg

SEQ ID NO: 356226 - DNA, 807 bp, Cannabis indica
ctcactatcaaggtcattggtacggagttcttgttgagacatctcagatcgttatgatttaaaacttatttatatacacgatcattttgacccagcaaaagtggataaatcacaactgtgtggtattcaaataataaccgcagttatactacgttaatatgtaatccgaccccatgattttaggaaaaaatgattgtaaaagatcacagtcaactttgtaattatctgcctactatatgattataaatagaggcaagttagactgaaaaagggacgaaaaaccatcagaaatctaataagattgactcgtggactatgcagaattttaattgcaaaaccacgtaaaaagtctttgtgctcatttttttctttactgtttttaattttctgtgcaagtttattatttaggctcaaatttggttaacgaaaatctgcgttaacataaaatattaaaaatgagagaattgaaagaagaaaaaaataattttggagagattatagaatgccatgtcaccgtctctttcatctccttatatatatatgtatattgatatatatatatagattttttaatcaaataatttattattgtttttattagtataatagaccatatgatcttgtatataattgtattaaataaaataacactttaagaaaaatataataatataaattataaaaagaaaataagggatgggatcaataaaaaacgaaaaaaaagaaaaaaaaagaagactgtctaaattttaaataaaatatagaaagcataatagaaatttaggaaaaaaagatagaaacactatc

SEQ ID NO: 356227 - DNA, 586 bp, Cannabis indica
tgtcatacgtagccgtggccacatattttgggaaaaacccagggcaacaactttatttcccatgcctttcactacaccaaccacttcaatagggtctattattagagtatactttgggattggtgcttcatcttgatagcctctaaacttttgggatgattgtctcctttcttagtaatcacatgattgttggggcggagctcttccactgccttaaagttatttagaattgttggtggggtatggttcaacatgataagatgacttacgctctactcgtcttggcccccaattctcacaagaacttaagtagttagagattggttgcctgttcgattcatcttcctcccatttgatttgagctcatgctttggcaagcacatcctccacgttgcaggctataatggacaccttctcagcattaaaccttgctacatagtctcttagcaattcgtcccttctctgtctaattctatagaggtcatctaatagctcctccagtttcttcctactagcaaatcactctacaaaaatatcagttaattgagcaaaaaaagcaatagaattattagacaagtttgtatac

SEQ ID NO: 356228 - DNA, 1365 bp, Cannabis indica
ataaggcctagcctcagctggacatccccaaacatgaaagtgcttaagactaggctttcgccctgtccaaagctcataaggtgtttttgcagctgctttagttggtaccctattcaaaatgtaggctgctgtcttaagtgcctctccccagagtgattctggtaaggttgaatgactgatcatactccttaccatatctttaagagtacggtttcgtctttcagcaacaccattcatgctaggagatcctggcatagtgtactgtgggacaattccacactcctctagatatctggcaaaaggtcctggacgttgttcacctgatccgtcatatctgccatagtactcaccaccacggtcagacctgacttgctttattcttttgctaagttgattctcaacttcagccttaaaagatttgaacacgtccaacacttgagacttttcatgaagtagaaataggtacgcatatcttgagtaatcatctatgaatgatacaaaatatcgttgaccattccaagaaggtgtaggaaatggcccacaaatatctgtatgtatcaactctaagacatctatagctcttttcgcacccaatttctttgttttggtctgtttgcctttgatgcattcaatacaaacatcaaagtctgaaaaatcaattgaatctaaaattccatcagacacaagtcgctcaactctatttctagagatgtgacctaaccgtttgtgccataaggaacttgatttttcattatccattttacgcttagtaccacgtgattccacattcaaggtttcattataagaagcaacagtgtcaagcaaatataagttgtcataaaccataagtgaaccagttccaacagtatttgaattaatagataaactaaagcaattgtttccaaatgaacaacaataacccaatttgtccaaacaagaaacagaaaccaaattccgtctaaaagacggtacaacaaaagtatctattaagtccaaatagtaaccagtacttaacaacaacctaaaatgccctattgcttccacatttaccgacttgccatctcccacataaatgcttctttcagcatcatttggctttcggtaactcaggcaaccctgcatagaaacactgatgttagtagtagcaccggaatctaaccaccaagtgtttcttggtactgaagctaaatttacctcagaacagaccaaagtaagaaatgtacctttctttgctcgccatgcaatatacttagcacattccttcttcatgtgtcctttcatgttgcaaaagaaacaaccatcatcactgttggtttgagtttgtttcttatgtgcaggacctttatccttagcagcctcattctt

SEQ ID NO: 356229 - DNA, 685 bp, Cannabis indica
ttttttggaaaaaatgggattaatttctggtgttatccctctctcttacccgaccctctctccctctctccctctcttgctctcttgattttcaattttaaattgaagaaaattgcttggtgttacttgatttgggagcttgatttggaagaattttaagcttgggattgaggtaatttcttgctgagtatatttgagttttagtgttgtaatttcttgctgaaattattgggataaaagcatattttgagttgttcttctcttgaggattgcatgtgcttgattttgagtttaatcttggtaaattgagtgagaaatttcatgatttggttgggattcatgtttgtgagcttggattgtgattttaggttattttctagcttgaaatccatgctatttttatatgtggttgctggaaaataattgtggttgttggatttttagctcaaagttcttgagcttgggtatttagtttgaggcgtgaattatgtgttttatgcaatctgaaattgtgaattttatgcatgaagtatgtgttttaaactacctttatgatgaataaaaacttattttatggtttgggagttttggttgtgaattggggtgatttgattgtgttttggagctgattttcgtgttcttgctgctgtttttctgggttttgaacccagatgccgcggcatgg

SEQ ID NO: 356230 - DNA, 581 bp, Cannabis indica
tgatgactactgcaacgagtatcaattattttcacttgtacacctccatggctggaaggggttgttctttgttgatccacagaacactaacccatcgaatcttgctgcctatactccaatatccatggatacaacatccacctccacaattttgaaacatctcgctgtcaaccgactcgaaaaaatctcactcaccatcctttgaaaaaactaaacaatcaagatcgatccaaaataagagaaagagaatttataaaaattaaaaaaaaaaacaaaatttacaaataaaaaaaaaaccaagatttcaaccataagaaacaatttatcggctgaccagaattatcggggagagaaaataaactttatggattcgacagcacttgaaccttctaccgagattcttcatcgtcctagaggtgcgaatcgcaacatccaatggtggtttacaatcgcataaccaccgtcccattatcaccttcgagctttcaacaatggtggaaaagtttcgcttcaggcattttaagtttaagttctataacatatttatttatttatttattcctgcaagtgttttattttga

SEQ ID NO: 356231 - DNA, 785 bp, Cannabis indica
atccaagatcaatatcggtccaatctaatgtatactccatacatctaatactcgtaaactttgtcaaaaccctggaagggacataacacttatccaaggtctaagtatacctgatcgccgattatcatgtcagtgtaaatccagtgtactgagaaatcgtgggacttaaacttttgaacatataatctgactatattctactttgctgacgatactataatcatgagcaaatatatatgttctatacttaatagaatttatacactaaatatataatcatgaaataaatcatgtgaacctgcaacataaaatgatttctgatcttttattaattagtaaatctgattatattgaaatgagttttatttagggctataaacccaacatcagtttcacgagccttctccactctacttgtggacttaacagcctcacaaccattgcaattttctattggggtatcttctgcaccaagccacggtgctcccccgggcttcaaagtttcacccaagcgcccctctggcatcaatgaagctgagttcaagaaactactcaagcgtaatcatagtgtcacactctctttgaatgaaagcaaccccgatgaggcgggtgtcgctcagcgcacccgccaggagccatgagcctcatcaattggaatacttgtggattgggggagtaaacgagcattctgtcgactctcccttttagttatcagtttaaaccaaccattttgtatattatggagactaggggtgagcaacagtcggtttggtcagttttttaca

SEQ ID NO: 356232 - DNA, 625 bp, Cannabis indica
aagagtatttttataactttaaataatctatttcaattttaaagtaatgtatacacatcaatagaatactgcttattctgattccgattaataaattcaattaagggtaaatctgattcttagttaatacaattcttaatcattccaattacgattacgtgtaagtaaatataccattagagtagaaatattatcagtaatgaattctccaagtgaatttttattttgaaaaatagtaagaaagttacaatatcgagctttcctctcttaaaattctcatatcttttgagatgattggtatctccacaagagtactattttctaattcccaatcccaagttagtcaaaatcaggttgctccctctatattgataagcattggtcttaaaaaaaaaagacttaggccacctaagattacaattggactaatagaacagaattaagactaagaccactcagcctatgtacataaaatacttaaagtaattcatccttttaggcttattatttccaataaccaacaaaaaataaattctaaatttaagcttaatgaatatgatatgaatgagaaaataccccatgccgcagaagagcacactttaaatccaaagaatcaatttatggc

SEQ ID NO: 356233 - DNA, 771 bp, Cannabis indica
caatcatatatcaaaatgttcaactctttattattaatcaaaaatatatttataggctttccaggtaaaaaccctaaaaatctctcacttgccctaaaagcaaattatgcatctcccttaatcccatattagttatatgacccataaaagactttgcttgtagtgtctttatgaatggatccgacaggttatgttttgatgcgatcttcaagactgtcatatcacctctctctactatatcccttattagatggtacttcctctcaatgtgcttgcctctcttgtggctccttagttccttggagttggccatcgctccactattgtcacagtagaccactagtagtttttttttacttctggaactacttccaaagcagtgtagaatttcttcaaccgaaatgcttccttagctactttacaagctgctatatattcggaatctatggttgaatatgcaatgctcgttttcttgattcttctccagactacaactcctctaccaagagtaaatactgacccagacgtcaatttttgactatctttgtctgattgaaaatcagaatcagcatatccagtaggatttaactctccagcataatataaaagtatgatatctcttgttctccaaagatactttagaatgtgctttacagctatccaatgttctaaacctagattagattgataacgactaacaatccctaaaatgtagcatatgtcaggccttgtacacaacattgcatatatcaaactcccaactactgatgc

SEQ ID NO: 356234 - DNA, 882 bp, Cannabis indica
gagaatgatgcatggtaatgtcaaaaaaatcattagatgataataatatttctctaacaatgataccctaagtaagaactaagaagtattgtagcgttttatttttaagagcatgaataatattaagacaattggattccacaatcaagctcttattctcctattaaaaaaaacacattaatatacatgtaaatgattcttagttttacaataataaattattaataaactcacaatttcataaaattataaagtagtaatttcaattaatttttaaaaataatttataattttttcaaaatattggttataattattatttccaattttataaaaaataaatataatttttttaaaaaaaataattattagaaacttgccataaaaggttattagattgttaccttattaattttttttagtgcccatctatgggtattacccatttagaagtgttccatatatatatataaagtattttaactaaaacatttcacattataatttgtgaaaaagagattttttatctacaacttttagatagatgttatcttcaattgtcaataatttagagattgatttttaattttcttttttatttcacacacatttaagttgtgttttctttagtatttgaacatgaatttttagtttatttttggattatcttaagaacatattacacttaaattatcaagttttcttaaacactataatatattacatccagtatttacttttaattgtcaaaattataaattacattatttagatatacataataataatctcacctaataagtaataatattttttctttaattgttaattatattttttaaataaagtaaaaaatacctaacataaaattagtatacgtgc

SEQ ID NO: 356235 - DNA, 583 bp, Cannabis indica
gagagtatagaccaaaataatataagtacagtcatcgcagcaggaaatttctagcaaaaaagacagcgaaaaaaaaaaagataaattttcaagaagaggtgcgatttttttatcttttgttcaaaagatgagctatcttttcttttagtgagatatttcctaatactattataagtagaatcctaattctaagaggatttatccatactactataaatagaatcctaattctaataggattcatctatcttgaagcactataaatagaacctcttagactacaaattagggaattctaaaagctacaaattagagagaaaatcagagagagagcaaggaagagatggagatcgacttcgaagtgttcttcatcataattcttttcttctccttctacttttactaaatattatgattttggttatactgtctaattttgagtattttttttaattaagggttatttcaaaatttgagacatgaattcttaattcattattgaatgttaatttctagtttccaccatatcaaattgcttctatttttctatgtcaatgccctgattattgttttaatcttattt

SEQ ID NO: 356236 - DNA, 730 bp, Cannabis indica
ggtcacagggtacgggttcgggtcaatttttgggtttggaactgggttcaggtccgagtgagggttcaggtctttgtcagggttcgagtccagggctgggtcccaaatccagacaccaactataggttttgtccaagcctttggtccagatccgaatcccaatctcgggtctcagtcaggttccattttttatgtcgtgtcacgagctgggtcctaggttgaagttcgggtctaaggctgggtctcaaaccaagacaccgactacaggttttgtccaagcctttggtcaagatccagatcctaatctcgggtcccagtctggttctaattttggtgtcgcgtcacgagcggtcctaagttcaagttcgggtctgggtccggtacgatgtcccgagcctagttctatttcccaggtccctatcctgattttggatccaggtcccggttattgcgtgggtttttatcccgctctaggttcgggttcgagtcctagtttgagttcaggtcggagatcgagtcgtggtctgagtttgggttcggaactggatttcaatctaggtccaggtcaggctccgggtgtgagttcgcgtcctgggtcttggtctaggttgtgtctgactcccaatttcctatccagatctgagtctggattcagttcttgttctaagtccttagttctgatccttgtctgggttcgagtttgggtctgggtccgtgtcaagctttgggt

SEQ ID NO: 356237 - DNA, 744 bp, Cannabis indica
ccattttagacgttctatatactttatcaaagatttcgacgagctctacaatatggtatatgtcttaaagctgaaatataagttttatttcagtatatttataccacaaagtttggtaggaaaccctaggttgtcctttgtaactattaagatgttttatgggatatatacttattggttgactattgttatgacatgggcctgggattattgatcgttctctaagcaggtcgtccaacagacctgaaccgacacttaaggtaagaaaagttaatgtaccacatgacatgacatgttttgtaattgtcaattgtctgattaggcaatgacaatatgatgatactatggatgtgataaacgggctcacctgattaggtgatgcaatgtacctatcggtgatacttgattaggtacgggcgacaatgatatgagattgccaggttatggcatagattaaaaccgttgttaggtttcttcctgttagcgataccgtattaggtacgggcggtagtgacacgtaaatgtcaggttatggaataaactgatattggaatttattttaccaggatcttagatctactcacaagtatgttgtttaacaccctaaatatgaactttctaaaacgataaataaacacatataaagttaagaaaaccttacattgatgcagcggaattaatgtctccttccactcagatctctaacccttgtatcctttctgtcgcagagtattatcaagatct

SEQ ID NO: 356238 - DNA, 890 bp, Cannabis indica
ggcaaaagggggttggcaaatcaatgttgatattaaaacttttgccagcataaaatgaaaaccgctgacaaaaataaattttcccagcgcgtaaatgtgttggtaaaagttagattatagccactgcaaatgtacgctggtaaaactttgacctctttgccagcgcagtttacgaaatacgctggtaaaagttacttttactagtgcagtagcgagctgtgctggtaaaagtgacatttcttatagtgtgatcaaaccattctctatcatgatactttgggattgtttggcttcataacttaaaaactattttaaatttttaaaaacaaatagcttttaaaaactaatagggatcgtttggccaaattttttaaaaacagagtttcaaaaaactagtaaacagaaaacatcaaaatgtaattttcaattttcaaaaaaaataatttttcctaacatattatattttatattttcgctcacataccctaaccctagacccagacccacaccttggaccccagacctgaactttggaccccgaatcctggaccccgacccagaccccgatcctgaccccagaccctagacacgaccccgggcccaaactcggacctcgaacccagaccccaacccagactcggactcgaacccagactcaaacctcggaccccgaaccctagacctagaccccagacactggatcccgactagtgatgcacacggggcgggaaattggcttgttgtgctcccctcgtccccatccccgttaaatattttaatcctcatccccgtttattctccatcggggataaggtggggaatctcctaatgggggtggggacgaggcgacaaaccacctaatagaaaaataaagtttataataaattttt

SEQ ID NO: 356239 - DNA, 563 bp, Cannabis indica
atatgattgatggatacaagtttcgcactgaggctaagcatatatagaggaaatgatgtataaaggaatatgagttgttaggataaaagtattttatcaatcaaatgttaaagtttattttggttgtattttttaggtttatttaatgaagatcatatatggtgtacgagtaacgaagccataggtgatatcacaaagaattactattctgcactctttacgtcgattatgcctacaaatgaaagcattgaggagttgttacaagctgtcgagcaagtggttacagatgacatgaatgaaacactgacgaagacctttacattggaagaagttcaacgagcagtttttagtatgcctgcggataaaagccctggtccagatggaatgagtgccttgttttatcaagaacactggatattgttggccctctagtttctaaagcagtgttagactgtatatcaggggtggcagatatgcgaagtattaatgattcgctaattacacttattcctaaagttcaacaacctgaatcgattagtgaatttagaccgattagtttatgt

SEQ ID NO: 356240 - DNA, 1190 bp, Cannabis indica
cacagagcactggttaggtaaaaataaaggatgatacggatcagcagaatggttccaacaagaggaaaagattcagatttgagaatatctggattggtgacgaagaatgtaagagtctaattaagaattattggaggtctgaggaaaatacaccactaatttcaacgatcaagaatatacaacaatgtgcttcaaacctggatacttggcatcataataagtatggatctttatttcgagaaattaaagatacgcaaaaaaaagtagttcaaatgcacaatttgcaaagtaaaggatgttccagcgaaggatctcggcaattagagaataaactcaatgacctgcttttaaaggaggaggtcttctggcagcaaagggcaagggtccaatggttacaggctggtgatcagaacaccaaatttttccacaagaaggcaaatgcacgcagaaagaataatacaattcgaggtaattattattgtaaattaaatatagagtaaagtatagtttggataagattttaatataattgtaattggatgtattttacatgtgtttaaatagggcaacacatagattgaattgtttaactagtgatctttcgtgagtggctcagaataggttgaggaaaggtgtttcaaactcaaatcattaaggttaaggttatgtacttataattatgttaatatgctttaagtataggttatgttcttaagggtgttgtgaatttacttaaatagatatgtttgatggatactagtttcccactgaggtaaagcatatataaaggaaatgatgtataaaggaatatgagttgttaggacataagtattttataaatcaaatgattaagattattttggttgtacttttttaggcttatttaatgaagattatatatggtgtacgagtaacaaaggcataggtgatatcacaaaaaattattattctgcactctttacgtcgattatgccttcaaatgaaagcattgaggagttgttacaagctgtcgagcaagtggttacaaatgacatgaatgaaacattaacgaagacctttacattggaagaagttcaacgagcagtttttagtatgcctgcggataaaagccttggtccagatggaatgagtgccttgtttatcaagacactgggatattgttgccctctagtttctaaagcagtgttaga

SEQ ID NO: 356241 - DNA, 699 bp, Cannabis indica
ttacttgatcaaaaccctaatcctggaaaacccaaaaccttaaccctaggttctgttatgccccttagagagtactcaaactctggaattagggaaaaacccaaccacgacactaaaatggacaaaaattgagaaaattgcttgtttggtgatcctgctaaaaccggctagccggttttacaggcctggcaaaccggctaggcggtttgcaccaggtttccccgaacaagctccaacttgctcaaaactcatcaaaatgcatccaaactttctagagcacctaaacaatgcatagacaatatttttcaacaagtatttcacagaaaaacccaaagaaactcaacttgccattaatgatcaaagctttgaactcaaagcttaaacttgcacaaaactaaatccaaacatcaaaaccagctgctaggaactaatcttaactcaaactaagcctagaattcgaaccctaagcatacataaacctaacagccccttactagcataatcacacaatcaaaccaagtaaaaacttagattttaaagaagggtgctactagggcttaccttgggtcaagaacctttgaatccctacttcaattctagaaaaagggttgaagtgaggtgattctcctttaattttgccccagccgaaggagagaaagagagaaagagttttatctttttggtttttcctttgatttt

SEQ ID NO: 356242 - DNA, 1439 bp, Cannabis indica
tcacatattcacattacactaagtccactcaaggacaaaatatcattggggcaaaattaccattttgcccctccacactaaaataacatacaagagtactaaagggtattttgggaaattctaaattcccgaccaatcccaaaattcccaatgtctaataaatttccccaatatactaacatgctaagttgtgattctactaagccaaacaccgagttccatgttgccgggcacaaaaaatgtaaaattatgaattttcactatatgacataaaatgcattcagaatttaaatataacaaaattaataattatttaaatatctataaataatttcataattaaatcttaattaactgctaatttccaaattaaactaagcggtctttacattcgcaaaccaaccgtacccaacgacacctccaaaatacacttccactgaagccaagtccctctagaaacttcacacgcaacctccacggcacatcatcctccttatgaaaattgagcactcctatcgcagggtaaaatttgatgtgtcccacctgaacgaggctcgaaagccaactgcacccaactagcagtaccaacgtagcactacttgtcacaaaatctcttggcaaagttcaaaacattggtcctccagccctaccgcacacccacaacttcatgcaaaaggccctttgacccactccttacgtgctcctctgagcttctttaacgtggtgaatgatctaacaatcacccaaaaccacaaatttgccctctagctcctgctcgtgttggctctctaaactgtgtcacaagtccatctcacaaaatcaaccatgcatcctctgatgactcactatcttttgacaaacttgataacacgcagtcttactcttaagacttgaagtcatcccaatttgctctcttccatcggtatattgttaggttatatttagcctatgtttcaggtctattaagtaagcatttttctcggttattggtgtcttttggagcacttttacgcttgatttttttcttttcccgaggtatcaaagttcaatttcagtcaatggatgaaaagacgggacaaactggtgataaatcagaaaaatctgctcattgggtgtcagtagtcgcgactagccagaagccaggtcgcgacccttttctttggtcacgaccatggtcacgacttgggagattttgcaaaaactcagttttttgagttttgcctgtagtcgcgaccagcctttaagttggtcgcgaccaggtacgaaaaaacgcagttttgacctaattcagattttttctcaattggaggcacacctttcatccctatataaagaatacgactcagaaggtcaaagtaagcaataacagacctgaaaagtggatgaaagaggagagaaagcgatcttgaagacctggagcgatatcaccttctagtttc

SEQ ID NO: 356243 - DNA, 978 bp, Cannabis indica
ctagaaggttttcttcagccattttcttcttcttttcaagctggttcttgccccaagtcagcctagaagagtttggaggtaaattctcaaccttttggattggaaactctaagttttgagttggttttgaggtagggtgttgattttctatggctgtagggattagactaagattggggtgtgtttagggtaggtttttgagtatgttggagatggttttaagtggtttctatggctgcttgattgagtttggtttgttgaagccaaagttgagttttcttcactttaatgtgagaatttgattcaatgattaaattgttgtgttttgaagcttggaaaatattgtattatggttattatatatcgtttcgaagcttatgaagagctctacagtatgagacatagattagagccaaaagatgtattttattctagggtgttttcaccataagatttggtagaaacccctaagttattttatgcgggttttagacagtgttttggaatagaaccttattgatttacttttgtggtgacataggacccgagatcgtcgggcatcattccactcaggtcagcccacatacttgactttggacttgaggtaagaaaagtattaagcaccgtatatggtaatgttatgattgttacagtctcgattatgatcaagatctcggtatgtgtttattgtgacttaatcttaattgaggttaacgatatgtatttgttgtgactcgatggtaatcgaggtaatgatgagaaacgattattgttgtttgtgaattgtttatgattaagggaaaaacacggttatcactgttgttatgaatgaactaagatacggtcattaccgttatgagcaatcattcttgaaactggggataggtttcttacttatcgtttgctttaccaggcaactatagtgacatacgcagcttgtggataacaagtggtaaggttagaaacggtcattaccgt

SEQ ID NO: 356244 - DNA, 995 bp, Cannabis indica
gtattctcctcactctcttgttgtcaatttgggtggttgtcaccaaggggtcattatgtggcatctgtacatggtctccatcttcttcattaaaaataatgaaattttttgtatgtggttgttttgggtgacgttgaggtggtgacacttgtgcattgttactacttttcagttcattaatgtagcattttgggccccattacttgttccagtaaagtgtggactttcggcaattactaagacatcatgcccttctaatggtggcaccatatctacatttggccttgtggcagggcttgcacattgtttggtgctacttgggcattgttttgggcttgtccttgtgcttgggtatttgccccctgcttgttgtgcgcataacgagcaagtggctcagctcagatgagatcttcaatttctattttcaagactttacactcgttggttgtgtggccaacatctttttggtatcgacaatactttgaggtatcttggtttttttctgattcccttcattggttctggaactcttaaattcacagtttgttcattagtgaggaaaatagtttctttctagcatttcagtcaattctgtgaagatggtgtaaagaggttgtttcttagtattgttgtggtccccaccgtggtcatttttcctcttgttggatgtgttcgcattggaggggttattgtttgttgaagtgggagtagcttctattgctccagatgaaagaggaaggttattggccaaccttgcctcctccctattgatgtacttttgagctcttttcatgaactcatatagtgcgtgctctctttccttgcaaactatcacaaaattgggacccattagtaattcctgcctccagtgccataagttgtccactatcatcaacatctctagccttggcggcctcgacattaaatcggttaatataggcttttaagcttttgcctggttgttgcttcacattagcaagggaggaacattctaa

SEQ ID NO: 356245 - DNA, 535 bp, Cannabis indica
gtttctagttactcatatatatcttattcaagccaccgcgcataactctacgtgatagctactatctgacttgatgtccagcaaatatggagatttcaaattcctgagtgctcctgaccaagtgtcggtaatcctagtcagaatcccgggatacacaagtatagggttaatccctaaatccatttccacaaaatatataaaattggcctttaaattacatatattcatatagagctcggaacgagctttctaacgatataaagaacgtcccaaacggagtcccgagttaaaagttattgcaaaagcaaaaacccaaacaatcaataaactgccattgtcatggtcgctaccaaacctatgatagttgcaacctctgggtttaaaaacccagaaaacccactttttagcttcgaaaattatgctcaaacacaactaccagaattaatcccacaataattatcaacataacagagagctaacacacatattttaagctctaatccaccataagcatgcttcaaaattcagatttaca

SEQ ID NO: 356246 - DNA, 646 bp, Cannabis indica
attattattattattgtttttaattcttctttttttttttttgcttttatagtcttcaaaataaatggaatagccgcctaaataacatgggggtgaaattacttttataagaagaaaatgtcaagtaatattaaacggtgtaaatataaaaaaaattaccttttatatttttagtaaaaattttaagtttaattttttttatatatttttacggtattttaaaatacacaagaaaacaatataaaaataaccataaaaaagtaacaacaaatcaccataaaaaacaatatataaagaattacaaaaatacaatattacaaaattttaaacatttttacggtttttaagatttttttttacataaaatttgatcttttgatgtatttttatgttgtactcatattattttgttgttgattttttgttacttttaaatatttaatttttttagtgattttagcagcaaaactacctaaattctatgattagtaacacttaaccttacaaatcgattttttgatatatagtaaaacccttcaaacctcacttatgttagctatttaccccttctgttcaaaatgttctgttaagtatcatggtggacatgccacaatgtacacaactgtacacgtgacaaatttttagt

SEQ ID NO: 356247 - DNA, 553 bp, Cannabis indica
tgaaccctataattcgaaccacacacaaaaactaaaccctaacagcccctaaatttccaaaaatacctaatcaaaacaaagtaaaagcttcaaaaacacaagtctatggattctagggttaccttagcttgaatcccacttgaatttcttcctaaaacaccaaagatcagcagcaactcccctggttttttactggttcgaagatagaaagaaggaaagacagagcttctcttgattttggtttattcatcttattttcttttaatttctctaaatgaaaagagtatattctctaacttaatcttgctgaattaacttgctaggtgtcacccaataaggtagccaccaaatcattccttagggcaattactaaaatgccctctcacttaaactagggtattttcaaaactaggggtaaaatggtcaaattccataaacccgctcaacctcaatattttattttctccaatatttttcccactaaaaaataaggttgtaaacttacccatgtgatcaaactaatcatccatcgcattttctgttgtcgccgagc

SEQ ID NO: 356248 - DNA, 445 bp, Cannabis indica
tttcatcgttttagaaagttcacatttaggatgttaatcatcatacttgtgagtagatctaagatcctggtaaaataatttccaacatgggttcataggctaagtcctataaaatggacgccccataaaatacaagaagtcagggtaacatggttgagacccgaggcggtcagggaaatcagaatccccagaatccccgtggtcgcggccgtggccatggcagagctcagggtggtcggcctgtaaatccaccacaagctcctccacactgggagcagagattcgcataaatgcaagaatgaatctgccagcaggatgaagaaattcagaggttgaggcagcagggtcttcctgtcgtgccccctcagcaagttgctcaggccgttgcagttccagcggtgccagcagaacaacctgttgttggcaaccgtatggaaccgttgta

SEQ ID NO: 356249 - DNA, 542 bp, Cannabis indica
tgtacttgtgctggtatcactatgctgtactcctaaacaatattcactacaccaatggactctataccataactgtacaagtgttggtagtgcaaataacacttaaagcatgcatatacacataacatatacatacactcagatattgatatcagacattatattcagttcttaccttctttccagattcaagtgtgctggccgacctgaatgaaagtctcgtgctagatggatgccctaatcacattatgaaaccaggtaagttacatgaccaaaaccctaatttcgggaaactcgaaccctcaaccctagattctgttatactttctatgggctaaactaactctgaaaatagggaaacacccaagcacggcacggaatggacaaaaattgagaaaatgaaaggcccggggaaccctgccaaaaccggctagccagttttaggggtctggtaaaaccggctagccggtttgcaccattccaccccaaatatttcattcttgctcaattttccacaaatgctaccaaactttccagagtac

SEQ ID NO: 356250 - DNA, 1016 bp, Cannabis indica
gaaatatatttataacatttttaaggcataaaccctaacaatcttccacttaccctaaaagcaaactggacatctcccttagtctcatattagttacatgacccataaaagattttgctagtagcgtcattgtgaatggatctaccaggttatgtttcgatacaatcttcaagactgtcagatcacgtctctttactatatctcttagtagattgtacttcctcccaatgcgcttgcctctcttgtggctccttaattcctcagagtttgccaccgctccactgttgtcacagtagagcaccagtggttttctctacttttggaattacttctagagcagtgtaaaatttcttcaaccaaaccgcttccttagttatttcgtaagctgctatatattcaacgtccatagttgaatctgtaatattagtttgcttaatgcttctccagactatagatactccaccaagagtaaatactgacccagatgttgacatttaactatctttatctgatttaaaatctcaatcagtatatccagtaagattcaaatcaccattggaatatacaagcatgagatctctcgttctccaaagatacttgagaatgtgcttcacaactatctagtgttccaaacctagattagattgataatgactaacaatccctacaacataacatatgtcaagctttgtacacaacatgcatacatcaagctcccaactactaatgtataagggtactctctcttatcctcttcctcttgtggagtctatggacattgatccttacatagagtaatttcatatttgaacagtaactatcctttcttggaattctccattgagaatcttttgagcatcttatcaatataagtttcttgagaaagtgctaatattctatattttctatctctataaatttttgatctgagaacatagcttgcttctcccaaatctttaatttgtaatttgtcagctaaccacttctttacatctgataacctttctacattgttt

SEQ ID NO: 356251 - DNA, 1108 bp, Cannabis indica
acatggaaaaatgtacacaggaagagaagatcctctttcccacctcaagtatttcgagatgcaaatggatttgcaggggatatgaggggatgtgtgttgccgaatctttcctactaccctttcggaagccgcccagcaatggtatttcaagttggcccctggaaagttcagctcatggaaagccttctctttggaattccatgcacaattctcctcctctcgccaactttcgttgcatctgggagacctggtcgaagtcaagcaaagaccaggcgaacctctccgagcgtacatcagcagattcatgacggaggcgaccaaagtttcacgggtaactgaagatggaaagttgtctgcgatactggggggtattaaagtccttggtgaactttggaaggacataaggaagaacggtccagtagactcaatgagtgattttcttgaccgtgctgaaggcttcatcaagcacgaagaagccattcaatgagctgaaggtgagcaaaagcttggcaagtcaaaagctccttctactggaacatctacccaactccccaactacccaaataattcaagctcgaatggtaaatgttccaacaacaacaggaaaggaaatgggaagaaggaaaagttcactggcaaatccgagcaaactcctcgggagagtcaagcaaagtacactgcatttatcatcttgactgaggatatagaaagtgtttacatggctactcagtcgctagccccatataagaagcctgggcccatgaagaaagatgtcaacaagagagacatgacaaagtttcgattccacggagactacggccacgacactaatgaatgcaacaacctgaagtgggaaatggaattcctgatgaagaaaaacaacccacacctacagaagtatgtcaagaccaatcagggtcaaaggaacaacaataaccaatatttactacctccaccggtagatggacatctgcaagtcatcattggaggcccgcatattgctggagattcgggcaaagcttgggagaggtatgcccgatcagcgcagcacgaacaagaggaagttatcctggccgtataagaaaggaagcccaaaattccacgagca

SEQ ID NO: 356252 - DNA, 1128 bp, Cannabis indica
gctgagtatgaagcctgatcgctagctaaaagataacagaggcattgaaagtcaaaaatctatctcatctgtcatagtgattcgcaactgattgtgaacaaggtcctcggggaataccacgccaaaggcttaaaaatggcgaggtatttagagaaagttcggaagaacttggaaagattcaattactttaaaattgaacaaatttcgagaaaacagaactccaataccgacgccttagcaaaactggcctcgtagaatgaactggatgaattgaacttagttccggtagagatgctgagcgagccaagaatgtgtgaaactgaagacatcaagatgatagatagctctctacgtggatgactcctattatcaattatttactcgacggacaacttccgaatgacaaaaacgaggcacaaaaactattgtattcagtacctcgctacacaattatcgaaggcaaactatatagaagggggtattcaatgcccctacttcagtgtgttctccctgtagaagcaaatgaaatcataagagaatttcatgaaggcttgtgtggggatgattagacaaggatatttctagccaatgatcaataaggacacacatgagtttgtcaagaaatgtgataagtgtcagaggttttcacatatacctcacgtactgccaacagaacttagaatgatgacctcgccctatccattttctatatggggtattgaattaattgaggcattacccactgggcgaggaggagctaagtattgttggaacttattttgaacctggatctctttctttcctttctttgtgctgaatctccttcttgttgaatgtctttcttcatgatcttcctcacaatgactgaggtatcacttgctatgtgttggcactactctatcactaagagattcgaaattattcaaggaagaagaggctataggtggtggctgggttagagagagaaggctcatgtttttctctgaaaggaaaaaagaaggagaaagtgttttgtatttattcctgaagccttcactatctatttataacattccacatagggttaggtttgaataatttggtaattaaaataataaaaatatcagatgataaatcctataaaagtgg

SEQ ID NO: 356253 - DNA, 614 bp, Cannabis indica
tgtgtggggtcattctgtttatgtggaggtggctgccttccatgtcggttcctattatggttttaactctgattattgtcacgaggagggtgattgcggttagaattagaaatcgagtcgcggttctgattcttgaaatttttgccattaggctttagaaacgctggtgtggacttcttagtgttgttgtttaaaacaacaagcacttcatctttctagtcttattttctcgtgaacaatgttgctttctttaagacgtttcgcggctctgcccgaagtgtgcacgacagtcaagcagccacggcgtccccaggataaaacaacctctgtatacgatatgttctgcaccaaacgatatccttcgattacaccctaaattattactctgagaaaaattgtaaggaataatttttttttagttgaaaggatgtgttcttccgttgttctgatacgaattatacgacttatattgttggatcatggcagttaaaagtggatcattgtctaatcaatttttactacttcagttaacgtaaaaaataattaattaataaataaataaataataaatatttattaaataatttttcttttaaaaaaataagtgacacctc

SEQ ID NO: 356254 - DNA, 1380 bp, Cannabis indica
aaggatatacaaactattgtctcgtgtgtcgtcgagaaaccgttccacgttagaggtacaaagtgagagatcaacctcgttgtgcatgagaagatgaagatcagacatgatgactgttaaaacacttagcatataatacacgttatacaaactaagtataacagtcaagtaaaactaaacaactaatagtgaagcatccatctcgctataggaaggagcgctcatggtaccttcactaatcaactctagacatctttcaatgagatttacagctctgttgagtcagttctctcagatagaaactgacattcaaatgatattgactgctgaagttcaccttttcaccaagaactgggatttttagatggagtgttatgtcttcaagcgcaggattgacgaggtttacattatcaacctcggaaagaaatgggaaaagcttcagctcgctaccagggttattgttgctatgttcccagcgagacgtcccagagcgatacgatttacaatgtatttaatacacgtttacattgacccagtaaaagcgaaccaatcacagctgtgtgattttcaaatattaaccgcacttattttaggtgggatgtaatcaaatcccataatttcaggggataattgttgtaaaatattagtcaactatgtaattaattaccctcttatgtaattataaataggagcaggttacactaaaaaagggacgaaaaattcattagagaaagagcgctagaactgtatcagaaatttaataagattgacttgtggactttgtagaattttaactgtaaaatcacatgaaaacatgtgtgttcttattttttctttactgcttttattttctgtgcaaatttatcacaatttaggctcaaatatagttaacgaaaatctgcgttaacagtacctaatatttataaaaaatataatttttctctaatttcgtcagtacagactctgtattaatataccgtaaaaaataaatgttggatttatgccgcttataaacttaaaactttaggtacttatgccgctatcccaatatattaatatacaattattacttttatatatgtatatagtagttaaatagaacgaatttgttaagatgctttcatgtttcgaattttcttgcccttttttttctttgtttatctacattttatttattaaggaaaactaaagaagtatacagttcaaaatagatttaaacttatgaccactagaataggaggatgttgctaaatcattattccacttaaatttagcttgtaaattattatttagattatattaaatgtataactaagcccaccctaaaattaaattctgggtttgccactgtatatatgtatacactaactaaattatata

SEQ ID NO: 356255 - DNA, 1417 bp, Cannabis indica
ctattgctacccaaaaacactgatttgaatataattagaacaaatagaatcccgatagccacacaccatatgatatgatatgatcatctttaggaaaagcatatataaattggctactagaattaatgcaattgaattttttgttttactttttttttttcttagcaatatttgtttacttcttattacttgaattattgtctgaaaagttttcgatttttctatcttttatttacttgtttttttttttttttttttttttttatcttttaactaattaattccttacgggcacgttaggaagcgacaatcttttgagatttgttaggtatacagtggcaggctcacgtgaattctccaccaaaaccaaaacagtcgcatttatttatttttctaagaaaaacagtcacattttttaatccttaaaaaaaaatctattttgaagttttatattttacaaaagttagtgtttgaattcttttttttgtttattaaataataatttgtaacttgtgtaaaaacaatatataataacgcacttaagttcttaaaacccccgtttcaaaaaaaaaaaaaaacgttcttaaaacccgattttagcctaattatttcttatcctctaaaatttcgcttaagactttctattttctaactctaacaataatggtttaatttctattttattcttaacaaaaatttaactagacttaagagtattatttggttttttaatcaaacaattaaaattgtcatttaataaaatattaacaaaaaatctaattaataattgtgtgtaaaatattcagtctaaaataacaagtacctaacaaaaaactatacaataattgtatggcacgttcactgtacaatattaaaaattgaattaacttaatagagaaacataacggaacatatgaaaaataattaaaattaatatttataatatgttatttactgaaaaaatttaaaaataaaatatagtgatttatcatatttattttattaaaaaaaatataattaattaaaatacttaaattaactaaattgtccttttaaattaaactgcaatatataataattattttataaaatatattttaaagaataaaattatcattatatatttgatattaaaaagtaaaataaatataaataaaatttattactcttaatagcattttttataaacttagtataaaaaaaggggtttttcaataatatacgtaaattacaaaaaaattacacaattctggttagatattttaatcaatctcatacggtaccgtacaaaataatatcacctctttccttttcattttcttaagtccgcactaagcactttttttcctttctctatctttattgcatttgcatggcagtcctttttgttttttttttttattttattattttttgt

SEQ ID NO: 356256 - DNA, 776 bp, Cannabis indica
gcactgtaaccggacagggacccaaactcaaaatcagacatagacccaaattgtgagccagacccggatcccaagccaaacctggattcgggacccgaacttgaacttgaactcagacccaaacatggaaccagactaggcacatagaaccaaggtcgagacctagaaccgcaccctagtctcgatcaagaaccaaaactcagaaatgggacctgggacctgaactagtacaagaccgagaaccgtgatagtgatccagatcttgactcgggattcgggtaacagggcctcgaacaaaccagtagtcggtgtccatatctgggactcagaataggaccagaaccgggacgaagaaccaaacccgaacccaaacctagacctgggacccaaaactagaacctgaataagaatcgtcgaaccaggaccgtagaacaaactaggatcctgaccaggacctgaaccagacctaggaccgcacactgacctagcctgaaacacaaactgagggtggaactcgggcccgggcacagtcgtgtacccatactggaactgagacacggacctagacctaaatctgggacccgatcccaaacatagacttggacctagatagggatccgaatacgaacctggactcggaccaagacccggactgggatggaaatgctggacctcgatctagaccgagatcctaacccagacccaaactaggacccgcactcgggacccgaactttgactaggacctgaacttagacccagatcggggtccagacc

SEQ ID NO: 356257 - DNA, 494 bp, Cannabis indica
ttccaacaactggcaccagagccttggtaatgatttacttttatgaaatatgaattaaaacgatgttttgtgttgatttgggtggtttcatgttggtttatgtgcttatgtgatgaatgtatatgttgtacgaaatttttccatgaaaaatatttttttctatttttaaaatattttatttcgattccttgtgaaaaattaagcaatttttgtttttacggaacttaattccgataaaaattgaaagacttatgaattttggaaaaatcggggttcaatggtgtcgagggtggtgctcatgcgcaccagaccctcggacaagcccgccatccacgcgcctgacacgcccgtgtgcaccctacatccgcccagcctgatcctgccagcgccgaggtttctcggcgccccttcctgtgctcttttgcagcctctggaggctgcacgtgcagcctcctgggcagccagcactcccaaactgatttttgtgggttttt

SEQ ID NO: 356258 - DNA, 541 bp, Cannabis indica
acttatcacgccttgtgggggtgtttaaactttcaatggcttgaaactttgtgattttgatcagggtaaccatcttttaaactcatacatattttcttagctttaattgacaatgttattgatcctatgccaaaggataaattgaattagttatggtcattttgtggaatatatggttcaagagaaataaaatagtgcataatagcatttatttgcctcttgacttagtggtgaaattgactcgtgaatttctttggaacttccaatataggactgagccttttctctctctgggataggcagtctctttgccttttgatgagattatttcgaaatggtctccttcggttggctagttctatcaaggttaatagagatgttgctattaataaaattggtgcttgtagtggccttgccttggtatggtggtgtatgattatttgagtatcgttctcgttgttagagatattattacaatggaagaaaaaatacaagatacattacaactcttttgttaaaataaatacaaacattagaataa

SEQ ID NO: 356259 - DNA, 556 bp, Cannabis indica
taaatctttcccaaatacttggtagcctccataaaaaaaccaattcatgtttgtctattgagaagactacctataacatagaattgaaccaataaaaataaatttttcaaaaaatatattatataaaaatgaagatttattaattaaatgatactttgagaagaaattgaaaaaacttcatatctaatatatggttaggtgaccatacctagtggcatgattacattaaaattttatattagagaaaacgaatcaaattcaaagctgtcaatatctgtatttgacttgaaagagggtttaagaacctcgttgatttttcttgactctccacttcagagcatcctcttgtcatatatatatatagacatgattgtatgtataaatatatcttaagaatggctattggtactcataatttgatctttagtaatttaggaggattagtattctatggtgatagtaattaggagaaacttgaaataaatatgtatttatatagagatcataatattatttgtatttaagaaaatacaatcaaaagtcacttatataccaa

SEQ ID NO: 356260 - DNA, 629 bp, Cannabis indica
ccagcttgctagagatagaaccaaaagagaaatccatataccagcaaggtttgtagaagctgatctgattgcctatgctttgtcaatagatcattcatgtgacatactagaaccattaagtatagaagaggctttaaatggaaagtacaagaaggagtggtctcgggctgtggatgatgaattaagctcacttagaaagaacaagacatgagtatttgttccaagacttgaggacaagaaggtgatctcatgcaaatagattctaaagattaaagaaggtgtgacagatgatgagccaataagatttaaggcaagattagttgccaaaggtttcactcaggtggaaggaatagattacactgaggtgttctcacctgtgctgaagtataagaccattagacttatgttgtcaatggcaactcatcaaggtttacaagtggagcagcttaatgttaaaattgtgtttttaaatggttatctagaagaagagatatacatggagcaaccacctggatttcaagtggaacaagatggaaaagagattgtttgtaagttggaaaagtccctatacgaccttaagcaatcaccacgacaatggaacaaacaatttgacagctatgttcaggaga

SEQ ID NO: 356261 - DNA, 713 bp, Cannabis indica
aaatttggggaaaaaatcccacaaaaattacatttttggggcatgctgacaacacggctgcacgtgcatccttgacaggctgcaaaatgcccatgattcgcgcagaatgaggaacttgtagcctcatctgccgagaaatctcggcgagttgaagggttcctgggcgttggatgcatggtcacgggcgaggcacatgggtggacacagctttagacaaggattttgtctgagatgcgtgcgcgcgtaagcgtgccttgtctgagcgcctggtgcacctgatgcacctactcgacaccatatgcattcgatttttcaaaacaccataactctctcattttttatcggaattgagttccgtaaaaacaaaagttgcttaattttcacaaggaattcaaataaaatattttcagaaagaaaataaaattattttcatggcaaaatttcgtaaatcacatacattcatcatataatcacttaaactatcatgaaaccatcaaaatcaacacaaacatcgttttaattaatatttcatgaaagtaaatcattattatggctctaaggccagttgttggaatatattttaccaggatctagatttactaacatgtatgttatttaacatcctaaatatgaatatctaaaacaatgtaaataaacacatataaagtttaggaaaccttacattggtggagcagaatattaatggctccttc

SEQ ID NO: 356262 - DNA, 706 bp, Cannabis indica
attttattttcggcgtgttaaatttttttgatttttttttgaaattttgtaggatatcttaaataattatagagtttctttgcagctaaatcctctcaactatcactctacttgcacttaaccctctaagttcaaattttgacggtaaaaccctccaaactacttaacagtttgcaaatttaagttgtcatccacttctacagttaactgctaatatagactgcttatgtgtacactcttatacacatgacacgtttatattggtgtacctaatattattatttaaaaatataaaaaatatttcaaattttacaatattttttatttttataatttcatttaattttaaatgaattttgaaaataatttttaaataataatatttgaaataccaatataaacgtgtcacgtgtacaagagtatgcacataagcagttcatagtggcaattaaccggatgacaatttaaatttgctactggttgaatagtttggaggattttatcgtcaaaagttgagcttggagggttaaatagaagttaaacgatagctgagagagtttagtcgccaaaaactcataattataatatacattaccatgaaaaaaatagattaaaattctacaatgcattaggagtccactgatgcacccctaactatttcagcatacaagaaaattttttagtctaatttttttcatggtcgtct

SEQ ID NO: 356263 - DNA, 785 bp, Cannabis indica
aagtagtgttagaagaaatgctttcagatataactccttctgatgttccatcctcttctacttaagtagaggatagtctcactccctcagttgaactgacacaagatgttacaactgaaaaaatctaccacaaatgttcctgttcagaaggtcacaactccccgtcgtagtgggagggtttctactaaaccatcttgctatggcttggatggtgaaatcaatatgatcattggtgatggtattgatgacgatccattaacctataaataggcaatggcaagtcccgaacagaaatattggtcagccgacatggattcataaatggattccatgaaaaagaacaaattctgggaatatgtagatgttggaaatattttaccaggatcttcgattcactaacaagtatgttgtttaacattctaaatatgaacttctaaaacgataataaataaacacatataaagtatgagaaatcttacagtggttgcagcggaatatgatgtctccttccactcagatctctaacccttatatcctttatgtcgcacagtatcaccaagatctgagctcgaatgtctttctgttgaatcaggagtcttcacgatcttccacactatgattgaggtatcacttgatgtgtgtgggcactcactctatcactcaaggggtttggtttcaattgtgaagaagagagaagagaggtgttgttgggttgtgtaaacccattttaatacaattagatatagttaataaagatcagaaataacattttatgttgcatggtt

SEQ ID NO: 356264 - DNA, 844 bp, Cannabis indica
aggcccaaatagtgtatggaagatattatcccaccagaatagcgggatatgtacccggagcccagcccttgggcactgtgccagcagcggctccaccgatgagcggcataagttctccgctactcccggatataaccaaggcctttcgaaatccctcggggataaatggacaagccccctcgcactccgctccaactgccagcctagctggtccttcccagggctcgaggagtaaaaggtcctccaaaggcagcacccggacggaggaaaagcgacagaaaagggggtacactccccaatatacccagtacacggagttaacagactcccaagaacatgtgtactatgctactaggcaaaatacacactaccggagaccacctcctctgtacaaagacagttctcggagggaccccaacaagagatgcgagtaccataacgacattgggcacaacaccaatgaatgctaaaatctcaaagaagagatcaaaaacttaatccgattgggacacctctacgagtggatcaagaatcggttgtctcatctcaacccgggtcaggcagctggagctttgccacagggaaaaccagggggtgcgacaggagtattggctccagttgttccccccggagatgcccagcatatccccggcctgccacccagacctaacgggagagtggccataatctcgagaggaccccatatcggaggaattacccgcaaggaactaaagcggtacgcaggggccgtgaaacacaatgaggtttgggaagttactcaactcccagctcaaaggccccagctgatggatcaacccatcacattcacggaagaagacgctaa

SEQ ID NO: 356265 - DNA, 1076 bp, Cannabis indica
attaatcacgatttccataaacctcgttgattagcaacgagctgcacattacgtttaaaaattacgtactacgcctatgctagttagggtgttacacattttgatacgaattctaccacattattcttcattccgttccaccagaagtaaggtttaagatcttgatacatctttgtggtactgagatgtagggaatatggagtggtatgagcctcttcaagaatttcatttttgagttctgcactattaggaacacaaaccctggttttgaacaataacatcccactgtctgacactgtaaagtctctggcttgaccagttgatacctcttccctgatctttactaattctggatcagttaattgagggactttaattcgttctaacagatcagattgcagcgtcaagttatgaagcttgcccacaacaaactcgatgctacatctgatcatgtcctctactagctgaggtaaaatctgaatcatactagctacccctctgggacccttcctgctcaaggcatcggccactacattggccttcccatggtggtaaaggatctcatagtcataatccttaaccaactccaaccaacccctctgtctcatattcaaatctttctaggtaaagaaatacttgagacttttatggtcggtataaatttcacacctctctccatagagttaatgctgccaaatcttcaaagcaaaaactaccgcggccaattctaagtcatgagtcgggtactgctgctcatattctctcaactgacgagaggcataggcaataacccgatcaccctacattagcacacaccccagaccctgtctggatgcatcacattacaccacaaatttctctttatcagaaggtagggctaacactggggctgtaattaatctctccttcagctctaggaagctagcctcacacttgtctgaccacacaaaacgttgattcttcttagtaagctcggttaagggtgttgaaattttaaaaaacccttctacaaaccgacgataataacaagccagacccaagaagcttctaacttcagtcactgttttcggtcttgg

SEQ ID NO: 356266 - DNA, 1010 bp, Cannabis indica
atattgtatttgaaaagtggggcatataaaacattgtcaagacaatgttgtttcctagaataacagatccactttgattcacagtaagactatcattatttggaagaattaatttatttggtgttgtcttacatatacattgaaacattttgatatcagaacatatgtgtctagtggctcccgtgtctactatccaggaattgagaaaaggagaaactgaatggtgtgacagaatgatacctgtatcacctgtcgaagtactaggatcactgccattcataccatttgtttgagaagcgagtaagttcagtagttgctggtactgagccgaggaaagctgagggagaatagcattattttcaatcgcagcagagttgttttcttccccagtttgtacctggtttgcagcagcctccttagatttgttttgcctattaaaaaacgggggatatccatggattttatagcactttatgatggtatgaccatggatgttgcagtgagtatagtagggacgatttctttaaggtggatgggagtttccttattgaatatcatccttttggttccctcttttgtcccgttggaatgcaaacgccatggcagagttgttgttgttgatatttgaggcagttcctctttgatgttcttcttgagtaacaagatgaaacacacgattcacttcgggcaaaggatccatgagaaggatgctacccctaacttgagagaaagaatccgagagtcccatcaagaatgacatgatgtactccatgtgataatgttcttgaagtctcttgactcctccacaagtgcacccattacaagtgcatgaaggcctgtaattagttagttcttcccatatagttttaagcctagtattgtatatgcttatggtctaattttcttgtttaagattcatgagatcttttctcaaattgtatatatgaggaccatttttttgatgaaaacgagtctttagatcattccaaatacccgaggcacattcatca

SEQ ID NO: 356267 - DNA, 576 bp, Cannabis indica
gactatttgcttcctaacttggcaggggccagatcctgtataaggtcacctggctttgacgccaacaatttttaaatcaagccagccagactacagatggtctaatcttcagtctagtttgggggactactgtcagaagacccaaacatgcacattgccaacttcgaagagctttgtcagacattcaagatgaacagagttagtgatgacgccatcaagctaaggttgttcccattctcactatgggagcgagctaagagttggttggtatctttgccatccaattctatcaacacttgggaggaattggccctgaaattccttttaaaattctttcctcttgcgaagattgccaagtgtagagctgacatcaacaacttcactcagcatgacaacgaatctctttatgaacgaatgagaatttcataggtgaatggatccaatccaatccaatacatactggacctaaaatattgaatggatctgatccggtctaaaaaatactagctctaaaatattgaataaacccaaattaaaccaaaatatatataaaaaatacatctaacagatagaacc

SEQ ID NO: 356268 - DNA, 907 bp, Cannabis indica
aaaacacaattttgaatcacaaaccaattaaatccttaaggttccgctcaagctccgagccgcgactgacggtccatcgttggaccgttggtgttctggagtagttgggtcagctcgtcatcaacattcagcgactttctccctgtcgatgctccgatttggtggtcgcctgagcttttcttcgagattgtggagtctccgagcgcttgcctctgcttggcttctccggatcctcgacgtagcctggctcatcgcccccgattacccagattgtgtggtatgtaaatgtaaactagttcatcaactcaaaatgcacatcaaagcaatattaatttctgtcatgagatttcttctgcttcggattggctaaaccagattagcttaaaccataatgtataactaatgttcatattttctattaaagaaaaaaaagagctaatgttcatatcgtagccatgctacttttgatttctagaactgttttatatctttgataaatgttgaaattaactaggcagtatctcaagttaacaaagctccattgatatcaaaaactaattataaaaattcatgtatgtttaatttacatctgcttcactatgaaacaaccatccataaaaaaacaagttctcaaaccaaattaacaattgttgccttatttttgcttaagtagtttgattagtataaatacaaaatagctaacataacaacaagctttcataacacagtaatcttcttcctgaagcttcctattacaggctttgctctgggttagttccaatattggcttgtggcgtccgattccttcttctcaaggttcgtttcttgcaggttttcttatcatcttgtttcatttttctctctgttttgagtttattatttctctcttctgcttctctgttgctag

SEQ ID NO: 356269 - DNA, 556 bp, Cannabis indica
ttttccaacatctctgctccacttcctcgaacccaatgtaacagagtcttctgcaaaatttactccaaaagggaccataactcgaagcaatttctcaactttgtcaccaggaattggacaggaagatttcctgtggaaacttctacttatgattctgatatttatatggttacttttggctggcaggcgatcttctcagggtcctctccaaagagccctggcatttttagaaccaacacctggttctttgccctccaagtgttctacaaaatgcctctttagagtctttcactattactcccttttgggttcaggtttaccgattaccttttctaagtaaatcgaaaaatcttgctcaaaatattggtggattgattggtaattatattgatgttcatgagaattcacttaatgagggatggggtccattcttaaggattcgagttggggtcgatgtctcaaaaccgcttcttcgtggtcaaatggtagcatttccttggatcaaagatgaattatggctagagttccgttatgaacgattacctgatttctgtta

SEQ ID NO: 356270 - DNA, 493 bp, Cannabis indica
gaaacagttgagatcacccttgacaacatcttagatgaacataataaagataaggaagcaatgattaacactcatgattattcaaaaaatgcaaagtgtttgttggatgttcttttggagttgcaaggtagtagtgagcttacagttccattagagattacaaacatcaaagcagtcatcatggttagtattattattaattattattatttttttttatggcttatttgtactcgtaaagtgaactatataggttttagtaagttgatctccaatacattatttttttttttcatagaaagttggtccttgaatatatgagttttggaaaattcatctcaaaattttattttcttgacaaattggttcctaaactaattttagttttttggtcaacattgttaagtccctactcttaaataatcattatgttttgttaatttcaaatatttgatcaataatttgccaaaaaataaagtttggggaccaactt

SEQ ID NO: 356271 - DNA, 1146 bp, Cannabis indica
acactaataatagtggaacactatagataatgttataaatacggtaagttttaaagtgtggttgggataaatttagtgtaaaatctcattaaacttgacattttagtattttattggagttgcagttagtacaacaactccaatgatttacactaaatattctaccaaataaatatattttacttaaaagatcttgcattttatataataatattaattatccaaaattgctaatttattaaataattgtaaaaaattatatcataattactagtaagaatttaaactcttgaaataatttaataaaataaaatatttatttaaattaaattagtatataataaaaaagggattatttcacaaaaataataaaaaaaattataaaaatacagttgtacagaattttgaatatttttacgatttttttaattttatttacagaaaatacaatctttttatgttgtactcttgttaatttattgttgattttgtgttattttttgttgttgttttgatattgtttaaatattattttcatgttatttttatgtaattgtcttgttttttctgttgtttctgtaaaaaaatcgtaaaaatattaaaaaaaaaaatcttaaagtgtaaaagtataattttatgtaattatcccaataaaaaatatatatcttagtctataaactttttttatagagagaatttaaactctttttttcacaaatattaatgtaaacattttttcaatatgaaactcttatgtaaacatttggttaaacacattgtatgtgttaaggggttcaaaatgctatgatttattctcttacatgcttaactggttctaaggtatatgggacctaaggcaaaataaaatttcggaaccctatatatctaatttaattattatcaaaatgatatttctaatgctagtgtaatggtaaagctttaaaaaaaatccttaaaagctccaagattcaatctttcatagctacacattaaaaacaattttaaaaaaataaacaattagggattaaggattgatcccttgacctctctagttatactatttaccactacatcaaataatatttgttatatttttttcttatttaatattttatctatatattaataatttttttttcacaattt

SEQ ID NO: 356272 - DNA, 584 bp, Cannabis indica
aatataacattagcttttttttttatcaaaaattttatataatttagtatttaattgaatatattttagttcatttattctttataatttatatcgttattgatttaacaaatgagagaaaattgaatacctcctacaaattatttacagcatcaattaaatatataataatttttataattttttaattagcacataaataacaatgtatactaatataaaataaattaagttttaaataagaatttattttaatagctaagagttttaagaaaaataactatattatcattaatccctaaaataataaaaaaaaaaagcttttgatacaatttttttattggaatgagtatataatgtagataagtttttaaagctttgttattattttttttatttaatatatgtttgtttacttaaaaaaataaaaattgttcatcaatgactttaaaacatctatacaaggaaaatgcaagttgagccataaaatagggaagcaatttaggtcaccatatgcagataatttattttaatatgaattaaaaaatatttattaatttatttttgagtaatttgcggcgtaa

SEQ ID NO: 356273 - DNA, 914 bp, Cannabis indica
cactagatgagatgaaataggggttgtttttccttgagaagttgtagttgtcgtggctggtttgagtgtagaggatgaactcggttcgccttctttctttgggaagtttgatcttcaaggtgttgtatttggattatttagactcggccttggttttgagctctaactacccttcttgagctacctttcaactttgattgccataggcaccaaatcttccaattcctcataatggtttagttcaaatgtattagcaatctctcgattcatcccattcaaaaaccttgccattgttgcttccctatcctcttccacatttgctctaatcatagccattccatctcctagtaatagtcatcaacactcttgtatccttgaagaacaccttgcaacgtgaggtacaagtctcgatcataatgagatggtagaaaatgccacctcatcaccctcttcatagcctcccaagagttaatctctcgttctcaattttgcctgttattaatgcacaactgatcccaccgaaaaatagcatagttagtaaattcaatggcagcaagttttacctttttcatttcaatttagttgtgagaatcaaacaccaattcaatcttcttctcccactctaggtattcttcaggatcattctttccttgaaaagcaggaatttgcatctttagatttgccaaatagttatctacgtagttcctagcttctctatcccgaccaaacctcctatggttacccactggtatcccatctaattcttcattaaaaattatctcatccccatctacttcgttatcatcctgttggtgaaccctattcctccgtggactctattgggttgcctcttctaccttatctaacctcacatgtatttgttcacaatcttctctcatcatcctcctcatctc

SEQ ID NO: 356274 - DNA, 582 bp, Cannabis indica
agaacaaaatcaatataaaacaaacctataacaaaatttacagtatatcccattatatcagctcacccaaaaagaacaaaatcaataacaaacaacatgatgaaatcaactatccaccatttcagccttcaacccggccaacacaacactgaccgagatctcccaggctcaaaactaaatctaaaaaatttaactcaaaaatttcatcacactgtgcaaacattcaagcaaaaattctaaaatccataggcctttcactaactcaaaatgaaaccagcataaatttctaaacaaaccaactacaaacaatcttaatgaatctaaaactaaaggactagtgtctagattcacatactgtatgtatatacaatctgtggcacaaaaataaaaaataaaataatataaactagaggaatagtgttactatgttttagaaatccgtctcctacgaagaaattggggtctcaaggccaggaaaatttaggggattaaaaattttaggttcgaaaagatatttctaaaatttataactcatatgaatatctaaaaagaatggaagatttaattcaaaaaaaaaaaaaa

SEQ ID NO: 356275 - DNA, 746 bp, Cannabis indica
aaaccaggataagaactcggacacgaacccataataggacaaaacacgaacccagacccgaacccgaaattggactcaagcccaggactcaaactcacaaccagacccaaaatcaaacccaaacctagacctgcacctggacccaacctcgaactcagactgggatcagaatccaggacttacacccgaaaactaaacccagactcagatcgagatcgaaacctgggactcagacccgaaccttgacccagacccaggaccctaaccacacttaaagccatatctagacctagatcgagatctgaacccaaacccaaactcggaccaagactcgaaccctaacccaaactcaaacttggaatcacaactagaactggaacccgactaggtttaggaccaggaccaggacaaggaccaagacttgaacccaacccaaataaaaacccaaactgagacccaaacccaaacggggactaggacccaacccgaacctagaccgggacccaaatccagaccagaaccaggacctgtacccagaatcaagatagggacctgggaacggaactatgaccgtgacctaagacccgaccccagacacaaacttgaacctaggaccgagctcgtgacttggcacccgaaatggaactagactgggacccgagatcgggatccgaatatggacccagggcttggacctaacctgtagtcagcgtctggatctgggaaccagccccggacccgaacct

SEQ ID NO: 356276 - DNA, 801 bp, Cannabis indica
tttttttttttttttccattttacacattaaaatcggtaggatactttttcaggttaccattgctttatatatataactacacgaaggttgtctttgtcataatgttatatattcttctttctctctctaataattaagcaattatgtagtgaaagaaaaagtatatataagaaggatattattgccttataaatagctatgaaatattacttgatgatgagtacagctatatatccatatatattataaattttatgtatatcaccccaaagaagtgcctagccttctctgctgagtataatattatttatatatattatagttaacacatagtattaactagtttaattaacaaacatatatatataaattatatatttgagttatgaacaatattcttgaagaaaagggttcggagtactcattgcggtaagtatatattaattttcttctttttttttttttttatatatatatataaatataagaattctttacatatgtaaaaattaaataaaaaatataatatatattttttttttctttttctgcctgccgttcttcttgtcacttctaatatataaatataatataaataaaaatataatatataattttatttttttttctttttgatgaacaaatttcaaaattttgtatatattgtgatgatgaaaagtgtaaataccattttggaccctgtgttttgcaaaagttacagattggaccctgtgttttgttaaatgacaaaatggaccctgtattttctaaaatagtaaaaataggaccctgagcttaat

SEQ ID NO: 356277 - DNA, 770 bp, Cannabis indica
atgcgagtgagacctatacgtagaaaccacatgatcagagctaaatggcttaagcagtttaatgctgccatggacgatgattctgcaacaaaaaccattgctcgtggtgaggtgtctcggtcgacgattgcaatggttgaggggaattgtgatgtgctggggtcagatccgatgatagtggaagaaactttgggtcaacgcgaggtagggataggatcatcaaaggttgttaatggggatcctataattgtggaagatattttaccagatgctaagaataaggaaatatctaatgatatcaatgaggaagcttgtcttttggttcttgacacgaaagggagaagaacaactttggaagatattgatggggcccatgtgaggggtgatgtggcaacgggtcaagaggtaaatgcttcaaagaactcgagtttggtgggtactggtgtctagacccaccaattattatgaatattttatcttggaattgccatgggcttgtgaacccatggactttacaattccttaaggatcttatgatagaaaagaagcccagtattgtgtttctctgtgagactctatccaatcgttctcagatggagagagtgtgtgtgacgttgggatttgatggcatgatagtcgtagatgtcaatggtaggagtggaggtattgcgttgttatggaaaattgaggatgtcaatggtaagagtggaggtattgcttgggttttctgatgcttatatagatgtgagagttgcttctgaaggtgtgca

SEQ ID NO: 356278 - DNA, 777 bp, Cannabis indica
taaaccttggcgaccagtctagctttaaaagttttgacttctactccaacgcctcgtttcttcttgtagacccatttacatttgattggacgatattcatcaggtgcgtctacgtattcccagacttagttctttttcatggaatccttttctgaatccatgccggctgaccattgtgtctgttcgggacttgccattgcctgtttataggttaatgggtcatcatcaataccgtcatcaacgaccctattgatttcaccatccaagccataatgagatggtttagtagaaaccctcccactacgacgaggagcggtgatcttctgaacaggaacatcagtggaagatttctcggttgtatgaacttgcaaaggttcaaccgaggaagtgggattatcctctacttgagtagaagaggatgaaacattagaaggagttatatctaaaagcatttcctccaacactactttgctttatggtttgaaattcttaatatagtcatcctcaaggaaagtggcgtttttggaaagaaacactttatcatccttgcgactataaaatagtccacccctagtctccttagaatttccaacaaacctgggaacctcagttcgcttttcaagtttgccatctttctttcttaagacatgagcagggcaccccaaattctataatggcgtaaactaggtgtacgaccattccataattctaaaggtgtcttagggactgatttaatggaacaacatttaaaatatcgatcgccatctgaattgcata

SEQ ID NO: 356279 - DNA, 696 bp, Cannabis indica
catactgcctaaaatggaaagcggtaaataattgatcacataagtagtaaagtatttactctcaacacttatagcaccatgagttgagcttatctcttacgatgattgcacatgttcggccggcctacaggaagtttaaaaaccttggcgctttgataccaaactataacgccctaacatttaggcatgctacccaagatgactaagaaaccctaatcccgtaaattgtcctactaataaaatgagcgtggaaattaaactttaaacgaaaacggaataaaaataaacttgtaataattttaaccttacaaacaaacgttacatgttctgggatcccgaaaattgttttacaaaatattacaagtcttttcccttagccgacctaagtggcaaaactgagttacaaaagttccaacactggtagaccacaaccagcttggtctagtgtggccctaacatgtacattcatcgtccagctcctacactcatggctgattagaaaccgatttaccctttcctgcatagtagagcacccattagccaagcccagcaagacagtataattatcaacaatcataattaacacatcacataagtattaatgccatttcatttttgtctgtatgacacaaacccgcatgttacgctcacacgcctatttatatctatgtggcatagacctacgtgttacgctca

SEQ ID NO: 356280 - DNA, 704 bp, Cannabis indica
agaagtcgagaagcttctatagatttccattggaaaaaaaaaagctctagcatcttacaaaagtaagttgcttgcactagagtaagtaaactaccaggcataccataagccataggtttaaataatctcaaacctataatactaggatcaggaagttttgttaagtccattgaatagacttattaacaagatttcctttcttgtccttgtaatagaaaacttttagttattccatacaaatggtttaactatagttcttttggctttgcgtcttagttccttattctgactatctattacttgttcaaactaacaatggattttcatcacaagtgtcttccaagtcataacagggtgagttccttgaaaccctctcattatgacaacgtaccgtgactatctgtctaagaacataagtggtattggcctcagcgattgtgtcaagaaagcagaggcattgggaccatcttataagatgatagagcaatttggaatcaagaaaaaaattatctcctctacttttctactttattttcagatttagtcattttcttagaaaagtagtatttgttaaaacaaacactttcttatcttaatgacaataggatggtcctgttggaattattttaccaggatctagatttactaccatgtatgttatttaacatcctaatatgaatttttaaaacaatgtaaataaacac

SEQ ID NO: 356281 - DNA, 508 bp, Cannabis indica
aggaagagagagggtcatgtgtttgaaatgggaggggtaaaattggggcttatgaaatattaacctattctaccaatatgagttaacttaggtttagagaaataattttaattcaataaatgcatagaaagttaaaatttcctttttatagttttaattatatttataatttttcaataatttttttattgaaaaaaaatatatttatataattttttaataatattttacagagaatctcataaaaaattattagaatttaaatatttatttataaatactcaattttttatgcacactttatacatgaattaatatatagttttacagtgttctacagtcataatactagtacctcacaaagggatatcatttgtgagctgttagaaatttatgaggcatatgagaatggaacgtatttgggacttccatattcagtgggaaagaataagaatgctacccttagttttcttaaagacaaaataaaaagaaaattcaaggatgggaa

SEQ ID NO: 356282 - DNA, 594 bp, Cannabis indica
tagctttattgtaattttatatacttttgtgtgtttttataataaatttgtgataatatgttatgtgatatttatttttaattttattttagttttctgattaattttaagtatttttaggtgtatttggtagaaaaagattgggattaaattgaagaaaatttgaagaagtggggtcaaaaatataaattgtaaagaaaatcagatttgaccaagaagagacccactctcggtcaactgcaagctccaaccgcggccagccacgtgtccacctgctgagaagaaaagagaaaaacaaaggattattaattttattgcacacatctgaaaatcacaccaacaaaatgccaaaatccttacttttctccaatactttacacataaaaatcaatttatttccccaacttctttttcacctaaataaacattctcattttattttttactctaacttttcactacttttccatccaaacaaataattattttttccagaacccttacacatactctatttatcccttcttttcccaacacaattaaattaatcaatctatttattttaattttgattaatttaatctctcaattttg

SEQ ID NO: 356283 - DNA, 805 bp, Cannabis indica
ttcaagtattaaataaaaaatgcgacattttaattttccgtcatttaacgcttgtaaataaaattagtatttttataaaagtacgggcgttacatgcgatactcctggcgacgtaccgggcgtaggtacgggtgtcagtgacatatgataagtaccgggcgtaggtacgagttcgtctgattagacgattactcctggcgacatgtagatatgtcgttcaatgatatgaaaattgccaggtcatggcatagaatgaaactgttgtagggtttcgtcttggcgacgtgtagatatgggcgtcaatgacatatgataagtactgggcgttggtacgagtttgtctgattaggcgattactcctggcaacgtgtagatacgtcattagtgatatgaaaattgccaggttatggcatagaatgaaatcgttgtagggtcccctcttggcgatgtgtagatacgggcatcagtgacatatgataagtaccaggcttaggtacaggctcgtctgattaggcgatgcgatatattggtgccacgttgtggcacaagctcacctgattaggtgatgcaattatatgatatatgggtgcaggtttttgacactggctcacctgattaggtgatgcatttatgcgatatatgagtaccaagctagggcacaggcttgcctgattaggcaatataatataggattttcagactaaagcatcgactttcttgataaagcaatgtaatgtaatgaagataattactttatgaggtaccatatatacaaattatatttttaaatgaatatgattcctat

SEQ ID NO: 356284 - DNA, 516 bp, Cannabis indica
atcaaccattagatatttgatccaatggtcaagaataaaatacccatacatgtgtaatacccattaagagcatacccatatatatatatatacaagtagaatgctacgtgcgaggcacgtatattaagttttatgctaggtgtatcttgctttatttaaaaaaaatacaataaataattaaagaaaaaatattattagttattgtttgagattattaatatgtatattcaatgaatataaataatgttgttaataattaaaagtaaatactgaatacaatatatgcatgtttaagaaatcttaatattctaactgcaatttattcttaagttaataaaaaaaactaaaccaaaaatcaatgttcgaaaaataaagcatacacaatttaaatttgagttaaataaaaaagaaattaaaatttaatctctaaattgttgataggtgaaaaataaggatacctttaatggttgggttttaattttcttttgcgagacaacagtgtaatatttgtatttt

SEQ ID NO: 356285 - DNA, 542 bp, Cannabis indica
actataaaataacaaaaatataattgcaaaacaataaaaaaaaataacaaaatattgacctaattgcaataagtaaaataatatcaactcttcaatatatttttgtattatgaattttttttttacttaattttgacagcatgatttaaaattacaaaaatatcattgttgcgatggagattagttttgtaatttagtttttaatttcacaaattgtaaaattataaatacccaatttataaacggttcatcatcattgtttatttattgttttaaataaattcattaattgttgattaataaattgctcatgcattagtgaataacatgtcatacatggaaagtctacacagtttaaattatcatgcatctcatagtagaaacaggatatattaagtgtcctatgtgtttatgtgtaccgtttttgaaatctaagcatgtaaactgattaagtttaatttagaattaacttaataaatttaaaattaatctattaatttaaaagagttttaaattatgaattaaagagttaattcaaattt

SEQ ID NO: 356286 - DNA, 492 bp, Cannabis indica
ccggttctaatggtcccccagaaccggtcgaccggttctgtgctgggaaccctaaaaccgatccctttcaaccaaatcaaacccaaactgcacaatctcttccagaatacctgcttatgtcccaacaaacccattccaagcattcaaacacaataaacagctcaagaattaaaaacaccattaaagctcaaagttagagctttcaaactccaattttgttcaaacaagacaacaacaacccaaccaagcttaaaatacaaaatatgtccttcatctaacctctgaatacaaagatgaacacttctaaagaaaacagccacaaagaacacaaattcaaaaccaaaacctaatcttaacttcaagaaaccaaagagagaaaggctaagaactaataccttgaattagatctccaaaggctggctgaaaactgtataattacagcaagaaattccttccttttgctggttttgggtggcacgaaagagagagaga

SEQ ID NO: 356287 - DNA, 793 bp, Cannabis indica
cccagacccatctcgaaataattttccccactagtcacaatgaattcgcactactaacacgtgaatatgaagattggtttgaagttaaattttgttaaaatgactcctttttcaaaaattgaaatattatattatttaggataaatttcaactaggtttttccttactcttacagtcgttagtgttctttcaaaatctaaccttacacatctttaaaaatggtgaaatttcatagggacgaagccgagaccgttgtctataacttttctattggggtttgggggttttcgatttggggtttatggttcgaggttcgagggttttgggtttaggatttggggtttgtggtttggggttttagatttgggggtttggggttaagttgttttacattaggtttttgggtttggggttttgagtttggggttttgggtttttaggtttgggatttaaggttttggggtttgggattaacagtttgggttttggtgtttagagtctttggcttttggggtttgaggtttaggattttgggttttgtgactagggtctagagtttaggatcttggaccaggtatttggggtatgaggtttaaagtgtggggtttggtgttagggttttagggtttcgagtttttgggttagggtttggggtttgggattttgggtatggtgtttttgggtttggtgtttttaggtttgctatttttgggattagggtttggggtttagggtttgatgtttggggttttaaggttttacggtttaggggttttggggtttaggggttggg

SEQ ID NO: 356288 - DNA, 948 bp, Cannabis indica
acacagaaccagggtcgggacctggaaccgcaccccagtctcaatcccgaacccaaactcagaaatgggacctgggacctaaaccagaactagaccgagacccgtgactgtgatcaagatcttgactgggattcaggtaacggggcttggaacagaccagtagtcggtgtctagatctagaactcagactaggactagaaccaagacgaagaaccaaacccgaacccagacctagacctgggacccaaaattagtacctgaacaagaatcgccgaaccaggaccctagaacaagactaggaccatgactaggacccgcaccctgacctagaaccgaacacagacctagcctcaaacccaaactgagactagaactcgggcctggacacggtcgtgtacccaggatggaactgagaaccggacctggaactaaatctgggacccgatcccaaacaccgacttgtacctagatagggatccgaatacgaacctttcctaggacaaagacccagactgggatcaaaatgctcgaccagttgttgaccgagctcttgacgtagacccaaacttggacccgcactcaggacccgaacttggacctggaccaaaacctagacccaaatcggggtccagacctggacacgaacccggacacagactcggactcgaactccaacccacacctagaatcaaaccaaaagcaagaccgggacaaggacccaaactcgaacctaaactaggatcaggattaaggtcttagacccagaactgaatcctggctcagatcaagattggaacttgggactcgaacccaacctagaccaagacccaggacgagaacccacacctggagccttatctggacctagactgaaatccagacctgaaccaaaaattcagaccacgactcgaactctgacccgaactcaaacccaaagtcgaacttaga

SEQ ID NO: 356289 - DNA, 527 bp, Cannabis indica
atttcagcacgggtttgggatttaatctcttaggcactatagtgcggggtataggcgctatagcgcaacacgtatcatttttttaaattttttttaattttaacaggattgatctatctttgttggcctatataaagaagggtgtaaatcaaactaaagggatgcgactggagagatagaaacaatcaactttgagattaaaaaatacattaaagagcaagagagaaaagacttcaagcaatcatcatcaactatcaacattagagctcttttcttcttcttcttctttattcttttgcttagttatttaattatgaacatgattatttttgttattatgaatgtgattatgaactaaacactcattctagagagttgatggaactattttagattatgaatttaagtttttggattattcccaaatttgttcttgttatttgtgcaattttgtgctaattatcatcttcttaatgcttgatcaccattaattagtatagagaatttaagttttacacttgagagag

SEQ ID NO: 356290 - DNA, 565 bp, Cannabis indica
tctctagcaagatactcgcattgtccatagattctcactataataaggcaaatctccacaccgtcgctcacctagtcactcgtgaccaaggtagcatgtgtggcaaaatgccaacacttctaatcatgtcctattcgatattgtccgaatagtcttcctcatcgcccaagaactcccatacgtccatggtccattcctcaaggcaccatcactccatgaatgttggcaggccctcgagacaagccaccaaactagtagcataggttcgacctctgtctctttccagcatggtgcaaccgtctattgtgcatatgcaaactagcccacgaatgactacctgtgtcatctcgtgttgagactcgtggccaatgtgcaccacaacgtctcttggagatttaagtcacgtcccgtacaagcggcatatcgacaagccaatggaaacgtaccgactaacctctggcagtaattttagacgtactactaggtcgactcaatagtgtccatgagtattccaactcatggagacatatgagtcccattgtggtcctcatatgcccgccctact

SEQ ID NO: 356291 - DNA, 521 bp, Cannabis indica
taaaacaactaattaattttattacaataacaactaactttaaaacacattataatggagcaaccaaaccccttcaacatctctcataacatgttatacgctgttgaaagctagatatacaataataaaataaataaaaagtattaataaataaatatatttataccgagctcggagagagagaaagagagagagggagatgaacgggaggtggtggtggttcgacgtatgagacggagatgagagggacatcgacgggaggtggtggtgattcgacgtatgcggtagagaggagagagagactgacgggaggaggggtgggtggagatcgatggatgagagagacgagaagaaataaagatcaaaagagggaggaagacagcgagagaggagggcaatggcgcgaattgtgacttctaggcttgcatcgatgatgaaaagtctacgtctaggatggtgtttactcttaggagtagagttgtgatttggagaagcatcaagcatgtgacagtcagtagtcc

SEQ ID NO: 356292 - DNA, 581 bp, Cannabis indica
aaacagagttgaatgaattactcctttttgattaatctgttagtgttacaagctgagaaaaagtattccttttttttttctatattttaaaaggaacaaaagctaaggctatttatagaagacttaagtgctaaaatgctaaagggtaccaactgtcataactgtcaagaaggcagttatgacagttggatatacaaccgagaaaccaggaacaagaatacctaactaactgatccacttattaggacataacttctaacagtaatgattcacttaattaatttgtaacaaaatgatttacttatgtataaaggtgagtacttactgattattttttattttattttttgagaaaagaactgtcattataaattagagggagtcatttacaacaacaaagcaaacttactaggaatgatattaataatgactacaagtgagatactttgatgacatcacctttaaatgaatagtgaccaagtgagttacggtgatagagttttattatttttttaataaatataattttaaaattatacataaatatataataatatgtttaaaattatttgatatgattt

SEQ ID NO: 356293 - DNA, 520 bp, Cannabis indica
aaccaaacgcgacttgtgtttaaattttaaaaactatttttgttctcttttctaaaaatacttttttaaaaacaaaaaacaaaaagtaataccaaatatgctctaagccggtggttgccacccatcttagacttaatttaactaaattatgtaaagtttgaccataatttgacaaatgattaattacaaaaaatacacatttaggtgtggtttggtaatatttttgttttctaattttttaatcacaaaatgaaagtaaaatttttgtttttgaaaaataaaaatgttttttgtaaccacttttggtttttaattttaaaaatagaaaacaaaagtgtgttctgtaaagtttatttttattttttgattttatttatgtcgggtctaggtccgaagtcggattcaaatttgggccagaggccgggttcaacaccaggaccgtggggggaggatttgtgtctgtccagggttgatcggagtctaaaatattgatcaagaaaaaaaaaaaatagtttaaaaa

SEQ ID NO: 356294 - DNA, 544 bp, Cannabis indica
gtgcatcttgtttttcggtagcccatcacgaaagacttctacggttaagcgtgcttgacctggggtaattttgggatgggtgacctcctcagaagttttctcaggaagcgtgcgagtgaagaccaagcacgctggaaacactcgtgttagtctgtagggtcagtcgtcaatccaagaagcatccacagtggcgtacttgtgtataagagtcattattctgtgggtgtaaggacccaatggaggcttgaagcggggatgttacaaacataaattagaaagcaaataaaatatgatactacgatattcaaagaatagttaaaggttaatctctaccctcaacaatcacccttaattcaaaataatgaatgttatttcgattttccaatcaaattattaatttagtagataacgctaaagtagttaattatctcactctccctattgcaattaattaaggcgaagcgcttaataagtaattcttttatctaagcagtaaatctatgaagcatacaatttatttaacttagataaagctttaaattca

SEQ ID NO: 356295 - DNA, 1047 bp, Cannabis indica
tagatttcccctatatatatatatttataaatactagaagaaagctacgtgtgaagtacgtatacttaattttatcttaggtgttttctatattatttaaaaataatacaataaataattaaagaaaaaatattattaattattatttgagattatttttacgtatatttaattaatctaaataatggtgttacaaattaaaactaaatactgaaagcaatatattagtgtttaaaaaatcttgataatctaactgcaaattgttcttaaattaattcaaaagtaaaccatgttcaaaagcttcacttcttcctcaagctccttgatacgagtctacttgtagcatcaaatcaatagatcaacaaacaaattcatagcattaagcagtaaggaattttctaattaagatagtctcaactatagaatgttgtgattacataacagaaaacaaatcaaactaaattacattgctcacttcattgttaaggagatctatgttccaccccctccctccctccccccaaaaaattgaatagtcgcaatatctagtttacttttcttaatgtgctattaaaaatgtaaaatcccatgtagagattttagccaacataaacaaatagcatatttcaacttgaattacctatttcaacatatttcaacatatagatatctctttttagggttggagatttgagaatagtaaattggagatttgtgattactttccaaatcttctttttttttttttttaattaataatgtcaatggtagatgaagactaacggaaaatttatggtaaatcacagcataccttcagtgtaaaaaatcctaccggttcccttttcatcaatgtcatccttaacataatgcaacaattataaaatatatggtaaatcacataatttaaatttataaaattcacttgtaactaaatgaaaatatattgtaagcttataaattcacttattcataatttaataaataaattatttttataaaaaaatacaacttaaaacatcattttaaatataaattagtttttaaaaa

SEQ ID NO: 356296 - DNA, 560 bp, Cannabis indica
agtgataaaccatataattatgagttgaacaaattttaactttatataacccaaaccaacccatttcttaaaagatgttccaaatttgagacaattttcatacataaaatatattttacattcacaaatatatatattttacgttttcatacgtaaataaattatattgtgataaccttagaacatgaattaaccacatcactaacatgtagtttatagttactctactacttttaccaacaaacctaatgtgagaatcaattactattattaactttgttactcacataatgataccactaccacctaagttttttttaaaagcactatattacacacacgcgcatatatgtatcgtttttttgtgtatgcactaggttgattaattttatcctgtttgtaacataaatattaaagtttaaaatattcatctcaacccaatgaacccaacccaacccaccccatatattattgtactaagtaagtagggttgggttgtacaataaaaaaaattagtgaaaattacatcaaatattaagtaactagttttcataactggt

SEQ ID NO: 356297 - DNA, 747 bp, Cannabis indica
cgataattaataaattaactaataaaaacaaaaaaaaaaatctacatgaaaactataatacaactataaataaattatacaataaactaaaaaaacagttattttatactgaaaaggtattttgtaaaataaaaaaatcaaaaagtaaaaatgaaaaaatttctgtgtgtttgatgtatttttataaatttttcaaaattttgatttatgtaaaaaaaaaaaaaaaaatccgtctttatgtataatgtaattttgtaactgcattattatttattttcttattgaagaaatcacaatactgtttataaaacatgaatttcttataagcttcaattgaatcgatcatctattctcctctctctatgcgtgaattacttgcatgcatgcatgtatttgtctagctacaatttcagaggcattggccgacccaatgaaggtcagtgtgggcttaagcccatgctgaaaaagaatatttcttttattttttaactaaaaaaaatattttaattattttaattgcccaccacaaatgcgcagcaaaatgggagatcaatagttgaatgatagttttacttatatctcaaaaagaacgtattcaatgctattgacaacgagcttattattcatcgttttcaaaatataaaaactcgtcaaggataactccaaagatatagctcaaaaattgatatatttgctaaaattttagaatattgagtatgttatatattttgaacatcgttttagatt

SEQ ID NO: 356298 - DNA, 571 bp, Cannabis indica
aacaaacttaaaagggattttcattatatcagtaacctaagaacctaataaaaccattatcaagcttataatacagttctaatccttaactattgattgatcaataaagtcatattgtaatccaaataatattcattcccctaatactctcccttccaagacaaattcacaaaaccaactgactaaacaccattatcattataaccaaataatattcaaaaaatgtacctggtaaacagaaattctggaaatattttctttgggtattcaatatatactgaaatcccgagatacggctacgcagtacaggttcaaagctcttcatcaatctctttaaaggttcccatttggtatacactgcgtatatatagagagagaaatatatacatacatacatacatacatatatgaacatgtaaataaacttctgctatcaaaatataaaactaacaaataaaaatgcaaagaagttatagaaagaaaaattgatttacaaaatggtcttggagaagaagtgaatgaaagaataagaagaaagatgtcattgcagggagagattgcttaagtggat

SEQ ID NO: 356299 - DNA, 433 bp, Cannabis indica
tcctttttcttttctttttatttattttttcttttttttttcaagaatttcgaaattctagcttactaatgacaaaaataaggaaatagatttgtgacacaaataaggaaactagaattcagtaataacaaattggagtttttttttttttgaattttcgaatttcaataacaaaaagggaaactaacgacaaagaaaaatttggaaacatgaaatcaaccaaaaatcaagaattttgaattttttttttttaattttagattttttttaagaggaaaagaaaaaaaaataagggaaattgatgacaacaaagacacgatgtttgacacaagaaaattatcagaatgtggttctaatagtttcggatttcacaaagaaaaaacaaaagagatgaaacacatattgacaggaatatagaacacaagttaaacaa

SEQ ID NO: 356300 - DNA, 589 bp, Cannabis indica
gtaataatatttctttaggtaacgtttggttagaaataataaaatggaatagaaaggaaataacttttatttcattcatttgtttggtttcattttaaagtattggaatgtcattcctattctagttatgtttttattccttccaatcaaatgctacctaattgagtatttattatgtgagtttgagttggagagagtagacttggatggagtaaactttgagagaatatgaaacccaagtgttggagaagattaacattaccaccattttaatttaaaaagtaagatccacttgaaaacacaaaccctttggtcattaaatttaagacatttctattcctattcttatcaaatctaaacctcataccaaacgtcgtgtatcacctcagtgagcaccactactctttgctccttgacatctacatctttatagagtattatgttgtcttcttgggactagcatataaattgagccattagaactccctataaatataagttaaaaacttttttaaaattcactatttatgaattatatttatgaaacattattcattattctaaacatatttttattaattattatatc

SEQ ID NO: 356301 - DNA, 633 bp, Cannabis indica
tgctgtcttttgtgttcagaaatgctcttctaaggatcatatgtccctcaaaaaatttatgtgccttcacttgctttttgaagtaccgagccacattttgttgatgggccactaactttaggtttgctatggctcgtttttcttcaattttgtcaagtgattctgctaggagagcatgattggcttcttgatcataggccactcttctatgggacggatgttctaattctacaggcaacatagcttcataaccataggccatagcgaatggactttgtccagttgcagttttttcagttgtgcggtatgaccataatacttctggtagttcctccggccaattccctttagcttcttcaagtcattttttcaaagtgtctttgagtgtcttattgactgctttgacctaaccatttgattgagggtgtgccactacggagaaactttttatgattccatgatccgtacagaaatctgtgaacaattagctgtcaaactgtttgccattgtttgagacattttgtgcgggagtctgaaccgacatattatattcttcaccacaaagtccaatacttttttagatgtaattgttgccaatagctcggcttctatcaacttggtaaaataatcaac

SEQ ID NO: 356302 - DNA, 1126 bp, Cannabis indica
aaaaaaaaaaaactaaattaagttagaaataaatacatgaaatatgggtttggataatagatttacaaaaatatagcatatcaaatacaaaaaaaatttaaaagggaaaaaatatcataaaagagtgacaaaattataaatactatatttttataattttttataaaatcttatatttaatgtaattttcacttttggagaggtacatatattaatttgtgaaatctcatgattgttgattgtccggaatctttgggaataattctctgtaatctaatctagtcacatcacatgttcatcaacctgtcttcattgagaaaatccaaaaagtttatggtatttatattaaattatagacatcattattgtgattggatgactaagaaataagtttagtttcaattgccaaccaaatcattcacgatcttataataatcagattctctttctacttgccacgtacctcataatcttacaacatatttcggattagacaatggattgcccaaacactcctatcaacttcttcaaaccgaagattcttcaaagaaaccaacttccatcatgtgcttattgcatagctaatttacattagctacattatcttcattttcttctccacatctcaaggcaagcatagtgcttgcttctttatatatatatttaattattataatgagaaaatcaaacaattacttactgcatgtataagaaaaaacattcacatgtgcaacaaaatatttgaatattatttttctattgtaaactgttatacccaaaattcggtaagcacatcagaggaagacacgtgtcgagctggaaagaacgaagaactcaaacacgcaaacaaaaaagtatacttagcatggaacaacttgttggaaatataattcgcagggtatatttataactcggctaggcttctgcaagataaaaacgtacgaactgctaacttatgtattgacgagaaaccatgtgggtgcacgcattcatgacgaggtctcaacctcgctgcgtgaaagagaaaacgacaacactaaaaatacttactgtatattatacgatatacaaactgagtatagatagtgggacgagtcaagataacagacagtgaggcgtttatctc

SEQ ID NO: 356303 - DNA, 511 bp, Cannabis indica
atagaatcaccctatagtttatatgacaattttcttcattttattgtatatgacttgaaaaatctatttgttgttaattttgctaaatgagttgtactattttcatgtaatgggggtaatggtacttgatatttgtatcgaaagatatttttattttctctataaaagaattagtttattatttgtaataaaagaaaaaaaattcaaagaaacgcgataattaatttttttattggagaaaaaacgtgcagttatttattatttgacaaaagaacatttatttacgtttttttttttttgattttttttgattttaatattttaaagtagtattttttttgtactttaaaagtaatattattttaatattttaaagtactattttttttttgtatgtttacaatttacataacaattaaggagaaatttaaatagtaactaaaatttatatagcaatttacatataaactattggagtaatttcaaaattataaatttaaaaaataaaaaa

SEQ ID NO: 356304 - DNA, 915 bp, Cannabis indica
cagcactagccagttgctcactggcctcgggaaccagtcggttcatgtagtgggccagcatctccttgccttttttggcctttagaagcacaggcaaaggcggagttggtgcctgcacccgctcaggagtactcctgaccagtttagacccagccattggtggtccagactccttggacttggcaaatttaggggtagaagggtttgcagcagtcagctcctcgaaaagtttaatcacctctccaaaaggtctcttctccgaggacccctcaccgccctttgacttcttggccggaggagaggcactagagcttcagcccattctcttcctcagagcatcgatcatctgccgagacatgtctacatagaacaaaaatagtatggttagaaaacagccatcagaaaacacaaggcatgaaagtcaagaagctcaaaagagaagtaaaatgcaaggtgaccgcccgcacagagactcagaagtccatcatcacctaacattgatcttgtctcaaacatgacaaccttcccttttccagcaaaggggggagatggccaaacaggtgaagtgggctcccttatgcgaattgcatgttcaacaggcctaggtgtggccgagagtttcttcttcctcttcaatggggtcatctgctcagcctcagcttcatcctcagcatccaaaggctcatgagcatactacttagccctgacacctcccttcaacttagcttcatgcttaagttgaaggagctcatcctccttatgagctcgttcaggccggccagcaccgaacttcctcttcttccccgccacggacttaggagaaaagtcctaagggtaaagcccatacttcaccagattatcatcggaggtcaactagatgatattcctatcttcctccagcaaccgggcaagttt

SEQ ID NO: 356305 - DNA, 682 bp, Cannabis indica
gggcgaattagggaaccctagtttttctaatttttatgtaatttagggtattgccatggtattcatcgatagggaaacttttattttcaagtttaagtccatgggaagtgatttagcgtgtcacttatcagtgttgtgattgatgtgatttaggagcctgtaattcgccgagcagtttgttccactcaggttgaccggcacacctgaattcggaatcgagctaagattagtataacaatatgcatatgtatttacatgtttagcgtgcattctaggaagcctgttagattacattagatatgtatgttgacttttgtactatctgacagtatcacatcggtacgactagagtatgactagcgtaccgagtataggctgatattatggtcgatagtttcgtacgactttacagtatcacatcggtgtggttagagtttgactgacatgttgggttttgtgccctaaataaaagtcattacaatctaatctgattagttatcaatttaagagatttgaagtggtttacgttaacatgtatttttcatgcgtatggtttaatatatatatatttaatatatgcacaaaatcagttaagtcaagagcagatattcattcacaattatagtattgtcaacacagaggaatgtgattgtgattatatgattcaaaagactaagtccct

SEQ ID NO: 356306 - DNA, 610 bp, Cannabis indica
cttttcttcttcatcattttattaattttctcactagtatctcatcatgttaaatccaactaaagttccaatatttttattatgttttatgtgatgttcatcatatttgttgggagcttttggttcatataattcaaagtagtacttttctttggttttgattcaatgttggaaatttcttaccatattttcagatttgaaatatcattcattttgtctccttagttgttcttcttctttcttttgaagtttattgaagttatatgagcacttcataagctacaatatattacatatgatatatagtgttcataataaaacactataaaaattgtattttttttccttcaaaaaagaacctttataataaaagacaacaactacatttactttaggcataaaattaaatacaattttaaatctcgtgttttacaaaattaactgattagatcttctgttttgttaaatgataaattagactctgtattttttaaaatagtactaaatagtaccctgatcagaggtgttatgacaaaattggttacattttttatatctgttcgtgctagaaattatcttcaagatagttatattaaaaaaaggataaata

SEQ ID NO: 356307 - DNA, 918 bp, Cannabis indica
ctaaaggaaactggccggaggagcttcctgaagttctatggtcgtaccgaacaactgagaaaacggcaaccggacagactccatttgccatggcatatggatatgaagcaatgttgcccgtataactcaaaccaccatcccacagaagattgacgtatagtcaagaagtaaatcacgtactccttgctgaatcacttgatgaaatcgaagagaggcgaaccacagcaaacttaaagctgatggcccatcagtgaaacgtagctcagtatttcaacaaacaagtgaaggctctgaatttctttgtgggagatatggtcctaagaagagtatttctaaacaccaaagacagtatgactggtgtgctcggacctaattgggaaggaccatatcaagtggttgaagttctcgaatcaggagcatacaaattgggcaagtatgatgaaaaaatgcaacttgttctagtaccacggtattggaatgggaaacatttaagaaaatactaccaatagaagtaccaggttggatgaccatatcaagtactaaacagaagaacatttactcttaagtgaatgtccttctgggtggaccacgcccaaaggttcggataaaattacaaagtacttaggtcggatgaccaccatctaaagtacaatctttaatttttgcaatttgtttaatttcatgttaagctaaagatcaaattagatcaaatcaatagctttgatgtaagttactacggtaacagatatattttcggtcaataaatgaataaagatgcttatttcaaaatttaaattgagtcgaatttactagcatgctgttaaattaccataaagtgcgtacaaaaggtttggtcaaacccaaaatcccgaacagacaaaagagcacacttgcgaaaaattataagtgaccaagagt

SEQ ID NO: 356308 - DNA, 847 bp, Cannabis indica
tgtgtcaccaaatattttagatttattttaaataataatagtattaagtatcttagtatttatatgtataaggaatatttatatttaagcatccaatcctcactaactgattagcttttggttcttagacctaagaaaatgcctccaaaaggaaggaagacagggagaacagttggagaagacgcccctgaagccaatgtccaacctccacaagctgaattccctatgaacgcccttctcgaagccttcagagcagttcctgctcaatagatggatcctgccgctcgacagagtcatcatttttagatctttcatcggatccaagtgcttgagtttaagggtggacaagatcccatggtaggtgaaaggtggttgaggcagataaagaaaaatttcaacacaattggaacaccggaggaatatcaagttacttttgctgtgtccaagttagagggtggtgcagcagactggtgggagaccttgtccaggacaatggaaactgatgggatgacttggcaagattttgaggaagttttgagggagcaatatttttgtccatctcacaagagggctctgattggagtatttgatggtttaagacaatgagatatgactatgaatgaattttacatgaagtttgtaaagttatcctcttatgcatatcctggtgttgttgaccaacccttggtgattgaacagttcatgcgtcgtttgaggcctgcgatacgtggtccaatagcccctttgacctttgccgcaccgacaacaaagatttcaagcatctcacggaggacccatagggagctatgtagagtctactacttttcatggacagcccaggacaaac

SEQ ID NO: 356309 - DNA, 544 bp, Cannabis indica
taaagggcactactggtgcctaggaccctccaacgtgtcaatatcgatattggtgcaattaagtatcgggccccatatagtttaatataataatttttatgaagtatcgttaatcaatatagataatgaagaatctcaattatatattggatttgtctcttcaactaacaaattaataattattgttagtttatattaaatagaaaaaaattataaaaatctacaaaattaatatattataatactataaaaaatagaattacctctttttatttggggattatatatagatatagattatatacagacacttttataaaatttatttttctattaataattaagaaaatatatagtatatataattaatagtaattttaagatgacacgtttattttaatatgaaaaccaaatggtaataactatatatcatgtacaaaaactatataacttctcatgcataaaatatataatttcatagatgtatcatcattattttcaataattaatatataaaaatatattactaattattaataaaaaa

SEQ ID NO: 356310 - DNA, 1012 bp, Cannabis indica
gataaaaagaaaaaagaaaccaaatgattcttgaaattgtttcagtcagaggagtatatatataaatatatatttagtgtattttgactttgaaacaattcaagaactttaacaagatacttacattgggacttgggcagagactcatgcttgaagcttgggcagagactcatgcttgaagcttgggcagagactcgtgctgataacgtgttataaaataatataaagtagatgagaagaaagaagaagaagatgaagagagaaagagaaagtgaatgagaatttctgagttgtttattccaatggggtgaacccctatttatacaaatacaagagtgagatattaagaaactaagaaaaaagggaaactaagaaaaagaggaatgttgattacaattaatggtaataaataaaagatttggacatccacataattattaatatttataacaatattgaaaatatattcattttttatattttattaataatcttttacattaaatgacttatattgttattattattttattattaaattttacatttaactttacattattattactttatattttttaataaattattaaatgagcattaaataacatattaaattttacatcaagatttacaattatacaatgagcattgttattaggcaccaatagtgctcaatacattctacaggtggtgccccacgattgattagtgatattctctaaaaattattttcttaagttatatagaacccgatacttaatttcaccaataataatatgacattgaggagggtgccagggacagtggtgccttttagcaattcttttatgcaattaagcaccatagtaaaaattaatgtaaaaatgtcacaaaactattttttgtgtcaaatatagctcaacttttatgtctctcattagagagagtcttatagcataaactaaactagagtaatccctatattatattttagggtaaatggcggcaaaactcccaaaacttttatttt

SEQ ID NO: 356311 - DNA, 598 bp, Cannabis indica
agctaatttataaaccccagttcctactattgcttcgatcacataaggcccttcccagtttgggttaaatactcctgcagatgcatctcttgtgtttccaaacactcgcatcagcaccaaatcaccgacattaaagagccttttcttcattttcttattgaaatacattttttgtgactcaatacgttttttctcaagcagatccaaggacaatttcaagagttctttgttttcttcttgattatagaaatcttatctgtgggttgcaatatttacttctactggcagcattacttccgacccaaatgccagcgagaatggagtatgctctgttgctgttttctcttgttctttgagcccaaagtacttatggtagttcatcgacccatcaaccttttgcagtgtccaactttttcttgatagtatccttcaaggttttattaacaacttctacttgcccatttgcttgaggccttgatatttatgagaagctcttaataatcttgttcctctcgtaaaactcagtgaataattcaccatcgaactgagttccattatcagatactatcttaatgggtattccaaatctgcaaattat

SEQ ID NO: 356312 - DNA, 1074 bp, Cannabis indica
atattgatcccaacttctaaccaattcaacaaaagcgaaggctattggacaaagagcgagcactagccctgaaggaagaggtagagaagctacgcaacaataatttcataattgaagctttctacccagcttgggttgcaaatcccgtactggtacccaagccgaacaaaaatggcgagtttgtattgatttcactgacctcaataaagcatgacccaaagactgttttccacttccaaggatcgatcagcttgtggacgcaatagccgagcacgaaatattaagcttcatggatgcttattcggggtacaatcaaatcaaaatgcatccaccagactaagaacatacaaatttctgaataaatatgggtctatattgctacaaagtcatgtcgtttggcctaaaaaacgttgaagccacataccaaagattggtaaacaaaatgtttaaagaccagatcggacgaaacatggaagtgtatgtggatgacatgctcgtcaaatccaggaaggttggggggcacatagatgacctggacgaatgctttaaagtcttgtggaagtataacatgaaactaaatcccttaaagtgctcctttagagtcagctcgggaaagtttctgggcttcattctcaatgcccaaggaattgaagccaacccagagaagattcaagccctcctggatatgaaatcgccaataagaaccaaggaagtccaaagtttaactggtcggataaccgcactcaacagatttgtttcaaagtcaacagacaaatgtgtttcgtttttcaacatcctgcgaggaaaaaagcaatttgagtggacggaggaatgtgaaaaagattttcaagagctaaaaatgcaacttgcaaagcctctcgtactctcgaaacctctaaacggtgaagaacttgggatatacttagctattacagagcatgctgtaagtgtcgtgttgatcaaagaggaaaactgttgggttttatgccctaaataaaactccatttcaatgtaatccattttattctatatcaataaagaaacagaagtatttttcattcatttatatgtttt

SEQ ID NO: 356313 - DNA, 605 bp, Cannabis indica
gaaagttcttatttaggatgttaataaacatacttgtgagtatatctaacatcctggtaaaataatttccaacgctttggtctagggtagaaatctctcccatggataatccatgggtcattccaaatacttgtatccctcccattggctataagtttgcatgcccctttcttcaaaatctctttagtacgcaccacattcctccaaaactaggagtccgaactcttaaccgcacaatcaaagaattgtctaccccgaaggtatttagctctaagcaacttacagcacaacgactgctcctcattgataagatcccaaccccacttggctaagagagcttggttcatttctaaggattttttaaaaccaagcccaccatgagacttgggcaaacacaggtgatctcatgcctttaaacagatccctctgttaccttgttcacaaccccaccagaagtctcttaccatctcgtcaatccttgtagcaagttttttcgagagcctcgtcgtttgcatcgtataaacaggcaaagcaaggcctgcagatttgatcaacgtggcatgacctgctttagaaagcaattttaatttccacccatgcaactt

SEQ ID NO: 356314 - DNA, 810 bp, Cannabis indica
aatagtgatccatcctcattgtagaaagggtcgaaagaattgctttagagagatctaagagaaaatactcagagatttcattgtgagagctttgagagaggaaacactatatcctttgttctcaagtcaatacaaactaaggggagtaggctattaccaaactaaaggggccgaacctctttaaaatcttgtgttctttactgcttgctaatttttgctctgtgttaattacatttcttatcgcttatcaattgactcactatcgttggctaaaagcgaagtccacatttcggtgctttcattgagagcaaaaatccaagtttactctttgccttaagttttagcagacacacataatggtagtacaaactcgcagatgcgtggttgaccagggtgactcactactgtcagatcctgccttgcaaacttctggaaagacaagggtcccactaggaaccaatcttgaacaaccaatatgcaaccacctactgtgggccaaggtgtgacatcccctctggctggaatcacacccggtgtgcaagagactgggaataccagtttggtagccgatcagagcactcccagcactggaatcccatccacaaccaatgctcagactgttgggttttgtgcctaaataaaacccatttcaatataatcagatttactagttaataaagatcagaaatatcattttatgttgcatggttcacatgatttatttcatgattatatttaatgtataaattctattaagtccagaacatatgtatttcttaatgattatagtgttgtcagcacaatggaata

SEQ ID NO: 356315 - DNA, 204 bp, Cannabis indica
tatccgcacatagaagtgaaacgatgatttccttcgagctaggctaaatagagataaatgatagagcgctcattttagtgattatattagttcactaaaatatcatttataggtggccaagtgttttaaggataaaatacattgaaacggtgtaacggaaattttgtccctatgcaatgtagatcatttatagaggatcattga

SEQ ID NO: 356316 - DNA, 533 bp, Cannabis indica
gttaagccctaggttcattgggccatttcaaatactcgagaaggttgggcaggtagcgtattggctagccttaccataagcgttatctgctgttcaaaatgtattccataattcaattatgaggaaatatgtttcggacccgactcatgtcttgagttatgaagtccttgaactacagttagacttatcctacgaagaacaaccagtttaaatttttgatacaaaggagaaagttcttcgaaaaaagaccatcgctttggtcaaagtgctctgcaggaacaacaaggtggaggaagccacctggagttagagtctgacatgaggactcaatatccagagttgtttaggttagatttcgatgacgaaatccttttaacggggagataattgtaatgactgcatttcataatatggattagaaaagacaattagcactaattattggtattttttataattattagtgaatttaattatttgtgagtcccattgttagaaatgggcattagagttataatttctcaattctggag

SEQ ID NO: 356317 - DNA, 590 bp, Cannabis indica
ctctctctctctcaatttggtagatctagggttctgaaatttgtaggcttaaatattctttttatagtgcttgaaaagatagataatccgcttagaattaggatttgttttttaaaaaaaaaaaagataagtgagcattataacgcccacgagatatatttcccgaatatcccatgtgctgaaattatctttttttttagaccggcgctatgccgtaggaattgggtgctgtagcgcccagcacaatttttgtttctacacctaattagtattttggccataacatcttcaatacaactcggatttagaagattcaagatgttctagaaatgtaagaacgagatctaaaacttttatgttgagctccaagtccagttctgcttctaaggttgtaaaaagtttcaattaagctataccttgtaaaagctagccgacttccacaattttccaccaaaatatgctaacatccctctaaatgactctaaatgtatgattagtctttaaaatatcctaaacaattaagatcatgaaagtattaattggaaaaaccctcttcaagtggccgactatggtgttaattggccccactt

SEQ ID NO: 356318 - DNA, 801 bp, Cannabis indica
cttagtcacgcatctgactcccttctatagggttcttcatcgggtagctttgtacaattggctcccgaattctcatttgtcatcagttactcttgagattggcaagtttctgtatgctgtaggaactcatgtatccattaatctgccatctctcatatttgaaaggatacttgaagcttcagaaactactggcactcgtaacaagctaccatttccaagccttgttcaacgagttcttatggctgctcacccgcctcttacaacgcatgactatcaagttcaaaatcctgttctcagtaagagctttctctctgtggtcaataggcagccctcatcaaccactccttctgcatcaaaagtgagtaaaggcaagtctcctatgttcaaagggctttcggattccagctggcaggtacaaatgttttctgagtttcaatcttttgccaaacgctataagaaggatcaaaagcgtcagcttgcatttgaggcctccatgtatcaaatggttcgcactatcaagtctactcttttgcaccattttcctggggattctctgcctgacatttctctgcctgagtttcatcgagattcgtttggagcatcctctgatacgtctggaagtaacgcacatgtgcagggggagccgtcagtatttgcccctgtcaccagtccagcccaaccggatctgcatcctccagctgactcgtctccagtaatcactgcaacacccttggtgtcgactgggccaccttcccagggggagtctggcaaagaacaggatcaagcagctcatattcaatg

SEQ ID NO: 356319 - DNA, 698 bp, Cannabis indica
catctaatctattatatcaacaaaagacttgttcaagttgaaggacggtacccattgatagaaaagcttacttatgcctaatcttagcaacaaggaagttaaggccctacttccagactcatcctgtttgggtatacactggccaaccattacgccaagtattacaaaaaacacaacgcttctggacgattactcaaatgggcagtagagttgggtcagtacaaaataatttttcaaccccgaacagactttgtagttgagtgcataagcaaagaagaaaacagttcaaaggacagcctggagccagtacaagaatcccaactgaacaataatgaagacagacctaccaagaaattacacatggacgggttagctacacatcaactgtttggtgcaaggattgcccttgtcacactgggggccaacacctgcacggggcagtcaaatttaaattcaaaccatccaataatgaagcagagtacgaagccctcattgctagcttgaaacttgcgccggagctgcacgctgaacacatcgagatctgtagtgactcacagttggtagtaggggtgttcgcggtgtgggtggtgcggtttttgactattttttcaaaccaacccgcacatgcagtttttcaaatttctcaaaccacacccgcaccgcgaaattaaaaacccgcaaaaaccgcaccgcaaaaa

SEQ ID NO: 356320 - DNA, 561 bp, Cannabis indica
ttggttgctcttgatctaaaaactctatcaatatttaggattggaatccagacattgtcaaaagcatctaatggaacaggaatcaactcatcttcaagaggagtggttgattctaaatcctccttcacaacaaagtctttaacaatatttctctccaaaactcaatatcctcaaagaactttgcagttcccgtttaaaatatattccttactttgaaaccataaaatttgaaacccctaaatcgctcagaatatccaataaagtagtgactcaaagttttggattccagcttcttttcatttggcctataaggcctagcctccgctggacatccccaaacatgaaagtgttgggctttgttccctaaattaaactctattttaatgtatttttttctgttcacttatcaataaagaaacaaattaaattccattacttgtttaatgtgttatttggttcatgtgatcatttatttacttatttgatttataactacatccaaatccttattatcacaatgatattcttgtttattgtgttttcaacatagtggaaagtaat

SEQ ID NO: 356321 - DNA, 502 bp, Cannabis indica
cttggccattactttgtggatggtacggtagagcagttctgtggcagacgccatatctcgaggggagtgcttcaaactgtttgttgcagaagtcactcccttcatcgcttatgattgctcgggaagtaccgaaccgagtgcatatattcttttaaaggaagagaagaactgttttaccgttattggccggtgttgctgcagcttcaacccatttcgaaacatagtccacagccaataagatgtacagattgctaaaagatgaaggaaaagggcccatgaaatctatcccccacacatcaaacaattccacttccaagattcctgttaagggcatttcgtttctccttgagatattacctggtcactgacaacgatcacatgccttcacaaaactactagcatccttgaaaagcgtaggccaaaagaatccgctctgcaacaccttagcagcagtctgaaatgtcccccacatggtaaagcatggcagtggttgagaatagag

SEQ ID NO: 356322 - DNA, 877 bp, Cannabis indica
aggacttcgatcctgcttcccaggagccaatgactcatggccgaacacagcttctaacttccttacctacaccacgaagcacccgtgagtcacaatgactcagcaagaaaagctactatataaaatcatagaaagtgacagcaaatttcattacaatgtaatatatataccaataggtcatacatattcaaggtgcataaataacttaatgtctatgagagcacacttattccataatcaagtatattcatagttatttgtaatcaacaatctctgtgtttcatacaacctcctaaacatttatcattataaatactcaccttcagtgcttcataaaacactctaattcacacattaccataactccataatctcagtgcttcataaagcactctaattcacacattaccataactccataatctcagtgcttcataaagcactctaatcttacatctctataaacacgaattcttacatttcgtgagtcactaagattctgcaagaaaagaaactaatttcttaagcaatataaaagtccattcattcacagtataacaaagatatatccagttacaagtcatcacataataacatgcttaagtcattcaacaacttcgtaatcacaaaattttggtactttataaagtacccttaccactcgttaaccacgagctacttatgtcactatcgttgcccgatacagcaaacgataagtaagaaacctatccgcggtttcaggagtaattactcataacggtaatgaccgtttcttttactcgatcataatcgagtcacaacgataataatcgtttcatatcattaccctcgatcataatcgagtcacaacgataataatcgtttcatatcattaccc

SEQ ID NO: 356323 - DNA, 1241 bp, Cannabis indica
ccgggtttaccacctcagagaaaaattgttttcgttattgacttggcacttggagcagaaccaatttccaaggctccttacagaatggctacagcagaacttaaagaattaaaaattcaacttcaggggttgctgacatagggtttacccgacccagtgtgtcaccctggggagctccggtactgtttgttaagaagaaagatgaatctttgcagatgtgcattgaataccgggaattgaataagttaacaatcaagaataaacatcctttacctaggatcgatgatctttttgatcaacttcaagggaggactgtcttttcaaagattgatctccgatcgggctatcatctgttgagaatccgagaggaggatgtcccaaagacagctttccgtactaggtatggacattacgaatttctagttatgtcttttggactgaccaatgctcctgcagcttttatggacttggtgaatagggtattcaaggatttcctcgatatttgtgttattgtatttatcgatgacatccttgttctgcagcgacttcgggaacataagttttatgctaaattcaagaagtgtgaattttggctatcttaggtgtcctttcttggacacattgttagcaaagatgggatcaaggtggatccgggaaagatagaatccgtcagggattggccaagaccgaaaacagtgacagaagttagaagcttcttgggtctagctggctattatcgtcggttcgttgaagggttttctaagatttcaacacccttaaccgagctcactaaaaagaatcagcattttatatggacggataagtgtgaattaagctttcaggagctgaagcagagattaattacagctccatattagctctgccttctgataaatagaagtttatagtttattgggatgcatccagatagggtttggggtgtgttctgatgcaggccgatcgggttattgcctatgcttcccgtcagttgaaagattacgaacagtgataaccgaatcatgacctagaacttgccgcagtagtgtttgctttaaagatttggcggcattatctctatgggaagagatgtgaaatctatactgaccataaaagtctcaaatatttcttttctcagaaagatttgaatatgagaccgaagcgttggttagagttggttaaggattacaattgtgaaatcctttaccatcctgggaaagccaatgtagtggctgatgccctga

SEQ ID NO: 356324 - DNA, 611 bp, Cannabis indica
aaatggaactagaaccgaactaggactagggtcaggacaaggacctgaaccaaaagccgaacccaaactcagaaatgggacttggactgggaatcaaaactgaaatttgacctagatccagaaccgtaaccggaccaagacccggactgcaaatcaaaccaagacctgaattgggagccggacacagatcccaacccaaaacaggacttgggacccgaacccgaacctgaactcagacccaaacatggaaccagactagggacacaaaaccagggtcgggacctagaaccgcaccccaatctcgatcccgaacccaaactcagaaatgggacttgtgacaagaaccaaaaccagactgagacccgtgacaatgatccagatcttgacttcggattcgggtgacggggcctgaatagaccagtagttggtgtctagatctgggaatcagactaggactagaacccagacgaagaacaaaacccgaacccagacctagacttgggaccataaattagaacatgaacaagaatcaccgaaccaggaccctacaacaagactaggaccgtgacaggacccggacccagacctagaaccgaacacagacctagcct

SEQ ID NO: 356325 - DNA, 628 bp, Cannabis indica
aagttattagggtcacgtgactattctaggtgtatgattatgaagaagtaaaagtatatagaaattacagcaatcaaaaaagataaaactagaaatttttactaatacgtattgaactagctagcaaaaaagaaatataataataataggtaaatatatgttatcttttttttgaataatgatgaaattttattaaatcaaatcattcaaaactaaagatgcaaaatcaatgggtaatgcatctccagagtaagtacaatcagcctcaacaagagaagatcgcgcaatagcatgcgcaaccttattagcagatcgcttaacaaaattaaaagaaacatcatcaacacccgaacacaacgtcatacaatcagaaagtatatggccataaggagaagccatatgtttaaacttttgtaaattcctgatgactctcaaacaatccgactccaccaccacattcgtccatctattgtctttaatccaactcagagcctcctttatgccaattgcttccaccacgtgggccttcaaacaccctctttgagtagactctttgcttgtaagacaaccccagccgctgtccttgctatcaacccaataccaaaacgcctctcattagagaagattg

SEQ ID NO: 356326 - DNA, 1247 bp, Cannabis indica
cctactactctctctctctctctctctctctctctctctctctctcacgcaacccaacccaaacgaccagaccagaccaaacgacaccagaccaccaacgatctcacggaaccaacgacaccccaccaggccaaattgcgaaaccccacccgaccccaacacgtcctgaccaaatcgtgaaatcgcgaaacccaaccggacgacatcgcgaaaccttgaaagaagaaatcgtgaaacccaaccacacgaccaacagaccaccggagacgatatcgtgaaactccaaatcgcgacactcccccaaacaaaacccagatccgagacaataaaaaaaggtatttggctaaacttttttgttgtttgattactttttaattgtttgtgcttcattgtaaagtaatgtatttagtttatgttcaattttttttgatttcgtttgaatttcattgttttggtatgttttctggtttttgcgaaatttgcgacgtatcgcgactatgtgcacgacataacgcgacatcgtctagaatagatgaggattttatgataaccgtggttctcacgacgtgttagcgatacattggcgacatagttcgctatatattgtatttagtacgtaggttccatgattttatcgacgtgtatgtgtgtttggcgacatgtttgcgattatatacgatatgattagtgatatataacagtcgtacataggattcttgtttttcatcctcctttttgtgtttagcaataaattagcgacatatttagcgatatgatcagcagtaacttaggattacatttcacgatgtatagtgacatactacgatatctttcacgacatacttctaacaaatttgttgacaattttgcagatggctcctgaacttaaacttccagtttcccagcatttcacgggacgtcttacctatcggggtacatataggtttagatatatcaagaccaatgagctggatttgtttgacacagtaaaggctagtcctttcggacacttttgggaagctggagagttgatttctctggcgcgttggtccacagcctcctcttacgaaaaatgaaagtggatacagaaaaggaggatgaggtttagtttcatgtagggagaaatgacatgagattcggacggatagagtttggactcattactggcttacctatgggtagtgcccctacagacgaggaaatacacgccaagtccaacgacaatctagttcggacttattttgaag

SEQ ID NO: 356327 - DNA, 695 bp, Cannabis indica
attatgcttcttcgggtcagacccgacccgacaatacagactttggttttttcggctttttcggcatcgggtcggggcaggtggtcggatttttcgggttgccgggtcctaatgttcaaccctaatgtagtattgctgctataaaaaatagtggatttgtcaaaattcacccgttgccccaatgccttggcaaagctctccaaaagattaataatgtaagagacctcctcattcgttgctttacagtacaaaaaactatcatccgcaaaaagcatatgggaaaccaacggagcaccattcgacactttacatccatgaatccattttctttcttcatatctactaataagagctgagaaaccttcagcacagatcaagaaaagataaggtgagattggatcgccttgccgaagccctctactaggaacaatagggccaagagtgtagccactgcttacaacattgtattgcactgtggaaagacaaccatatatgagacggacccatttttcatcaaaccccaaccgagaaagcattggacaaagaaagtttcaatccactctatcatatgctttactcatgtccaacttcaaagccatataaccatctttaccaacatgtttccttttaagatagtgcaaaatctcaaaagaaaccattatattatcagtaataagcctccctggaatgaacgc

SEQ ID NO: 356328 - DNA, 854 bp, Cannabis indica
ttggatatcaccaaaccagaagcgaatttagctcttactaagccctacactggtggacgtggtaccttttcttccccttattatccttcatctactcactctaatgtctcaccattgtccagaggcactcctttcaattctggacaatattcgatgcaacatccaccaccaggttttgcttctgcaactcaaggtcgtggtaatccatctgggcgtggcaatccctcaatttctcgaggtggtcatacacatggtcgaggacagtacactgcatggggacagaaagtacaatgccaactttgccacaagttgggacacactgtcaaacagtgtttttacaggtttgataaatcctttcaaggccctgaatctttcaatacctttactggcagtgctaaccttgcagaagctcaatctctatatgcctatcctgatgttgttggagacaatgcatggtatcccgattctggagccacacaccacttaactcctcatgctcagaatctcaccaactccactgatctcagtggtgatcaacaaatactcatgggagatggctcaggtttgcctatcaaaactgttggtcatacaacctttctttctcccattcatagtcaatccttagcattacataatcttcttcatgtgcctttaattacaaagaatctaatgagtgtttctaagtttgctacagataacaatgtctcatttgaattctttcctcaatcttgttgtgttaaggatttaattaccaagaggatcttgttggttgggaagcttgacaatggcctgtacaaattcgattctctccctatctgtcaacagcctgctgcatcatcttccagcagcaattc

SEQ ID NO: 356329 - DNA, 945 bp, Cannabis indica
gacgttcgacgattgttgacctacagtttggtatgctcttcgtatcagcacagtggcttgccgactacgatcttcaatctctactaggggtgaacattcaaaccgcaaaaccgacaccgaccagtaaaccgactgttaaaaaaccgagaaaatggcgccacgtcataaccgaaaccgtttaaaaaaaaaccgaccacaccgctgtaactggcggtcggttacggtttggccaataagttggcggttataaccgtaaccgaccatttatttcacatttacaatatattatatcttcaatacatatattatataatattaatatacattaaacgttttcatttataattatatatatatatagtttttacttttttttttcaggaatcttttcctttttcaatgttactttatttatatatcacattcactcacctcactcactccacccacccacgcggcacaccaccaaaccaaaggtaaaaccaatcaattactcctcaactcagtattttatctctctactgggttaccacaaactaaacacacaaatcaaaagaaagaaagaaggaaagagaagccaagaggaggagcggctggagtgggaagaaaaaaaagggtttcacctaaatttttttagcaacccccaaggcccaaactggtatgtttatgatgatgatctatcaaatgattcaaatctaatgtatttttttttttctgtaaatttttttccttatctttatatattaaaagtgcctatttaacggaattcgtggtttaatggtttaacgattctttttttatttagccttacacgattaacttagcagactgttaacgttaaacgttaacaaataaataaacccaataattaaacccaaaaattaaacaatcttttttaaattaaaaaaaaatatcttacccacatatctctctaacaaatcctac

SEQ ID NO: 356330 - DNA, 929 bp, Cannabis indica
ccattatatatttattgtaagaatatacattaaaaaattacaatacatcataaacaatatatctaacaccaatccataatattcaactaaaatttgtgaagacatcacaaaacatcacaaaatctgagccaaaaaatagaaaaaaagaattcaaatattttttttttgaattccaatatttaagagttacagaaatatattgttggcctactttatagaacatcaacaagtctcatttgagcctaaaagacaattaaatagacctcactatttctttgactacccttttcaatagctccctgaaaaatgacatataatcaaagttaagaccaatatacatttgtaagcttgaagacactgaaaaaatacattgtataaatcacttcattcacaaataggtgggcacttcacttcaaaatcacatcaactaattcaaaataaatttccataccatctttaattcaaagcaattttagcacgtataattctatacacaaacaattatatacatatatattatatgtaaatagatttatacatatgttcgtaatttttttgacagtttattgaaaaactctttattatctctttaccaagtgtctaagaagaagttatatcaccttttatctcattgagagaaccttatctagctctgccaattcttaatcttgaacttcaaatcaaattagtaataaataaagtaaaagtaattgcattaactgaaacacatgtaagaatgacaataaaaattaaaaggtgtagagaagagaaataattccttttaatgtatggtttacttgacaaattaaacactagtactagaaataaaattgtgtttctttctttacacactccccatcaggtgaaaacttggacctcccctattcggcctaaaagaaaagatagacgctcaggtctctcgagcctca

SEQ ID NO: 356331 - DNA, 656 bp, Cannabis indica
acacttgcttaaaatcaactaaaaaccaacaaaaaattgcttgaatcaacatattaaatcatgttctaacttcagaaatcaacaacaacatacaacaacaagtacaacaacaaaactaagcatgcaaccaattcttacttgatttttcaagaaactaaagaggaaaagagtaagagctatacatagagcttgaattgcacacaaaatcagcttgaaataccaaagaaacaccaagaatcttgctgctcaaagaggggccaaaatagagagagtttgagagaaaaaatgattttttgcttttcttgatttttttctaattttgtaaaaagtgacaaaataatttcattttcttatttcagccaaaataaacttagaaaatcaaatttaaaactaaatattaaatcttcactaaagacaaaactcataaggcaaaaagaccaaaatgcccttgcccactttaaagagttaaaagcactaaaaggggtattttgggaaaattctaaattcccgaccaatcccgacattcccaatgtctaataaactgccccaataaactaacatactaagttgtgattctactgagcgaaacaccgagttccatgttgccgggcaccgaaaatgcaaaaaaatatgaaatttcgctatatgacataaaa

SEQ ID NO: 356332 - DNA, 807 bp, Cannabis indica
tgatgcaggaggggtaggagccccgccaaccactggagtcctaactgactcagtcatgcacccaactgcgccctcagctcgcagtgctttttccaccatctcagcataggaggttttgtcgtctgtagtaataatcaaaccatgcttaatcttcacattcaatccatcaaggtatttttccttcttactgaaatcggttggcacaattcccggggccaacctcgccaaccgatcaaactacgttgtatattcagtaacgctcatgttctctttctgggtcaggtgagtaaactattttctctttgcacttctaacggcctcattatagtacttcgcattgaaaagttcctggaacttttcacaggtcatcgtggtgacatcatgtatcatagacaccatgtcccaccacaccaatgcatcctcttgaaactgaaaagtggcacacaccactctgtcattcccggtgacacccataaaattcaaaatcttggtgatcacagttagccactgctcgactttcatgacgtccggacctcccagaaaaactggaggtgcctgcttgtggaacctttcatacagaggttccattctatttaccgctaccactggttcggcctggacaacaggggcaggtgccactggaacttctggaataggcactgcaggagcaccctgctgtcttaattgctggatctcattatcttgttcctcaattctggcttgcatttctgcaaacctaatttcccaattctaggcttcctgagtggcttgggcagcctgggcagcctgtggtgggttaacatcacc

SEQ ID NO: 356333 - DNA, 994 bp, Cannabis indica
attaaaatttgtaagacccaatattaaaatgcattaatagcattatgcaacgtcttgtattgtttggcaccttaagatacctcttaatattttttcttaaacaacagtccacggtattattattatttttaaagcattgctattgggcactagtgatgaccaacactttctataggtgatgtcacacgattggtgaacgatattccctaaaagttatttttttaagtaataagagactcgatacttaattacactaataaacatcaagaaagatgttaggcactaatagtgatttttaatgtttctctttattttttttttatcaaaattaaaagttaataaaaatccttttttcttattagaaaacagtattaaaatacttacccaatagctaggtatcatttttaaaccaaataatactagccagcatgtttttttttttttaaattaagtactcatattaaattagatttaactgtatgtataaatatatttttggccccttctaaaatttaactctggctccgcccctgattgtcactttgttcgagaaaagatgacaaactcatcgatttgcctcattccagttagcaggaaccttcaactagcatacgcttttaccaaacctctaccttcttctactctaacatctcacattagcaagatgtccatacatgacatatatagtccatcttaacagattacttgtctcttcaacatgtggttattttggttatgttaattaggagttagttaatattcggttattacactacaaatttttttactttcagtcagaacaaaatatgtggctaaaaataaaatagttgtgactaattacaaattatcattcttatattgtgattaaaaagtctgtggctaaaagtataagtcacaaaaataaattgttgtgactaaatgcatgtatttttagtcacaatacttgttgtgactaaaattaaattagtgataacttgtatttaaatactatatt

SEQ ID NO: 356334 - DNA, 887 bp, Cannabis indica
gctaaaagcgaagtcaacattttggtgctttcattgagagcagaatcgcagatcgctctttttgacattcaacacgatggtgcaaactcgtagaggcctgtctgacccagcaaattcacagacgctagatccgacattgcaggacccagggagttcaagggttccactcgctgtcaatcctggacagacgggaaacgtggtgaatggcgggacaactcctgttactgaatctgcacctggtgtgcaagagactgggaataccagttccgcacacagccagggcattcataacacgactattctgccaggaatcaatgcccaaacaaccatcgaagatgcaaccgaattgcaaaatctccgtgctgcgctcagacacatgcagggtcatagcaatactttgcatcatgatcaggaggaactgcgtgccgcagtaaatctcgcgtttgatgaacaaaggcgtatgttcgctgaatggagagacaaagagatggaggcattaagggctcaccatgcagagatctaagatcgtagtcagaaagctaccgtgctgatacaaatagcctaccagactgtaggccagcaagcgccgaatgtcattcccttgggagaaacggaggaagacccgatgattaatgcctcccagacaaccaatggtcagccatccaatccccggtcatgagttccactcgtgggcgaagaggtaggcgggcagaccctgtccgggaattcatcaggaggagccatacctgacggatccaataagaataatggagtcattccgcctgtcaaccaagcgaatcaatcgctaaggcatccaagctcttttgtgttcaataggctgggaacgacccatgacttaagggacgatctaaacagaagaaggggaa

SEQ ID NO: 356335 - DNA, 809 bp, Cannabis indica
ttttgatcacaataaaagtgttgagactaaaagtgaaaaagtttgtgactaatgactaatgactaatcatcattcttatgactaaaagtttgtggctaagggtagtagttacaaaaatcacaatttgttgtgactaaatgtatttttagtgttgtgactaaatctaaattagtcaaaacttgcatatccagaatcaatccaataaatatttgattatacatctgatggataaaactgatccaatccaacattcaatggatgttgaatcgatcggttaaagtttgaaaaaatggttaaaaaccgcacaacccgcaccgcgaacacccctagtaaaatctaacatccaatattaattggattgattctggatatgcttaaaaacattggatatgatccaataaacaccctaaatactatgttttactcacaaataatcttttattgtgactaaaagtcacatttagtcacaaaaagttatgctgtgactaaaaaattaatcactaaaagtagtttttttagtgaatataaatagataaattaataaatttataattagttttaatctgaactttaaagttaaattacacgagaaacacatcaaatttaaggtttaagtttctaagtatctagttatattaagacagaaaaagaaattcctcttcggtatttgggcattccgatttgctaaaagaaattagtaaagtgattgtgatagtatcattgagaaaatagagactagattaatattctatttcaattaaaaataaatgaaaacataatataggtatgcatacatatcatatcatgca

SEQ ID NO: 356336 - DNA, 590 bp, Cannabis indica
atactggagcatgtccttgcccttcttagcctccgtgctaaccaccacggccgttgaaggggtcctagtctgatcagacccgtacaagctccccctctagaactctttgacttcgagaccttctggactggagggtccagggcaggtcattccttagaaaggtcaatgacctcttcgaccggccccttctctttggacggagtctcactgcctttagatcttttgggcggaggagtttggcccgagctgtccccccaccctcttcttcaaggcttgaagcaccttttgagacatttctgcacaaacaaaacagcacagttagaagcaaatatgatagaaaagtatatcatcaaagtagtacagttaaaaataccctgcacgtgggcaggagcatttgctcgaacaaccacagacggggcatcatcgtctgaagaatcttcctcctactgcaccaggacggcttttccttttccttccacaggggcagatggccgagcaggcgtatcaggttctaatcctgatagcgtgttttactagtacttggttatttgggagagccttcttcttcttcttgcttggcctctcctgct

SEQ ID NO: 356337 - DNA, 810 bp, Cannabis indica
atctatttaataattataatcaattatcaaataaaattttcatttaacttatttattaattagaccttacaacgtctctcaattaataaaaaaaatcttaaatcctcattttcttctcaaataagcccttacttagtgaaactcataaatagaattctaattgattaattaaaattaattaattgagtctacaagacattattatctcaactagtacaaggatcatgggcctatataatcaagcactcaataagtaattctagaatttatcaagtaaattttctttattattaattcctcctcactcaactatagattcgaaattgcactcctgattacataaaatactctattcaccaagaatagatacgctataaattatctattgtttcaatccgaataatcaaagatcttctatagatgatctatatcgagtaaggacaaatttaccgttatacccttcaatgtattttatccttaaaacacttagtttcttataaatgatatttcaataaactaatataatttctgaaataagagctcttctatttatgtctgtttagccaagctcaaaggaactcatcatttcacttctaaatagtaatagaagctataaagtccatatctatgattagttttctcactcaatggcactaccatattcccaatatgtaaatattgggccgatctgtttagtccactttaacgaacaagttaaaaaacacatgttatacattaagccaaaacctaattatctcaagattaagatctattgatctaagatcagctaagttacattgacttagaaaa

SEQ ID NO: 356338 - DNA, 692 bp, Cannabis indica
aaatgagggccaagtcccttttaatcaccaaaagaatgtaaaggagtaccgccatcgctttttcttttcttccagcttccaagccgtggactgcctggaacttctcacggagtgggtcaggattccccctattctctgcactgctcccacccgactgcttctccaacacgccaagaccttctccacttatgacaaaaaagacctcaacatgggagacttggtcacgacagaaaactgccgaatggccaaactgatctccgggagctagtcggtggatgactttaacctctcgaaggttctctgccctaacatccgcaccccggccgcagagaaagcgctccgggcggaaattatagcctcggcggaggaccggtaccagaagtacctctttaggagagaacaggagttggcttacatcaaggctcaggtcgccgccgagaggaccctttgcttgggagcaggcacagatcaaatgccttccaggcctaaatctttggtcctggttcccaatattggggctcccgatgccagcacatccggcttcggtaagtctcctttaacggtctatcatgttccttcagtccaagagtattcccggtataggcctatagaattcgacgagcgccttcttaagtttaggatgccccccactcggtggggggatcatgccaaggccttttacttttcccatt

SEQ ID NO: 356339 - DNA, 502 bp, Cannabis indica
ttattatccatctcacaacactagaattatggaattaaaaattgacttggtcagtgggagcgatcaatctaggaacctagcttctaaaaaagatcatttattttctcaaacttccatcccaagtattagattaattatgattcacaacaactctttagtttaataattattgagaatccataattaactaatcattaataatccacaagtcattgataaaattctaataaatcatgttatttagtagttgcttacaatttctaaacaacatgtatgttgaaccattttctcttaaggagttggttggttgatccttaagatgacctattagaacaataaaatcaatgtttctattgataacattatgtacaataagagttcatgtaatgtccccgcttcaagcctccattgggtccttacacccacggaataaatggctcttatacacaagtacgtcactctggctgcttcatggactgatggctgaccctacagaccaaca

SEQ ID NO: 356340 - DNA, 832 bp, Cannabis indica
taattattgggtttatttgttaacgggagatcaaactaatcgttaaatttaacagaatattcttttattttgaagtatattctgttaaaccaagaaataccgttagatagacacttttaatatataaagatattgtgatttcactaatcttctcatcttattctttattttgcaacgatgtaaaatttataaatttaagatgcttcatcataatatactgcaagaaatttttttagtcataataaaatttgtgactaaaagtaaaaatattgtgactaattaaaaagtggagtgctaaggacactctctatcacactctcatttgcattctctatccaatttaataacaaatattatcttttacttggtgtagttgaagattattttagagagttattcattacttcggaaattaattgggaaagggtcacggcttgtgtgcatagtcgggtgtcgactgctatgaatgagactcttgttatttcgatcgaagctgagaaggttcagaaagctcttttccagatgcatccagataaatcacctggtccggatgagtataatcccggtttctatcaaaaattttgggatattgtcagcaaggacatcatccagttagttcaatacttcttcacttttggtgagttgtttgatcatttaaaagaaacaaatattgtgcttatcccgaagaagtctaaacctaagagtatgggtgatcttagcccaattgctttatgtaatgtggcctataaaattgtatccaaggtgctggctaatcgcttaaaagttgttctcccaagtgttatttctgaaacccaaagagcctttttgccag

SEQ ID NO: 356341 - DNA, 650 bp, Cannabis indica
aaaatcaaaaataattatttatcaaaaataattatttgaataaagaattcaatatacacatttatatatatgaatctcattaatcaaaaagaattattaaatatatgaacaataatttgtcacgctatatgtttcccaataaagaaatccacctcctcatagtcaaaaataaacaatacatgtaatacagatctttgtaatgaagtacctaaaagaaacaaaacttcagttagcataatcggaaaaggtttaagtgaactaaataatgactaagaagatctaaattacaaaatgaaaataacatgtctatatgagtatgattctattgctatatgagcataattgatctaagagaaaatagataaacttataaacatataaatatacttaatattaattttgacaaagaaacaagagatatttacgcacatacaccatttttgaattttattcctacgattaccgttattaattttattaatgaaaagtagcggtacttttcaatttttttggacacgtgtatatgtggggggtatttggcgtgttatacacgattttttactgtctttcctttcaacatatcatttccaactttttcatattgattcatattctctttgttctcagtttatttctttctctcttttttt

SEQ ID NO: 356342 - DNA, 532 bp, Cannabis indica
attaatgattatattttagaaatcgttatgcaacaatttggtgtaaatttaaaatccagcacattaagtgatctccaattgcattttttttgtgtatatttgttactaatttggtgtagttatttctcttatttaatgcaacaattccaatgattaaacatcaaatattagacctaataaatagccaatttattatcttacatttttttttattagcattgttatttgctattaggtagtgcttaacactttctagtaggggtgttcattggatcacatccaatggatttggacccatccgatccaatccaattatttattagatattgaattttaccatccgatccaatctaattgaattgagtcatccgatccgatccaatagatgtattgaattggatcggttccatctattggatgctttaactggttttttattggattgaattggatccattcaatgaatccaatggatgaatccaatccattttggccactatttaggctaatttcattcaaaaaaaaaatatat

SEQ ID NO: 356343 - DNA, 1165 bp, Cannabis indica
taaaataatttccaacagaggtagcatccatctaccacatttgcttgaagttcccaacaaggcacagggtaggatgtttaaggtgagaccaacagtctgcctgtcattgttacaacttagttttgtccaaagccaagaaagagaagatgccagccaagagctctaataaagagcctggcagagggtaatgaagtccagcccaaagtggggaggcagacatagatcctcgctttggagatcctgcagacagctttagacatgtagaagaactggaagaagtggaggttgatccaacattttatagccagaaaactaaagattgggaaaggtttagtgccaaaataaaatcactattgataaaatttccaagagcaaaccttgacctttttgcatggtcacatggatacatggtcggaagagactcttccgtgatgacccatgcactaaaaattgatcttaacttctgacctgtgaaacaaaaaaggaggttgttggataaagagcgcgtccaagcgctaagagaggaagttgaaaggttgagggcccatgactttatcaccgaagcattctattaactttggttatccaacattgtgttggtacccaaaccaaacaacaaatggaaggtgtgcatagatttcaccaacctgaataaagcatgtcataaggactgatttttgcttccaaggatcgactagctggtaggtgctattgcttgccatgagaacctgagtttcatagatgcttattcaggttataaccaaatcaagatttagccacgagatcaagcacacacaagcttcatgacgtgcctaggcctatactgctacaaggtcatgccctttgggcaaaaaatataggggccatctattagagatttgtgaacaaaatgttcaaaaatctcattggccgcaatgtgtaggtgttggaatatcttttaccaggatctagatttactaacaagtatgtttttaacatcctaaatatgaatctctgaaacgataaaaataaacacataaaaggtatgagaaaccttacattagttgtagcagaattaaatgactcatttcgctcatatctctaacccttgtatcatttctgtagcagagtatcaccaagatctgatcctgacactccttctgttgtttggattcttcacagtctt

SEQ ID NO: 356344 - DNA, 779 bp, Cannabis indica
ggggatcctaccctagccggttttaggggtctggtaaaaccggctaaccagtttgcaccagtccaacccaaacttttcattctttgctcaattttccaccaaatgctaccaaaccttccagagtacctaaccaatgcataaacaatattttccaaccagtatttcacagaaaaacccaatgaattaatttatgccattagagatcaaagctttgaacttaaagctcaaacttgcacaacacctattccaatcatcaaaaccagctacaagaagctaataccaactcaattgaactctataattcgaattctaaacatcccaaaccctaacaaccactaattcttaaaatcacaacatgaaaccaactaaaaccttgagaaaacttagctaggagtgtctagggttaccttagcttcaagagtgcttgattccttagctttaatcctgaaaaactccaagttttgagggtgattccctctggttttgtcccagccgaaagagagagagagagagagagcttcaagaggaaaagtctttttcctaattttttgattttccttcaaatgagaaaagggtttctctaattaattctttgctgaataaaggaggccacatgtcacctcccaaggcagccaccacaccacccctttaaatgactaaaatgccctttaggttaaaacttaaatatttctaaagctaggggtaaaatggtcaaattccataacctcgctcaatcccgataatttattttctctaaaatatttcccactaagaaataa

SEQ ID NO: 356345 - DNA, 1376 bp, Cannabis indica
tatatatatatatatatatatataacaaaacatatcaatcatggcaatatatcctcattatatgctgagtattatcttttatgtattacgatatattcattatataacaatgtactaagcgaataaaccttaaatcttatgtttattctagttgtaatatcctggaaaatatattgatattttaataggacatattttattaaatatgtgattaagtgggccttagagtaggattataatcctacttaaactaattacgagttgattagggaaatatgagtaaataaataaataaagcataatttattaattacggagattatattggaatatgtgggtatcgtagataccataatttgaataaaatattctcgagcctgacaaatgtggaacttgacggggaggtcagaaatgtcacgacaataaaagatgaattgaattgtactttataccggactagtttagagttttgggttgtcagtttggcggattagctagaattactaaaatgcccctagattttgaatggtttcagttttattaagaaggcaatatggtcttttcttaggttaatttattttgacattcagtgttatttaggctaggttttatttgtttatattagataattttgaacttatttttagaataataagttttttttatttagaaatcaagaaaccacaaaggcttcatctccctctccgtccccctctctttcttaagcaacttgaaccagccaaaaccagggggaaattcttcacctttttccttgaatttgagtagaatttgtacccaagttcaacctagaagcattggaggtaagttccttactttgaggattgagaattttcaagttttaagtttatttttgggttagggttttgtgatttcatggctgtaggattaaactggttagggattgtgttttcagacctgttttgaaatgtgttaaagtttgaattgaatgatttttgctggttgtttagtttggattgagttaaatgaaataaaatgagttttcttcacttgagtatgtgatttttgaattaagagtttagatgttgcaattgatgcttgggatgcattatattgatgatattgtactattatgtagcttttgggttgctttggtggtgtttggattgaatatggaggaggaaaatttgaaaattgcagccctgccagaaccagtcgaccagttggtctagtgcagcaaaatcggtcgaccggttttcctgcaaggggaaatttttagttttctccaggggcagttttagggctcagggtgattttcgtgtctggtgtagattgtttagaagttttaaaacctattttggagctaatagaagttaaggtttaccggttatgggaat

SEQ ID NO: 356346 - DNA, 468 bp, Cannabis indica
caaacaattgataaagtgaaccagaacatacacaaatgaatgaaaaatagttctgttactttattgatattgaattatctggattacattgaaatagagttttatttagggcataaaacccaacaggaatcacctggtttcttgggaggaggtgggtcgatcccgggaagagggtggtttgggtattgggggttttgagctgagaaataaaggaatgctaaggaaatggttgtggagatttccattagaagaaagctcattgttgcacaaagtgatagtaagtaggcatgggaaatcgaacaatttttgagactcaaaggtgggtgctcgtatgtctttaaaagggacgtggagagatattttagatctttatggtgattattttgagctggtacatttcaaggtggggaagggagatcgtattcaattttgggaacatctctgaagagtgtaacaccctaactattt

SEQ ID NO: 356347 - DNA, 823 bp, Cannabis indica
aaatacaactcaacattatttaagtataagagaagagtacgaacatcatgaactaaaagaccaaaagaggatgacaaagtaatttggctttgcacggcttgtacacaaactaaactatcagtttccaaaatcacttgtccccacgaatgacggtcaatccagcttaaagcttctttgatgccaacaatgtcagctatttcaagttgcacccactccatcttttccatagtgtaaataaatttaattataaatattaattttaaaatatttaaccattagattttagtccgatagcgaataataaaagagaaatttaaatttctatacttaatttaattacttaataatagaaaatataaaaaaatacatctttttacactctatcaaaaatatgtttatatgaaaaatatttacgttaaattcaattttttttatcacttttttgttgaaaaaattttctttaattattttttcttttgagataaaattagaaatgcctcttttttttgtctgttaactaaaaatgcctgcatattaaaatctattcaaatttacccactttcataaggttactatccaatttactcttacatatgttaccttaattaatagctggcgggtattcatatggttggggaggcgttaatcacttaattgtatgaaataggaggggtataattggaataataattaaaaaagatggcataaattaatgagttttgagaaagaggtaaaaatgagatgactcccttaaaaagggtataccatctaatttttattattttttttttaccaatcccaacccatataatataaaaatgag

SEQ ID NO: 356348 - DNA, 476 bp, Cannabis indica
gttctctctccatttgataaattttagctccattgagcttgttgttagtcaacggcgataccatgggattgttcatacttatgttggatactacaaataacaataaatagaagtcaagaaggtttaacacaaaatcatattcacaaattactagcacttagcaagtaggaatgacaagtgaaaatactaaaacatacaatcctaaatgatttccaaggtttctaacaaactgataccagtgtcccgtttaggtgagagtcaaagataccattcattgaatagagttgtcacctcatctaaaatgataaacattctagcaaccttttattcgatcaagatgagaatccagcgttgtcccgtttaggcgagagtcaagaccattctatcgtatgagcttccaccattgtttcatacttttgtaagtcttactcttagcagccgccattaaagtgttcagcactaggaataaaacactt

SEQ ID NO: 356349 - DNA, 564 bp, Cannabis indica
agtggttgggaacatgttatacagtaaaatgtaagctttcctaacagatcaaatattagttcccttatagtgttaattttaggagtgctaacagttggatccaaatctataatgagctatagattaactgtttacattgaattaatggcacataaggagtcaagatcgtaattataagggtaaaatagtaattttaaccaactctaattatgaactaataattggaggacaaactacttgtattaattatatcaatggactacaagtaagaattatgtaaatataattttatattgtcaaaagtgtaattttatatttatagtggagtaataatagaattaataaactagattattctactgatgagatcaataataatcaagtgtttattagagcttcaaaatataggtccatggtctccgagccacctctaaataacactgtataggggaaagttttatttgatgagtaaatttgagtgagagtttatttctatgagaaataaattcttaagggtaaaataataatttatgaaattatagttttgattaattataacaatta

SEQ ID NO: 356350 - DNA, 897 bp, Cannabis indica
gataactaatcagattgtaaagagttttatttagggcataaaacccaacattcttccctcgacagctttctcggggctgataaagccagcgttatgattcgagacgttgctagggccgaattagagagtcatgcctttctcatgaatatcctaacacttagcttctttctttgtggctacagtcgggcctatggaggatctcgtggccactcttgctgaggcctacagtcccgatgcctctctgccttcggctccctcccagtcggtgacccccgggaggtcctcctccaatgccccttcaagcgcgatcgtcttgatagacgaggaggatgaagttgaggagggcgaggtggcagatgcggccgcccttgatcataagcgaaagagcaagatggtggaggctgaaccttctaagcggacccaaaggggggacactccggtgccgagcaatgactctgggattccatccgaaggggaggaatatcgcgtggccaagcacaactatgcccttgataagtacagtcgggggcatattgaggtggaggccttgaagaagattttgcgggaggagcagctaaacactctctacgaggacgccttccggaatccgtgggacctaaacatggatccgctaacggactggttcaaccgcttcgtcgggcccaccttggctccctttccctcggagatgaccagccagttcgtttcacacctaacacaattcccacctaaaagatatgttgcttgtgcctctttgaactctgtctaccaggtccaagacattagctctgctatggccgcggtgagtacttgtaatttattccttcctttgatattttgtctaagacatctgatttcactcttgtctcttttttcagattactgccgagaccggcc

SEQ ID NO: 356351 - DNA, 516 bp, Cannabis indica
ggatcacatcttcatccctgccttgggctgttccctatttggcaatgcttttcctcttgtccgaactctgatcgtaggattcttcctttttggccttggttagggcaaggttgtaacattcccgtgcaacttgttaatttcctttcaagcaccctaccccattctttgttgggaacttaatgcacgaatggaaaattgatgtaacaggttttaagtcatataaggctggtcaattaacatgacgttaaaggctgatggaacatcaagtaccaggaattgtgccatcacagttatgctctatggagcttttccaacagtgaggggtaggcgaattttccctagaggtgcaacactctggccaaagaaaccatacacgggctggatacagggaatcacatctttgagtttgagccccattttttcatacggtgtttttaacaggatatttggtgaggctccattatctatcatagtttgggccactgttttgttggctatttgtacttccacgactaa

SEQ ID NO: 356352 - DNA, 579 bp, Cannabis indica
aggaaggcatcataccaccatcgaaccaccatcaagcctgacaaaaaaaatcagttttttgcctaaaactcagatctggccattttcgaccctaaatctaacatctactcatagataacaaacattaatcatataatttattcctttgacaacattgtcgatggtgaagacgtggttgatggaaaagtcgttgggtccgcagtggtcattggggttgtggtcgtggtggtcgtagagagaagggaccaatgttgtgggtggtgagttgtggatttgagtccttggagtgagttcagagagcaagagagataagggaagaagcgagagggttaggtatttgaaatgggaagggtagaatagggttttataaaatgttagcctatccactaatatggattaacttaggtttagaaaaaaacaatcaatctaatcaatgcatattagggctgagcataaaatctagaaaaccaaaaaaccgtttaaactgacctaccgaacactgttagaaccaaaatcgacggaaccgaaaactgaaaaaaccgctagcggttaaaaccgccattgaacgatcagtttttt

SEQ ID NO: 356353 - DNA, 680 bp, Cannabis indica
ctgaccaaaccttttttacgagagaagggttgaatcgttatagcatcttgatcgaacctttttgacaaagaagggatcaaacaactataattttgatttaaaatctatccaacgagaaaggaaaattaaaagttataaatcgcgtataaaactgattactaacagttcttgcaaactaggaaagtactaaacgaggcatcactacgccttgataaaagaacttaaacctagaaaattgatagataatataactattcatgcaagaaaattaaaaatacacaaagtgataaaatcattaaagtatatttagttttcttaaggcagattgtaactgctatagcgaggcagaattgacaactgctcgaaaatcaaaaagtttggtagattactaactacttaaataggaagatcacgagaaatggaaaaatccaaaagtactgtacatttgatcaaaatatgattgtttacattgtgaatagaaacgcaagcaaacaaaattgtattaagttcgaatgaaaatagtacgaggcatttaagataagaaaaaaccaagttgggttacaaacttatctttacaaaaatgccactaggggcaaatcattaagtcatcttcctaaacaagggatgagatgagaagtcgataaactcgagaaagaccgactacacatagcttggagaaa

SEQ ID NO: 356354 - DNA, 774 bp, Cannabis indica
acataattattaatatttataacaattggtgaattttttattataattagaagaattaattagatacatagtacatatcgtatatttaaaattaaaaagttgtggttaaatatattttatatgcacacttataagtaggggtgtttattggaccacattcaatatttttaggattatccagatctgatctaattatttattagatgttagattttaccatccgatctaattaattttagtcatccaattgatccaacatccattggatgttagattggatcggttcaatccatcatgcacataaaaaaaaaacaatattaataatatgaaaaatccaaaaaaaaattataaaaacaaaaaataaaccaatgtacattacaaaaaatgaatcgaaactatatttataccttaatatggacgttgagattcaatattttctcaacaaatatcagtggccggagttatacctgttggaattattttaccaggatcttagatctactcacaagtatgttgattaacaacctaaatacgaacttctaaaacgataataaattaaacacatataaagtatgagaaaccttacattgggtgcagcggaataatatgtctcctcccactcagatctctaacccttgattcttttctgtcgcagagtataatcaagatctgagcccgaatgtccttctttgttgactctgaattctacacagccttccttactatgattgaggtattacttgatgtgtgtgggcactgctctatcacttatag

SEQ ID NO: 356355 - DNA, 272 bp, Cannabis indica
aaaaaaaaaaagaaactgaatatattataaggagttttacttatacgtaagagatcaatgatatatatttactccaaaaaagaaagcaataattttgaaatggacaatggaatgtagtaatattcatatatatatataggtgataaaatatatatatatataagtatatataagcctgatatagcttgcagcagtgcatatacaacacgccaattcaaacggaccatcggaccatcgtaccagagcatcggacccatcgggccgatttcaat

SEQ ID NO: 356356 - DNA, 487 bp, Cannabis indica
agtgccattattattctaaaataatctttcgatgcaactggagagaaagtctctttataatcaatgccttgtttctaagtatagccttttgctacaagacgagccttaaacctcaccacattacaattttcatcccgcttggttttaaatatccatttacaaccaatttgttttacaccttctggtaatggcacagcttcccaaactttattgtcttgcatagacttattctcttcattcatgacatcattcaacttttgagagttaggacttttcatggcctgatgaaagatgattgtatcgtcttccatcgttccaatgtcatcctcatgttcttgaagatacaccatgtattcatctgttggaatatattttaccaggatctagatttactaacaagtatgtttttttaacatcctaatatgaatttctaaacgatgacaattaacacataaaaggtatgagacaccttacagtggttgcagcg

SEQ ID NO: 356357 - DNA, 504 bp, Cannabis indica
tttctttcacatacagatcagcatactgatccactgtataggtcaccttaacgggcaagaaatgtgccgattttgtaaagcgatctaccacgacccaaactgagtcgtacattcccgtggttctgggcaaaccaaccacaaaatccattgcaatatcttcccactttcattttggaagtgttaatggcagaagtaatccagtaggtcgctgatgttctgctttaattttttgacaagttaagcacttagtgacgtaatctactacatcccttttcatcccataccaccagaaatatggcttcagatcttgatacattttggtggttcctggatgtaaagagtaaggggtagtatgagcttcatccaatatttccctcttaagctcagagttattagggacacatactcgtgccttgaacaacagcattccactgtcgaagattgaaaagtccttagctttgcccgctaagacatcttctcgaatcttaactaattcaggatctt

SEQ ID NO: 356358 - DNA, 1430 bp, Cannabis indica
atttaaaaaacaaacaaacaatgtaacaatatttagaaagttggttaacatatttctattttaaaatagaatatttaaaaaatatcttaacttgaattcaaattaggttgtttgaagatatttaaatctaacgaattcttaaaatatcttaaatttaaatttaaatatccaactaattttcaaaatctagtttaatttaatttaatttaaattaaataaataactaataagatgatataacataatatcttattttgaaaattgaggtatttctaatattatatttcaaatcttataatctaataaattaaatttaacaaaataaatcaatttaaaaatagaatattattctggttaggatattattaattttatttaataaataaataaaataaaatatccttaaatttaaaaattttatggttagaaaacccttgaatatctattcaaacaaaagtaaccaattattcaaaaattgcatgtcattttaacaaaaaatataaattttattaagataaatatcttaataagataaaatatcaaataattaacatctatctaatcttataattaaattaataatatattttaaaaataaaaattttgaaaaaattacacgattagcaatttaaaatttttttagattatttttaagtgttcttaatattttaatgtcaaaataagataatttcaaattttattaataaaatatataaatatctaatcttattattaaaattaataaactaaactaaactaattaaattttaaaaataaccataatgacaagtagaggtgtacgtcgatcgatgtggtcggtttatgttatattttatttagggtaaatactattttggactatgtgttttacaaaagttatcaattggactctctcttttattaaatgacaaaatggaccctgtattttctaaaatggtacaaataggacccttaacttaattttttgacaactttttttttttaaaaaaaacaaactgaaaaatacgaaaaaatatagaatatgtaaacaattttgtcataacacttttagattaaattattaattaaaatttattttgacaaaaaatcagttcagggtcctatttgtaccattttggaaaatacagggtctattttgtcatttaacaaaataaatgtccaatcgataacttttgcaaaacacagggtccaaaatagtatttacccttttatttaacctaatgtaaagattgggttacaaaaatctaagtgcgactcgccaattaagaaaaaaaaaagtttcaactcgtcccaataaattggttagtttagtcgggttaacccgttcaaaacgagcactaatgttttattttttttcacattcaattgttatattttagttattgtgataatgaaataaatataaagattgaatttaaattttaaattat

SEQ ID NO: 356359 - DNA, 571 bp, Cannabis indica
taagtgcacctatattataaagggcaaaaacaattacattaccacttacatagacaaagtatatgtgtcaacaatacgttattatattatatgtgccagaaatattttatttactgaagattatatcatttttatttcaaatctttttgaatgatttaagcaataaaaaaccccaaatataatacttaaagggttcaccaaaaaaagtgggttgagcttttataaacagatggactattcatatataataaaattaaaactatatttaagaaatttgtattttcataccaatacgtagcggtgcaatttgaacaacaattattatatttaaaaccgcaaactgttgagaatattttaccaagatctagatttactaacaagtatgttgattaatattctaaatatgaatatctctaaaacaatgaaatcaaacacataagaagtgagaaaccttacattggttgcagtaaataaaatgactcattcagctcaaatttctgacccttgttcctttttgtcacagagtattatcaagatctgagtttggattctctcctttggatttggttac

SEQ ID NO: 356360 - DNA, 673 bp, Cannabis indica
ccacagaactaccgagaagacagctacggggcacactcctttctcaatagcatttggctcggaagcaatgctgcctgttgaagtgaacatatcgactcacagaagagagtttttataatcaacaagaaaaccatgaacttttaaagttgtccttggatctacttgaggaaaaacgaatagagtcgcaaatcaccaacacaacataccaacaccgagctacaagatacttcaacaaaaaagtcaagaaaaaactattcaatgttggagaccttgtgctaagaagagtctttgcaaatacgagagatgcatcagtaggagcgttcaatgcgaattgggaaggtccatatgtcatcgaagcagcagttggagtcggactttataaattaactcgactcaatggctcgctaataaagaactactgcaacatagaacatttgtgactctactaccaataaataaataatgtaactcgcattactgatgtaaactttaaacttcaatcatgaataaagagaatcattaatattaagtaattacaaagtttattctttaaaaaaatccttaagacgcatttatgtatgattaaccggaattcatctggaaatacatggtataatgcaaacccgccatttcaatttttttttgaaattcaaaggttctcgactaaacctct

SEQ ID NO: 356361 - DNA, 561 bp, Cannabis indica
gtcttgagtagggaagcaactccagcaacaaatgagatcctgacacgataacaaaatcacaacatcctcagggagaaaatcaaagattgtctgtttgaattgaaagccttcttcatcaacagaaatgtatgtcacaactttgatatctttgttgagccacgggaacttttcttggaagatgaataatgagatagagaattttgtcctttgtaattgagattggataaaagaacgatcagatatcaagttgttccaagttttagatacacatttcaattgaaacaatgtctttttaggtaataggtatagcacttcgatgaatacatcattattcaagcaccttatctttctcatttcctgaaacacaaaatcagattttctcattaattaaatgtataacatgtgttgctatactaaacaagtaaaagaccataattgaaactctttaacaataaaaacttctatgcaccatacaatcaactattgccataccacaaaaactgttatgcaccattcttaataatataaattacgttgcaatataacttgctatgcagtaca

SEQ ID NO: 356362 - DNA, 925 bp, Cannabis indica
aaataactttttggagaataagtatttgtagtcattataaaaaacccataaatatgtaagatcctctgagaacaataatacttttgatttcaatcatgctattatttctacagaaattattaaaataagagaaatcgtccaaaataatttgttaattgaattatattatcttatacgataactaattagttttcaaaataacaaaaaaacataaaaaataatccgtatataaaaataataacttattatattacatgacaactcattaattttaaaaatactttttaaagttacctaaatatattttaaattataatataccatgatataacttaaaaatagctaactagttactaaaatatatacaaataagtttttagataataaccaaaatatatctcaaattatatgatatagaaaataaaatttttttttttcttaaaaaaaataaaagtaactaattggtttcttatcaacactattagtaaataaaaatttaattataaaaataatagaaaacgtcaataaaacatcaagaaaatgctacatttaactgaagcggcacatcaaataaaaatagtaatgtcattattgtaaattagattaaaataatgtatattattgtaaacatccctaaaaataattgcataaaatgaacccaaacaaaataatctttctagatcacgaggattaaaatccaaacaaatacacatataattaatataaaaaaaaaattagaaaaaaacctcaataaaaataggtaaataaatgagaaatttacgataaattactattttcggttaaaaatttactgttttacatttaaagatttttttttaaaaatatttttatagtatttataaaaataacaagaaaattacataaaaataattgaaaaataacatccaaacaatattaaaataac

SEQ ID NO: 356363 - DNA, 740 bp, Cannabis indica
attttcaaattgtttaattatttttaaaattttaataagttttttgcggctaaatcctttcaatgttttaactctctaaacttaaattttaatgtgtacattcttatacacgttaaacatttatattgaatcttctctattttacagttctccaccgtattaatgacatcattgtccccaaaatcgaaccttccacctttatgaacaaccgaagatccatttatttttcttgatttgtaagtacaaaattattgagagagagagagatggtgttacaaaattcaatattttttgtctaaaactttctttttttttcctctaattgattggttattcaggtcctatctcaagattaccctagtaaattattgatctttcattatttttgttaattttttttgttatagtaaagttgttcttccaattatgttgttttcgtgttcaagatggatcattacggttgggagttggccgtgcgacttgtttgtgcggaccatgcttgagaaacaagaaggagaaagatggagggaggtgcaaagagtaaatgctgtgaattttggtaaattttggattgaaggaagaagatgaggtgtgaagagaacgaagaagaatgtattttttttttatgatttaaaaataattattttaatttcgtttggttttaaattatttttaattaaaactatgttttggaccaataaaaaattgacatatgatattttatgggaaatttacatagt

SEQ ID NO: 356364 - DNA, 1129 bp, Cannabis indica
ataaaaagagaagtgtttaagtagctggattctcaggctcttggttcgtttcttctgggccaatcggagtagaaggatctgttgcttgaacaggaggtacatcagcagtctgactggaggttgaagcagccgcctcaatttcgccataggccacttgggatgcgcagaactcaaggtacatgtagtcaaaattggcctgaggattagccttccaaaaatcaaagaagacctcaagaccagctgtctccatgacattgaccttctccttcaacctggccacctcggccgaaagctcctcctccttggcttccttctcctccttcatccgatgaagaactgcttgaagggaagtcctctcatcctaaagactgtttacctcagaagataaggtctcgatggtctcctcaaaattgtcagcaacctcgagatccttagtcagctcagtgatcttcttctgagcggcaaacaacttcttgttggcttcacccaactccaaccgaatagctctgacttttgccctggcttcttcagcatccttcttagccaagtccgcctccgccctcatggtgtcggacagagccgtgttactggaagcagtagacttagccggggagaaagtgtaggcccacttcagaccggcctgcacaaggaaaaaactttagcatttgagctaagtatggaagattaaagggaagtgtcaagaaagacttaccctggtgaactccttcaagactccgcccaccagtaattccaaagaagagtcattgtcagcaccaaccagttgttgactgaccttaggaaccagccggttcatgtaatgggccagcatctccttgcccttcttggactctggaagcaccggcaaaggtggagtaggtgcccgcaccctctcaggatactcctgaccagttcagacctaaccttcggtggtccagactccttggacttaggagctttgggggtagagggccgggtttgcagcactcagctcctcagaaagatcaatgacctccacagtaggcctctttccttagaagaggacccctcaccgcccttagacttcttggacggaggagaggcactagagcttccgcccattctcttcttcagagcgtcaagcatctgccga

SEQ ID NO: 356365 - DNA, 555 bp, Cannabis indica
agttggttgtggggcaattggctaatattaccctacaatctactcttttggagcgaatcagagaagcacagttgcaagatccagagttagtgaaatcttgagatagggtttcagctagaaagactggtgaatttgaagtggatgatacgaaaattacgatttatgaatcgtgtttgtttgcctatagacgacgacattaaaagagagattatgaatgagtctcatatgactccttactcagttcatccagtgtcaacaaagatgtatcaagacctcaaagctatgttctggtggccaggagattgttaacgcccaaaattgtgacttccacaacagtggttgtagtatagatcgggcggtcgattccacagggaggtgattatgaacaaaaacgttagtagaaaaatgaaaacaaaaggttaataaagagtgacaatagtaaccaatgattttgtgatttttgtttcggtaataaatattaaaagagagtaaataaaggtgtaatcaatagtaaaataaagaaaggttttaagaatcatccatatgcttgtttag

SEQ ID NO: 356366 - DNA, 584 bp, Cannabis indica
gttctataaaagatcaactactgatattattttgttaatagtgtatgttgatgacattgttattaccgaaaatgatattgaaggcatctcatcccttaagtccttcattcatacccagtttcacacgaaggatttaggggtgctcaagtattttttggaagttactcagagtaaataaggtattttgtttcatagaaatgtatgtacttgatttgttaactgagacaggaaaattgagagcaaaaccttgtaatgctccaattaatccaactgtgcatcttacacgtgatggaaaaccgtttgaaaatcctaagaaatatcgcagattggttggaaagttgaattatctaactgtgactcgtccagatattgcattcccagttagtgtcactagtcagtttatgtcatctcctacaattcatctttgggcaatattagaaaaaattttatgttacttgaaaggagcatcgggacgaggtatagcatacaaggatcatggacatacacaaattgagtgtttctctaatgcagattgggcaggctccaaggtagatagacgatccacttgaggatattgtgtattt

SEQ ID NO: 356367 - DNA, 1275 bp, Cannabis indica
cttacggctaagcgaagtgaaaaaaaaaattggaaggaaaatgctactaggagggaatctaagaaaggtgcagccaattctaatgaccacaagaaaaggggacaaaatcagcccgaacagtcaagtcaagacaagaggtacaaaactgataacgaccatcgatttaatggaaacaatggacgcaatgttccagaatgtcctaaatgtaccaaacgtcatcttggagagtgtcgggcaaatgcatattacaaatgcggaaaggaaggtcacattaaacgtaattgtccattgtggggacaaactgagaacaaagaagattcaaaggaagacgataaatatgttccaacgagggtcttcgctataaaagaagctatacagagtgatgacaagcgctgaggtataagacattgagtgtttgctttctagaaaaaaaaagtcgagtagaatttcgggacgaaatttcttttaggaggggataactgtaatatccgctttcttgggtaattaatttttttatacttttagtttattttgtttgtcgatggggataatttaatattttgaatatttatgagtttagtggagtatgcaatttatttattttttttagtgacaataaaatttattattagggtatgtataatgctagataaataattaaattattggagataatttaatatttaattatttctgaattattataggcatattaatatgaatataggtaaatatactatagcatattgcttagtttactattgttattatttattattattattattatttattattattattattattgattattattatctacgtagctacgtatatatatattatatttttttgtttttaaatttttaaattgttaatctatggctatattagggttaggactttatataagatgtttatatgattgtttagggtttagagggtatagaaacggggtgagaggcagagagagagtacggtgtatacgatataccgaaattttttcgtttttcaagtggagtgcaacctgggtgaaagtgggggttaatttgagatcacttatgtacgatctaaggaagctttttaacgtggtataagggtcggaggtccctattttgagtttcgccattgttgaagcttcaaacatacggttcttgaaacggacccagatttgaacgtgttaaagttgtttcggagatcaaaggaggttgtgtttaagtttatgggaccccaaagatcagttttaacttgaagaatcgaagctttaaggtc

SEQ ID NO: 356368 - DNA, 544 bp, Cannabis indica
atagacctaatccaccttttggagatgactaattctccgtcaggcagtcaggttctaaaccctgtatcataactatcatgcggtctacccaatttactaaagattctgtctaccacataagaatgagtggccccagagtcaaataaacacagagaagtaagagttgttgaccgagagctgacttcttaccactaaggggatagcttctgcatcagcctgagttgacgtaaacacccttgctggagcaggtttcgctgaaatcttctgttcttccttcttgagtttggggcaatcccttttataatatcctggcataccacattggaagcacttctgccctctacactctcctagatgatgctttttacaactggggcattctgggtaagtgtatcgagtttcagagctactctgacaattgcctcgaccctcgttccttcggaacctcttgttctgactggagccaccggatgcagtaggtgtttttcttttctgatcagtggtcgagtcactacctcccctactaaagcctgaggtaggagga

SEQ ID NO: 356369 - DNA, 565 bp, Cannabis indica
atttaaatttaataaaaaataacatctgatcttataattaaaataaatgaaataatctaaaatttcaaaattaaccataaggctcctttgtaagaaatcaaattttcaaaattcaaatcctactaatatctgaaactaattttaattaattaaaaaaataataaaaattaattttattatgacaattagattttttattgaaaattaagattctatacaaaattctaccaaaaattggcttttgtttcaacgaaaaaccatttttgaatcaaaagttatgatgaaaacaagtttgaggtacacatacccttgcgcgcgcggattggggtgtctgaccccagcatcaaggctgcatgcagcctatctgaccgagggacacgggcgggacaggggtatgcttgggacaaggctttgtcccatgcgcgcgcgcaagggtgctttcaaaccctgatatttttgttcaatttcaaaaaatcataactaattcataaaaaatccaaattaggttctgtaaaaccataaattttttatttttttgtctactttccagaaaaaataattccag

SEQ ID NO: 356370 - DNA, 581 bp, Cannabis indica
cctatttggtttgcgaacctttcttttaccaaccgctaatacgttgccccagcgttctttagtccgaacgacatgactttataacaatagagtcccatgttggctatgaagcttgtatgttcttgatctgggatgtacatttctatctggttatatcaagaatatgcgtccataaatgacatgagctcatgcctagcagttgcatccactaaccggtcaattcggggaagtgggaagcaatcctttggacacgccttattcagatcatagaagtcaatacaagttctccaagttctgttaggtttcgagatgagaacaggattggctatccacgagggataaaacacatctcgtataaaattgttgactaacagcctgtcaacttcatattttagtgccccttgcctctcggaatctaggggcctccttttttgtctcttcgctgggtagtttggatcaacatctaagtgatggcagataatcttgttggaatatgttttaccaggatctagatttactaacaagtatgtttttaagatcctaaatatgaatctctaaaatgatgaaaataaacacataaa

SEQ ID NO: 356371 - DNA, 665 bp, Cannabis indica
tgggaggatgtgtgcccctaagtcgaaggggggattaggtttctaggatcttaggctttttaatcaagcgatgattgctaaacaagtttggcgtttacttcaatctccgagttctttagctggccgtgtgttaaagtataaatactttcccactacctcaattttggacgctaaggatcgtccaggttcgtctcatttgtggtctagtttggtgtggggcttggagttgttacagtcgggtatgagaaaagttgtgggggatgggcaaagtgttgatgcgtttcgggatccttggcttccccggcctaggacgtttcgtcctatctcgcctgctcctaatgccagtgtgatggttagtgagttgattggtgtggatggctcttgggatgtgtgttctttgtcgcaatattttctgcatcttgatcttgatgtcattcttggtattccgttgcggagtgggccatgtgcggatcgctggtgttggcattatacttcaaatggttgttacacggtgaaaagtggttatgcagttgctcttgatatggtcagtggaatgaacggtagctcttctgtggatcaagctcattggtggaatgggatgtggaatttgcgggtgccacaaagatcaaaatttttgtatggcgtatgtatttccgggctctccc

SEQ ID NO: 356372 - DNA, 424 bp, Cannabis indica
ttcctcaattctggcttgcatttctgcaaacctattttcccagttcctggcgtcctgagtggcttgggcagcctgtggcaggttagcatcaccccgaccacgagccctgcccctgggacctctacctcggccccgagcatttgggggaaattgagctccttgaccttgatttgacccgacggagttgccctgatcctggtctttcacctggcgtccatctagtttgaacagcctgcgaaaccaagagttggcatatcaggtcatgatcaacgagagcttactaatgccgcttaatttgaaaattaaaaacatgcgcctattctactatcaggctactaacatgcttcctaaaaggcttttcttatttcataaaaatcaaaataagctactaaagaaataaaagcttactgaaccgtagaacgag

SEQ ID NO: 356373 - DNA, 743 bp, Cannabis indica
aaagaagaataactggttaaaaaaatggtaaaattgtaactagagaatggtccactctacggccggccttagtgtgttattttttatcaatattttattcttttttcagtccatataattcagccataagccctaattgaaacactatgcaaataacatgatgctctcatctcatccaactctttcaacctgccaaaatctagtttctaactctatcaaacaactagcagatgagacacacctgcaatagtgatttcaagcctccttcattgttcttcatactcgacccttagtgatattgttccatgcccacgcacaacaagttatgtactcaatcatagtgagtaagacagtggtaaccaaacccaaaggagtgaaagagatccaggcccagatcttaataattctctacagcataaatgaacaaaggttagacatctgggccaatggagtcattatattccgctgcaactaatgtaaggttttttaaactcttatgtaaagaccgctaaactttaatttggaaattagaaaataattagggtttaattatgcaacttgcataatatttatgatttatcattttatggagatttatttgaatttagaatgcattttatatgtcatattcagaattttatattattacatgttttgtgcccgacaacttcagaacgcggcgttgtgcaattagaatcacatttcagtatttttagtatagcggggcattatagttagacatt

SEQ ID NO: 356374 - DNA, 878 bp, Cannabis indica
ccagaatctcaaacggaccaatagatctgggactcaactttctcttctttccaaacctctaaattcccttcattggggacacccgaaggaagacaaatccctaatttagaattcaatatctctctacgctttggatcagcataactcttttgtctactttgtgaggcaagcatacaagctcaaattttctcaatggcctcacttgttcttcggactgcatcaggtccaaggtacctccattcaccagcttcatcccaataaatgggtgaacgacattttcttccataaagcattttatacggtgccataccaatagtactctaataactattgttgtatggaaactcaatcagaggaaggtacttgttccaaggacctttaaagtccaacatacatgcccgtacgtaacatatcctcaagtatttgaatagttctcttccattgaatgtcaatctgaggatgaaaggctgtactgaactttagtttggtacccattgctcgttgcacactctcccaaaatttggatgtaaactttggatctcgatctgagatgatcgattttggagcaccatgacgttgaactatctccttgacatacagatcagcgtactgatccactgtatatgtagtccgtattggaattattttaccaggatcttagatctactcacaagtatgttgatttaacaacctaaatacgaacttttaaaacgatggaaaattaaacacatataaagtatgagaaatcttacattgtgtgcagcggaatatatgtctcctcccactcagatctctaacccttgattcctttctgtcgcagagtataatcaagatctgagctcgaaagtccttcttgttgaatctgaattctacacagc

SEQ ID NO: 356375 - DNA, 1287 bp, Cannabis indica
attcaaattaattaaatattattactttcatataatttaatttcaatccaaaatttatggtattattaaattaaaataaattattacaatttcaaattcaataaaattatatacgtagcactatttgttagaaatgttagttaattaatttatttaataaatgtagatataatattatttattttaaattacattaacaacaatttttattattaaaattaaaaatacaaaaaataaaaaataaaaaatagcagcactttgccactagtatatatatagggcaagactatggtaggacttagcaaaagttccctaccggtagggtactttttccaaccattaatttgagatcgtatggttattatcatataaggtgtatactcttacgataagactgcttgtatacaattaaaaatttatatattataataatatttaataatatattttaaaaaataaaataatattaataatttataaaaaaaattattaatttttaatttaaattattattattttttaagaaaaaattttaattttttatataggtatttattttcaaaaaataattttagttaccaactttgctatcaatataatattaattaatataaaatatcaaactttatttttctctcctaatggaaggctacgcccaattttcattcttcctttctctctcttctattgtctcttaatctctctctttctctctcttctattgtctcttgatctctctctttctctctctaaggcaataattactttacactatattttaagaaattaagtaaaatggattgaaacccgtgaagacaataaaaataagtaagttgaaatcttctcaaactccatttaattatttaaattttgttatttgagtttttggaatttatttgctgaatgtgtatcaatttaattattaagaaaaaataatttaatgcaacccaaatactaaatggtattatacacttttttatctatcaccgttaaatttatgatctatggctacaaaaacacccctatgaaaggaacaaaacaatgatccctatcatatacatatcttataagggcaagactatggtaggtcgactaagcataagtttcctactaagagggaagtttttttgactattaattttagatcgtggttattaagatataaggtgtatactcttacgataagagcgcatgtacacaattaaaacattataaatattataataatatttaattatatttttatttaaaaaataaataatattaataattaaaatttttattaat

SEQ ID NO: 356376 - DNA, 1514 bp, Cannabis indica
atgccaaattgtgtaattacctccaattacacacaaattcaattacaatgtggctttccaaacgcaccctagaattttcttcttactagaaaacaagcaaaatataaaatgcttctaaagtgccaaaatcatataaatattttcaatcctaaatcaatttatcaccaagctaaaaatacaataaaatacatataaattttatatatatatatatacatagaaaaattatagggcaagattatggtaggacttagtataagttccctaccggtagggaagtttttttgaccattaattttagatcatgtggtcattaagatataaggtatatactcttacgatgggactgcatgtatacaattaaaactacacataataaataatattattatatattattttttaaaaaaataatattaataatttaaaatttattaattttaatttaaattattattattatttaaatttttttttatatatatataggtatttattttcaaaaataattttacttacgaattttgttatcaatttttttatactaataattaattataacaaaattaattacttaagcactttcgctactaatttatttagatacataattttaccgtaattatcttttaaattaatttgctttgttaatttttttatcaagaaagataatttctataatcaaaccgagtcaattaatgtttcaaaacaaaacgagtcaattacatttacaaggagatttccttcaaaagagaaacttacaattcaattttatttatgctagacaacttcctttttgtacaagattaagtccacatttgaagctctctttaatactactatatatacaatttatacactttttcctatttatacacaaattttaatttagccaaatgttataaattgcacctcctaacacatttttatgaacataatatgaattttatgacacaatctaatatatatttaattcatttttaaaaattatgtgttttttttaagcatatatttatttttttcaataacaaaaaattaaaataacaaaactcattaacttaaagccaaaaaaaaaaaaaaaacttcattcatgtatacatactcaacacttgtatttctgaccttctattttctttttttaacaattttttttataaagtagatgttttttttaaccaacaaaaaaaattatagtgtacgtacgcactatcataccatgtgtaacgctctaatctatagggacaccacgcgtgtgattttataaactagtttacagtaataatagattaattaattattaaaatctgtgataatattaaaaacttcactaaaataaaaccctagtagcggatattataacgatattaaaactttgttccggaaatcgctgctataaaagtttaaccaaaaaggactttatacaataaataattaaaatacacaacatataatagtatgtttatttaaataaaagtatgtttatttattaccggtacgggttaatattgtcgtgt

SEQ ID NO: 356377 - DNA, 462 bp, Cannabis indica
gacccgagacaaggaccattactgaacacgtaccgagacatacacgcagactgggaccctaaccaagaccgagaactaccactttcacttgaatcggggaccaagacccattactttgacctaagacccgaaccaggacccaagacatgagctagacctggaccaggatcttgattttgacccgggacaggactgaagacccgagtcttggacccgacccatagtcggtgtctaaattagggaattcgacctcgacctggacctagacccggacaaaaaacccagaaccccataccaaaaaaccccataccagaactcgaactagactcggcatgtggttggagtttggattggggaccaagactcagacctgaaccaaaacacggacctagacccaaaccaggactcggactaagacccacacccaaaccttaaatcgtaccttgtgactcgaaattggaa

SEQ ID NO: 356378 - DNA, 593 bp, Cannabis indica
ctagttccatttgcgattctgagttcgagtttgggtttgagttcgtgtcgaagttccagaacttgtcttagtttgggttcgtgtccggatttctgtctaggtccagatcaggcttcgggtgtgggttcgcctcctgggtcttggtctaagttcggtccgagtcccaagttccaataccgatttgagtttggattgaattctgggttttagtccttggttctgatcctggtcagggttgagtttgggtctaggtccgggtgtagcttttggtctgaatctaggtaggggtttgagttcaagtccgagtctgtgtctgggtttgtgtctaggtgtggaccctgatttgggtctaggttcgggtccaagtccaagttcgggtccaagtgcgggtcaaagtttgggtctgggtcaggatagcggaccagatgtaggtccagcatttcgatcctagtctgggtcttggtccgagtcctggttcgtatgcggatccctatctaggtccaagtttgtgtttgggatacggtcccagatttaggtccacgtccgggtctcagttccggtttgggtacacgaccgtgtccgggcccgagttc

SEQ ID NO: 356379 - DNA, 632 bp, Cannabis indica
gtcggcatgcactcaatcactaaggctcaaattttgatagtgaagaagactaagaattttgaattagaagagagaaaaaaaaagaagaagaagtctcaaaacactagttgtctgtcagaatgaaaactaggtttaaagctatagaagcattagtttggatagtgagaccttactcttctttttatactaattctcttagggttaggattgaattatttggaattaaaaaaattgataaaaatagagcaaaaatagggttaagtggccagccgcttatgtgggttcatctcactagttagatttttgccatttttcttaatcatttatctattttttacaaatactactttttgcactttcaatcctataaatgccaaaactaattatttaaaaaataaaattaattatcaaataaaattatcatttatattatttattaaatagactccataaagtctcttaattaacaaataaccttaaaattttattcttcacaatcaagccatatcttagtgaaaattcctaaactagacaaagtctaactttagattataattgattattaaaatcaattaactgagtcttacaagcattttgtctcaactagtatgaggactatggggcctatataa

SEQ ID NO: 356380 - DNA, 595 bp, Cannabis indica
atccttaatttttaatggtgggtaaccttttttttcttctttataatgtgattttatttgctaaaaatatcaatcaaacaaatttaagaaagaagatttttttgaaagttaatcatgtagtggtgattcatagttattattttgtattgagattgttagtacgttgtttgtttattttgtttagtagtttctgtttgctgtgactaaaattaaaatcacgttgattcttatttatattctaattgacttttagtttaagtgtaatttttcataaatataccgtgagttaattatatctaagttgtatatgtatgggtgcatttttaatgggtattacccatgaataggtaaaattagaaaattttgagtttttatgcttaatttttctatttaactaaaaaaatctttcatttttatataatttggactgagattgttccatcggtaaaaaaaaaaaatttaacaagaaaaataagaaaagaaaaagttgagtttgagttaaatattttttataagaacatatttttgatatagtgtaaaaagagatattttttgatattttttttaattaagtagttaaattaagcatagaaat

SEQ ID NO: 356381 - DNA, 634 bp, Cannabis indica
tttttttacattcccgacgattttaaactgtcgggggttttaaaccttcgggaagtccacattagcgacaattttaaccgtcacctattttgcccgttttacgacggtcgtataggcgacagttatagaaaccgacaggaataccttaaacaactgtttaaaaacgtcgagaaaaactatttttgtactagtgttaaatgggttgtttgttcattgtcctgagcttgcaatactggtggtgaagggtaatatggctgttgcgaagataatatctcaacaaattgtcaagtggttgttgtggaaaactcagagattgttgctgttgcaaaaaaattcagagattattgttgaaactgacaaaaaaaatatggattttgtggactgaaaaattgatcggaaaaaagttgctgcattgaacacccaaacactattagctgctgagatgagctcccaaattgaccaaacatcggttgttgtaactgtgatcctccaaacaaatcagagtagaaaagttgaggagactgggaggagcatccaaacatgttcgtgttgggttttgtgccctaaataaaatccatttcaatataattagatttactaattaataaaaatcagaaatcattttatgttgcat

SEQ ID NO: 356382 - DNA, 750 bp, Cannabis indica
cgaagtgagcattagcaagaactctcgcagcacaagtacaaattggggccaagctcaaactagaacatcgagcaaagttgatcgaatttctcattaggcatcatgacagctttgcttggtctcacaaagatatgacaggtatagaacctaactattgttatgcattaagttgcaggtagaccccaatttccctacagtcaagcagaaaagaagaaagttcgctcccgaacgtaacaaagtgatcaatgaagaaattcaaaagctcatcgacattggatcagtcagagaggtcaactatccagaatggttggccaatgtagttgttggacgaaaaaagaatggaaagtggaggatttgtatcgatttcacagacctcaacaaggcgtgccccaaagattcattcccgctgcctcacatcgacatgcttgttgatgctacagctgggcatgagctccttaccttcatggatgcattttctgggtacaactagatccttatgcacccagatgatcaacagaagacatcattcatcacagaacgagggaccttctgttacgaggtcatgccatttcgactaaagaggtgcaacatatcagagattggtaaatcagatgttcacagacatgctagggaagtcaatggaagtatatatcgatgacatgctcgtcaatcgctagcagcagcagaccacctcaatcatctcgaacagtcattccaggtacttgaaaaaatataatatgaaactcaacc

SEQ ID NO: 356383 - DNA, 550 bp, Cannabis indica
tatccttcgatggttccttaacttcgtcctttctcttcgaaccggaagcccctgagttatcaattctcgtggaaattgttcctcttgaaatattgctgggtttgcatcccgagccagttttcaacagattcatttcctctcgggcttcttctttctgaacaaacacctgagccctttctttgaactcgttgatgcttctcaatggacatccttgtaaatcatcccacaacttgccccctgcggtcaataaatcagtagtgatccccgcctgaagggctgtaagttggatgctatcatccaaatttctaaccctggccacagccgtgctaaaacgacttaagtaagcattaagtgtctcgccaggctattgcttggttagtgaggccgcttcgggtcgcctatccctagcagcctgaaattgctttttgaaatccctggacagttgctcctaggaagttattgaatgatgagtaaacttgttaaaccagctacttgttgctccaacaagcgaggtggggaacaaaatacagcgtaaattgtttgtcacatt

SEQ ID NO: 356384 - DNA, 429 bp, Cannabis indica
aggtggcataatgattagctttaccacccgcattgtctggggtgcataatgtcttccacatctctatcttgaggaagtatgtgccagatttgacacgtattttgagttacgatgatattgaacttcagacaacttattttatgaggaagtgacttgggaattagagtcccatatgcgggagctatatccctaaattatcaaggtaaatttcaaggaaaaaattcttataaggaggggatggttgtaatatcccgataagcctaatggtaaataattagggtttatatttatattatgggttaatctattaataagtgagattatgatcctactaatctagttcaacataaattttaaattcgctataagtaagtgaataagagtaatttataaattacggagatttatatagcatgtgtgaatgtaata

SEQ ID NO: 356385 - DNA, 870 bp, Cannabis indica
taaaaatataactaagtatacatgccgtgcacgtaacaataacctagtataaatatatatatatatagagcattgttatgcctaacagtaccaataggggttattagtagttctctataatctttatataagtaaaatatgtaaaacccgatattaaattacaccaatagcgatattacatattacaaccggtgctaggcaataggcactataagtgcaccctttagcatttcttatatatatatatacatatatatatatatatatgcgaattttcatgcctatggacccctaataataagagcattaatattgaatactaatagtgcctaacacattttagacatatgttgtcttgtgattggttagcgatacaacttaaaagttattacattaaattatataaaaatattaattacaccaattacaatatttacacgtaaaagggtactagacactactaccactaataccttttaataatatttatttgataacaatgagtaaatagtagataagatatgataagatgatctttctatcataaatattattaatgtcttgtttagataaaatagacaaaatcaattcaccacccatcacctcatttattacgagtatatacctaattaaagaacctagtagtattggtgttattataaatagaatgcttgtagaactcatcatacacatataataatttacacaataagttagtgagattatatatacgaatatggcacagatgaagatgagtagcataataagctttattgtagttgttgctattgtgtttaatctttcatctactacttttgcaatttcaggtggaagagctctgaataatatcattcaacttcactcatctga

SEQ ID NO: 356386 - DNA, 927 bp, Cannabis indica
tatttaaaaacataaaaataattggaccaatcactcatagatctaaggactaacatctacaatgtgatgtgctttattgagcattgctattgggcaccaacggtgcctaacacccttaagacgtgtcgccttatgattgactaacgataccctctaaaagctattatattaaactatatgggacctgatactaaattacaccaatagcgatattgacacgtaggagggtgcttggtgacttttagcatttctctactttattaggtattattatgttaattttttttatgtataaatatttaagtgcattaaattaaactatataagtactaatattgtcacaatgtttttaaaagaaaaattaccttgattttatgagttgttaaaatagcattatactaaatcaataaaaactaaatttataaattttagagcatttctatatgatattttaaggtatctaactatatgatgtaacatatattgtgaattatataatgctaagtttatatttatgtcaatttgattatttatctactagtattgaataattataaattatttatttttcagatacttttaaatttatcttgtatttttgaaaaagtagtgctaaattttatgtttggtgaccaaaatgtaaaaaaataattagtatttttgttctttaaattttcgatactacttgatctagcctcttaaaatatacagcttgttaaaaaatttcttctaaaatataacagctacataactatactacttctggtaggttctatttcttttaccgttaaaaattggtatttttactccctaaatttttattaatacaaattttttctccattttattaaaaaaataattttaaaaattattatattctattagttctgaaaaaattattaaaaaatctgataaaaatattaaatt

SEQ ID NO: 356387 - DNA, 623 bp, Cannabis indica
aagtcaatggagagtacctagaccgaggagggcatttggccagatatctttcttatacctgtgagttattgcaaaagtttagaaagatagtcgtttgtagaatacctcgtgcttataattctcatgcaaatgctctggcccaactggcctcgacaacagaagcagaattactcgatgtaattcctatagatgtattaactcatccaactatcaatcgagatgagatgatggaggttgatacagtcaaaaaggtcacctgatgaccccgataattaattagttgaaaataggaacgcttcctgaagataaaactgaagccaagaaactacgatatcgagccgctcgatatgtcatttatgacgacaagctctatcgcagaagctttagtcagccattacttaagtgcatcaatgggattgaatgcgattacatacttcgagaagtacacggtgggatctgcgttaaccatgctggtggtaattccgttgctctaaaaatcatgaggcaaggatattactggccaacattgcgggcagatgcagctaactttgccaaaagatgtgacaagtgtcagcgaataggaacctatgtaaataggccaccgagccaattaaattctatca

SEQ ID NO: 356388 - DNA, 566 bp, Cannabis indica
aatttaaatagaattaaaaagataaaaaaaataacttaattaaacatcttagactgaacccttaatgggcttataggatttcaattttgccattttatttaactcatctttcttttcacaaatgtcatcttttaattctaactccgtaaatgtcaattctatctatttaataattataattaattatcaaataaaattgtcaattaacttacttattaattagaccttacaaattctcttaattaataaataaagcctaaatcctctttaattctcaaataagcccttgcttagcgaaaaattcacaaacaagacatagtcttatttataattctaattgattaattaaaaccaattaattgagactacaaaacaatattatcccagttagtgtagggaccatgaccctatgtaatcaagctcccaataagggtaaataccattttggaccctgtgttttgcaaaagttaccaattggaccctctattctgttaaatgataaaatagaccttgtattttctaaaattatacaaatagatcctgaattgattttttttatcaaaata

SEQ ID NO: 356389 - DNA, 429 bp, Cannabis indica
ccccccatcgggtccccatcggacccaaacaaaatttttttcccagcacgcaagtatcagacccccctcatcggaccccatcgggccatcgtcttccccaaactgcgattttcccaaatcgcagatctgaacctaaaatcgaacctaaatctaacaaaactcacggcgcacacataaacacatacattatacattataaccctaaaatcaatacctattaatactccaaatcatatatcacacaaaaaaaaaaaaaacaatgacaaaaaaaagggggtcgacggtgtaggcggtaggcggtgagagagaagtgcttggttttggtttgggagggggctgacattgtggacagtggtgagggggcggcgttgtggacagtggtgaggggccggcgttgtggacggtggtgaggggggttttgggttgtgg

SEQ ID NO: 356390 - DNA, 820 bp, Cannabis indica
cttgaaaatcttaaggcatctaaagattcagacttctcacaaatgagctcaatatgaccatatcgggaaaaatcatcaatgaaggtaatgaagtatttatagccacccatagcaggtggaacaaaggacccacaaatatcagtgtgaataagctccaatacatctgtgcacttatctgacttactatttctaacctcagcaattaattttccttttatgcaatcaacacaagcagtgaattcagagaaatcgagatcttgaagtacaccatctttcaccaatctctccattctatctctagaaatatggcccaaacgtttatgccaaagcatggaagatttcaattctaatcttgcacgtttggaaccaacaactgcattaagagaagaagaagaagaagggtaagaggaagaagtaacagaaacaacatcatataaatcaagcttatataaatttctacataaactttcattaccaaccaacatagagtcacggtacaaaatcagatttctagttccaaaagaagactataacctagtctatccaagatagatacagaaaacaagttcctctgaatagagggaaagtaagcaacatcttgcaattccaaaaaatgtcctatatttaactatagtctaacagtcccaaaaaactctattctgactttagtatcgtcttccatgtatacgtactcttctgaactattcggccttcttcgatttatcactgcctttcttctctaagtgggctattggtcaccagagttgttggaagtacactctctcttctgagaatttcttgggttcgttaccatggagat

SEQ ID NO: 356391 - DNA, 759 bp, Cannabis indica
gtggctctcgagttctacaggtagcatagcttcatattcgtacgccatagcgaatggtgtttgtccggttcctgttttctcagtttactgcttcaggaagctcttctgactaatttcctttggcatcttcgagttttttctttagtgtatccttcaaggtctcgttgaatgcttcaacttgaccattcgcttgaggaggcgacactggaaggaaacttttgattataccatggtttgcacaaaagtcagtgaaggattggctgtcgaactgcttgccattatctgaactattttgtacggcattccgaaccggcggattatgttcttcacaatgaagtcttgaactttctttgatttaatggttgcgagtggtttggcttccatccacttagtagagtaatcaactgctaccactgcatattgcactcctcctttacctttgggtaattgtccgatcaagacaattccccaaatggcaaaggtccacggactctacatctgagttaactcattaggtggagctcgaggtatcttgtcgtgcagcttcttgttgagtaacacatctaagcaatggcattgagaatgctcttctgtaaataattccctctactatgatatgtcgtgcagctttccttctcatttttcgagcttcattcaaattatatgggtgtttcccagagtcgaagtaggctgctattggtgtcatcgagtttggggatgtacgaatcatttcgatttcttccgtgccagtgatgttac

SEQ ID NO: 356392 - DNA, 659 bp, Cannabis indica
tgatgtctttaaaaaaggccttacaaccaaataagatatataaaaaaagggataaaagagtatttaaacagctggagtcccaagctcttgatttggatcttctgggctggtaggagctggaggatctgttgtttgaatgggaggtacatcaacattctggccagaggaagaaggagtcgcatcgggctcaccataagccacttgaaaggcacagtactcgagatacatgtctttggcctcgcccaagcaatcaaaatttgcctgagggtagccttccaaaagtcataaaaaatctcgagaccagttgtctctaaggcacgcactttttcttcctgctttgccatccccgacttgtacttctcaatctcagctgtaagctcctcctcctgggtcttcttctcccttccaactgacggaagacagtcagagggaccaccctttcgtcctgaaggctattcatttatgccgatagggagccaatggtagcctcaagctggtcggacgcctcgaggtccttagtcaactaggctattttcttctcagcaataaaaagcttcttgttgacctcacctagctccattcgaatagccccaagctcaccctggcatcatcagcgtccttcctggccaagtccacttccgccctcatggtgttggaca

SEQ ID NO: 356393 - DNA, 505 bp, Cannabis indica
attcaatggtttcaaaaaaaaaacttcagtcaattaaaaaaggcatttgaaatgattttaaaaaaataagaatacgtgactcaattcaaataaaatttagtggaaacaccattgcacttcttttatagaaagggataatcccctacaacacactatacttcttatcatatacacaatagtatttataaccaatcaaagcacaccaaataagaagtattagagtatccgtaattagggtctcaccctagaatttctcaatattatattcttaatcttataatttaataaattaaatattacaaaaataaacaatttcaaaaataagatattttatggttaagatattaccaattttattataaataaataaaataagtttgaaaaattttatggttagaaaccctaaaatttctattcaaacctaaactaacaaatttaaaaatttcatgttatttttgccaaaattaattttaataaaaaatatccaataagataaaatgttaaa

SEQ ID NO: 356394 - DNA, 554 bp, Cannabis indica
ctgaagggctggcctctgcatcaacttgagttatcgccagcacccttgctggagtgggtttcgccgtagtcttcggtgcttcagtcttgagttggggacgatcccttttgtaatgccccgacataccacattggaaacactcctgccctttacactcccccagatgatgctttttaaaattggggcactctaggtaagtgtatcgggttttggagccaccctggcgattaccttgaccctagttccaacagaacctcttgttctgacctgagccagtagatgcagtaggtgcctttcttttctgatcagtggtcgagccactacctcccttaccaaagcctaatgtaggaggagtaggagccccaccaacaacgggagtcccttgagactcaaaggtgcactccactacgccctcaactcgcagtgccttacccaccatatcaacataggtggtgctgtcatcgatagtaatcattaagtcatgtttgatcttcgtattcaacccatccagggtcttctctttcttactaaaatcggttggcacgattcccgag

SEQ ID NO: 356395 - DNA, 521 bp, Cannabis indica
ctgagctcagattactttactaataaaaaaaaaacaaaccaaggctctactggcgttttagactgtttgctcatccatagcccctcgcggtacacataccagaactgacccagctcatcaaacttacattcaatgttccttgtctattgcctgtagggggaaagtaaagggtgagctaaaagcctagaaggggaatgcttaacatacaatagcattcaatacactaaacatatcttaaaattcacaataatacgattcttttataacattaacgtatctagtctttacaatattatataccttagtgcataattgtaatttaaataagtctagatattgaaagctatatcatataccatatatttgtactaaacgaaaccattacatatatgtagggatcacaaccctggcatcatactcatagcacaatcatagcaataacatataataattatttcaatcatatcatgtctttaccataatgtggcgtatcatagccactacatacacaacctgggcct

SEQ ID NO: 356396 - DNA, 1032 bp, Cannabis indica
attaatcaaaacaggggctgtttcatattcataaaaaaaaagtgtagaaaaactactacgaaactaaaattcaaccgaaaatccaatttaatttgcataaaactaatgttctgacttcaattttcagatctataaaaggcagatctcaaaaagttgaactggagtataatccaaaaaaaatcacgtcaatactatagtaaaatgtttatcctggtgtattttcgttgttttccaaatttttaatggtgaatttgttcatattaaatcataaagagacatgtagataaaaatatgtacgtgaaaacactgttctgatttttaatgtttcacaatagttgcataaatattttgctaacagttatttcgtctgattgaaaccttcgtctgatgcaacattcggtcaaccacccaacaactacccataaacttttgtttgagattgaaacattcgtctgatgcaaccttcggccaaccaccctacaaccatcgtctgattgaaaccttcgtctgatgtaaccatcgcgcaactacgcagcaaccaccctgtaacaatcatctgattgtgtaagtgataatgtaagtggtattttagtaattaaaattacataaaaggtataaatgttgtccacaccttatcgatatatttttataaataaagtgtcaatttatattttctatgtaataattctaattgattaattataaataagttaaaataataatgaaacttaaatattatactgaatattataattttataatgggttaattgcgacaaaacttccaatagtttcactttggttgcacttaacctctaaaacccaagttttgctggcaaaactcccaatactcctgttctattagcactttaacattcccgcctattttaggtgttaagtgtcatgttggactgtctacgtatacatctacgtgagcacagtgtatacatggtacaattttattggtccacgtaaaagattatttaaaaaaataaaaaaaattgtaaataaaataaaaaatattttttttatt

SEQ ID NO: 356397 - DNA, 590 bp, Cannabis indica
aaaaaaaaatatatatttaaagttttaaaaatttaaggaaaataaatataaagtttaaaaatattaaacttgaatatactcctaatattaaaaataacaataaaaaataataatgttataaataatatattaatatttttatacatatttaaattaattttaaattattataagtttaattaacataaaacaaataatatttatatttatatatttttaaattaatttaaaataaataatattaatatttatatatatatatttataaatttaagggtaaataccattttggaccttgtgttttgtaaaaaattagcgattggaccttctgttttgttaaatgacaaaatagaccctatattttccaaaatagtaaaaataggacattgagcttaattttcgacaatttttttttagtataatcaacttgaagacaattcctaacaagaacagatactataaatataaatagtttgttataatattttgagatcagattattattaaattttattttgacaaaaatcagttcaggatcctatttgtaccattttaaaaaatactagatacattttgtcatttaacaaaac

SEQ ID NO: 356398 - DNA, 701 bp, Cannabis indica
ttgtcacaacttacaacttactttatcaacaaaatatagaagatcgcactgtgactttcttaagttacagcctcaatacatggggtaattttttttattgtgactattctaagtcgatattttttaaaaataacttttctttattttttgttatttaaaaaagattatagataaatcattgtttagggattaaaatattatttgattatttgctgctagaaaaatatttaactatttttaaaaagcaattatttaaaattacacaatttaagttacttttgtaaaaaaaaagaattattaattattaattgaatgtgatgttaaataaaagattacaaaatattttatttttattttttaaaagattacaaaaataatattactttttaaaataatagttattagttatttatattaaaaaattagttttagtcttactttttaattaatgatataatagtattatttttaaaatttaatattatttctaatactaaaagggaatataggatttttaataaaaaaaatactcatatatcacagaatatatgtgttatctcaatttaattatatatacacataattctcctttaatatattgtatgcttattaatatataagcatggttatataaatgataattattagaaaaattaacttaaaaaaaataaagaagtattattgatttgaaaatatactta

SEQ ID NO: 356399 - DNA, 859 bp, Cannabis indica
tctcctggtgatttaacattctctccagtaagcaaaccagtccccaactcttctcttacaaacttgtacaatggataagatctgcactccttgatcttgtttgatatgtctacgttcccactttcgatagcattccttgcattttcaacctctttaggcaaaagggttttcaattcttcctcaaaagctccaatcttttggaagattgaattgtttggattcttctcactttcaccgttaaccaaagcttgttctactagtacttgccttagtttttgcattaaaggataggtagcactgcaaggatcatcaatgtatgtgaagacgtattccttatccacaactttaagcaactccttccaaaattttgatgggtggagcttgccacttgcgccagtagtgaaaactgtattagccacttgactcacaacttttttaactgtgtgccttagactctcttccaaatgtctcaagtcgatggcctggcaaagagctaccaagaatgttgtagacatgagtttgagaatatcaatagtctcagcagttttcctggaagatatcaatcctagagagttcacatcttggttgtgttgttctgcactttggacatgactagtcaccggattagcaagatattggagctcagaacaatatgaggccatagcaatctcagctcccttaaaaccgtaatccaaactcggattgcgaccaccagataaatttgaagggagaccattgttgtaaaagtcattcacaagctcagaaaactgggcaaacatgagcttaccaatggctgcaacagccaaacgggtattgtccatggaaactccaattggagtcccttggaagttgccaccat

SEQ ID NO: 356400 - DNA, 687 bp, Cannabis indica
tttaaatggtcttccaacaccatatttataggcaaaattggaggattaaattaatcaaaataaaataaataaattgattaatttaattagtgttgggaagagaagggataaatagagtatgtgtaagagtattggaaaaaataaatgtttgtttggatggaaaaatagtgaaaaagatagggtaaaataaaatgggaatgtttatttaagtgaaataaattgggaagataaaatggatatttaggtgtaaagtgtgggagaaaatgttgaacttttggcattttctaagtgattttcggatgagaaataaagcatttttcttcttctttttttttttttgttttctgcaggtgccacttggcgtgcgctgaatgggagaggagctgacgagttgctgaggtggcaggacgctgttggaggagaactgccggctgggacccgcgtggaaggaaggagaagagggagctgatgctgctggggaccacgctgcaggcttcacttgcgcctgtcgggtgtgtatctcacacacgcgtaggggccattggatcagatgacgaacgacccagatggaaggaagatattgaccgagagtgggcttcataaaggctgatctgatttccttttctaaaattatgcttttgacccatttccttaagtttttcttcattttaatcccaatctttttct

SEQ ID NO: 356401 - DNA, 1342 bp, Cannabis indica
tgccaacccccaaattgctagtcgatggggggctgactataggcaggccagttgtaggaaggctgaccgtaggcagaccagttgtaggaaggctgaccgtaggcaggccagttgcaggaaggctgaccgtaggcaggccagttgcaggaaggctgaccgtaggcaggccagttgtaggaagactgaccgtaggcaggtcggaggcaacattgttggtcgttagacctccagagtttgtcccatctgtttgcatatcagtatgttcagattgttgaggttgagaacctcctacgacagaatgacttcctaacgttggagtcgatgttcctccgagtgtttgttgatcagagacttgggtctctgttcttataggagttgagtctagtgatgccattggtgcaattggaactcggaaccgactttgagcaacactgggagtcgtcatggtagccttcagtgactccatttgtgattttattgtggcattttcactcctaaatgctgcgttctcctccttaaaggttgcattttctcgctccagaactccagttcgctcagccatctcgcgcatctgggccattatcgtggcaagctgttcattgacattgggttgttcctgggcaacaaactctccttcttctgccatttgaagtgtggtaatgatagatcgccttgctcacagtcagtttgtcagggccccacggtgggcgccaaattgtagacgctaaaatctacaatgatcggaatgagcgtttgtgggcaccgacaacctgcggaacaaagacaaaggatgaccgtgaaaccttgggacaccggggtggtgccggccgaaggcactccgacggtcaagtcagtaaatttatagtgcgaagtagaaaagaaaacaagaaatgtaaataaatacttcctgtgtctatggttatgtggtgatccacggtcaaacctcgctcaccggaatgagaaagagtacgtcagatcgtagagaaatgataagtttagtagtaaaactatagagagagagagtgaatattcgtctatcctttttccccctcactcagtcccagtgtgggcctatttattatcttaggaaaacggctacctcttgaaacgtggtccgtccctagagaaacggtcttcccccacttctccagggatgagcgtcatcttttaggttcgttcctagatgagcgtcctcccattagcgtatcactcagagggttgatattctcgctccgctatgctagggaagatcgctatttttgtgggttagttgggaaacttaacgttcttcttcctccacgtcaaccctaacattacactttaaaatcaagctttattgtgg

SEQ ID NO: 356402 - DNA, 346 bp, Cannabis indica
tgtctcagaaggtgtttcaggccctggagaaaaggtcaagagatagctcgggtcagacccctcagcccaaacgaccaagaggcgacaagaaaccgtccaaagagaagagtctggctgagacaattatcgacctctctaaaaaggtcttgcctgcagtgaagcttcagcccagaggaaatccaaatccaaaggtgccaagggaggtagttcaactggatctagtccgatcaaatcctccaacactgccatagtgttgagctccaaagccaagaagggcaaggagattcatcaatactacctcgatcggttacttcccgaggtgagtgatgttggaatatattttacc

SEQ ID NO: 356403 - DNA, 657 bp, Cannabis indica
tttatcccagccgaaagaaagagagagagagagttcaagaaatgtcttaatttccttattttcttatttcttcaaatggaaaaaggattttaattaatgactgcatgttgagcccttaacgcttccatctctttgtccctccattcggcacatgtgtcttcgctcttcaaacccaagataaactacagcgcgaagttcctcctaatcatgatgtagggtgttggtatgaccctgcatgagtccaagagcagcacggaggttctagatctcagtgtcatctcaaatggttgtttgaacattggtagcgggcagaacggctgtgttatgaatgccctggtcggctactgaactagtattcccagtctcttgcatacccggcgcgatttcatctacaggactcgtcacaccatgacccgcagttgatggctgtccgggatttacgactagcggaacccttatgtttcctgggttctgcagtgcaggatccaccgcctgtggattcgctggatcaaccacgcctctacgagtctgtaccaccatcgtacttgtgattaagtttggaataaagagcgattcttgattcgcctctcaatgaaagcaccaaaatgttgacctcgcttttagccaacgacagtgagtctaattttataagcgaca

SEQ ID NO: 356404 - DNA, 524 bp, Cannabis indica
atatactaaatatatatatagacttagtcatgctctttctatatatttttatttagtgattctagtaatagtagtatttatcttgttctatcttttatgttcattcttatttactttttattaaacatataggtttagtcatgctcttcctatgtgcttaaaaattaagaaaagtaatattaatgttcatttccttcactatcaccaccatctctatttctattttctttgtcattatttttactaaaaatatataggattagtcatgctctttctatgtgtttctatttagtaaaaataatatttatgtttagttttatgtttaatcttttattgcattattgcttgatgtataatgtcatttctaggttctacataagattaaatcatttcttttatttgcaagaacttgtatactcaaaaatataatgaactttaatgttaaatcatttatcaactttgtgaatcaagggtacaaaatagctaaacaagcatatggatgattcttgaagcctttctttctt

SEQ ID NO: 356405 - DNA, 705 bp, Cannabis indica
atgcacattcgtaaagttccatccttctttttcacgaacgaaactggtgcaccccaaggtaaggtacttggtcttgtaaattttaaattcatcatcccctataattgaacttttaactcttttagctctacaggtgccatcctgtagggagctcttgatacaggctctgtccctggtattagatcaatctcaaaatcaatttcacgtttcggtggtaaccccggtaactcctctggaaaaacatccagaaattctcgaacgactgggacacgctccggtcccgctggtggttccctggtaacatccacaacatttgctaagaaactgatgcacccctcacccaacaaatctctttccttaagcgctgaaattaagggaatctgggatccctgcttcttacccacaaatacaaaggggtcctcgccctcaggctaaaaagttaccatctttcttttgcaatcaatagtggtgttgtatttttcaagtcaatccatacccaaaatagcatgaaagtcctccaaattcagttctatcagatcaactaataactcccttccttccacaattactggaagggatcgaatccacctgctggagataaccaactctaaagtaggcaatgaagttccaaagcctctagcaagtacatcactaggcctattcaatttctcaattattctacttgaaatataagaatatgttgca

SEQ ID NO: 356406 - DNA, 817 bp, Cannabis indica
tcagtatttaagccccatgatacaaagcaaatcttttatttccctctcatttccaactcctcctttccccttctctctggaatttcaaagacttacgcccttcatccatatctccgtcttttcttcttgaatctcttaagttttagaagtaatcgagaccaatcacagggagaatcgtcaaaactaaaggttagtttttcgaatcttcttctgaatttggtttctgggtttgagaaaaaaccttgcttttctgaatgttttgaattttggaaaagaggttgaaaatgcatgtttagttgtagggaatacacgtagggttttattcccttgttagaactgggtaatccctaggagaaaacagacctgtaattggcataactgccaatttaggaagaatattttgaatattcgcatctttttgattgcttatctcttgaatactcgcgggtatttggatgagcatctctaatactcgcgtatctgcttcctttaggaattctggagactttatcacttttgcccgttgtttataacttagggatttatttatattctctgtatattttgttgtggggatactggttaagtctctcaaatggtgggtgtgtcgccgtattctaatgctcatgcgtgcgatcgcatgttccttgaggtactgcgatacacccagccatttgcaacatacactagcgttcccttttcccatataatcgtattcttcaactagtagatttgctcgaaacggtgggtgtttcccagtaactttagggtcatgctccaaacgcgtgccccttgggtcactgggaaacgcccagcc

SEQ ID NO: 356407 - DNA, 643 bp, Cannabis indica
gggagtgtggactgtcacaagaggagttcgaaatgctgaaaaaagccgcgcttctatactgaacaaaaccgctctgttgaatgtttctttttaggatatcggcaccaacctaattttacatttttcactttaataaaaaattaaattttttaaggtaaaatctattaaactcaaatttattaccacaatgaattgtcaagtgtaaggtggacgtcggtcgatttagtcgggtaatagtatatttttatcaatccaatataatattaagttgcaaatatttaatcgtaacctgcccaatcaaaaattagagaaagttcaacccgcccaatgatttcgtcggtttggtcgggttaacctgtccaaaccgttctttacttttctttttataagggataattgcggcaaaagtccccaaaaagttagagttgatgcagattagtccccaacctcaaaaattgacggtaatagtccctaaggtcaccatttttgttagtccgttagtacctaagttaaatagtctgttaattgctataacaattaccacgtgtcaaagcattattggtacacttaataaatattattaaaaatttaaataattagaaattatattaaaaataaaaactaaggctaattagtaattttt

SEQ ID NO: 356408 - DNA, 649 bp, Cannabis indica
aaactaaaaaaatagaagccctaaaaaaccaaacaaaaccaaacgaaatgctaaattgaaaaacctagaatagtacaagcgaaaaacacaagacacacaaatggcaaatacaaacaaatttcaaataggggcgaaaccaaaaagaaactaaaatcaaaccttataccgaagaccaactccatcttgattatttttttgagcatcatcttgaggaattttttcatgggcagccacctttgatttcttctttggaggagctcgcccatgtttcgacaatggaggagcgaaatcagagtcatcctcctcaacaacaggtcgtttacccttgttcctattagctaaagatttcaactccattttagaattttttgtttgaataggggaaggagttgatgaagaacaagttacagccatatctatatatggattaagagaaaaattaaaagatgaaaaatgattatgagattcagttaatgggagttgaaaaaaaaaattgaagaacaaaaaaaagagggaaaatagagttgggattgtggagaagaaaatattcagctatggaggttactattttaaaaaaaaaattgaaaagaaatggaaaaaaaaaagaaaaaaagaagagaaatgatggatggttgattgataggggtca

SEQ ID NO: 356409 - DNA, 726 bp, Cannabis indica
ttacaattatactaaaataattggagatattgaaaaaataaaataataaatttgatacgacatacgacacacatcaaaggaattaactctccttaaatctcagccagaagatcatatcaaactaaaatgtgaaattacctaaaatgaagatcaagtaattaatttacaattaattgcccataattataagacacgataatgatagcttgagcatgttcaacctgcctagtcaacaagcttatcgctccaagggctgggcctcacgaatacaaacttaacttgtgtatttttcatgtaaactccccattaaagggaaagggaaactaaggataattatataaactctataaatactcaaaaagaaaaaaaaccatttcggattaagggttgaacactcttatttgcttaaggaaaaatagagaacatatactcattgtattcctaaaggcttttctttctaaattacccaataatatcaactcgtggactaaggttctttaacgacccaatcaggtaaaaactctaatggcacgtttttttatgctatttactaaactgtccgaaaagaaaaccagaatcatattattttatttacataactaggaaaggtaatcaaaatgctttaatttgacaaaattgtcattattaaaacatgtaattattttctgtttatagatttttaaagggcatgtttattttttttatcatttttaattaataaaatta

SEQ ID NO: 356410 - DNA, 519 bp, Cannabis indica
ataattggtaaatgataaaaaaataatagagagaaaatatgaataaaataataatcaccttcttattaataaaaattatatcaagacttatcaattctttattctacttagtattaagagtccgtttggcacagttttcggaaaagctaaaagctatttttttttgaaaaaactgtgataaaaaagtgaaccaagcagtcaaaaacaactttttgaaattttttggataagttacagctaaaagctgaagctgctccaactcaacttttagaataagttgttttgattaaaatactataataattttttttatttgtactaaaaccatatttacttatttattatatattaaaaaaattaaaataaactaattataataaaataaataattattaaatctcttatttttttaaaaaaaataatttatatttatttaatattaacaaacaacatcaatctaaaatttttcttatatacttgagtttctaatttttttactatttgataaaacataataaa

SEQ ID NO: 356411 - DNA, 496 bp, Cannabis indica
aaaaaaaataatatatataatgacacacttttgagtgtgactattatcagaaaataaatagatatagtttaataaagtgtgactctaaaaatctacaattacgtacagagggtttctaaaagcgtttagtgacccacattgaagggtcactaaatattgtctttccagttaccgacattagtgacgtgcagtgaacggtcactaaaacattttagagtccctcaacaaggatcactaatgtcgatttttatagtattgccttattctaaaactcatggccggccagagagtggggcagccggtgccgaggccccaggccccacaattttggaggccccaaaaaattaaaattaatattatatatataaataaaaatataatatatgtatgtatataaattttggttcaacaattgtcataaaagagcttacagcacaattggtaagagagggatttaatattggttgatgggagctaggttcgatgcctgcttctt

SEQ ID NO: 356412 - DNA, 546 bp, Cannabis indica
tgtttttgacgtaagaaaacaaagctttaacgtccaaaatgaatgaccaatattttgactccattaaagacggtacaccgccaacgaaggagacgactccgatctgccaacttggacctcttttcttgggttgatcttgattgttttgaggttctgagcactgtggagagcttctccaatcgaatggacgtgtcaagagcaatcggggacaaagttacactttgccgacaacgaaactgacgagaacgccggggaccacgttctgagcatttttgtggtgtttttcttaaatattttttcagattttgatttcttatttcattctaaggtgcttggtgaagtttcataattttctgaatttatttggaattattgtgagttatttagtttatttcataaattaattatgaaaaatacttaggctgctcagaaaaatctaggcttattttatatgatgggctatgatatataaactgttataaattgatagattgaaatttcaggtgattatgtattttttatgaattattgatgttatttcttatt

SEQ ID NO: 356413 - DNA, 767 bp, Cannabis indica
ttatatttcttttgtaaagttagttttatagattcggtatatatttacttctggacatcgatcaataaatcaaagcttgtaagtccttgtttttcaaaaaaaaaacaaaattatttctacaataacaattaataaaatcagcaaacggaatgtaaaaaattagagaactatagatagtatcggtattctttcgaatattgttagtttactgggtaagcccaaagaataaaattaattagtgaagtatcaaaaattacaaatgcaattgacttaaataaagtttgaattcctctaaagcttgtcgcaactttttataatttaacttgttaatttgatttctgaaacacaccaactagtgaaatccctctagccattgatgtgtgttcacttcctcccgaagtgagtcttaaaaaaatcctctctcaaagatatgtgctcacttcctcccgaaatgagatttagaaaaatcttctcccaaatatatgtgctcacttcctcctgaaatgagatgttaattccatttttggcatatttaattgacaaaaatattttgttatttattgtatatttcggctggtatgtgtttaatatggtttcctattttgtgtattcaaacttggaaggaaagttgtctagctttcctatttttagaaaaaaaggtaaaaatggtaagtttggttacccatttcgtttttatctaaccagctgtataatctgatcttgtgttgagtttcccattttctcagatcagatttcttgaagagaaa

SEQ ID NO: 356414 - DNA, 557 bp, Cannabis indica
ccttggtgttcgaaagagagggaaagagacttagaaatttcaaggtttttccttcaactttttttactttattcttatttcttaatttaatttaaatcatatttatcttactaaaagatataaccagcccccccaaagtccactagagtccaaataaataaccaaggaaaagacctatttgcccttaactaaattaaaatagttactaactcccaagggtaaactagttattttttccaaaccccaaaaattccaacacttccaatacccaacaatgataccccgataataatattctaagtatataaatacaactctctaagggcccaacgtcactttccactgcttgcaaaacacaacagagcaacgaggaatatatacaaagtagcataattaattgtatcaactcattttcaccatatgcatactatagttaatatttaaatcttataattaaaccctaattatttaataatccatactgttgatcttaggcagtctttacacattatattccgctgcacccaatgtaaggtttcctaaactttatatgtgtt

SEQ ID NO: 356415 - DNA, 546 bp, Cannabis indica
agaaaaatatttttagattgactcctctattccgtttattaaatgaattattttcaagttgacacattaacttaaaaatgacacaataatgacctactacaaagtatacacttatattcattctatttattgagaatcaaaacttcaatcttcttcactagattagccagacacacacaatatttggacataaacacaggacacaatattataactcaaactcagaaacacttagtcgaaacttgaatgaataatgccactcttttaagttttaagactgtatatgactaggcaattttggttattgtattatcattgctgctacatagttgatcatttttagatttttgatgtgaaattttgtattgtgagctttttagagtttctaatagacttcaatgagtaatagatttatataattatacttggaataaattttgataatgttgtttggtggattcctattttgttattaggtaacataatattattattcgttaggtctgtcacaattattaagtaaaaatgaatcaatttaaaaatctt

SEQ ID NO: 356416 - DNA, 930 bp, Cannabis indica
attatcattctcaattcactaccggaatcctacagggaggttaagacagccattaagtatgggaaaactgagatcactcttgaagaagtaatctcagctttgaaatcaaaagatttggaattgaaagttgaaagacaggggcatactaatggggatgttaacataagtaagggaaggcctggacaaaagaaaccatggcaaaataggggtagaagcactagtagatgttcaagcactagtaggggttcacataagggcaacaatcatcatcacaaagggaggtcaaattcaaagggtcctaaatatcctaatgggtgctaccattgtggaaagttagggcatttcaagagagaatgctacttttacaagagaagcaatgggaaacaaaattcaaatcatctagaggaatcaaacaaacaaaataagactaagaatgactatcaaaatgcaaacctaagtgatggttatgatagtggagatgtctatgtggctgcatcatcttttaaagattattggattatagattcgggctgtacatttcacatgactaacaataagtcttatttatttgattacagggaatctagagggggcaaagtaaatattgggaatgaccaaacatgcatcattgaaggttcaggttctattaactttaaaatgtttgatggcattattagaactttaactaatgttagatatgttcctgatttatctagaaacttaatttttattagtgtacttgatgatcttggtgttgttagcaaaattgaggtaggtacaatcaaattggccaaggggtctatgactatcatcaaaggacacaaaaatggtggtctatgctacttgcaaggaagccccgtagcttgctgccacaacaccaaagagcatgtatagaagacactaaggctgtcttatggcatagaaggttgg

SEQ ID NO: 356417 - DNA, 1259 bp, Cannabis indica
ttaccgacacatttttatcacagctttttaaaagcagcttttaacttttccaaaagttgtgctaaacgggcccttaaacatcgaccttaactttaccaaatatgttttattgttgagttttttttgttgttgtcgagtttaccaaatataattctatccccttctttagaaaaaaaaaagtgtgtacccaaacaataataacaacaaaattgatttttcttgattcaaaataagctaatttggatttttactccctgaattttgacatatatcaaatcatatcttttgaactttttaggtcgttaaaaatttctctcgaactattaaaattgttagatttaaagatttttgtccaattttactaaagaaagtttgacgtggataaaattttggaagcacaattgctacaagttaaagttgagaaggcataatttggtagatatcaaagtttaagagtacaatttagtatatggacaatcgctacattagcaaaattgaatgaaattagataaaaatccttaaattcaataatttcaatagttcaaaggaaatttttaataacaatcaaaatattaggagacatgatttggtatatgtcaaagtccaaggaacaaaattcttaattagccttaaaaatatgtttatatataaaatgtgactatctaaccgtttttgctggattaacaagatattttaagaatataagaatatttcgttaaatttaacagtattagtagggttatttttttttttataaaaatatataaatataaatattatttgttttacgttaattaaacttatactaattttagattaatttaaatatatataaatattaatatattatttgtaatattattttttaatttttatttttaatattaagattatgtttaattttaatatttttaaactttatatttatttttatttttaatattgggagtatatttaattttaatatttttaaatttaatatttattttccttaaatttttcaaactttaaatactatttttaagaaaaaatttaataagaggtttaatttataaaattttaaatacaaaaacataaataaaaattaaaaatataattaaatatacttctttcaattatatatagcaataatattgtatagggtgattttagaatgcacccccttaaaaaaggtacactgatgcaccttacctatttcggtatctaaaaaaaaaaaattagtctaatttatttttcatatttgtttacgttatagttat

SEQ ID NO: 356418 - DNA, 723 bp, Cannabis indica
gatactcattttaggaagtttccctatttaatctaatacgattcttggttaatatctgactaattattttttccttatttgtttgcaggaataaaaagggaaactggaagagtcttccggcaacacggtgtctcgtccctctgatctcattgtagcagactttgctttcgagaatggtttgccaagggttgaaggttttatggtcacgaagctgggatatgttcctgcactactacaaaaagtgctttttgctttggttttaaagtgacacataaacaattgctttggttcttttaccaacgttatagccgtaggcacaaattttgatttttttgcttcaattttaaaccgacgttaaatatttttttgcttctattatgaaccaaagcaaaagaaaaggttttactttggttcataaccgaagcaaaaccagtgcaccgacactagagggttttcgcttctattatgaatcaaagtaaaagaattaagaaaataaaatcagaagcatcgcataccccactattttagatctcacatgaccacatatacacagatttgaacaatcatttgaacccaaaatgcacaattttaaaccaccgcaccaccacaccaccaacatcgcacgccaccaccgcaccccgacctatgtcgacaacaccaccgcaatcctaaaaaatagccaacatgcgaagaagagagatcgaaagaaagagagagagagag

SEQ ID NO: 356419 - DNA, 906 bp, Cannabis indica
tacatgattagtaaattaagatcttggtaaaaaaaaattcaacaattggcttcagagtcatggtagtatttattattcatgaaatatggattaaaacgattttgggttgattttgatgtttcatattttgtttatgtgttttttatggtggtatttattattcatgaaatatggatttgaaacgattttgggttgattttgatgtttcatattttgtttatgtgttttttttgttatttggagtttcttttcaataatatggtgcctaagacacctgactttcacaatgtaacaccctaatactaaggcacgctacagtgatttttcaattgcagtgttatctttgctaatcaaagaactttctcgaaaatcgtgtcaaattaaaagtttgcattaataataatactttataaactttagtaaaacatttacaagtatcgggatcccgtttctaaactttatacaaaatatacaaattacaatacttaggtcgcacagcgactacaaaatagaaaccccagatgtcccaggaccgaacactccaggtcgcgccgccatgacatgtacaatcccatcctaccttaggctcactcctgtttagctcttgcctttcctttacctacacatgaaagtagaaatatgagtcgacagactcagtaagaaaagcatatagcatatcatataatgctgacttgtatctaggtgcccatacacatatttacaaagcttatcagatgggtaagaacgttccatactagggtacagccactgtaccacatacactacgaactcattgtatgagtgttggtagggtttttttcgtaccctgagtactacttagtgatataccatacacaccctgtactttcccgtacttttgttggtaaaacctgttgggttttatgc

SEQ ID NO: 356420 - DNA, 516 bp, Cannabis indica
aagcatttggtaaagataaaatagtcacaagtgcacgatgattaaaacagagaatgaatttcattaaagataacaaagccacgtaataccaggattaaaagcttctcgatcagcccattatctgtaaaataaaaaataattccaagtttaaagaccgcttggccggtcatgatgtcttagaaaaggccttatggctgaataagatatataaaaataaaaggataaaagaagaagtgtttaaacagctagagtcccaggctcttggttcgggtcttctgggccggcaggagctggaggatctgttgtttgaacgggaggtacatcagcattttagccagaggtagaagcagccgcctcggtttcaccataagccacttgggaagcacagaactcaaggtacatgtccttagcttctcccaagtagtcgaagtttgcctgaggattagccttccaaaagtcgtagaagagctcaagaccggctgtctccaaggcatgaactttctctttcagcttcgt

SEQ ID NO: 356421 - DNA, 582 bp, Cannabis indica
aaaaaaattgtatgtataaaaaatatttaattttttttacattatattttccttattaatatgaaatgaatatacaattcatctactatatttcaaaatatatttgtattatatgtataaaatttttaagttactattttttatattaaaatattaattatatataaatgtgtgaattgaattggatcgattacttttacatgtcaattaacatccaatccccaagtgcagattatagatttttcaatccaatccactttacggattggattggattggatggtgtgtgttgacctcagatttggccaaccgacatcgaaatcgaatttaatgttgatgcttgccacgtgttacacaattagaataataaaataaatagacataggaatttatagaggttcggcctcctagttagcgggtaatgacctactccccttttagttgtattgataccgagagataataatacttagatcactataatgataggatctgaagtagctctcttaagattacaatgtaggaatcagagttggcaaatctcaagttagagaagagcagtgggcgtgtgtgtgtgtgtgt

SEQ ID NO: 356422 - DNA, 719 bp, Cannabis indica
ccagccacagaatgatggctcgtacaaagaaaaccacatgtttagttgacgcatctgaccctcaagtggctcggcacgccactttgcctagcgccgaacaggatccagccgcccaggaggtgagggatcatgaaggggacgctgaggtcctagaaattgaggcgcaggacgacatacgtccttgcagttcctccaaggcagaggatgaggcagaggttgaacccctaaattacagagagtacaatgaggttggggagccagttgatgctgacggagacgtcctggttgagggagtcggctacgtcactaagtaacttgctgcggtggttcctcacagaaggcaaggtgccttgggcgccaggtgggtaaacccttcgtccaaggttaccgaggcgcgcctgcgaactctcgaccaaggtggctacttgggcaaattagactgctacattcccgcccacaacaatcgagccacaaaccgtgatagggggatgtgcgcttggtcgggtgccaatgcccagcaaggggcgttcatgcctttgcatcaatactttgagaatgtgggagatttcttcagcctctgcccggccaattcacccttaagggcattaagtacttgtccgccctcttcatcctttatgcctcccagaagtgggatatgccttcgccccatgaggttggctggttctttgatttgaagtccacccccaagcaaggcaggt

SEQ ID NO: 356423 - DNA, 725 bp, Cannabis indica
aaaataaacaggagagagatatatacttgcaaatagtgtttttattttttttattattttattagttaaataaataatatttagttattttttaaaattttaaaattttaaaattatttaataaggctttttattaaaaatacatagcaaaaaaatacatctttttattatgtactttgtgtacaattttacaaattttaaaattatttaataagttcttattgaaaaatatgagtgaactactagtatgttaacatgtgtaaacttagtctattttaataagatttaatggactaaaagtgacgaaagtaacataaatgtaacattagatatttaattcgctaaactaaatgtatgtggtatataagtgtataaaatctaaaacatcaggtatttatgctgtaaatacaattatttgaataggatttaacagaataatagtaacagaagtaacataaatataacttaaggtattaatttgtcaaaaaaatatacaatatttaagtgtatgaaaccaaaaatataaaatatttataccacaaatatccctatttgaaattaggggtggcaaaacgtgttatcgtgtcgtgttcgtatcatattttatgtgacccatttttatatttcgtgtcaaacgtgtcgacccgttttttgaatcatgtctaattatctcaaccctaacccgacacgtaaaaaatcatgtcgtgttcgtgtcgacccactgt

SEQ ID NO: 356424 - DNA, 1004 bp, Cannabis indica
atatctataaagagataaagagatatattaaaaaaaacagaaactgaatgaacatgattcgattctaatgtttgcaaatccatacatgataaaacttatataaaaatattgtaacataacaaaaagaaaaggtggtttcagactttgaggtgatatatagaatgtgtaataccttgttttaggtgttaagatgattttgtgccataaggccaacggctgagaggatgtcaagagacacaaggcaaacattttcagcataatcatccttcacttcatattcaatggtggacttaattaaggaacaaccttcatctttctcgatgatctcgagtcgaactcgataaagtgtgaagcccaactcaaggaatcctccttccaccacttccacttccttcactcgctgctcgttgtctatcttcgtgaacttctccttgaaactcttgaacttcgccgcacctgatgattaggaatatttggttgttttgtaaaaataatctttatgaatttttgtttaatcaagaagaaaacttcattaattacatgtcaatctatctaataaatttatctccagtttgtttcctttcctatccttaagcatatacaatctatacttaatatttttttttttactttgttcactagtctttaatgaatttttttattaacaaaataatcttgtatggtcacacaaacaactgacgtgaatttattttatgatgatgagtagagtacataccagggacaaaatctaggtggagaattgttccaacaccgccgtcgccttcaactacttgaattttttcaataacagatttgagttgttcctcgaatgagctttactagacgaagagtaccatagagctcccaaacttggctggctggtgccttgatttctagctcatggcaaagttgaccactcaccatctttgtgttcttttggtttgattatattgtaaatggtgtttttgttggatagaatagatgattgttgtttggatatatat

SEQ ID NO: 356425 - DNA, 511 bp, Cannabis indica
aataatatttaaaatttaactaattctaaatatcaaaatttaaaaataatttttattaaaaaaataaacaatatgaacaaatttattattaattgcaacactttaggtggattaattatacttagatttaactaactacatgcatgatgaccctttacgtggcaacatctaataatttggttatttttttatttaaaaaaaagtcactcaataatgtctcataaaccaaaaattctcttatatagccacattttatatagaatagatatatatattagggagtagagaacgtgcaaaattaatggattaattgatcatattttttatttttatcaattataattaaataagaacagataaaatatctaattatattagtaaattagatgtaaacaattaaaattataatcaaaattactaaacatacatacatattaaagacaaaaatataaagatagcatatatattgtaattggtgcatttcaatatcagctcccacaaattttaattt

SEQ ID NO: 356426 - DNA, 596 bp, Cannabis indica
ttataccattcaaattattataaaactattcatattagtattttcctatacaactaataaggcaataatctcaatacttcattagcatttactttccatttatttcaatatcttcccaaaaataaaaaataaaataaaacaaagtattctcaattcacaattaatgtccctatctccaatttattacaaaatcccacatttataatttatataccaaaattaatattatgttatctataataaactcatatttataatttatatacccaaaattaatattatgttatctataataaactaataaggcaataatctcataattatataccataattgttagctattaaattttataatatttttaaaattcatgatatcttgtaattttaaccaattaccctaaataattaggggccagccataaatcatgcgcgaaaaccttaaaaggcaccaaagccataaacaatggcacagctcatccatcaaatttgtacttccatttcttccatcaaaaaactaataccactcatccagaaattctttaaaaatacaaataatataataattttggtacattcccataatattgagaacaa

SEQ ID NO: 356427 - DNA, 543 bp, Cannabis indica
ataggaatgacatacccatggagactacacaccattaaattggctacatcaatgtcttgtgtcttggacaaagattggaaaggaaaaggtcaaggggagggtttgtggagagaaccagtaaaaataaaacaaggagatggtgagaagaaattatactgctcgtggtttaaaaataagcacaaatccaaacttcttcttcacaaatctatttgacctaaatacaaaatacagaaatcaacaatcaataacaaaataaagatcaacaaatatatatttatatatatatacgacttgtacaaaaaaacccacaaaaaaattagttttcattgctttaccttgttaataggagaatgttgatggagactaaacaccattaaaattactacattgagctcatgggtcttggactgagattggacaggacaaggttttgggaaggtcttactatcaaagtggataggtgaagggtttgtgaagagaaccagagaaaaagaatgggatggaggagaagaaagatggatcatgggttaaataaaagaaaag

SEQ ID NO: 356428 - DNA, 582 bp, Cannabis indica
ttttcttaacaatttttgtctttcgcctatcaaattaatttgaaaaaattatttatttatttattaccaaaaaaaaataattactattttgccaattcaaaatttatttttctgaacatctttataaaactctttatccctactcttgacaatattttaaggtgacgattcggggaccatggacatataattctaagcttcaataaactatattatttattgggtctcattgttaggctatttttagcctatgttttggatccaatttatgtgcgtttttagctgtgttgggacggaattacgcttgttttctatgttttcaggttctttggaataaaagaggtctcgggtgcagaaattcgttaaaagacgtgctgagccgaagaaaacacaatttttgagtaattgtgcatatctggccgcggctaaacacaacttggccgcggctagatctcgaagttttacaaggccacagtcgccgcggcgatgaagagtctcgccgcggccatttaagagatacagagagcaccctaatttgctattatctcgccgcggcgagaggaagcttggccgcggcgagat

SEQ ID NO: 356429 - DNA, 702 bp, Cannabis indica
atgaagacaaggtctcaaagtggcatcaagaaaccaaaagcttacatggccactaaacatctattatatatttgttatttaacaaatatttaataaagattaaaatatagcatattataaattaatatgagattaatatatatattatgtgttggaaattgtattatatcatatatagtgtaataatacacataaaagttgtaacatatgaggagttagaaatctgaaaatagattgtaacctaagaatcacaactgataaatatgtaattaagtgagttattacatatggaagttatggaattaataggataagtttctagctgttagaaattgttacaatactcaattacatcatttaaatgagtattgggacattgagaaaagatttaactcggaaacgagttacaaaaactatattttgagttttttagaaacggttgtttaattgttgttattatgttgttttatggctgttttccgaatacctaaaaccaagttttttaaaaatattcataaatgcacataaattaattgagcatatttctagctctcttgtccaacgtgtttatcccattaaacaccaattaaagtgttggtaacagccatttgaccaaaagaatttgattttcaaatgtatcctcaaacattataaatagaggtctttggttcacttgtagacaacaacaatttttatcttcta

SEQ ID NO: 356430 - DNA, 791 bp, Cannabis indica
tatttatttgatgtcgatttcactattcttgctccttctcgtcgaaattaatggttgttttctgggtattctcgtgttgttgtggtggttctgtctgtcggtgtggaagatggaggctgtaaatacatttcttcttcattctctttggttattattgtgattttttttatttaggttctcctataaatacatttgacgagctcactgacaaaaggatttcgaggtgtgtagttcttttatgtttttctaagtggttatatttatttcactgtcttacatttatttttgtgctgttttagttttgttttagtaggttttttattctaattttccaagactgaacttgcaaatatagcctctatttgcatttggtgttgaggctgtgtagaagattgttagtttttttaaatatttttttccttttatttatttttatttgttttagtgttgttttacagttattttgccatgagtatttatttgacgtcgatttcactgttcttgctcaatcttgctggaattagtatttattttcagctgtcttagtgttgctgtggtggttctggctgtgggtgtcgaagattgtgggctcgtattttttttttagtttttacagtataaaagaaaaaacaggaggacagtataaatgtaatttttgccatgtaacagtaaaattaaaaagtttacgcaaatctagtatttttgccatcacattttttttaattaaaattataaaagggacatggtgcctattttttttttatgggaaatttataaaaatattagaattt

SEQ ID NO: 356431 - DNA, 503 bp, Cannabis indica
atgagtctgggagccatctgaaaaaataaaaaacaaataaataaagctgccaaaaaatttaaaaaacatatcgacattatatcgacatgccgtcgacattatgtcgacattatcaaaagcaaacacaattcaattatgtcgacaaaatatcgacatcctgtcgacattcagtcaatattttaaatggacaacaatttcacagcttgtcgacaaaatatcgacaacctgtcgacattcagtcgacaatacaaacttaaattcataagttattataatcgacaacatatcgacaaccagtcgatatgttgtcgacaaattcaatcagaccacaatttcacaacaagtcgacaacatatcgacatactgtcgatattcagtcgacaatacaacctaacaatgaacaagttaatttaattgacaaaccatcgacatactgtcgacaagtcgtcgacaatataggccaaaaaatacacttaaaccaccatcgacatcctatcgacata

SEQ ID NO: 356432 - DNA, 1018 bp, Cannabis indica
cataccatggcatacatcaagcaactacacagttagcatatggtatgctatccatgtatctcctttcttctttagtctgtggtgcttgttctttagtgagtttgaagtgttgagccaatggtgttaccacaggttttgcatcattcatgttaaacttgattatgactttcttcaagtatccatgttgagttaacatgataaaacctagtctttttcttctgatctcaattccaagaattttcttggcttctcccatgtctttcatctcgaattcactcttgagttgacatttcaactcactgatcttgtgcttatctttgcctactattagtatgtcatcaacatatagtagcaggtaaatttctttgtcaaaataaacacatggatcatattgactctttgtgaattttatcctagacatgaacttgtcaaatcgaatatttcattgtctaggtgcttgctttaagccatagagtgatttaagtagcaatcatacctagtttggattgccattgtcaaatccctcgggttgtttcatgtagatcttctcatctaaggtgccatgtagaaaggttgtcctcacatccatttgatctttttttagatcctgattagcagctttggccatgatagccctaatggaagcttatttcacaattggtgcaaatatatcattaaattcgacaccttctctctgagtgaacccctttttgccactagccttgccttgaacctcattgtgtcttcatttactccttccttttgtttgaatagcaatttactatttattaacctctgccctggtggtctgttaacaactgaccatgttttgttcctaatcagtgacactttctcttcattaattgctctcacccaatgttccctgttactacagttcagggcttccctgtaggttgtgggttcagagttttcgagctcacttgcagcaacaatggcaaatgcagaatagtctgcataaccaagcttttagttggaaatatttcaccaggatctagat

SEQ ID NO: 356433 - DNA, 854 bp, Cannabis indica
cacctgaatcctcagaccccactggaaaattccatgttccatctggacctaccaaggtgaagttagaaggaagaagaattgccccggagaatatatctcagatggagagattcatcccagtgtgtcacttctgtaacaggaggggtcatattcgacccagatgctataagctgcagaactacttgaaagctatgatcaatcgacctatgagttttcaaaaacccaataaaactcgaaaggaaggatctcaatgtgagtggagattgagggctgatcgtgaatcgaatgttgggttggtagctcaagtttcactgtctgcatttctggaaggacagtggtacttggatagtggttgctctcgacacatgacgggcaacaagaaattgttagtcaattacaaagaagcaaaggagggagttgtcacttttggtgatggaaataagggccatattattggaaaaggagacttggtgatgagtagagctgcacctcttactgaagtactgtatgtgaaaggactcaaggcaaatctgataagcatcggtcaactttgtgatgcaaattacactgtaagtttttctaaaactcattgtttagtttcatttgatgggtgctcagtcttaacagggaagagatctagtgatggtagttatttgttggacaatgttgtcctatgtaatagtgcatcattggataaatcagatattggagactttactgctattccaaaagttttaaccaaaagaaataagagtgttaaatcatcacctcgtctttcaagagctcattcactattattagtgctatggtatggtcttctaaaccttatactgttgaatcttgggtttaaacaa

SEQ ID NO: 356434 - DNA, 789 bp, Cannabis indica
acggtatatcatgtagagggaattatgtacagaaaaggattctcaatgccattgctcagatgtgttactcaagaagaagctgcacgacttccatctgaggtgcacggcggtggaaatcatgccgccggccaaagtctatctaaaaaaattctaaggcaagattatttctagccaacgatgattgaagactcaaaggcctatgttaagaaatgtgacaaatgccagagattttcaaagatacctcgagctccacctaacgagttaactcaaatgcagagtccgtggccctttgccatttggggcattggcctgatcggacaattacccaaaggcaaaggaggagtgcagtatgcagtagtagcggttgattacttcactaagtggatggaagccgaaccactcgcaaccattacatcaaagaaagtttaagactttattgtgaagaacataatctgccggttcggattgccgtacaaaatagtttcagataatggcaagcagtttgacaaccaacccttcactgacttttgcgctaaccatggtatcatcaaaagtttctttggagtggcacatcctcaagcgaatggtcaagttgaggcagtcaacaagaccttgaaggatgcactgaagaaaaaactcaaagatgcaaaaggaaattggccaaaaaaacttcctaaagttctatggtcatatcggacaactaagaaacaacaaccggacagactccatttgctatggcgtatggatatgaagctatgctgcctatagaactcgagccaccatcccaca

SEQ ID NO: 356435 - DNA, 359 bp, Cannabis indica
gtgttagtctacaagggtggtgctttaaatcccgtaggctataccgactcagatttccaggcttgtcttgatgacaaaaagtccacacttgggatggtttttactattaggggtggagcagttgcttggacaagcgctaagcaaaccgcaataccaaactctaccatggaggccgagtacatagctgccgctgaggctgctaaggaacttgtttggctaagaaagttcttctcaggactttgtgttgttcttgaaatgggaaaaccactggtttcattttgtgacaacactagtgctatagccaactataaaaaagtcttgaagccacaagatatgttttaaatttaccgtaatatcta

SEQ ID NO: 356436 - DNA, 563 bp, Cannabis indica
tttacctaagactattcttgatgtttctcttgagaaaatcaacctacatctattgaatccgaatctgatcttggtttatcagaaacagaaatgctacgattgattaaaaatcgtaatgttcttgagcctgtggtttattcaaggaagaacatctgggaaagaagtagagaccatccaatcatccctgcacaagaccaaatggaagccccgaacaatggttcttcaagtaccccaggtaattcttcttctattcctagttcttctctgtctccaagtaatattttgtcttcacaatctgtttcaagccctacatctgaaactctagatcttcctattgctcttagaaaaggaactcgtgcttgtacaaagcatccaattgccaaatacatctcgtacaatcacctatcagataactatagagcatttattactaatatttctgaacttgttgtgcctagaagtatacaggaggcactagatgaaccgagatggaagttggcagtggatgaagagatggatgctttgataaagaatgggacttgggagattgtaatgttaccgag

SEQ ID NO: 356437 - DNA, 1328 bp, Cannabis indica
tccacttccatatagtattaaatttttcaagataatctatagggttagaggtacctttatattttaggaattcggatagatgaaatccctcgggaagttgggcttgtcgcacttccgtagtgaaaggagagatcccatgcagcttgtatatgggccttctttgctgctcgagcattttcaaagctcgcaaaagcatgctttggtcaattcttccagccacaggagtcgggactgctgcgactacaggagtcgcaactactgcggcgaggttcgctgggatagtaatcccagtagtcccagtcgatgcgataggcgggttattgtgagtgtttataccctgatcgcccacatggggatcacggggtgcttcctcattatgtggtgcgcgagagcgcgctctgaaaactgtgttgaggtgatcacacagatcacctcaatgtacctgatagcgtcccccctgctgcgtttccacagagccggaccttgtgtatctacttggtgtacgaccatgcgaagatgaagaggcggattctgcgtcgttgtctctcgatggtcgactgcgaggactgcgtcgctcaggatcttcatcagcctgtgttccttggttaggatatctcacagattggtctctcgatgttggatgattcaggtccagaccctcagggttggctctttgttccctgcgaacacggttattacgacgtctagaatttgttacctgagggttgtccgtgcaagtagtagggactcgagtggggtgtcgggcctgattctgtccatccacttcagcctgtagtgcacgcagttggtcctagatcgcagtatattgatcagtggtgagctggatgattccctcagataccactgcctgagtgacagggggaaaattcatggttgctggtggtgtggacgtgtccccgacttgagggtcagttttttcagggaaccggttgagaggtctgatgttgctcctccctactccgccattaacgacgtccacaggcggtgttccagctccggataacggtacgttcatcattccaatgttgatggacccgttgttagcacctctgtttgtttggtttccagccatgatggtattcttacttgaaacgaataagattttaattctcgagttcccacagacggcgccaaatgttgtcgagtgaatttcgcaacaccaattttatataatattgttaataacagaaagaattctatatgaagaacaagtgcgagtattcaacctgggaatgagaaaaaattaacggaaagctagaaataataatgagacaaagaattatagtggttcagtcagatcacggtat

SEQ ID NO: 356438 - DNA, 542 bp, Cannabis indica
agcttctatagattgccactagaaaaatgctccagtatcttactaaagtaagttgcttgcactagagtgatcaaataaccaggtatcaacaagtcataggtttagataaacttaaacctttaacactaagattagtaagttttgttaagtccattgaatagacttattttcaaaattttctttcttgttcttgtaatagaaaacttttagttactccatatgaatgattttaaccatagttatcttggttttgcttcttagttccttattctgactatccatgacttgtttaaactaacaatggattttatcatcacaagtgtcttccaagtcataacagggtaagttccttgaaaccctcccactacaacaaggtaatgtgactttctctctaagaacataaatggtattgtcctcttcggttgtatcaagacaacggaagcagtgggaccatcttatatagaataagatgatagaacactattggaatcaagaaaaaaaataatctcctctacttagctacttgttttcaaacttagtca

SEQ ID NO: 356439 - DNA, 824 bp, Cannabis indica
gtggtctgtactcacttgtggttgtcacaattattaaattttacagagtacaaagaaccttcactcaataacttcttaaacttagaaaccaaattttttcgtattgttgcacgcattagattttcctgtagcatatatggtagatacattgagtatttaataattgataaataataataaaaaaaaactaatagagggaaaatatgaataaaataataatcaccttctcatcaataaaaatcatatcaagacttatcaattcacaattctttttagatcaattctctattctttttagtattaaaagactctcacattctacaaactctaatctttatgctccaactatctgtatcagtatttaagtcggtaagaaaagaacacttcatcattatagaaaaagagagaatataagaaaagaagagagaaggtaagtagtaaattaaaatatgaaattaagagaaataagttagaatatatatagagatttgtgatagtaattttttttttttaaaaaaaataaagtaattttttttttcaatttgaagttgtggtgatattttttaaatataattttagaaagaaataataaaatagtaagaaaatagaacaataggtttataatattttttttatgagtaatttgcggcataaatacctaagtttatcttttagttactaattaatacctaagttaaaattttggcggtaaaaataccttctgtcatacttttggaacttccgtaagtacctggccattaagtgccaggtcagccccaaatgtcagtcactcattggtctaaatcatttaattttttttaaaa

SEQ ID NO: 356440 - DNA, 781 bp, Cannabis indica
aaagccttttactatggacatatgactgtcctgactatcttcttattgccttgacatgtaagtatccgaatttacttttctttatgccaagctaaagtatgcatgaacttgagttagaggcaggtttattagcttacactaagcgttaaaatttctctgcataagttctccatgctagttctatgcatttgtacagtgtggatgcccccaaggtgagcacatagacttacggtctcttggtcacttgcaattcaccaagtttcatagaccttgcctgggaattttcttggggatgctacgggtctacgcatgtggaactgaaaaagaataactttaagaagttaatcttgttagcaagtggtttaaacacagttggtcttacgtgtaacaaaagcttacaatttaatgttcgtttttgaagtcacattttacccctacctgagatgtcaggcagaggccatcgctgaagagcgatgggaggccatgctgaaaagcgatggatactagctcttttatatttggctacctctgtagggcttatcgtgcaaaggctatcactgaagagtgatgggaggccatcgttgaagagcaatgaccctaatttaaaatataaaataactaatttttaaatttaaacttcaaaatatcaagaaattaataataatctattaaataattaaatattattcaattggtaatttgatatttaggtttcaatattaaaaataatattttatgtagatatttagtgttgggttttatgccctaaataaaactcttt

SEQ ID NO: 356441 - DNA, 387 bp, Cannabis indica
ataaaacccaacagtctcttcaactcatcatgctcatcaaaaccaatacgttagcagtctttttaagatggacagccgtgcttgggacgaggagattattagagatctctttaacgttcgagatcaggagctgattctatctattcaactaagtgcaattgctacaaatgactgatggagttggaaatatgaaagcctcgataaatatttacaagaaatgaaaagggggctagcctaatgatggtgattagaattttcggagggagatgtggaatctaaaggttccaccaaaagccagcaattttctgcagagggcagcttcgggttcgcttcctacttgtttttgttgggttttatgccctaagtaaaactctatttcaatgtaat

SEQ ID NO: 356442 - DNA, 802 bp, Cannabis indica
tatgggtcgtgtcgtgtcgtgttatgttatcttgtgtcgtgccaatattataaatggtaagcctgacacgacttgtatgtctatattttcgtatcgtacttggactcatactgtgcattaatcgagttggcccattttttataaatgggtcagcccatttgcttatacgggctcgaattcaggttccactttttcaatatttttttacaattaataagttaatcactaaattatacatattttctatagtttgaattgtttttatattttctaagcaatactttgttagaatattattactatggaaataaatcaattatttaatttataaaatatgattaataatatttttaaaatattttttaattatggtcatatttaattatcaaatatttcaattactcgatttgatttcctgaattagttgtcaaaatattctgacaattatttatgatacaaatactgatggagtatctcacctataaatttagggtaccggttcccaagctcactactcattctgtgaaaacagtaaatctatctaagagagttagagatagattggaagctcaaatacccactaactaagtttgtttaacctttgtagattcaaagttcgtgtggaatcgaagctctaagaataatgactggatgaattttgattattgtttataaatcaatcattcatataaagtctaacatctttacacataactatttaaaaaatattagaatataaaatttgaatattattgtatgttattattattgtgttgttgtcgttgttattcgtatttttcgg

SEQ ID NO: 356443 - DNA, 962 bp, Cannabis indica
ttagagatgcttcaggaaaattggatagtaaactagcaatatcatctaaaatagaaccaaattcattacaaaaggaagatcttctagaaaaagctgaaatgatgctcttccaaatataactaggagatctcctactgcaatcatataattcattgatgaagaaataaaattattatagatcgaaaacaccaaaaaataacaactataaagtaaaattattaaattcaaaagggttacattaacaacttaataataatcagtgaataagttagaaagtaaattatatagaaaaatggttcagaagcaattactaaaaatgaattaatcgaatacctgaagcatccaaaaaggaggtatggtgataatatttagccttataaacttgagctggaagcgagtcaggtcgattaagaattcgccaagcttgcgcagctaaaagagcctgattatgatggacaaaagatctaaaacctagcccacctttttgtttaggataacagagcttatgccaagctaaccaatgcatcttctttttatgaaccgaagagctccaccaataccgagccattagtgattccaattcatcacaactcttaattggaatttggaaacatgacattacatatgtaggtatagcttgaattactgctttaagtagtacctctctaccaccataagaaaagagcttgttttcccaagaattaagccgcgaccatactttctcctttatattatgaacagtcgttgtttattttgtccacttagcattggtaatcctaaatatttctctatagcctcagtcacttgcatttgaaaagtttccacatacagagattgcagatcttctggagtatttggggagaagtacaattgggacttagtgaaatttataagctgcaacagttaagaaataatctataataattatccattgaaaaatactaatgcattatgaaagaaat

SEQ ID NO: 356444 - DNA, 624 bp, Cannabis indica
atctgagtctggattcagttctctgtctaagttctcggtctcagtccgtggtctgatccggtctaggttctagtttgggtccgcgtccgagtctagctttgggtctaattcaaggtgtgggtttttgaatttaggttcgagtctatgtccgggtttgtgtccaggactggaccccgatctgggtctaggttcgtgtccaggtccaagttcgtgtcttgagtgcgggtccaagttctgctctggttcaggatccctgtccaatctaggtccagcatttccatcctaccctaggtcttggtccgagtcatggttcgtacctggatccctatctaggtccaagtctatgtttgggatcgggtcccagatttacgtccaggtccgagtctcaattctggtctgggtacactaccgtgtctaggcgtgagttccagtgtcaatttgggtctggggctaggtctatgttcagttttaggtctgggttcgggtccttgtcacggtcctagtcttgttctagggtcctggtttggcgattcttgttctaattttgggtcctgagtctaggtcttgttcggtttcggttcttcgtctgggttcttatcctagtttgagtcccagatctagaca

SEQ ID NO: 356445 - DNA, 528 bp, Cannabis indica
tattttggacaaaatcaggggcaacaaattcgatggtggtctaacgcatagtaactgattggtggacatattttgtgttcgatggggagttagatactgtccaaataagggtctaatagggtatttaaaatcatacaaataagcaaaaaaagtgataccatttaaagaaagaaagaaataaaaaaaatataaaaatatcttccttaaactgtacctctccttaaaattaagaaaaactaaaaaattaagtcgaaactcacgttagcatcgcgtaattacttaagaaattaaaactatgataaaaaaaatgtaaacaaatttatatatatagatatatatacatacaacaatatgtatttaaataaacataacaatatattacaagtattcgaacaagaaagagaaaagaaaaagcacatgtatatatatacataataaatatgtatataatatgtatgtatacccatcggaccttattcgaacaatatcagatcttatcggacacgaaatatgtgttgggttttatgc

SEQ ID NO: 356446 - DNA, 568 bp, Cannabis indica
gacatatagagagaggaatttcacattatcaatgattttgtgattaaggaagagtaatggtggagaaagggttgtgtttaattcaacctttacgaggagtttactactactgcacttgatttgtatatcaaggtgttgagattatttgaaatgcacttttttgttttatattagtgcaagtggtagtttgttgggttttattccataaaaaaatcatttcaatataatcagatttacttattgttgcccttgattttgcccaatatacgtggaccaaccagacagggtcacgtggaccaaaagatcttaagatttgaattaattgctaagtctttatgaagaaaggcagcatccgggatctgcctcccggagaaggcatacgaagtcccctatgctcccggaggcctaagtagcatcaaagcatctccgcgaggtgtcaggcttcccctgagcagtcatctcgcatttcatgccacatgggaggaaacgtgtgttggaaattattttaccaggatcttagatctactcacaagtatgttgattaacaccgtaaatatgaactttctaa

SEQ ID NO: 356447 - DNA, 667 bp, Cannabis indica
ctaaaagcgaagtcaacagaaatcatattcgaagcattttcatttttaagcatttggagcaccaagtgccttagccacacagtgcccatgttaacattttttcaacctggggaacttccaagcattaaactaaagaactatcttgtgcattttccttgtcattgtgaaaaataatgaaataagtgctttcaaggaagaaatagaccgatctagatgccaaaaagaaggttcagtgcccaagttgacacctagtgctagtgcagcgcccaggttgacattttgtcaacctaggctaaatccaaagagttttttttcaataagtattctgggaatattctttgttttcatcaaagattaagataaaagtacttctgggaatcaaacagaaccatccggtggcctgaaactagacccactgcccaggttaacacccggtgttgggcccaacgcccaggttgacattttgtcaacctgggttgtttctaatcatgtttctgaaaaagtgtttgttgggttttgtgccctaaataaaacccatttcaatataatcagatttactaattaataaagatcagaaatcacttttatgttgcatggttcacatgattaatttcatgattatacttaatttataaattctattaagtccagaacatatatataaata

SEQ ID NO: 356448 - DNA, 645 bp, Cannabis indica
gcgtgtacaaattaccacaacaaatcccaattgtgaaggtctatttgctttatttaaataattttagtaggctaattatgttggaatatgttttaccaggatctagctttactaccatgtatgttatttaacatcctaaatatgaatttctaaaacaatgtaaataaacacatataaagtttaagaaatcttacagtgggtgcagcggaatattaatggctccttccactcagatctctaacccttgtatcctgtttgtagcagagtatcaccaaggtctgagcccgaatgtccttctcttgaatctggatttttcacagccttagacactatgattcagtaccacttgatgtgtgtgggcacttactctatcactaaagggtatgaaaatatgaagagagaaagagaagaagagtggttcgaaaaaagaaggagtgatggctctggaaaattttgactgaaggcttgaattttcatcatcttttagtgtgagccatcactatctatttataggcaaccacctaagtttaggttagaattattaggcattaaaatattgaataaattagaaggaaaaaccctcccaagtggtcggccataggatgtgggccccactttggaattttgccatttttcaataatttt

SEQ ID NO: 356449 - DNA, 478 bp, Cannabis indica
cgaaccttaatcaaaccatacccaaaattaacttcttacagataaaaatcatcacaacatagagcaaacaacatcaacaaaaactctcaaaattcagattacataatcaacttaaaatcatgctcaacatacaactttcaagctctagaacttgagctttaactccctctaatctcaaatatatatccagcaacaacataccaactttaacatgaaatcaaacccagaaaataccctacaatctcattccatgctcaacaaacacaaaacccaaaagattctagtaccacatgctcaaattaacaagaactcacaatcatgtacatatcaccttcttcaacctattcatgctatttgtaacaccctaactagcaaaggcgtattacgtgatttttaaacatactgttcagctcgttgctaatcaacgaggtttatggaaaaacgtgattaattaaaatttttgctttttaattaaact

SEQ ID NO: 356450 - DNA, 591 bp, Cannabis indica
agatttgaaggagatttgtgcaaaagatagaaattcatccacgtctactaagaaagatattcaccatagtccaaatgctcaggttcttaattaatatctgctaaagtgcttcattttggtatcatgtattttcctgtaataatctttgattttggtataattttaatgaattatgatatatttttttggaataaattctgtaatgaattatgatatttaaatttagaaatatataaattccatttattttgatcaatattattttttttataaaaattaatgctattatttaaaaaatatatattaaaaaaattaatttaatttaaataatacttttgccaaaagttattaacagtaatttaatgtgactttttccaatagttgtaaactgtcatttaaattgactttttctaacagttataaaccatcttttaaagttctgcatttttatgacacccacatagccaacgttttaggaaccgttgggaaatagtataaaagacagttataaaacataggcaaaagccaattttgtagtagtgcccctatgtgcagataagtaagcatgtaagctttcggtgacaagttgag

SEQ ID NO: 356451 - DNA, 642 bp, Cannabis indica
gtaaaataatttccaacaccgtcttcctcctcgtatcgactaggccgcggagtccaacccatttcaacgttataatcatctctttttttttatttacagccatttttcttttctttaagacaatcttaatttagctgtttattttctaaggggagacaattattatggcccgtccccaggccctttgtattttttcttttttttggacctgccctttgggtcaggatattttacatatatatatgatcactttgatacatattctttttgacattacttttacttttagcctgctttatgtctgtccgtgtgatatgtcttagtacccccctgagtggcatgaaaactttatttttaaggcactcagtttttatttgaagcttagaggttacatatacttttacggtacaaactttcttttttttttaacaaggcctaagttacacaattttttttggactattggtaatacttccggagatgatgggcgttccaagcccttggcacaatggttccgtccattgtttttagcttataggttccgcagccgatctcatcctcaatttcatatagcccttcccaatttggccgaagtacccccactctgggttcttgagtggctgggaagactcttcttaagac

SEQ ID NO: 356452 - DNA, 878 bp, Cannabis indica
gatgatgagaaggatgaatgggcgagacttctgattgatgactctctttagtacacagctcgggaaagagttagaaagatcatgtttattcactttgatctaaaataatttgcagaacaatgtatattgcctttgacattcagtagtatacaaattataatcttttggatctggtgtaatgtgttatgctcataattttgcaaacaattgttttgagcataaatatgggtattggacatgaatacttatactttttgtagtgatattttatgtatggacaatgtttgatcttattaattaaaaaattataatttttttaaaaaaaatgattatatagtatatttttattaaaattaaaattttcatgtgattatatagatttttttaaaaaaatatatgtcaggttttttttaaagaagtaatattttatagtaaattcaataaatataaatttatatatatcaaattttttaaacaaatattaattttttaatacatatctgtttttttttaaatatatatcaattttttttaaaaaaatatatatataagtggaatatatttaatttaattttttaatcatgttttaaaaataatggtatttttgttcaaaattaatttattccattccattccattatatagtcaaccaaatataagaatatgtattcaattattgattccataaatctaaccaaacaacctattcctattcctattcttattccattccattacccttaccattcctattcttattactattcctattccattattttcattacctccaaccaaacgggcccttagttcctttctctgtttcacaactaaacgggtctgtaaattatacattttttacttgaattaagttataa

SEQ ID NO: 356453 - DNA, 954 bp, Cannabis indica
aattacccagacaattttaaaccgaaatcactaaaaccaaatgaaatggcaaaaatgtagactataaaaataatgatcaaacccaggaatgtaaaaaaaaatgcagaggaggatgggttacttactatttgaaatcgggttgtgatgcgatgaacgattctacaactggggatgaagcaaacggcgtgatgatctttcagaacacttgtcgaaaagcaagtccgaggagattcacagaaagaaagtgagtgatagtgagggcatgcaaagcttcgtaaaactggggtagagtttttcgcagaaaggctcaagaaattttttgaaatggtaaagatggtgaaaaggtggttcctttttcagttttataccattgggtttggacttcgttagattgaaatacaaaggatccaacaaatagaaataagagagaagtggaaaagatgattatttaatgctcatgatgtgcctcataaccacaaaactgccaaaataaaaggcatgtattttttccaaatggattatgacaaatacaccctctgtaatcatttaaaaagtacttttcattaaaaatgactttttaaggggcaattgttatacccgaaattcggctggtacttcagaaggtgacacgtgttaatctcagagaatatgaacaaacaaatataatgacaattatattaataaatattgaatgaaataactcgttgaatgtagagtcaataggatatatttataacttgcagactgcatagttgttgcccctgattttgcccaatgtacgttgaccaaccagacaaggacacgtggatcaagcaatttacaaaatttgctaagtctttgtgctgtaaggcagcgtccaggacgtagctctcggagaaggtgtatggaaccccatatgcttccggaagctcgagtaacgctaaggcatctccgcgaggtgtcaggtttctcctg

SEQ ID NO: 356454 - DNA, 544 bp, Cannabis indica
caaggcatggcaaaaccgtcaagcagcaagcgaaagaagttaagcgatccgtcaagcagctgcaccaccatgtctggctgaccaaagggaatctataggccaggcaggatgaacttatatgcccgcccaggatgggcacaagctggtcggccaaaaggtgactttcagatcaagggaaggtccgttcgaccaaggaagcttggcctctgcaaggaaaaggtgtacaaaggttggcctccatctccgaaggctggcctccacatccaaaagctggcctcctcttagtaaatctgacagaaacatgacttgcaggatcagggagacacatgacttgccagatgctggcaggagtatggccgaccagcttttcctttacaagacattgatgcgcaaccttcatccatggacagcaagccaagttacgagttgggccttgacaacccactaagatgctacgaaaatatctactttcaaggggcaatttagtcatttatatttattaatttaatatgtaaatatctattattttatctgctaattaggg

SEQ ID NO: 356455 - DNA, 508 bp, Cannabis indica
aacataaataactgctaatttccaaattaactaagcgggctttacagtttcgcttcctgaaccgctcatacaatggttccaaacgattccctgcatccggtggcactaccacaggttccggaggatcaggattagggtttagagcaggttgagctcgctgctctctcaattctctaatttgctcaccctgctgctggatagtctcatgcattgcagtgtataactcttcccagtttggtgggagtggagggttctcgccctcaccagcagccccgagcccagctagctcgcggttacccctaccagtccgcctcgggtgcataatctatacacctgccgtcacattccaagtaataacaatactgataagtatttccacatatcatagtccttccacacaattcagataatcaggcagtcagaatattaacaaactatcttttaactaaaagcttactgaaccatgagtcgatcaagtccttgcagccaatgtacatatcaaaccagt

SEQ ID NO: 356456 - DNA, 682 bp, Cannabis indica
aagatcttcgtctttcttttcagtttcttctaccaagatcaccatcaattgatgaccagcttttctttatgctgtagctctatgcgatagcaatcgcgagccagcatctggtcgccacgtaccactcccacgtcatctggtgtttagaattttaaggataggtgcttgatcgagttggctgcccctagtccgattagtgctggacgacccaacaaaatgttataagctgatggcaggtcgacaactaagaagtcttgcataacactagcagataagggtgcctcccctaaggtttatgcgagctcgattatgccaagactggcaatgctgtccccagtgaatccgcaaaggttcacaatataaggccttaatttggctttttcgagccccatttttcgtagagtctccttataaatgatatttaccaagctcccattgtctattaacaccctcttgatccttttattggcgagtggtatggtaatcacaaatggatcgacatgaggatatctcaggtttttcttgtcttcctccgtgaattcaatgggaggttcttcggttttcaccttcttggaaggttctggggcaaaggtcgactgctcattctttatctctttcacatatcttttctgggcgttattgctttcccctgcaatatgtggccctcctgaaataaccagga

SEQ ID NO: 356457 - DNA, 506 bp, Cannabis indica
taatcttaaaataaataacaatacaaattgaaatatccaaaaaaattagaatatatttttatttatttagtttttataattaaataattatttagatttttttttgagtcaataaaaaaattattaaaagtggataaattaatcaattgagacgtattaatccgtcgaaaaaaacatataatatattagcgtatgtgtgatttgtgttttcgaatggaggacacgtataattccaacatagtttcagttaagttgctctatgcccaatcgcaatcccaaccaagataatgaattggatccattagcgaagtcaagccttccggaagctggacaaatgacttgtccagataagatacacctccgacatagcgtatggatgagtgattaatggatattcagatatccaacttcgtatcacaataatttattaccaaatctcacaatatcaaggctttatttccaagattagtatcttctgaataaggaaataaagtaattgtcaatca

SEQ ID NO: 356458 - DNA, 469 bp, Cannabis indica
ttagcgttatatgagcttccgggagcatatagagttctatgtgccctctccgggggctacgtcccggacgttaccttatcgcataaagacttagcaaatattgtgaattgcttgatccacgtgtccttatctggtttgtccgcgtatattgggcaaaatcaggggcaacatttaccccccaagccttgtttatttgaaaaatgaaacaaggcttgctcaagtgcctctagttgggtcctcggtttcctggcacgagctttgagtgcgtgagggtgtatttaatgatggcttttaatgcagcgattcactttttgcaggggtcaattcgtttcacgcccatcgattgatacggtgcattagtggtgtcagacggatactcaagtgtttccaccgcctttattgtaaatcaatctggtccgttgatctttgagcatttgaatcgtgcgcttccccaaccgttcgattggta

SEQ ID NO: 356459 - DNA, 941 bp, Cannabis indica
taaaaatacaaaattagcttaattttttctacaaggaatccaaatatattatttcaaagcgaaaaaaaaattaattttcatggaaaaaatttttaaatcatatacattaatcaaataacagataaaccaacttgaactcatccaaatcaacacaataaacaaattcatcattttaaatccatattacatgaaagtaaatgattaccatggctctgaggctagttgttgggaatattttaccaagatctcgatttactaacaagtatattgattaacatcctaaatatgaatatttctaaaataataaaattcaacacataagagtttaagtaaaccttatattggttacagcggaatataatgactccttccactcagatctctggcccttgattcttttgagtcgcagagcagtatcaagatctgaacttggatctctttctctctttcgggtttggttaccaccgtcttactcactatgattgagtacttgactttctatgtgtgggcatggctttctatcactaagggttcgaatatgatgaagaacaatgaatgaggtttgaaattactatagaaggtgtctctcatctactagttgtatgacagagaaaactagatttttggcagattaaaaatcaagtggatgagtgagagcatcatgttctatttatagtttttcaactagagcttagggctgaattatatggattaaaaaagaatataatattgggcacaaatacacttaaggtcgaccactttctagttacaattttgccactttatttcaaccaattattcttctttcaataataccatattttctaattcaatcatgtaaatgccaaaactatttatttaataattataattaattatcaaataaaattttcatttatataatttattaattagaccatacaaagtttcttaattaataa

SEQ ID NO: 356460 - DNA, 1472 bp, Cannabis indica
tgggattacaagagaaggatctgcgacccatcgtgcgagtatcacggtttcactggagacatcacttgccctgaaaggcatgatcaaactcccaagttaccttggggagcccgcgacccggtggtagataagtcaatggctgacttcgcggtaatcgaccaacacttggcatacattgctgtgattggtcgccctatcctgaaagagatgaagatcgtgacatctatttatcatctcactatgaagtttcctactcctgctggagtaggatctgtgcgaggagtccaatcagagtcacgagaatgctacaatacagcagtaaaactcgtagaaaagaagtcagtcaacgtaatttacttgctagaggcaccgccccctcgataggaggtgtttagaatagaggaaataccgcataaagacaaaccagacttggatcctaggatcctcgactatgccgcaaccgcccaggtcgcggaagacactatgaggtacctattgatcctatagataatagctaagttttgaaaattggttctaaactaacatttcaacagcgagaaaagctagtcagttttttgaagcaaaacctggatgtttttgcctggaaacatttagacatggtcgaaatatctccgcaggtcatgggtcaccgattgaacattgaccccgaagtgggaggtgttcgacagaagctacccaagctggtcatgaacttctcagttttatagatgcatactcgggatataaccaaatctcgatgtatgaaccagatcaggaacatacctcgttcattacaaatcgaggtttgtattgttacaaggtaatgccttttggtttcataaacgcaggtgcgacgtatcagaggctggtaaataagatgttcgcagatctgattggggacaccatggaagtgtatgttgacgatatgcttgtaaaatatcaacatgaaaaagaccatgtcaaccatttacaagcgatgttcgagatattgcgacggtacaaaatgcggctcaatcctcttaagtgtgtctttggggacgatttagggaaattcctcgggtttatggttaatcaccggggaattgaggcaaaccctgcgaagattaaagcattagtagagatgcgatctccgactaagccaaaagaggttcaaagtctaacaggtaaagtcggcgctttaaatggagaaactggcgtttgctctggtaatagcgtcaagaaaactgcgaccttatttccaggcccatagcattgaagttttaacgaactaccctttgagacatgttttggcgaaaccagaagcaatgggaagattgttaaaatggtaagtagagctgagccagttcgatatcaggtacagaccaagatctgcgattaaggggcaagccttggcagatttcatactcgatttcccgagcactgaagtggcactcatagaaaaaaaaaaattgatactgatgtaccaaaatggc

SEQ ID NO: 356461 - DNA, 1037 bp, Cannabis indica
caaggtcataccaacaccctgcatcatgatcaggaggaactccgtgctgcggtaaatctcgcgttcaaagagcaaaggcgtatgttcgttgaatggagggattaagaaatagaaacattgagggctcagcaggcagccattgacgaccgaacaaggcaggcccctgtgctgatacgaaaagcctatcaggctaccaatcaacaacctacaactgtcattcccctgggcgagtcagacagagatccaaccgtgaacacttctcaaaccctgaatggtcagccgtccaatccctggtcactggttctgcctgtgggccaaggggtaggcggacagaccttgtctagtaattcatcaagagaagtcatacccaataactccgcgcaagttaatggttccagctagctgatcggccaaactaaccagtcattgagacagcctagtgcatctatatttaatagattgggaacggcccatgatctcagaaatgatctgaataaaaggagagggctagacgggcaacatatcgcgccagccattcagcctggagcccgtgctcaaaatcttgcataaagagatgctgacgtgactctggtcgaccaagaggctgaacaagttaatccaaccgtgcaggcacagttggatgaactaaaaaatatgttccaaggcttgttcggtcagaagaataatgacctcgagctggaccgagcatgtggatcccctttctccctagagattaatatcctagagctgcctcataagtttaagatgccaacctggaagatctatacaagaaagaaaaattccctatcccatctcaaatactttgaaatgcaaatggacctgcaaggagtacgaggagatgtatgttacagagtttttcctgccaccctcacaaaagccgcccagcagaggtacttcaagttgactcccagaagtttcaactcatggaaggctttctccgcagaatttcatgcacaattcttgttggaatttattttaccaggatcttagatctactaacaagtatgtttattaac

SEQ ID NO: 356462 - DNA, 796 bp, Cannabis indica
tgagcgttcttttccctggggatccattctactttatagtctgtgaactcgtggagcagttcccagactattgctacatacacggccattctttccccgcgcgtctagtactctcccgacacctggttcactaccagttgggagtcactgtagacttctactcttttagcccccacggtctttgctaatctcagtcctactatcaaggcttcgtattcggcctcattatttgaagccgaaaagtcgtaccgtagggctgcttggagtcgaagtctgcttggagatatcattgcaacccccgctctggatccattctcgctggaggctccatccacaaatactttccacgtcgggaccaatggtgtcggtatgttcgcggttgcttcggcttcattacattcggtcatgaagtctgctagtgcttgtcgctttatggaaatacggggaacgtagtgtaagtcaaatttacttaacttcattgcccatttgaggagccttccagacgcctctggcttttgcaggacctgccggagtgggtggttggtcaacaccttgattgggtgagcttggaaatagggtctcaactttctcgaggccattaggaggcaaaaaaactagttttcaatgacggggtatcacgtctccgcccctatcatgcgcttagctgacgtagtacacagcatgctaagtcttccttcttcccggactaaggccgcactgaccgcgtgctcggagcggccaagtacagaaacagtcctctccgagacgggctttgacaggattggaggcttggcca

SEQ ID NO: 356463 - DNA, 526 bp, Cannabis indica
aagcttgcaatactctatcatatggtgtatttagagctaaaatataagtttaattttagtgtatttgtactacaaggcttagtagaaaaccctaggttgtcctttgtaggtattaagcagtgtcttgggataaacacttattagtttactattgttgtgacataaggctgagatcatcgggaatagttctccgcttgggttgccgacatgtatgaacctagattaaatgtaagaaaagtatattgtactgtatagtacgttgtattgtaatacaattaatatttttatgaattgattaatattgagattgaaatatggttaatattgatatataatgaaaagattgattggttgagctgtgatgatattatgaacgtgatatatgggcttacctgattattgttgggttttgtgccctaaataaaactcatttcaatataatcagatttactaattaataatgatcagaaactgcattttatgttgcacggttcacatgatttatttcatgattgtttaatgtata

SEQ ID NO: 356464 - DNA, 1284 bp, Cannabis indica
aaagttaaactaataaatttaaaaatatgattaaaattatgtaaaatattttaagtattttaaatttaaatttatataaaatatctacgtaatttttatttttaaatatatataataataatataaaattaatatagaatatgttgttaattaataggatattctgttaaagttaacgtagaaactcaaaaaaatatcgctaaattaaaaattttgttatatagttacactactaaaaattctgttctatagttatactttagatataaatatcaatttcatggccagaacaaaaattactttttcatacaatagttgatcgttgatgattgactcgtctacaaataaaaacattcactccaaatagaaataaaaaattacaatgagtgaggataagaaaaaaaagaattactctatatattattttttaacttttgttttttaaatttacagtttgggttgctacagtagtttttcaagtactttctacgtggttgttatatgtattttggttgcgatttaggttgctcagttagttgttttaaaaaaaaaaaaaataaataaaaaatataaaaaaaaaacatgtttagaaatgtaaagatagaaaaaaaaaatccttaaaagaaaaatcaaaacaatagtaatactaataaataaataatatatgtattttttcttagtaatactaagaaaaaataaataatacacaaaaaaaaaaattagaaaactcatgagttcaatatacagttcagatggtaatatcaaaattaaatattataataattgtagttttgttattaacctttagtaatacttttatatttttattttttaatctcaaaaatattttttaataaattatgtttttgaaaaataattgatcattttgatgggattttattggattttagttttagatttgtttaatatatacttaatatgcttgtataacaaaattagttacatttcaaaaaaaaaaaaaaaattggtaacattcaaagtgaatcccaattagggacggacccactagtattaaattgggactatagtttccactatcaaaaatattgtcttttaaaaaattaaatataatttttttaattttaagaattataaactaaaattgtagaaaaacccccacaaattaaatagatctaaaaaaaagtaattataatgttgataaaaatatttttttaattgacaaataagtcctctcaaaataaaaattctaaacctatcccaacctatatatatatatatatatatatattcctatattttttt

SEQ ID NO: 356465 - DNA, 790 bp, Cannabis indica
agtataatattttgcatatgtttatacatgtgtgcatgttagttgccgtcagaataggtaaatctataaccctcagattagcatagcagagcatcggtgaggtgtacatagagatgcactgagatgccaacagttgtatgctacgctatcagttagtatgattttactgctaccacatcagtgcgattagagtactgagtataggctggattcgcggttagtcatactttgtcaagatcgatcctgattcagttagggttgtggttgggtgtatgggcaccttattagaacccaggattttagtatgtttgtaagttatgcttttcttactgagtctgtcgactcacagtgttattgctatgtgtacgtaagggcaaggctaaggctgaggagccgtgagagcgagcaggtgaagattgtacatattgaggcggttaggcctagagcgtacgatcctcgggacatcacgaccttttgttgtttagtcacctggcgacaaatattttgtaaggaaatagtaaacttttctaactgtattttgtaaacgagatcccagaattttataaatgtaatatattaagttttaaataattaagcaaagttttaattattcatgatttccaataatctcgttgattagcaacgagctgcacagtacgttaaaaatcacactaacatgcctataatagttagggtgttacacgagtatctccaaaatgtagaagaagatatgaatcattataagaaaacactattctgaggaaaacaatgttgactataatgatctaat

SEQ ID NO: 356466 - DNA, 1539 bp, Cannabis indica
atcttatgacgaagaagattattggtaaaggacatgaatctggtggcttgtatgttgacaaccaattaacttgtccgagtgttgcttctgcttttgaagctcattgtcgtttgggccatacatcactttctttactcaagaaactttgtccacaatatagtaagttgtctacattagattgtgagtcatgttatttttccatacatcattgtgttagtttgagtcctcgagtctataaacgtgctaatatttctttcgagttagttcattctgatgtttaaggtcttatcctattttttctaaacctagattcaggtattttgttacttttatggatgattattctcgtgttacttggttatatttaatgaaaaatcgctccgagttattttctatattttgtgcgaagatttaaaatcaatttaatgcgtctattcgtactttgtgaagtgataatgccaaagaataaacatctgcttaattcaatcttatatgacctctaatggcatgcttcatgaaacttcttgcattgatactccaccccaaaatggtgtagcagaacgtaaaaactgatatcttcttgaaactacctgtgccctcttgttttaaatgcaagttcttaaacctttttgggccaatatagttttcataacatgttttcttatcaatcacatgtcatcctttgtacttaatgatgagatcccatttaaaattctttttcttggtaagtcattctttttggttgctcctcgaatatttgacagtatttgttttgctcgagatgttcgtccacatggtaccaaattagatcctaagtcattagagtgtgtctttcttagttattctcatcttcaaaaagggtataggtattattgtcctaatctcaataaatatcttatttctagtgatgttacttcttttgtagaaaatacaccttattttttatcttcacctactcctactcgtcaatgggaggatgatgatttattggtttatcccgtcacatactctatgcctaatacatgttctgacgagtttcttatttcttcacatgcctctatcacacctccaccacttcctaggcctcttatagtgtacactaggcatccacctcctccacctcccatttcatgtcctgcacttgcatctttgtcattagatctggaactcaaatatgatcttcccattgcactacataaaggtaaatgtgaatgtacatatcctatttcttcttttgtttcttataatcatctctcctcttcttcttgctcttttattgcttatcctgattctatcactactcttaaaactgttcatgaagctatgtctcatcctggttgtcttgtgcaatgatagaagagatgaatactttagttaaaaatggtacttgggacttggttaatttaccttcaagaaaatgggccatagggtgtaaatgggtgtttacggttaaattcaatcaggatggaataattgcttgcttaaagtctcgtcttgagttcaaacctatagagtggactattgtgatactttttctcc

SEQ ID NO: 356467 - DNA, 598 bp, Cannabis indica
aaaaaaattgttcactgtgaaataaaattaaacaacactaaaactactaaaaataaacattaaaacaactgtttagaaaaggccaatagaacactaaaagaacaatcaaacaacgaattaaaaataaggaaaaaatgttatgaaaacacaaaaccttcgtacaaaaaatgagaacaaaaacaacaataaaccctaaaaaaatacatttaaaacttaaaaacaactaataagaaaacccaaactgacaaaaagaaaaatagtgtagtttggttaaatgatgctaaaaactatttaatagcagtaacaaaacaaaaaaaaaactaaaaaaacaaaaatgagaacaaaaacaaaatgaaaaataacggttgattaaaaatttcaacttaaaaaaatgaaaaaaattcaaggtaaacaacccttgggtttaactttaggcttcacttccaaatcaggaacttcatcctcgaagtcaaaatcggagagaacctaaaacattatggagaaaaaaattgaaacacaaaacagcaaacgaaaaacaaaacaacaagaaaaaaactaaaaaaaaatcgaaaaacaacccaacttacatccttgacaa

SEQ ID NO: 356468 - DNA, 820 bp, Cannabis indica
gcagctgtaaaaataccttatgatatttaaggtggaaagcctagtctaaagaatttcttaatttgaggatgtccagctatggcaaggtcttatatgccacatgaaaaaaaaaattagactctaaaatagttagcaattactttattggttaatctgagtgatctatgggctataagtttgatgatcccacatttagaaatatttttgagacgggaaatgcaatatttttttgaggatgttgaatttggggggataaggttagagacattgcttttgtggaggaaagtgaatttaaattcagttcctactatcattttcgataatgttcagccttccacacctatcattaatcaagaaatgaatcttaaacctcaacaagacaatattgaacaactcccaaatcatgatgaggtaatttttccagaagaaaaaaaaaatcaacaccctcaagaactagagccatgaaggaggtccataattgaaagaaaaaatattatttcaaatgattattttgtatttcttcaagaacatgaggatgatatttggaatgatggaagatggatccaatcaactttcatcaggccatgaaaagttctgactctcaaaagtggaatgatgtcatgaatgaagagaataagtctatgaaagacaataaggtttgggaagttgtcccattactaggtgtaaaaccaattggttgtagatagatatttaaaaccaagagggatgaaaatagtaatgtggtgagatataagacacgtcttgtagcaaaatattatactcagaaacaagacattgattataaagagactttctcttt

SEQ ID NO: 356469 - DNA, 598 bp, Cannabis indica
acaaccaaacatcagactcaagaaccaccgcatcccaccctttgcgctttatccaactaagcgcctccttgataccaatcacctcagcaatctccgcagacacacaaccccatctactcccagagatagcttcaataagcctaccatgactatcacgagcaacacaaccaaaaccgaatttatgttgagtttcaaaagtggcaccatcaacatttaccttgaccgtaaagacatcaggtttacgccaactattactgttcgaaacaccccccgtagcaaacatagcagtaggagcttcaaactttgtaattttccattggccaaggacatgttttgctgatttaaccacctccaaagcagttcggtttttactttgccattgcacttcatttcgagtattccaaatactccaacacaacatggcagcttcacaagctatagtctcactgccggcagcaagaatgtcaaaaaaccagtcacaaaactcagcatttgtaccattagctgactggtttatcgatgataaagcccagcatgaccgtgagaaagaacagtccaccaacacatggacaattgtctccacatgcatattacacaa

SEQ ID NO: 356470 - DNA, 619 bp, Cannabis indica
acatccatatatcatctcaccataaagttccctactcccgctagactaggatctgtgcgaggagtctaattgaactcgcgagaatgctacaacatagcagtaaaactcgcaaaaaagaagtcagttaacgtcattcacttgctagaggcaccacctcctcgtcaggaggtgtccagaatggaagaagtgccgcataaagacgagctagatttggatcctaggatcctcaactacatcgcaaccgcccaggccgcggaagacactatcgaggtccctattgatccaatagataataataaagttttgaaaattggttctaaactaatttttcaacagcgagaaaagcatgtcacttttctgaaacaaaacatggatgtgtttgccaggaaacattcagatatggtctgaatatctccgcaggtcatgtgtcatcgattgaacattgaccccgaagtgcgaggtgtccgacagaagagccgcaaaatggaccccgcgaagtaccaagcgctaaaggatgaagtagaccgccttttcgcatgcagcttcataagggagtcgttctacccaaactggttagcaaatcctgtacttgtgcccaagcctaacggctcatggtgca

SEQ ID NO: 356471 - DNA, 1030 bp, Cannabis indica
taatgtggttagataattattattttaagaataaaataataaataaataataattatcctaattatatgtcaaaatatcttcaaattaagcaatattcaaatttctacaaaaatatctaagttatttaaatatttaaaatataatttataaatatctaataagtaaaatgatataaaatagtaaaatatcatttttaaacttataatttataaataattaaatatttaacaaaataacaaacttttgaatttgaaaatattatggttagaatatctataaaaatatctaggttaatttcaaatttattaattatttaatttgtcatataagataattttaatataatatttcaaataaaaaagataaagttatcttttaatttaaaatatgttaaatatcaaaatatctaatcttataattaaataatatataaatattaaagaaattaacaaatttttaaatctgaccataatttaaaaaataaaataatcaatttttaaatttaaacctcaaaatatcaaaattaataataatctattgaaaaaataaatattattaatttaaaatatgatatttaagttcaaatatattaaaaataatattatactttaaattttaggtttaaaaaattggaccataaaaatcgaaaatttttggttggcagcgcagtaggctgcacgtgcagccttcataaactgcaaaaacagggaagtgcgcgcggattggaggtgccagctgaggaactccggtggatgcagcatcacgcccgggcatgtgcagcctcctgggcgtgtccgaaggagtgtcccgtgtctgaagacacgggttgtgtccgagtgcacgcgcacggatccctatttgcttaatttttatcaaaattcataactttcttaatttttatcaaaattaagttccgtaaaaattaaaattgcttaatttttcacaaggaatccaaataaaaaaaacagaaaaatatttttatggaaaatttcgtacaacacatacattcatcacataagcacataaaac

SEQ ID NO: 356472 - DNA, 775 bp, Cannabis indica
ggtatagtggctataccctggtacggaacattcttactcatctgttaagccttgtaagtaggtgtatgggtgcctatttacaggtcagaaattatatgatatattatatgcatttcttactgagtctgtcgactcacagttctgcttccatgtgtaggtaaaggaaaggcgaaagctgaacaggagtgaacctgagctagggtaagattgtacatgttaaagcagcgcgacctagagtgttcggtctcgggacatctggggattgtattttggtagtcgttgtgcgacctgtaatatgtgttttttggaatattaacttttaaaagtttgaaaacgggatcccgacacttgtaaatattttgttatattataaagtttattaattaatataaaacttttaatttaacacgtttttcaagaaaattctttgataagcaaagattgcactgtaattgaaaaagtactgtagcgttccttagcattagggcgttacaatttgagtttttaaacttgtaaccagcaccccattagcctcattcaaagcatcataaccattactaattgtcgctttctattgagttctgataatattcttcgagcctttcctccttggagtaatctaactcctagcctcattatcatcatttacactagtactcttgttctggtgtgtctgactagcttctccctccttattgaaagaagaataagtggttgaaaaaaaaagtggcaaaattataactagaaagtgattcactttgtggccggccttaga

SEQ ID NO: 356473 - DNA, 546 bp, Cannabis indica
ttgctgctagtctccaaactgaagaaaaagtaaaagtttatattattttatatatatattatttgttattatgataaatactataatcaataattaaaatttattgctttttgatcttgtatatgactgttggggtttgcacgtgcgacgatgtcagccatgtatttcgaaacataaaaatcacattcttgatttttaggttgtcttggacaatttgcttgtgaaatttttgaccacagcccaagatacgcatttgatgtccctatatattggtatgctctgtttgaaaaattttatattaacattttaattcattagttaattaaataattttttccataaatagtcattaaattattaccttttcaacattgtagtaatttgttcgggaacttggtggccacgtatagagtctaaatggataactttccttggcgcaacgacctctaacatccaatgcgcactagaaaattatattgagttataggtaagatagtataaaaataattctaagttataatataaataagtaataagcactaaaaa

SEQ ID NO: 356474 - DNA, 1081 bp, Cannabis indica
gactgtgaagaatccaaacacaaggaaggagtttcgggctcagatcttggtgatactctgctacagaaaggatacaagggtaagagatctgagcagaaggagtcatttaattctgctgcaaccaacgtaccgtttctcataccttttatgtgtttattttatattgttttagtagttcatgtttaggtggttaagaacatacttgttagtaaatctagatcctggtaaaatatattccaacactccctatccctccatttaatgaactgacgcttctgttcttcaaatgcaaggttcattgcagcatggagctcttcctgatcatgatgcaaggtattattgtgaccttgcatgagtctaagagaattacggaggttttgaatctaagtatcatctcctattgtcgtctgagcattggttgtggatggtatttcagtgattggggtgctctgatcggctgccaaactggtgtttccagtctctagcacacagggtgtgatcccagctagaggggatgtcacaccttggcccacagtaggtggctgcgtgtttgattgttcaggattggttcctagtgggacccttgtattcctaggagtctgcaatgcatgatctgttaacattgggtcactctgatcaaccacgactctgagagttagcaccaccattttgtgtcttataaaacttacggcaatgagtaaacttggatttttgctctcaatgaaagcaccaaaatgctgacctcagttttagccaacgacaatgagtaaattaataagcgataagatatgtaattaagataaagaaaaaattagtaaccaataatgaacacaagattttaatgtggtttgacctatttacctcggtaatagcctactccccttagattgtattgacttgagaacaaaaaatacagtgtttcgtctctcaaagctctcacaattaaatctctgagtgttttctcttacatctctctgaagcaattctttcgatcccttgtgtagtgaggatggatcactatttatagggctaaaggcttgagggaaggtttcctttttacttacaatatctataattggta

SEQ ID NO: 356475 - DNA, 778 bp, Cannabis indica
ctggtgaaatctgtgggcaccagatcaccagcaaacttagacaaccgatcaaactccagggtgtattcggccacttacatctttccctgagtaagcttcacaaagtcttccatgtgtgaagttctcacagcgatggtgtaaaacttttcctcaaacaaatttttaaattcctcccaagtcattacactgacatcccaggtttggcccacgatatcccacaagacgcgggcatgatctggtaacataaagactgaacaattcctctcagttcccgtcaccccaataatgtcaaggatacgggtaacagcgcttatccactgctcgacctttattatattaatacgtcccagaaaagctggaggttgcagcttcacaaatcgctcaaacacagaatctcgatgcggcataacaaacccctggttacccaccactggcacaggtactggtggtaacacttgatcaacaggggcagtcggtgcccttaaacgatgcaactcttattcctgatgaagtatgacactttgcatttcttgaaacatttactgccagtcggtaggaggattagcattgccaattcatgcattatcctgttggaaattatttttgattgaggtatcacttgctgtgtgtgggcactactctaatcactaagtgtttcgaaatttcaaggaagaaaagagagagagaagtggcggctaggtatagagagagaaggctcaggtttttctctaaaggaaaaagtagaaagttaagtgttaatttcctgaagccttcacta

SEQ ID NO: 356476 - DNA, 529 bp, Cannabis indica
aaaatatttccaacaataatatcgtcagcacaacgaaatataatcatgattatattttcaaaagtttaattctcataatttgtcagatcactagatttagactcacatgataatcggcaataaggtttacttacaccttagataagtattatgtcatttccaaggcattggtaaagtttactagtatcaaatatatggagtatacattggaaggggctgatattgattttggataagatatcataaacttaccattatatatttctaagttaatatcaataaattgatcttacatctatggatcttaatcttgatatggttaagttcagcttagttgtattatttatcttcttcaagttgttcgtggaagctaacttatggttctggcagatatttacatcttgggaacatggtagttcaattgagtgggagcactaaatatagatatggaatctatatcttctataagtatttaggagtgaaacaataattcctttgagcttgagtgaatagaaataagtgattgagg

SEQ ID NO: 356477 - DNA, 1172 bp, Cannabis indica
atataatatacgctaagtatttttagtgtcgtcgctttctctttcacacagcgaggttgaggcctcatcatgaacgtgtgcacccacatggtttctcggcaatacataagttagcatttcgtacgtttctgtctcgcagagggctattcagccagacaagttataaacataccctgcgaattatatttccaacgagttgttccatgctaagcatacttgtcgtttgcgtgtttgagttcttcccagctcgacacgtgtcctcctctaatgtgcttaccgaacttcgggtataacagtaaagttttctaaacccttatgtgtttattttcattgttttagagaattcatatttaggatgttaatcaatatacttgttggtaaatctagatcctggtaaaatattcccaacaactagcctcaaagccatggtgatgatttactttcatgtaatatggatttaaaacgatgaacactgtttttgtgctgatttggatgtgttcatgttggtttatgtgttgtttgatgatgttatgtgaattacaaaatttttccatgaaaataattttattttcatttttgaaaatattttatttggattccttgtgaaaaattaagcaattttcgttttcacagaactcaattccgatgaaaaacgaaggagatatgttgatttgaaaatcggggtccaaagagtgtcgagggtcgagcaccacacgcaccagtcactctgacaaggtgctcatgcgcacgcgtgcctcagacaaaaccttgcctaatgctcgctgatgcctagcattcaaacacgacacaccctgtaatctgcccatgcctgaccctcaagttccgaagaatctcggccaaatcacctgcaggcatcacattccgcgcgcggtgcagcctcttctaggcatccagggtgtttcacccaaaatcaattttttgggatttttttcaccaaattttggatttttgaatttcaaatcacaaatatctaaataaaatattatttttaatatatttaaacttaaatatcaattttaaattaataatatttaattttaatagattattactaattttttgatattttgaggtttaaatttaaaaataaattattttactttttaaattatggtcagatttttaaaaatttgttaatttctttaatattt

SEQ ID NO: 356478 - DNA, 970 bp, Cannabis indica
tttttttctatttttaacaattaacagtaagggtgtcttcacttgtgtcaatgagtcgatgataaataatattgagaaacaaatatataatatattgaatcattgatattacagatacaaatacagagaaacacatagaaaaaaaagtaacgaactcaaaattaacaaacatgcactatcttaatattatacaatatataatatataaaatttaactttaaacttaaactactaaagaagagagaaaggagatatagcagtagcagtggacagcttgcttggaagaatcgaattgatctggttgcaacctgcagggatgagaatttgtcgttgccggaggagatgagatgatgattgctcgattcgattcagggatgagtcggtcggtcttcttctcttccgtatcatttagggagtaatcaatttactaatatattttacttatttaggattatttacaatttaaagatgaaaaatattttttaaaaaatatttattgattcgggtttcgggtggacactcgagttctaaaatatgtattttaaaaatctgaacccgatacccgtatataccattttcgggtgagacaagacctgaatatatgggttttgttttctttcggcttttttggcagcgggtcggggcgggttggcgggtttctgggttcaaatgtttagccctaataacaactctttttttcttctcagtaggagacatttggcgtggcttgaatggagaaggggctgacggagacttacgtggcgttgtctggttggttggacgctgacgggagaggacatgcgtggagggaaggctggtaggatttccaggcatcacttgcacctgcctggggtgagatacactcgcccatctggttcgttggatcagggcacggacggctcagattgggtcaaaagtatgaccgaaaatggggcttctaatgggctgaaatgattttgcttttaaaatt

SEQ ID NO: 356479 - DNA, 515 bp, Cannabis indica
taagttttggtttgcatgtgatgggaaaaaaattatttgtggagaaatatgaaacttatgtacacaaaggtattcatacgagctacttaaaatttaaacaaaactacactaaaccagggattctctccaaacgcctcttacatcctaatacttttccttatactcagaacaatatctactttgttgttgtatacgttcaattgaagctccaaaatatttttttggaggagagagaaaaaaaacatatatacccagaagtaaaagaacccaaaaagttatgtggaagcaaaactctattactgataattgtttgctggattggtgagaagaaatagaaattaagtaaatagacacacacaaaatatttatagtaattcacttcccgtcactacaagaaatgtcacttttatcagcacagctcgctactgcgttggtaagcgtacatttacagtggctaaaatctaacttttaccaccgcatttacgcgttgggaaaatcatttttgtcagcgcttt

SEQ ID NO: 356480 - DNA, 601 bp, Cannabis indica
accaatagaaacattacttacgaagataaaataaattgacaatcatgaacaaatagaccaaaaatagaaggcatagataccgaactaagaatagcttgaacaaataaaagcaatccgtctctaaaatgacatttgacttgttattcttctttatccaactaagtgcctctttgacacttagaattttcgggccgccaactgatagaagaaatagttgaaaacgcctaaattaattggccatcacagccacgtgcgacaaaaccagtcccgacctcatttgtgtcttcaaaaaccgccccatccacattaattttaactgtccagcaaccggtttggaccagtgttctcttatgtcagatcgattataagcccgagaaaccgagtccagcctcttagactaagcacacgtccattgtcgaagagagttacgagtcaaccaaacaacatcagcagcacaacaacttttaccattccaaagcatatcattccgagccttccaaattgcccaaccaaccatgacagcttctgttgtgataaatccaacacgcaagtatacgtatcgttttaacaagtaatactcaggtaagtgagatcgttccca

SEQ ID NO: 356481 - DNA, 512 bp, Cannabis indica
cgaccataaccgaccgatttttaaccctaaataaaattataaaaataaaaataaaaatatttaaaaaaataaaaaatattgtaaactttttataattttgaaagagtcatgtagatacataacaccttaaatttgttaacagttcagtaatttagaaagttttaccattaaaattttaatgattaagtacaatttaaatgataattgagagagtttttaagagctctaattaatttttttattataataaagtcaatatttagggtatactatcaaatattttatgaattcttttagaacttatgagtatgacaatgtctcctgattttaatcgatgtgattaacaaaacaatgttcttaaataacatgatacttccacatattgtacaaagtttataaccgactagctcaagtgactatatgtaggtatgtgtatgttggaggtcctggattcgagtcccaaataaaatatgattgtaatatataaacgcttaaataaaaaaaaaatatgt

SEQ ID NO: 356482 - DNA, 856 bp, Cannabis indica
agtaatcagtacaactctatgtatactattaccactatcaatgtaatctaacaagcataaacaacatgtacgctaaatatgtaataacatatgcatgatagtatactaatcttaccttgattccgaattcaggtgtgccggccaacctgagtggaacaacagctcggcgaattacaggatcctaaatcacattaatcataacatcgataagtgacacgctaaatcactttccggggacttaaatttgaaactaaaattttccctatcgatgaatagcatggcaatacgtaaaacaacacaaaaatggaaaaaactagggttcccaaaaactgccccaaccggtagaccggtttctcaaccgaaattccggttctgaggggtttcctcgtgaccaaccggaattccggttcctacaagtccccctgaaccgaaattctggtttagtgcaggaaaggttcgaaaattcatatctcactaaaaataaccccaaattataccaaactttacagacctgctccatatatcccaaagaacataatcaaaggaacgaaacaacaatcaaagctcagaattaagacttgccattaaagctccaaatttgagttccaaaactcaaaacttggttaaactaatcaacaactactaaaacatgctcaaatcaatatttctaaacatataataacttctgaaaactatatcaaaccccaacagcaagaacaaccaccaaaaatacaaaaacatgcatgatcaacttctgaaaatttaagaaacttaagagagtaaagacaacagtttgttgggaatattttaccaggatctaaatttactaccatttatgtttcattaacatcctaat

SEQ ID NO: 356483 - DNA, 612 bp, Cannabis indica
ttttatttttctgtgcaagtttattacctttaaggctcatatttggttaacgaaaagctgtgttaacagctggtcaaaaaaaggcctaagcgacgatcttctaaatatttcaagtaattttctcctacttctactttatctagtgtaggggtaattccagaaagtaatattgccttgagaaaataaactcgtacttgcactaaatatcctattgctaaatatatttcttacaatcatttgtcaaaaaataatgaagtatttattgcaaatatttcagaacttgatgtgcctaaaaatatataagtattagatgatcgaaattggaaattgatagttatggaggaattgaatgccttgagtaaaaatggtacttgggagattgtagaagtacctgagaaaaaaaattgtttggcgaaaatgggtttttacaatagaaagcaaagctggtgggagtgttgaaaggtataaggctagactttccgcaaaagggtttactcaaacttatggaattgattatcaagaaacttttgtttctgttgcaaaaataaattcctttcgggtttcgttttctcttgttaataattttagttggcctttatacaaattagatgt

SEQ ID NO: 356484 - DNA, 440 bp, Cannabis indica
gccatggtaattgatttactttcaagaaatttatacttttaacgattttggtgtgatttggattgtttcatgttgatctgtgtgttatatgataattgattgatgcttgtgaaattttatgaaaattaattgaattttcgtttctagaattatttttattggatagtttagaaaaaattaagcaattcacttttttacagaacttgattttgattttatttgaattagttatgattttttgaagttttgaaaaaagatagagtgatcactctccctcacgcacgcggaatcgagctgcactcggtcagcagcgtgttcggacaggttttgtctgaaggaacacgcgcagggttgtctaaaatcccctcctgcttgcgcggagatccttccagctgttgggttttgtgccttaaatataacccatttcaatataatcagat

SEQ ID NO: 356485 - DNA, 882 bp, Cannabis indica
cttggtcagagctcttggcgggcttcttctctttcttggctttagataaagccaggttgtaatagtgtcgggcaaactgttggtctccccttacacattctaccccatgccttgttgggaactttaggcataggtggtagatggatgttactgccttcatatcggatacggtcggtcagtataccattgcattaaaggttgatggcacgtcgattactatgaattgtgccatcaacattcttattgagggattttctctgactgtcgagggcagtcggatgcattttaagggtgcaatgccttggccaaaaaagtcgtacattacttgggtacagggtgctaggtttgttagttggagccccatcttttcataagttgattttgaaaaggatgttagaggtaggcgttcactattgaccatgcacctagcaacaatcatgttcccaatttgtactgtaaagaccatgggtcagttttatgggaagctgacctgggcagcatctccctctctaaaggagatggcatgctctccaagattgagttgcttggagcctctttctttgacggctaggatgtcacttttaggcttgtggcgaacagtctgagcatagcgctccctagtcttgcttgtcttgcttgcaatatagggtctgccaattatgacccccaaatgaccactactgcttgtggcatagggtctctactctgggcagcttgtgcatgagcttggtcattctacacgtaacgacgcaagtgggggattatttttcctcatgaggaattcaatttccctcttcaagtttttgacacttattggtgtcatagcaaaaattatgtgaaatcgcaagactttaacatgtccctcttgctcatctccttttg

SEQ ID NO: 356486 - DNA, 487 bp, Cannabis indica
taagatcctggtaaaataagttcccacagtatcccctgtcacatcttaagtatttttaaatgcaaatggatttacaaggggtacgaggtgatgtgtggtgtagagtattccctgctacacttttagaagtcgcacagcaatgatattttaagttacaaccaggaaggtttaattcatggaaagccttctcctcggagttccatgcacagttctcttcttctcgccaactcccattacatttagaagatttggtcgaagtgaagcaaagaccaggagagcctctcagagcttatataagcagattcatgagagaagctacgaaagtagcaaggttaactgaagaagggaggctggccgcaatactggggggcattaaagtactgggagaactgtggaaagacattaagaaaagtggccctgtaggatctatggcagagtttttggaccaagcagatgggttgatcaagctcgaggaggccattcatcg

SEQ ID NO: 356487 - DNA, 675 bp, Cannabis indica
ccgatttttgaggtaaataaacaattattcatttaacgattgtatttacgaaataaattaatagagatatttaaaactattttaaagcgtcatgtcaccgttttatactttagttttatatatatacatatcaacacaaaccaagtttcacttgcggttgtatttttaataataatttagtcataaacgatatcaattttaaattttgatatatctttataaaatataagtaagtattctgttaaatttttattttttttactcttaataacataaaaaaaaatattattgagagtcctcgcacaaattaaagatctaaaaaaaaaggattgataaataaataaataaataactcatcacatgttttaaaacttttgtcataccatatctcacttgtaatcgttattacacttagaattattgtcatgactcgtaaccttatttcacttgtataggtttattctgtacataaaacaaatcaaactataagttaattaaatgttattctttaaataagaaaaatatataaattattgaaatcaaacattgaaaaaaataaaatactaaaaaattaaggtataaaaaaagggatagagaacaccatgaatatgtatgagagcttaataattacacatttcaatgtgatctatgactttatgtataacaatttttctt

SEQ ID NO: 356488 - DNA, 582 bp, Cannabis indica
aaaccccagatgagagaatctgaagatgcagggtcaatggggggttgcgaggatacggtcaacttgatatgaagggaagtaattctgaagcttacggatgttccaagttgaatcatcatttatgaagaaggagacaaaagcttgagactgggggagagagtgcaataggatagggtgctgaatgttgggaatccaattggaagcagataaggggatattattgccagtgccaatcttccaaaccagacccttttgaagcaaatggcgaccccaaagaatacttctccaggtgaaagaagagttgtggccaggaggggcattcatgaaatctgagtttttgaaataccgagctttaagaatagaatggagaagggagttcctatcattccaaatgcgccaagcctgcttagctaagagagcttggttatgagaagaaagaatacggaatcccaggcccccaaaaaattttgagacagaaatagaatcccagtttttccagtgaactttgttagtgccttgcgatccccaccaaaatttagcaatcaagctttgaattttgtgacaaatcgatttggggacttt

SEQ ID NO: 356489 - DNA, 547 bp, Cannabis indica
gatccccaccaaaatagcaatcaagctttgaattttgtgacaaatcgatttggggactttgaaacaggacattgcaaaagagggaatagcttggaccaccgctttaataagagtttccttaccagccctgagaaaaatttttcgttccatgagctaagtttggctgaaacttgttgaagcagataatgaaacatggaatttgagactctgccaacacaatggggtgcaccgaggtacttactaatgaaaccttctcccataaggtgaagatcttgacgaaattgatgctgagcctcagtagaggtattgggggagaaaagaatggagtatttttctctattcaccaattggccagtagccttattgtatagatcaagaataacatttagcgaagcactggcctgaggatggacaggagagaaaaccatgctatcatcagcaaacaagagatgagacaagggtaaggcacccctgcaaatctgaatgccagaaaacatagcctgagcttcttgcaaacgaatggctgcagaaagaccctcagcaatta

SEQ ID NO: 356490 - DNA, 849 bp, Cannabis indica
ggccacggcagtgaaacctctcgtcgcggctactgaagcccccaaaaatggtctctctgccattcgacttatggtcgcggccatggtcaggctcgccgcggccaaaagtggaccgagcctcaatttggcatttttcttggctccacttgtattttattgcacttttgtatcccggggcctccataactctgagaaacctgaaaacatagaaaataagcataattctgtcctaaaatattgaaaagggaacataaaagtgatccagaatataggctagaaatagcctagcgaattcccccaaactgaatctttactcgccctcgagtaaagctaacactaaaacagaaataaaacaatgcattagataactgaaccttccaatggtggaactacaactaccacctgcacaacttcaaggaattcaataaccagaatttcaactcaataactctaagaattaacatggatgcacaatttagaagtaagcaattcatatagacagaaaacacctcttttgacacccatatcacaaccattctacactctccgacattccgccaatccatgttcaataatcttgaatgacatacctctctccactaatgttaacaattcttgctcggaatcaaaaggtcttttccggttacaatatcatggcttaggtaaaacgggtagatgagaagtcatttaggctacattataccataagcaaaattataccgaacaagcacccacaattatccatactttcatccaaaagaaacttgtaagagattacattttcctcttttatgtgcccacctcattgttcaattttttttttctcaagaagaatttatcacatttatt

SEQ ID NO: 356491 - DNA, 713 bp, Cannabis indica
taatattcaatataagcaccaccgtgcatatctctacgtgcaactactgtcttacctgttgtcctgcaaaagaagagattccaaatccccgggtactcctgaccaagtgccggtaatcctagtcataataccaggatttacacaaaaagggttaacccccaattccacattcataaaatataatcatggcatttaaaatacagataatcacatagagctcggaacgagctttccaacgatataaagaactcccaaaacggagtcccgagtcaaaagttatggccaaaacaaaattcagcattttccctgatacagccaaccggaattccggttggaacagccctgaaccaaccggaattccggttgtctgggcagcaacaacacgaaaaatttcaatctttaagcccccataacctactcaaatcttccccaaacaccaccaaactttccagagcatcaacatatgacatattaaacatattccatagctcaaacacaataatttcactaaaaatcaaaaagtgccattaaagctccaagcttgagttccatgaactcaagcttgctttacacaaccaaaatcagagtttacaatcaaactttaaactcaatgaaaccctaaaaatgcctctgaatttaccaaaaaacaaatcccacaattcaacacaaaatcatgctcaaactcacaaaacttcaagttcaaagacttgagc

SEQ ID NO: 356492 - DNA, 603 bp, Cannabis indica
cacattatttatcgatggaaaaactcttagttttgagtttaaagtccttgaaagtgatgttgtaggtcacttaccagatttacgtaatttgtgacttagggccttaaatcgtcgagcagcagtttccacttatgttgactggtacacttaaattcagaattgaggcaagattagtataatgatatgcatccttacatgtttagcgtacatattttatggttgcctattagataacatatagtaagagcagtattaatgtacatagagctgcattgaataccgatagatatatgttaggcaaattctaaagccattagtccatcatatcagtaaaagcagtatcgatgttgtaacgtcctaatgctaaggcacgctacagtgatttttcaattatagtgctatctttgctaatcaaagaactttctcgaaaatcgtatcaaattaagacttttatattaaatattaaactttataactctacaaaatcatttacaagtaccgggatcctgtttttttaaacttttatacaaaatatttaaattacaatatccaggttgcacaacaactacaaaataacaatcacagatgtcccgagaccaaaca

SEQ ID NO: 356493 - DNA, 1041 bp, Cannabis indica
gggaggtcattgatctttctaaggagctgactactgcaaacccctctacccccaaagctgctaagtccaaggaatctggaccaccaaaggttgggtctgaactggtcaagagcgatcctgaacggttgcgggcagctactctacctttgtcggtgcttccagaggccaagaagggcaaggagatgctggcccattatatgaaccggctggttcctgaggtcagcgagcaactagctggtgctgacaatgattcttctttggaattgctggtggtcggagtcttgaaggaattcaccacggcaagtatttttttaatacttccctttaatcttccatacttaactcagatgataaaaaaatttccttgtgcaggtcggtctgaagttggcttacacttactcccgggctatgtctgctgcttccaagaacacgactctgtccgacatcctgaaggcagaggcagactttgccaggaaggatgctgacgaagccagggcggaagtcggagctgttcggttggaattgggtgaagccaacaagaagttatttgccgctcagaagaaaatcactgtgctgactaaggatctcgaggctgctgaccattttgaggagaccatcgagaccttatcttctaagatgaacagtattcaggatgagaggacttccctttgagcaattcttcatcggatgaatgaggaaaagggagctaaggagggggagctttcggctgaggtggacaagttgaatgagaaggtcaatgccttggagacaaccggtctcgagctcttctttgatttttgaaaggctaatcctcgggccaatttcgactactttggcgatgctaaggacatgtaccttgagttctacgcgtctcaagttgactacggcgagactgaggcggctacttcaacttccggtccggcccccgatgcatatcttgtttaaacaacagatcttcctcctcctgtatcagtgcaatcatgattattttatttttaccaaatgctttgtataggtataggtgcccaccaagtgaccgag

SEQ ID NO: 356494 - DNA, 611 bp, Cannabis indica
aaaagaaacatagtgctttgaaacaaaaatgggttgaaaaagaaaaatgtctagttggtttttctgataaaagtgctgcttgaactctcaattttgaagggttttcgagattgaaaatgcgatgttggttgaaggactaagggctaatttatttagcattagtaacatttattaccaaggatctatagtctcttttgatagtgatcattgttatgttctgaataatgacaatcaatgtatctttcagggtttttgatctaatgataattgttataccctaacccctgtgttcacttgtcattcagttttaaacaacactaccaatttgtggcatgtaaaacttgggcatattaattaaaaaatctaaaaaaattgtccaatacagttatagttcgcggtctaccctaactgagtagagaaagtgttggtaagtgtgaaccttgtcaacttggtaagtaattaaaaatcactgacaaaagttctcagatatcaataccacaaaagtattgaattgcttcacatgaatcttatgggtccaattcaaagttgaaacgttttaaaatggtaaacgatatatttttgtgtgtttgatgatttctctcgctttactt

SEQ ID NO: 356495 - DNA, 753 bp, Cannabis indica
tataatatataatgtgattgagagttacatacatgtaataatcactatataatatgattggaagttacatacatataatattcatataagttgtaacataagaggtagagttactcatattttgtaacttctacatgatcaccaattaagtgtgtaaagagtgattacacaacttaatcttttgaaattcaaagctataatgcaaatatagttgttggggatttattttgtcatttataatgtgtataagcgatataaaattaagtgagaataatttggaatggtttgaagaattatttacaaaagataaaaaatttggtaactagtaactagttattattttttctttcagctttaatattggaacattttttactatgggatgccttaaacaactcccataacctccaaatcactcatttacacccaattaagagatggtaacagccactgggtgtaggatgtttgaatttcaaagtgtgtgatcataaacactataaatagagacatcgattcatcgattcatcctttgagacatactctcttttatcttcaaacacatagctatgggaatgtcttttaacaactcccttaatctccaaatcacccatttaaacctaattaagagatggtaaaagtcattgggtgtaggatgtttgaatttcaaagtgtgtgatcctacacactataaatagagacctcaattcattttttgagacacactcttctcttttatctttcaaacacaaagct

SEQ ID NO: 356496 - DNA, 477 bp, Cannabis indica
ctaggtctgggttcgggtttggttctttgtctttgttttggtcctggtttgagtcccaaatctagacaccgactactggtctgttaaaggccccgttacctgaatcccgagtcaagatctggatcactgtcacggtctcggtctggtcctggttcaggtcccaagtcccatttgtgagtttaggttcaggatcgagaaaggcgtgcggttctacgtcccaaccctggttctgtgtctctagtctggttccatgtttaggtctgagttctggttcgggttcgagtcccaagtccaggtttgggttgggatcagggtccggctcccaattcgggtctaggtctgatttggagtccgtgtcctggtccagttacggttctatatctaggtccaatttcagttatgatgccaagtccaagccctagttcaagtctcggtaaacttccagttttcgttccaattttgggtcacagggttcgg

SEQ ID NO: 356497 - DNA, 984 bp, Cannabis indica
tgcaacataaaatgttatttctgatatttattaataagtaaatctgattacattgaaatgagttttatttagggcacaaaacccaacacacctgagaagacgaccagaatcaatcaaaacagaggctgtttcgaattcataaaaaaagtgtagaaaaactactacaaaactaaaattcaactggaaatccagtttaatttgcataaaactaatgttttgacttcaatttttagatccatgaaaggcagatctcaaaaagctgaattggagttcccaaacaatccaactcaagtataatccaaacaaaaaaatacatcaatactatagtaaaatatttatcctggtgtattttgttgttttctaaatttctaatggtgaatttgttcatattaaattataaaaagacacgtagatagagctatgtacgtgaaaacactgttctgatttttaatgtttcacaacagttgcataaacattttgttaacagttatttcgtctgattgaaaccttcgtttgatgcaaccttcggccaaccacctagcaaccacccagaaactttcgtctgattgaaaccttcgtctgatgcaaccttcgcccaaccaccttgcaaccatcgtctgattgattgaaaccttcgtctcatgcaaccactctgcaaccatcgtctgattgtgtaagtgatgatagtttaagtggtattttggtaattaaaattacataaaaggtataaatgttgacttaggtatttttgtaaataaaatatcaatttatattttctatgtaataattctattttttttttcataaaggctgaaataaataaaaataaataaataaagtatgaataatttaatgtaaaaaaaatttcattgtaaaaaacacaaataccattttagactttatgttttccaaaatagtaaaaataggatactgagcttaatttttaacaattttattttttaatataattaactttaagacaat

SEQ ID NO: 356498 - DNA, 762 bp, Cannabis indica
tttatatttctatctaaaatttttaaaaaatatataaagaaaaacttttgctctctatagctttaggctatggaaaaattttaaatgggggttttattaaaaaagtaaaatatcgtgtttttgaaaattataatttatttctttacaccaatttaggcaatcatttcataaaaatattttaaaaaaccataatatttggaggaaaaaaaatcacatatttgtattaaaaagttactaaagtgtcgaataaattcaggttacaataataattgatgtttatatatgtacctactcaaataaaagtagagatgatttattttttatatatgataatagtaattataaatgactccttatttaaccccttctctaatgtttttcttgatcattgaactactttattagtctctcttcctttttcaaccaatctttctcaattctaataagattcatttctttaaatattttcaacataacgtctacttttcaaagtgttcaaaatgtttaatattttcaacattgttgttgtttcttgatgaggttataactttaatccaatgcttaaatgtggaagagaatcgtaacaagtcttttgtaatagatggttctgatactttattgcgatttttcaaaaaagcaatggagttggttggaccattttggtataacgagacgaatcagaaggaaaggaagaagacaatattttattcgaatgatgaaatcgaacacgaattagttcagcatatcatcaatgaagttctt

SEQ ID NO: 356499 - DNA, 1286 bp, Cannabis indica
gagggcccagtccctttcaaccaccaaaagcacgtgaaggagtatcgtcaccgcttcttcttttcctccggcttccaggccatagaccgcccggagcttcttacagagtgggtcaggatcccttcttacatgcggaccgcgcctacccgagtattcctccagcgggccaagactttctccacgtatgacaagaaagccctcaacgttggggacttggtcatgacggagaactaccggaaggccaagttgatatccaaaaatcagtcggtggatgacttcattctttccaaggtcatctgcccgaatgtgaggactctggctgcggaaagggcgctcctgcaggggacccttcgtctagaagctcctccggagcggaggcccctcagacccaagcctggggttctggcccccaacactggtgctcccgacgctagtacttcaggttctggtaagtctcctttaataattcagtatgttcctcctgtccgagagtatacccaacgtagacctatagggttcgatgagcgtctctgtaggtttagaatgccttccacccgatgggggagtcacaccaaggaatattattttttcccacttgggtcgtttcttgggtcggtctcggatgggctctggacctccggcgcctattcctctggaccattcagcccatttatcttctagctggttcctctcctcggacagctttcttggggatgatgaagccagcattgtagtccaagacttcgctaggactgaattagggaatcaaggtaggactagttttattgctttcttgttgggcgcatacctttttccatgattattctaacacttagcttatttctttgttgcagcagccaggcctatagaagacctcctagccactcttgccgaggcatacagccctgacacttctctgcctcaggctccatcccagttggtgactcccgagaggtcctcatccagcacccatttaggcacgatcgtcttgatagacgaggagggggaagttgaggaagacaaggtagaggttgcggctgcccttgagcgcaagcgaaagggcaagatggttgagactgagtcttctaagtggactcagagggacactctagccgtcagtactgactccgggattcctcccaaggtggaggagtatactgtgtcgcacgacattgtgctaaccctggttcccgtggatgaggagaggcaaaatctccgagttgccaagtacaactacgccctggacgagtacagtcgggggcacgctgaggtggaggccttaaaga

SEQ ID NO: 356500 - DNA, 512 bp, Cannabis indica
catcatggcttattttgtatagtttctaggcgacgtacttttgtatatgtatatgtatagttaaacttatgtaaatgcttttgtaaacgggatcccagaattttataaatatgctatttaatgttgttaattaaataagcaaaattttagttaatcacagttttagataatctcgttgattagcaacgctgcacagtaagttaaaaatcacgctaacatgcctaagatagttagtgtaataccctaagattaagaaaatagattagcaaaccctaactagttatatgtgtattaatatggagttatactattatataatttattgtatgtcaattaatttgataaatgacatgttaagaccctattggtgagctaggggcatttttgtaattttgaccaaagaagggtaaaattttgaatttaatttaaatgcgtgcttatggactatattattatatagtatacttgttgtgtcctttttttggtgttttctgacaagtcggcgtggtata

SEQ ID NO: 356501 - DNA, 595 bp, Cannabis indica
ggtcaacactatattgggaaaaacatggtttgtatcttttatatatgatcacacgagattaacttgagtgtttctcatgaaaaataaaatagaagtgagtgaaatatttgagtgctttcattctatgattcaaacacaatttcacacaaagattcaaattctcaaaactgacaatgccaaagacttctttaattctattcttggttcttatttgatacaacaaggcatcattcacctaagttcttgcgttgacactcctcagcaaaatggaattgctgaacgcaaaaatcgatatctccttgaagttgctcggtctctcatgtttgggactcatgttcccaaactcttctagggtgatgccattcttactgctacatacctcatcaatcggatgccatccaaggtgctaaaagttaaaactccttgtcaaactcttttgcaactatttcttcacactcggtccattagctttgttgacactaaaatctttagatgcactgcttttatccatctctattcacaacatcgtagtaagttagatcctaagtctatcaaatgtatctttattggttattcctcccatcaaaagggttat

SEQ ID NO: 356502 - DNA, 1141 bp, Cannabis indica
ccgggagcacctcctcgtcatccactaagtcaatagtgtctggaggagcactggaagaaatctttagagggggggccatctgggaagaagtaaagggaggaggagcctcaggagtgtgaaccccggcaagttcggccaaaatggcgtccatggaagcacctgctacaacaaaagaaagaaagcaagtgttagaacatccgtgggaaaccaccaacactcagatatgacaagcaagctagtcctaccctgactctctaattcggccctagcaaagttccgaattttgatgctggcagcatcatctccgagatagctgtccgaaggccggaaccagctggatgtaatataagctgaagggcctaaggggacgggctccggaggaccagaacccatccgggaccgacctaggaaatctcctaagttggaaaaataaaactccttcaaatggtctccccaccgggtcgagggcatcctaaacctataaagacgctcatcgaaccctacaggcctaagactggcatactcgccaacagaagggacataatgaactgctaaaggagacttaccaccggagccggaagtgctggcaccaggagccccagtgttcggctcctgagccgaaggctgtggcctgggagcccctttctccgctgagtccccaatatgaaggggcttcccagcgatcgcctggcttcttctctcgaccgggctccccacgcgaagtggcctcccggaagctgcctgggccttaaagtatgccttctcctgagccttccggtagagatagtcctggtacatcttctcggcagtggcgatgatctcatcccgaaaggtcttctccgcggcaggcaccctcacattgggacagataacccgggaaaggttagagtcctccacggattggtgcggcaggataagttttgccttcctgcagttctccgtagtaaccaggcccccgacgtcaagatcagcccagtcataagaggcaaaggcctgggctctccgaagaaagacctgagtaggtgcggtccgttcgtaaggaggaatcatgatccactcagttaggagctctagatggtccactgcccggaacccggaagagaagaaaaaacgatggcgatactccttaacatgagtttgt

SEQ ID NO: 356503 - DNA, 1067 bp, Cannabis indica
ttaataatttaaaagtctaatacatataatattattatatttacaaaacttaataaatcaaatgtatattctattcttatatattaatttttttttctaaatacaattttaaaataaaagtaaattgtttctttatacattatatttttttttacttcattttgaatttgttatttgttattttatttattttaatgtgttgttggagacataaaataactataatttattttattttgttgctagttatgtgaaaaaaaaatatttttttttcataaatattaaataatttaatattaaaaagtaaccaatccaaaataaccgatccaatctgcacttttgcggattagattgaattagatttgagcaatagtgcggattggattggatccaaaaaatgaaatccgcacttagtgcggatcagatgcactatgagcaaaataatgcgaattggattggatgaatacccctaaatattctcgcctcttctacttttattttttcatattttcatctttgtgaggagagagattattttgtgaaaaaatagagtattcaactaggttttagtctttgtttattgttcttacactattcttagaattatcaaataaatttgactaccaaacaaaaaaaaaattatcaaataaacttacacacatctaatactcatatatgcatcactatatatatacatatatatattttattttcaaaaatatatatatataatcttttttggaaaaaatcacaaaacattcaattttaattctcactacaagaaatgtcacttttgctttggtatggcgctggtaaaatgaaatttacttctgatgtgttggcaataaggggttggcaaattaacattggtattagaacttttaccagcacaaaatgaaaagcgctggcaaaaatgacttttctcagcgcgtaaatgcactggtaaaagttagattttaaccactgtatatgtgtgttggtaaaactttgacgtttttgccaccgtagtttgcgaaatgcgctggtaaaattacttttaccagcgcagtagcgaactgtgctagtaa

SEQ ID NO: 356504 - DNA, 551 bp, Cannabis indica
tcctaattagcttaattaatttaaatttttttcgattgttttaataaaatgtcaatgattttttataaattgtttaattagttttaaatttttaattttctttagttatttaaaataatttttttaaaatttactacaaaaaattgaattatttttattttaaggggggtaaaatttaataattattaaagtttagctgataaagttactaatttacaaaaatacattagtatttaaacggaataatgtgatggaacctaacaaaagaattaaatttatgtaaatgtaaaagttcaagaaattcttaacaaaccgtatattttaggggatataatcagtattgtcaaaatttcaaggggcaaaattactaattattctcattataataatgagatatatatggtcttttttggtaaaaaatatatttggtaagcagttaaaaaatgttttaattaaaaaagaatttttttaacaaaaataatattgtttaacgcccaaatgtgacttccactagcgatggttgtagtatagatcgggcggtcgattccaca

SEQ ID NO: 356505 - DNA, 817 bp, Cannabis indica
cgccaccttccactccttcttcttccttgaatatttcgaatctcttagtgatagtgtagtgcccacacacaacaagtagtacctcaatcatagtgtggaagatcgtgaagaaagacattcaacaagaaggagattcagcattaaaggaaggagagaaagagatccaggttcagatcttgataatactccgcgacagaaaggatacaagagttagagatctgaacggaaggagacatattattctgctgcacccaatgtaaggtttctcatactttatatgtgtttaattttataatcgttttagaagttcgtatttagggtgttaatcaacatacttgtgagtagatctaagattctggtaaaataatttccaacataaataattatatgtatatataacaatatatatataaaatatttataaagttattgtaataaataattaaatatatacttaaaggagatagtgggttctagtggccacgagggggatgataaccgtagttgggaatggtcgctggttgagcgaatggactgagagaagagagagagaaagtatcgccagtggtggagctcgaatgggagtttcttggtggttttccttcgtcggtggtagagcgccactccgaatggggtttcttgatggaggatggccacctttggtggtggatatgacttttatcttcggggcttcaaagagagatctagagagagacgagaaaaggagattgtaggtgggtttcgtggggtatcaaaaccgctggagagagagagagagagagagagagagagagagagagagagagagagagagaga

SEQ ID NO: 356506 - DNA, 658 bp, Cannabis indica
tagaatagttatgaaggttctgaccttataggattgttctcgggtagtcatgggaccagttccgatgttttcttgctgaaattgaggtgattttgggttagaaattgagtttgcaactttttaaagcttagtccgagcgttaatggcgttttcgatttaagggctcgattttaatttctgttacataagaatggtattattcatggtatatatgtgccctgtgaagtttggagtgatttggataagttttggtactgtttccgtgagtgcgaaaaattaagattttcgtctttcatagtttttagaaattcataagagattagaaatcgtatttttatcataacttttcacttgggtgtccattttggacgttctatataccgtttcgaagcttgcgacgatatctacggtatggtgtatgtttaagagcgaaagaataagttttcttttagtgtatttacaccacgaagtttggtagaaaatcctaaattgtcttacacaagtgttaagtggtgttttggaataaatacttattcatttattattgctatgacatagggcccaagattatcaatcgttctccaagtaggtcagccaacatacctgatccgaaacttgaggtaagaaaagtataatgtaccacatggcatgacaggtt

SEQ ID NO: 356507 - DNA, 560 bp, Cannabis indica
agatgatggagatgagaagagcaggaagtaatggtaaccacaattgaaaaaacgtggatcaagttttcaaacaaatgaagaaaaaaattgaaaaaaagaagcttaagaagaagaaaattttgaagatgatagagacgagaagagcaataagtaatgagtttggggaaacgtatactcaactttttttttaaaaaaaacgtctcaaaagaacaagccagaacaataaaaaaaaataaccgttaaaaatataaataaacatgcacacaataagaaacaaaaaatatgaattacataacaataacaaaaaaattaaaataagcaaaaaacatagattagagaaaaaaaatccaaaatatctacagcaaaaaaggaaaaataaaccctaaaataactaaaaaaataatagaaataccttcattattcgctggtttgattgttgaaaaacaacataaaccacaccaaaaaaaggagtcaccacgattttgggtttattattcactagtttgcttgcttaatataaatatatatatatatatatgtgtgtgtgtttactaatttgc

SEQ ID NO: 356508 - DNA, 697 bp, Cannabis indica
ttgaaaaagcacggtagcgtgccttagcattagggcgttacaacatatatgtattgtgtcaggtcgtgctcgtgccagtttcgtaccgtgtcaaaaaacccaccttcatctacaacactagttcaaagagagtattttataaaaaaaaaattattgagaggtaaaattcacgtgtcatagtttaaaagtaagttgcacaagaccattgtaacctggttttccacctttggcgctctttcccgtgggatatcttctccatctctggtacaggtatccgtatgtgggactggcttaaatttttaaggagcctaaaaagtagaggcataaatgaagacgaggtcttcctttatgtgtttattgttattgacacgatttggagggtttagaatgataaggttcataataacaggatggataatgtaaatcactgtattgactatattcttcactcttatgcagattacagagattcccttatcccctccccatccccgacaccctcgctgttgttggaatttattttaccaggatcttagatctactcacaagtatgttgatttaacaacctaaatatgaacttctaaaacgatgaataaaacacataaaaagttaagaaaccttacagtgatggcagcggaataatgtgtctccttccactcatatctctaacccttgattcctgtctgtcgcagagtat

SEQ ID NO: 356509 - DNA, 636 bp, Cannabis indica
ggtaggtttttgaatatgttggaaatggttttaagtggtttctatggctgcttgattgagtttggtttgtcgaagccaaagttgagttttcttcactttaatgtgtgaatttgattcaatgattgaattgttgtgttttgaagcttggaataagttgtattatggttattatactattctgtgaagtttgggaacaattggttaggtttggagcaagttttgggactttgaagagctgaaattttcgagttcctgctgtagtgaaccagaattccggatggaacagtgctgcaccaaccaaaatttcggatggtcaatttttaggaatccctgattttcgtattttagccattatttttcactcggttgtccgttttagacattctatataccacttcgaagcttatgaagagctctacattatgagacatagattagagccaaaagatgtattttaatttaggatgttttcaccataagttttggttaaaaagcctaggttattttatgcgggttttagacagtgttttggaatagacacttattgatttacttttgtcgtgacataggacccgagactgtccagcattgttccactcaggtcgacccgcatacttgagttctgaattgaggtaa

SEQ ID NO: 356510 - DNA, 966 bp, Cannabis indica
aaacactttagctacttgtaaattaatgatagttgtagaagttatagatttcatatctatgattagcgtgttaggtttttattagtactatttttaggataattttagtgtatttttaattaagttttactcttatttggtgcaattttacgctttttggtatatgttattttgtaagtttaaagtagaaaatattgaagaaatatagaaaaaatggtcaaataaatcaattctcggggcaaaaaaatataaactttggaggagcacctcaacattaaaaaccaatgctaggacatgaaaggcttaaaatttggcagagaaggtcgtattggacaatacatgggcgtgcctaggtataaattcatagaatgttcactgtccaaataaaggagggttctggctaggcatggaaatcccatgcctaggcccgtgtctaagcagcatgaagacgtgaatatttgcaaacacaggccgcggtataggacctacatgtcgcagcccgcccctttgaatttcaagcttatgatattttttagatttttttgtatcttttttatcttttctttagttataaaaggagtgagacttcgatatttttcagcaagcaatttaggagtacgaaaattagagagcaaaatcaatgtgaaggtttttttaacggggttttcaacattattttttctcaatctcttcttctattctgaattaatatgtgtgaatttactactatgaacaagagtagctaaacagtttattagggtgtagatgaatattgtttgacatcgatttatgattttgatgtgatttaattttctctcaatttctatgtattatatttcattcgtacttacttacttttaattgcctggccaccaattaaatatttataattttgatgcaaaatcttagaggtaagtgtcaattatgctatagtgaaataggaacaaatttcgatataggaggaga

SEQ ID NO: 356511 - DNA, 857 bp, Cannabis indica
ttttgtaaacgggatcccaaaatcttatatatgtaatactttaaatttttaattaaataagcaaatttttattattcacgattttcaataacctcgttgattagcaacgagctgcacagtacgtttaaaatcacgatatcacacctttgctagttaaggtgttaaacaaaatatctttgctgatgtggactaacactaacactatgaatcccagatgcaactggacataatttgtcactacgaaaaatactggttcttacaatctcccccttgaaaaattatggtcaatgacaacaataccattgcaaaacaaagtgcaaccatcgaaatatagcagagtctaaagaaaaagaaaaacaaacgctttaaacaaccaaacaaagaatttctcccccttcattaagcataatccatgccaaaaatgatatggtctgaaaccaaatgctccccctaagaaaattcaaagtgtatcaaagacctccccctgaatggcgacataaaatgcaacatagactcctcattgcgaagaaatgccaaaatatctattacaacatcaaagaagaaagtcaaaccatctcacaacatgacctaaaacatatggatatagatataaacaaatgagagattgaccaagcaaaacaattaaatcaccacgatattacaatagatgcttcaaatgagatttatttttatttcaatcaaaaacatgccaaatgatatatctgaatagttaacatgttcaacttgtaaagaggaaacacaatgagtggcctaatcaattaacaagtgagcaatgatcatttgagcaaagaaccaattcattcagcttaacaatgagccatacttaataaaaagat

SEQ ID NO: 356512 - DNA, 911 bp, Cannabis indica
attaaaaccaattaactaagtctacaaactaatattatctcaactagtgcggggactatgggcctatataatcaagcttccaataagtagttttagaatttaccaagtaattattttatcttattaattcctcctggctccactatagatttagaattacactcttgattacatagaacgctctatatattccaaatatagatacgttattaattatctattgtttcaatccaaataatcaatgatcctctatagatgatctatattgagtagggacaaatttaccattctacccttcaatgtattttgactttaaaatacttagctccttgtaaatgatatttcagtaaactaatataattactgaaatgagtactccaccatttaatctcgtttagccaagctcaaaggaaattatcgtttcacttttatgcatttataaaagttatagattctgtatctatgattagcgcttctacttaattgtactacatgttcccaatgtgttagtattgggaagatctaatttgtcaactttaataaataagtcaaagaacataaataatacaattgaatcagaacctaaccatctcaggattaagatcattgatctaagattaactaagtaatattcacttagaaagataatatggtaagtttaagatatctttttctatgtgaatatcggtccagtctgatgaataataatatatcaaatacaagcttactttaccaatgcattgaaaaagacataccactatctaagtgtaagtaaaccacattgttgattatcatatcagtaaaaatcatgtgtactgataaattatgagactaaagtttaatcacataattttgattactttccactgtgtagaaaatacagtaatcataaataataatgtgataaggat

SEQ ID NO: 356513 - DNA, 580 bp, Cannabis indica
ttttttttttcaattttttcaaatatttataattattttttaaaattacgtgggcgactaaaaatttgccatgtatatacaagtgtgtacatgtgggcagtccactgtgacacttaactgtgatttttagatagagggatacatagcaaaacagaatgagagtttaggtagttttactcccaaaaaatatttttgtggttaagtgttaagaaatttaaagtttaaatattttagccgccaatatccttttatataataagtggcttctaaagtaatgaacagacagtactacttctgccacttttatttgttccaaaagtaaatctcaaccatttattaaggagatattcacaacaatattagttgaattatattatttgtgacagttaattttacattgatttttttatgggctattttcaaaaatatgggaaaaattattaaggttatgataaatatggcataaaaagtaaatgatactaattatggcattatctaaccaatcaaactaaaaatgtgcttttttttctaaaaaaaaccatataaaacattaaaaagaaatctgaatttaaaattcata

SEQ ID NO: 356514 - DNA, 416 bp, Cannabis indica
ttagtcacaacaaaaagttacttttgtgactaaaacataattttagatacaagttgtcactaatttaattttagtcacgacaaggtgactaaaaacacatttagtcactacaaattgtgatttttgtgactaatacatttatctacagactttttaatcacaacataagaataatgatttataattagtcacaactcttttttacattttagtcacaagttttgttgtgactaaaagtaaaaaattttgtagtgcttacactctattcgcctcaacacaatactttcctatgagagaccacttgttacacaagaggatgtcatctcgttatgtaagccctaccttgctatacatgcaagaggatcctacctcccgcatgcatgcacccttaaccaataatatgcactacaagaaat

SEQ ID NO: 356515 - DNA, 377 bp, Cannabis indica
ctcactaagtacactcattccaatctcataagcaggtctaacgtcaggagtattggctcgtttttcataagctgaaacgggctcaccctattctaagaatataatttagaaagcattaaacatacataaaatagtattttactttgaacttatgagtaaatacttacatatttatgagcaaccaattgattaacaaatgtatttggcaatttcttggtgagaacttccttccaagttgttggaaatattttaccaggatctagatttactaacaagtatgtttcattaacatcctaacataaattctaaaacaatgaaataaacacatatataaagtttagtaaaccttacattgggtggagcggaatataatgact

SEQ ID NO: 356516 - DNA, 699 bp, Cannabis indica
gtacgatcctcgggacaatagtgcttttgtagttagtcgttaggcgacaaatattttgtaatgaacaggttactttttgtaaagtattttgtaaatgggatcccaaagtattttgcatgaaatattataagttttaattaaaaagtaaaattttaattaatcacaatttccataaacctcgttgattagcaacgagttgcacagtacgtttaaaatcacgtcatcacgcctatgctagttagggtgttacaaagagttagggttaatttgataatctgtcatcaccaaaagggagagaattaataattaacatttaaaattgataaactgaactaacaagattcatattcctaaatactcatccataattaattacactttttattattattttcctgctttttaatttttagttatttaattattcaaccttattattgattctaccaaatagaaacaagaattcaattgattggtacttagctacagtcctcgtgggaacgatctcacttaccttgagtattacttgttaaaacgatacgtatacttgcgtattggatttatcacaacatatatgagtttaaataaatattgattcattgtgatatattaaaatccctacaggtgtattaatagtattagataacacaattttaaaaattctcttgatcagggggagagaagcagttgggatcgatg

SEQ ID NO: 356517 - DNA, 849 bp, Cannabis indica
tatcagagcgaaggtttttaggtcctgaagacgggtttgatatgtacatcggctggaagactcgtttgactcatggttcagtaagcttttagttaatagataatttgttaattatctcattgcttgattatatgaattgtgttaatagttgaaatgtgttggaaggactatgatatatggaaatacttatcggtattgatattatctggaatgtgactgtaggtgtatagactcattatagtaggggtaaccgcgagctagctgggctcggggttgctggtgagggtgagaaccctcgatcaccaccaacctgggaagagttatatgccactatgtaagagactatccggcagcagggtgaacaaattagaggattgagggagcagcgagctcagcctactctaaaccctaatcccgatcctccggcacctctagtagtgccaccggatgcagggaatcgtttggaactgttttatgagcggttcaagaagcaaaacccgccactgtttgagggtggtgctgatccactcaaggcgaagcaatggatgagtatgatagcatccattttttattttatgcgtgtcgaggataatgaccgggtcaggtgcgctatctatatgctacgagatgatgcccacatttggtgggagattgtatctcagggtcatgacctgaataacatgacctgggatgccttccaggccttgttttatgagaagtactataatgagtctattcaggcagcaaaggcagaatagtttatacgattgactcaaggcagcatgacagtgatagagtatgccactaagtttgattgactagcaaaatttgcttcagatgaggtggcta

SEQ ID NO: 356518 - DNA, 1503 bp, Cannabis indica
taggttggaatgggggggggggaattggtttttatagaaatttcgaaagctggttgtgactagctcatagcctggtcgcgactagcttgaatttgaaaaattcaaagcttctggaaaagtgcgtggtcgcgaccatggtcgtgaccgtgaaaaagggtcgcgactagctcgaaccctggttgcgaccattggaaccaatttttttctcgtggtttctgtaatgcccaggtcgcgaccagggttgcgactaccaaaaagggtggcgacccaaaaacctggtggtcgcgaccacttggttcccggccatatattttttttcttttttttgcacgtttttcacgattcaactggaaaaatttaatgtctggtactttaccaaaaaatttaaaatactaaaaatactaacacataaactaaaaacataattcaaaagtctgaagaattaaataaaacacttgggctgcctcccaagagcgttgtctttatcgtcatctagccggacgctgagttgttgtctagagaggcaccagaataatggcgaacttggcttggtcaatttgacctcctaagtagagctttaaacgctgtccattaactttgaaggttgctggaccttcacctttcaactccacagctccatacggaaacaccttgaccacggtaaacgggcctgaccaccttgactttagcttaccaggaaacaatttcaaccttgaattgaaaagtaacaccagctgcccaggttgaaactccttcctaactaagccttggtcatgccacttcttggttctctccttgtagatcttagcattcttataagcctcattgcgaaactcctccagttcatttaattgcagtagtattttttctcttgcagccttcaactccatgttgagagtcttcatagcccaaaaggccttatgttctaattccaccagcagatgacaagcctttccaaacaccaaccgatatggtgacatgccaatcggtgttttaaatgttgttctatacgcccacagtgcatcatctaacttccttgaccagtctttccttgatctctgcactgttttctctaaaatcatctttatctctcggtttgagattttagcttggccattactctgaggatggtacggtagagcagttctatgacggacaccatatcatgcaaggagtgcttcaaactgtttgttgcagaagtgactcccttaatcgcttacgattgcccggggagtaccaaaccgagtgaagatgttcttttgaaggaagcagagaactgttttaacgtcattttgtggtgttcctgcagcttcaacccatttcgacacatagtccacagccaacaagttgtacaaattgctaaaagatgaaggaaaaggacccatgaaatctattccccacacatcaaacaattccacttccaagattcctgttaaaggcattttgtttctccttgagatattacctgtgcgctgacaacgatcacatgccttcacaaatgta

SEQ ID NO: 356519 - DNA, 744 bp, Cannabis indica
tggtggttgttgttattcatcgatgataaccaagcagccaattgtcttgccgcattgtcaaaagactcactcttctcttcatcggttataccattcactacgagaagctctagattgtaaaacttgaaaaaatttctcataccgttgatgctctcccaaatgtgcctgccaaaaaaattgttaagtattagtgtcttataatgatttgactagaatttgatatatatatatacataaggttaattagataaaagaagagtatacatcattccaaacgacattacctagttgccgatgaagtcacacaatgcaacctgcttcaaatcctctccaaataacgtgatctgggtatgtggtgctatgaatcctcggggtaaaggaattgtgattatatcacgtttatctttgaggttcaggaattcaagtaccatccattttagcgatttagggatcttgtccatgttctttatcgagaatacttcatcttcccgtgcacgaccgccttgtggaggaagcattggagctttccccttagacacatcacgtcttgaaggcggttgagcgaatggacaccaaacaaaacagaacacagatatatcaaatttgatccaaattctacctaaatttttgcatcataacggtcgtaattaaatgcccccaaaatttttaaaagttcctgtataatgacaaataacatagatataacaaaagtttgttcatccatcccaccgcaacacatatatt

SEQ ID NO: 356520 - DNA, 532 bp, Cannabis indica
aggaagaagaagagggaggtgattagacttagtattttttcagtgatagagaagggaagaagaataggcaggcgatcgatttttctaaaaaaatttggggcagccgcatttgctatctaaaagggaggggaagacttagggttttttttagagaaaaagggaaatgcaatattatataattgttgagttttttaaaatttatttttaaaaaaaaaaaaccatgcgtctctgatagggtttctatgtaaactattatatataaattttgttttttatatatatttttaattaattattacagctaaatttttttttaaaaaaaatagcattatcacatagtgacgtgctaagtgggtcgggaaatatttatccaatcgcacctggcgcgtcactttaagccatagatttttaaattaataaaaataagaaaattttagattttactctttagtgaccctctatatttttagtgacacacattacatgaggctaacaccaaaagtttagagtctaattatgcatgtcactaaaa

SEQ ID NO: 356521 - DNA, 552 bp, Cannabis indica
agagcacccgtgagccaagcccagcaagacagtgtaaaacataaaaataataataatatgctcaacgtactattttaacaaaaatgccattcacatatggctgtgtgacagaacccggcatatcacattgacatgcccatttatatctacgtggtatagacctatctgttgcgctcacacatctatttaaatctacgtggcgtagacctacgtgttgctctcacatgtctaaatacattatggctttacaattggttcatatgggttattgttatcgagtccaacctgattatgccttaagcgcataacccttgaatctcattacatataacatgacatgacattttcatacatatatcactagggtaataaccctaggcaactataccgttcctattagggtaatagccctaatcccggttattaaataatcatacatatcactttcaatataagcgccactgtgcatactctacgtgctaatctctgtcttacctgttgtcccgcaatatcaaagattccgaatccccgggtgctcctgatcaggtgtcg

SEQ ID NO: 356522 - DNA, 1184 bp, Cannabis indica
gaattgtatggcattaaaatatgaaaaatacaaatggtaaaccttatacaaagtggccggccatataagggataatgggcctcactttgcaatttttccattttgttatttttcaatcatattttctcaaaaatgccaattttccaatcactactacaaaatgggcttttcccaacggttttaaagaaggtgaactatggaaaccgttggaaaatgtaagtggagatttttcccaacggtttagcactgaagcaaaaaaaactgttgggatagctaatgcccacggtggagaaccgttggcaatactaagtgattttttaaaagaaaaagatagttaatcccaacggtttataactgttgggaatactaagtatacccaacagtttataactgtggagaatatttagtattaccataaactgttagaaaaagatgcattcttttttgaaaataagcgtattcgtgtcattaaataaacaaactagacctctcggtcattacataatagttccaccggaaccgagtcaatcggaatagaaccgtacaacttgtgagtaaaagcccaattcgccacattatgggcagtaaaattacaagttctactagcaaaaacaaaattacaacaattaaaatagggagaggatctagaacaaaaggagacatagttctcaatcgcccaatgggactccgtcccattgagagcattgatgactattctcgagtcactctccaccaaaacatatttgaagccttgctccagagccaaagagacagctgaacaacaagccgctgcttctccacataaagcatccacaaaatctaactgagtcgtgtgaatctgaaccacagtcccatgatggtttctggctaccaccgctatgcacatactttccaagcctaccctgacatcacaatttaattttatccactccagaggaggaggcctccaagtcccctccaaagaaggtgttggggaaggcaagacaacatcatgaagctctgcataagaagaacaaatcaggtcaatatatacatttcaaaatattcgggcgagtgttgttatgtataagctcattacgaattctccaaatagtttcaacaacaaacgaggcacacaaaaatacttcctccaatcgaatccccctagtattaagattccagatgaatttgacccagtcccaaac

SEQ ID NO: 356523 - DNA, 945 bp, Cannabis indica
  modified_base (158)..(158): a, c, t, g, unknown or other
  modified_base (515)..(515): a, c, t, g, unknown or other
gttttgtttcgtttggttttttttagttttttttagtttttatatatatatatatatatatatatatatatatatatagaaattgattaaaattctcaattagaatcagttgctgtatttattatttttattttttctgtgttatgttaattttttanattatcattatggaactttaatttaaattattaaataacagattttgggttgtctgaagttttgggtacaaaatacaaatacaataatttcagatttttcttaaaaatgatcatttatttatatttgagttgccagttttcttcttttatacataagtttgttttgaaacgtataccattttaggcaaatactaaatacgcaatttcttaggaaaaaaaacaatgatgacattaatataggaataattaattaattaattaaaacttgtccccattaccataaccgaatagtttgctttgctgtctctaataaatctacctcaaatataggacacttaattacgttttttttttttnttttttctgaatctaaatgtaatgatttctttcttattttttagtgaattaataaagtaaaatattaacaataaaatgtcaaactccaatttttttaaatgtgtagggaatatttaaaacaacataattatattagaggcaaaataaacaacatataataaagatattttattgtcgacaattaaattacaaagaaacaaatattaaaataggctaaaaatagtaaattactataaaaattaattagtaattttttcttctgaactttgacatgtagtaaatcgtgtcccatgaatttttttggctgttaaaaattctccctaaactattgagattgttaaatttaggactttctattctaatttacttgtttctagtgattgtttattgtacttaactatgctccccacgactttgtatatctaccaaa

SEQ ID NO: 356524 - DNA, 703 bp, Cannabis indica
acaatatgaaactcaatcccttaaattgctcattcggagtcagttcgggtaagtttgtaggcttcattgtcaatgcccgtggaattgaagccaattcggagaagattgaagccctcctagatatgaaatcgccaataagaaccaaggaagttcaaagtttcactggtcagatcgtcgcactcagcggatttgtttcaaaatcaacagacaagtgtcttccgttcttcaacattcagtaaggaaataagcaatttgagtggacgaaggaatgtgaaaaagcttttcaggagctaaatacacaactcgtagaacctcctatgctctcaaaacctctggacagagaagaacttgggatatacctggctgtcacggaacatgctgtaagtgccgtactgatcagagaggaaaataatatccaacactcggcctattacatcagtaaaagactcattgaggctgaaggccggtatccattgatagaaaagctcacttactgcgggatcctagcaacaagaaagctaaggccctattttcaagctcatcctattctggtatacactgaccaactgttacgccaaatattgcaaaaactggatgcctctggacggttgctcaaatgggcagtggagttgggccaatatgagattatcttccaaccctgaacagcgattaaaggtcaagccttagcagattttgtagttga

SEQ ID NO: 356525 - DNA, 534 bp, Cannabis indica
atttttctggactgttctggggcactgagtgccaaatatatttttgcgtacaaatatttatgcaagttatgatttttgggtttattcaaaatacagttgttatgctgctgaattttctaaaaaataaaaaggaatatgttctcttgttatgcttatcattttcctactttggttgtactgatcagagccatgttgatcatgttcagtgcatgttgttgtttcacgacctagtctctctgtcatcataggtagattaggtgtgcagtcacctgcaggtgaaagacctagaatctgtacagggagcgaatgaaatttgagccccagtattatggtggatgtcagatgcgactagccggttttagatgtcgtttctatgattggtatggagagctagcggtctagtcgacggtgtgatatgcatttgatgcttgattttgtgattatgtgtggtctctctactttatttatatatttcgatacaggtgatgagatattttatttttacaaagctaaccatgtaggaattttattaaa

SEQ ID NO: 356526 - DNA, 640 bp, Cannabis indica
gaaaccccaatgtcctaaacttcttgcaaagaaacaaggtatttattttcctataaactgatgtgttttagtgaattattatccatttggattattaattctggacctaataaccatgttatttgtttttcttcttattacagccggagctgcttgaactcggttgctatcttagcgagttgaatcggaaagttggacaaaggggtggagttcgtccaagatgaagatgaagctcgttttttttctttatttttgaattgattgttttagtttcagaacactttggatttcaattattaatttgggattttattccctatttttttttcatattgctgtaaacaattccttttatttaggagaattttataataaagttttctattttggaaataaattgcaatatatgaattgagcttcatttactttatcttgtgtaaccaataccaattatatttatatgttttaataattgtatgtgtatgtgtttttattattgatacaaatctaatcttaaactcttcaaagagttaatactacataaacactaagaattaattttctatgtttatgaataattattaattctaaaacaattattaagaatttttttaatagaaagatcttttgatctgatagg

SEQ ID NO: 356527 - DNA, 602 bp, Cannabis indica
ttaattatttaatttatcatataagataattttagtataatattttaaataaaaagacaaaggttatcttttaatttaaaatatgttaaatatcaaaatatctaatctaataattaaataatatataaatattaaagaagttaacaaatttttaaatctgaccataataggaaatatttaaaattggaaatattctaaattggaaatatttgaaaaaaggaaatatttaaaaatggaaatatttcaaattggaaaaatctaaaattggaaaaatcggatttttgggaaacaatcccataaaaaagttggatttttgggtaaaaacccacaaaaatcgcaatttggtgtggctgcccaggaagggctgcacgtgcagccccaggaggctgcacgcaacctcaatacgggcgccgagaagagcacccagcagaggaaactcggcggatgcagggtgcatgagcgggaaaagtgggcggatgcagggtgctgagacgtgtcacgcgcgcggatggggggttgccagaccgagtgcctggttctcaagagcacccactcgacagccttgaatcccgattttccaaaattcgtatcttcttcgtttt

SEQ ID NO: 356528 - DNA, 599 bp, Cannabis indica
ttagcgggttattatcgacgttttgtggaaggttaactcggaagaaccagcgatttatatggtcagataagtgtgaaaagagtttccaagagctgaagcaacggttgattacatctcttgttctagccttgccatctgatcaagagaagtttgtggtgtattgtgatgcgtcaaggcagggtttgggctgtgtgttaatgcaggcagataaagtcatagcctatgcttcccgacaattgaaagattacgagcagcgttacccaactcacgacctagaacttgcagcagtagtgttcgccttgaaaatttggcgacattacttatatggtgaaaggtgtgagatttatactgaccacaagagtctcaagtactttttcactcagaaggatctgaacatgagacaaagaaggtggttggagctggtgaaagactatgactgtgaaatcctgtatcatcctggaaaggcaaatgtggtggcagatgccttaagcagaaagggacctgatcagatatccaacatggtcatgatttctcctcagttagcctcagagatgactagggcaaacattgagttggtgactgagaaattatttaatctg

SEQ ID NO: 356529 - DNA, 592 bp, Cannabis indica
tgataaaactgtttatatttttttgattctgttcgtataaggaattattttcaagttggtaatattaaaaaaaaaaagttgtacaaaaattaagcacatggtcttatttttactattttgaaaaatacatggtctattttatcatttaacaaaatacagggttcagtcggtaacttttgtaaaacacagggtccaaaatgatatttacccttattttcgccaaaaaacatttaactgcaaagttatgatgaaatttaatatattaatattgttataatcgcattcttttaaaagagatctatcgctgcactcctaactattttggcatttaaaaaaaattgctataatttttttttatgatcgtctataataaattatttaaattatatatgaaaaaatagattaaaaattattttaaatattgaaatagataaataatgtatcaataaacactttttatcgatgaattgtaaagggtttattttataaatatggcttttttgtaagtggtttagaaatatatggagaaataaaaaaattttataaaaactggaaaaatgaataaaaaatttaaaatatggaaataactaat

SEQ ID NO: 356530 - DNA, 564 bp, Cannabis indica
tcgaaaaattcaatttataaaattgtgtttgtaaacatgaaatactaatcaggtttctactaaaattagtagtaaacaaaacagtgtctaaaactaaaaatttcttctgaaacttgaggcgggctcttcctttagcttggaccgatactaactcgccatttccaactttgagcttcaactcctctggattcagataatcccaagtttcaagctgctgcaatgaagaacaaacatggttagtgattccagaatcaacaatccagaaggatttgtcattctctaaaacacatcattcaaaaacaaaagtattaccttcaattgtacttaaagaagcagcattgttagaagcttcatccttaattcttttcctcttacaaaagtttgcgaatccgggggacggcattgcaatcaattttcgttcatgagctcgtaatataaattaaataaataaattaaaaaaaaattaaaattaaacctataaatttcaaaaattaggtttcaactaacccgaacagctttttcaaaagaaaaaaaatgctaacaactttttaaatttcatgttat

SEQ ID NO: 356531 - DNA, 590 bp, Cannabis indica
attaataaacatgtaggctaaacatgtaaacacatatgcatatcattatactaatcttaccttgcttctaaattcaggtgtgccagtcaacctgagtggaaaagctgctcgaaaaattacaggcccctaaatcacattattcacaaaactgagaagtaacatgctaaatcacttttcggggacttaaaattgaaactaaaagtttccctattgacgaataataaggataccctaaatatcgtaaaaacgggagaaaccctaatttggaaaaccctaacccccaacaagggattctgctattgggaactaattattaatatcctaattaacaaggaatgaaccaaccaaggctctaaaaataacacgaatggacgaatcaaacaatttgggaaacctgtcccaaaccagttaaccggttttacaggatctgtcaaaccagttaagcggtttgcacaacgtttccccaaacagtttgaaaccaacccaaaaggtgcccaatcgaagccaaatcttccagaacacctaattaggttgcaaaaaacataaaccacgcaaaccaaccaaacatccagaatcacaatccaccatta

SEQ ID NO: 356532 - DNA, 557 bp, Cannabis indica
tcttccacacttccactcactctatttttttactcccccaaacttattgtaaagcttatgatatcattcaaaaaataatgacgaaaaaaaaacagtgtgaatacatttttagttccacaggtgaagaaacaaaacaagtttaggctcaaaagggttcactaaggatattcattttatggtaggctcaaaaggctcaaactatccaaaaaatgcctaaatcatattcctagtaaacgctgtcaagaatttcgcctcaagagaataagacatgcaagttttaagccattcagtcactcttaccacaaaccacagtaaaacaattctaacatatttcaaagattattaattttcatcaatacatagtctttacaagcatttaaattaatctaaagagttaaaagaattaagcacacagtttaaaatttcaggacatttcacaattaacagcagcacacaactatcttcatcttattaaattgctaacaacaaataaaaaaaaaactatcctaaagaaaaaaacttaaaaaaaataataattttaagccccccgcccaccc

SEQ ID NO: 356533 - DNA, 1028 bp, Cannabis indica
acaatagttcaagcccactcagacatgccaaagccaagaaacccaaatattcctacattgtatgagcttatgtcagagcctaatctagaaatttgggaggactggtatgataatgaagaggatttggaagtacatggcaaacatgtactcagaaaaaacctgcaaaaattccatctcggaaaccatttggaaactccggagtcaaattttggggtagaccagatataaaggatcaaaagaataagaaaaggatctaaaggcaaaaggccatttccaaaagaaacgaattcaaacaaccaaaatgaaatctagtaactctggaggagtttttaccaaaagagttacaggacaagacagctggttgtgatgacagtgtgtcggattgctgcatgactttgttgacaaaagaagatcctgaatctacctcacttgaaagtgaaagagaggtagatgaaattaccttgcaagatatgcgacaaaaaatttttgcaaagaaggaaaaagaagcgaaagagcttgaaaaagccaaacaagaccttcaaaagccttcatctttggccaaccaagaatttgctaatgacaatcgaagaggcaaaagcactggtgaagatgaaatgacgcgagcaaaatatgatatattggctcatctaaagcgcatccctactgttttaagcgtttatgatgcactgcaaatgtctcctgagcatagaaatgcacttgttgtcgcattgacaagtcctgaattttatacggagaaaatagagccaatgaaacctacatcacttgaaacgcatacctcttgtatggcatgcataactttcgatgataaggatcgtcagttgggagctgctttacataatcggcctctgtacgtgacgggtatggttgctgataatcgcgtaagctacatcatgttggattgtggatcggctgtgaatgtactcccttaaaaaccttgagagatgttggtttacacccacgtcaattgtctccatcatcattgacaattcaaggttttaaccaagctg

SEQ ID NO: 356534 - DNA, 1053 bp, Cannabis indica
caattgtagctgtaggatttgttgtttgaacaggaggtacatcagcagtctggtcggaggttgaagcagccgcctcagtttcaccataggccacttgggacgcgcagaactcaaggtacatgtccttagcatcacccaagtagtcaaagttggcctgaggattagccttccaaaagtcaaagaaaagctcaagaccggctgtctctagagcattaaccttctctttcaacctcgccacctcggccgaaagctcctcctccttagtcttcttctcctcctccacccgatgaagaactactcgaagagaagtcttctcatcctgaagactgttcactttagcagataaggtctcgatggtctcttcaagacagtcagaaacctcgagatccttagtcagctcagttatcttcttctaggcggtaaagagcttcttgttggcttcacccagctccatccgaacagctccaagtttcgccctggcaacgtcagcatccttcttggccaagtccacctctgccctcatggtgtcggacatagccgtgttcctggaagcggcagacttagctcgggagtaagtgtaggccaacttcagaccggcatgcgcagagaaaaagctttagcatttgagctaagtacagaagattaaggggaagtgtcaagaaagacttaccctggtgaactctttcaagactccgcccaccagcagctccaaagaagagtcattgtcagcaccagccagttgctcactgaccttaggaacaagccggttcatatagtgggctagcatctcccttcttagcctctggaagcactgacaaaggtggagtaggtgcccgcacttgtttgggttcacttctgaccagctcagacccacccttcgatggttcagacctgtccaaacttccttcccgagactccttagacttagcagcttttggggtagaggggtttgcagcagttagctcctcgcaaagatcaatgacctcccaagcaggcctctttcccttagaagaggacccctcactgcctttaaaacttcttggccggaggaga

SEQ ID NO: 356535 - DNA, 671 bp, Cannabis indica
gtgtttttcatctaatattgcttggcatccgggggaagattgtgattgcttggaatcctccaaggtttattgttgatattattagatgcacaagtcaaattatgcatctaaaagtgtcaacaatagatggattgttttcaagcttcataacagtgatttatgcttcaaataatagaaatgagaggggtttactttggaagagtttagaggaagtaaatacaagtgagaattggtgtctcatgggagattttaatgacatattagctaaagaagagaggattgggaataaggtgaagtactatccagattcggctttcttgaattgtgtaactcattgtcaattggaagacattaagactagtgggaactacttcacttggtctaacaagcaacatggggatgatagaattttttccaagattgataggatgttggccaaccaatcttggttaaacaagtatgatcatgctgaggtagtttacatgaatgaaggactttttgatcactctctgggtgttctttcactccatcctattagtgcctcgggtagaaagccttttaaatattttcgaatgtggaaatcccattcaggatatgatggctgtcgtaaggattgttggaagaaaaaaattctgggatctcttatgtttcaagtggttacaaagctcaag

SEQ ID NO: 356536 - DNA, 592 bp, Cannabis indica
atgtccatttaaatattatttattttctgggatattacaagaaaggccctaagcaattaagaggaagagatagggtgataaagggtccccttggcgaataccacgggtagagtgaaaggtgtttgtgagggtgccatttatggatagtcgaaaatggacagtagacaggcaactcattataggagagataaaagatgtaggaaaaccaacatgagtgagcaattgatttaggaaggaccattcaaccctatcaaaagccttttccatgtcaagcttaatagcagcccaacctatcttccctgaacgtctagaatgaatggcatgaataagctcatttgcgataagaatgttatcagtaatttgtcgcccctgaaggaaggcactttgattgatactaataatggagtgaagaacaagctttaagcgattagcaataactttggataggcatttgtaaagagtattgcaaagactaatcggtctaaaatcacggacaagtttggggtttttcttctttgggatgaggacaattatagtttcattaatttgggagatatccccctaatgggagaatttggagcatggctctggt

SEQ ID NO: 356537 - DNA, 741 bp, Cannabis indica
gcaaagcaatcagcaatccgcacagagcgaccacacttagcgaattcagctttcgcatcgtgagtcatcacggaaacccctataacgttggggattggattgcagagatatggcaagctatccaaatcccacgatcagtgtattctgtatttattatgcaatctttctgcttatatccattgtaacgagaagagaaaaacttcctctccaagctcatagccctataaatagtgatgtatgctcactgggcaaagggtcgaaagattttacttaagagatattatctaagaatttatatttagagatattgttgtaagagttataagaaaaggaacctttctccttgttctcgagttaatacaaataacgaggattaggctattaccgaactgttcggggctgaacctccataaaattctcgtgtctttatattgctttgttatctttcaatcgttataaactacttatcgcttatcaaattagactcactatcgttggctaaaagcgaggacaatagtagtatatctagatcttggtaaaataattcccaacaataactttacctatttgaattaggatactttgtaagccctacactatataaaaggattagatcactctcttaagggctaagtcattctacacacactaaagggtctccacaagtcctctcacatgtacctaagtgttggaattattttaccaggatcttagatctattcacaagtatgttgattaaca

SEQ ID NO: 356538 - DNA, 768 bp, Cannabis indica
gtgatacattaaactcaaaacaacatctaaaaattgatctagaatgagaataaattaataatagtcatttacttctacttttagaagcctaatgtatgcctaagagtttgaataagactttacattgcatttatttttgaaatgttaagtagtatcagaataacttaagttaagaccactttatacaaagtgatgaagtatctttcttgtgatacattaaatattactttcatgcatattttattgaaataaattgatattctagaaatatagttaaccacttacattccaacttcactattatatcgattcacgcaaattacttaagattaccagtaagttgtatcgtggagaacttgttatttctattaaagaagtcaaatttatttattgttttgaggataaatctcgtatgctatattgtaaagtttcatactaggcctagagttcagaattatattttaggccattaaaaaaaatttgagataaattcaactataatatttatggcgaagaactataagagtactggtcgaaactatcatatcgacattaagtattatttagtcgtaaagaggggtgataagtggtcattaagcatgcaaactgaattgggtgatcgcatattcttgactaaaggcatgcagcaatacaaattcaaggatcgtaaagtaaatataggattcagttaccccatatgtagtttttatttgtacaactaaaattattcaatgaaactctaattttgatattttctcatatttatgt

SEQ ID NO: 356539 - DNA, 1660 bp, Cannabis indica
aaaaaaaattaaagtataaaaactcaatttttttaatattacccattcatgggtaatatcaattaacagtccacccatttatacagaaaataagttggtagtgtattgaagtactcaaaatctttaatatagaactgctaagtacggtttgctatacactatacttttagtgtgtgtgtgtgtgattttaattcgaatcacatatgtggatatacatgtagtaaaggtgttgtgtataattcgattatgcatgaataaactgatatgtaataaacatctttcattaacgtgccttttaccatgaaagagtgattcatatcacaatgatgatcattagtagattagcctgaattctgagtatacatgaactcctatttgtatttattgacttctttgattcactctttaaagtttcttatagaagataattcttacaacttttattttgaaagcttaataacatgagtggctaagaacatgttatacaatagtggaatctaagctttcctaacggattgaatattaatttccttatagtgttaattcttagagtgctaatagttagatgcaaatctataataagttatagattaactgttcacattaaatttttggtacataaagaatcaagagataattagagggtaaaacggtattttgaccaactctaattatgactgataattggaggacaaactgtttatattgattatgtcaatggattacaagtaagaattctgtaaatataattctatattgtcaaagagtatagttctatatttatagtgtagtaatcatagaattaataaaccagattattctattgatgagatcgataataatgaagtgtttattggagcttcgaatataagtccatgatccctgagtcatctctatacaacactgtacatgggaatattttacttgatgaataaattttgagtgagaattaatttttgtgggaaataaattcttaaaagcaaaagagtaatttgtgaaattattattttgattaataatggaaattatgaattgtataattaatagtatttaactatttagttttattagataaaactatattaattagttaaatataatattattcttaaataatattaaaaatgaaatatattattttagagaaaattatatttattttaatccttgtgaaataagaaattgatgagaattaattatttattatttattggtagaataaataataaatcttatttatgataaaattgagaaattagtttttggccataaaatatgacccacacgtgtaggcccagtctacacatgtagggtcacatataaaggcccacgattaatttagtttaattatttttattggttaaaataatttaaattaaattaagctagctatcttttaattattaattaaataaattattagataattatttaattaaaaggataataattaaaataaaagatctaacagatatttgttatttaattattcgatttatttgaattttaattctaattcaaatcaaattaatttttttcctttattttaaatgaatgattaaaaatagcttatttataactcataaataaccaagccaattaacaagaaaataaactgagataagtgagaagaaaaatgaattaattttttcactcccta

SEQ ID NO: 356540 - DNA, 604 bp, Cannabis indica
ttttattattttattaaatataaataaaaagtcacccatgaatttctcataaaccaagaattcagttatataagcacactttatatagaatagatatatagatagatagattattatatagaaaatataaattaacattttatttacaaaaatacatctataaggtaaagacaatatttataccttttatgtgattttaattactaaaatattacttacacaatcagacgatggttgcagggtagttgttgcgtggttgcgcggtggttgcatcagacaaagatttcaaccagacaatggttgcagagtggttgctaggtggttggccgaaggttgcatcagacgaagatttcaatcagacgaaagtttctgggaaattgttgggtggttggccaaaggttgcatcagacgaaggtttcaatcaaacgaaataactgttagtaaaatgtttatgcaactataatgtaactgttgtaaagcattaaaaatcaaaacaatgttttcacatgcgtaactcttatctacatgtctctttatgatttaatatgaacaaatacactattagaaatttggaaaacaacaaaaatacaccaggataaatatt

SEQ ID NO: 356541 - DNA, 1009 bp, Cannabis indica
aacctcttccaattcttcgattgtttttagtaggtttctttcatcttgaactcaaggatcaagatcttcatctttcttctccttttcttttgccaagatcgtcatcaacatatgactagcttttctatgttgtaactctatgcaatagaaatcccgagccagcatctggtcgccacgcactactcccacgccatctgatgtttggaatttcaaggattggtgcttgatcgaagtgattgcccctagttcgatcaatgctaaatgacccaacaatatgttgtaagccgagggcaggtcaacaactaagaaatcttgcataataatagcagataaaggcgcctcgcctaaagttaatgcaagcttgatcatgccaaggctggcgatactatctccggtgaatcaataaaggttcaccatacaacgccttaacttggctttttcgagccccattttatttagagtctctttataaaggatatttacggagctcccattatctattaacactctcttgatcctcttattggcgagtttaatggttatcactagtggatcgacgtgaggatacctcacatttttctcatcttcctccgtgaatacaatgggaggttcctcagtttttagcttcttggaaggttaaacggcaaagaccgattgtgtgttctttatttctttcacatatctattctgggcattattgctttcccctgcaatatgtggccctcccaaaataaccaggatatcctctccttccacaagaataggttgtaacccatggttgtttgggttattgggcagactgggctggttgtatccctggccctgtcttttcatgtattgcttaaaatggcctcgagcgatgagactttctatctcgtctttcagttggcaacatttgtcggtcgtatgcccaatatccttatggaatttacaatatttgttaggatctgttttgctcctcaaattcctcataggttgggtttgccgaaggctaccttctgctcatgtg

SEQ ID NO: 356542 - DNA, 1086 bp, Cannabis indica
ggtgctctactgtgcaggaaagggtaagactgtcgttgatcagccatgagtgcaggagctggacgaagaatgtacatgttcgggccacactagaccaagcgggttggggtctaccagtgatgtattttgagactctattttgtcgcttaggtcggccaaaggaaaagaacttgtaatagtgttttttaaatacttttgaacttttgtaacttttaaattataagttttaaattattacaagttatttttattccgtttattaataaagtttaatttctgtgcttatatttctagtaatcccaattaggggattagggtttcttaagtttattgggaagcgtgcctaattatttagggcgttacactatggttggtcagtctctggactgcaccatggctagccagtctgctccctacaagggtctggctggccaagagaagctctgtaaggttctctgtgaacttctacacgtggacaacatcatttgggctacgaattagaccctaaaagcctaatagaataacttaataatatctatgtttaagggcattttggtcttttgtaattaattaattaaatatacaaatatctagggttttaagtgtaaattagagttttaggcttcctatataaaggccttaactctaacctagaaacctaagtttagtttaagcctaatactagcctctaagctctaagcttaagtctaataactctgttcttcttcactttctctcacacgcccatacaagcactttcatcacttgagatttgccaatcttgattcatactttgtatccttaagggtgctatatcagatcccacctatagtgatctgaatagtattaaccctcaatattaatacaactaaaaggggagtaggtcatttctctcaatcacacggggtcaaacatctataagaaatctatgtgctctttacttttccaatttatttgtgtaacctgtggcaagcatcagattcatatgatcttgttgttggttgatcactttttgaggtcaacaataggaaaagacacattgtttcatttaaatgaaataaagtagcataaatctaactctaaagc

SEQ ID NO: 356543 - DNA, 715 bp, Cannabis indica
caaaatctatagagatagaaagaggagagcattactactttctcaagcaacttatatagataaggtgctagaaagattctcaatgggaaattccaagaaaggacagttacgtcttgacatgaaattactccatgtaaagatcaatgtctaaagactactcaagaggaagaggacatgagaaagtacctttatgcatcaatagttgggagcttaatgtatgcaatgttgtgtacaaggcctgacatatgctacgttgtagggattattagtctttaccaatttaatccaggtttgaaacactagatagctataaagcacattctcaagtatctttggagaatgagagatctcatgcttgtatattccggtagagagttgaatcctactagatatactgattctatggtgattctgattttcaatcaaataaagatagttgagacatctggatcagtatttactcttggtggaggagctgtagtctggagaagcattaagaaaatcagtattgtagtttcaaccatggaagctaaatatttaacagcttgtgaagcagctaaggaaacatttttgttgaagaaattctatagtgctcttagactaatccagaagtaaaaaaaaagctactagtgttctactgtgacaagagtggagcagtggcaaactcaaaagaaccaaggagccacaagagaggcaagcacattgagaggaagta

SEQ ID NO: 356544 - DNA, 929 bp, Cannabis indica
tgttttgttatcaataagagattagaaatgatttatgttaacatgtagttttcatgtttatggtttaatatatgtacaaaatctgttaagtctagaacatatagtcattcacaattacagtgatgtcaacacagtggaatgtaattgtgattatatgattcgaaagacaaagtccctgtttcatcagtgcattggatttacactgatgtgataattagcgatgaagtgtacttacactttgcataagtgttatgttctttccagaacattggcaaattatactagctttgaatgtacggagtatacattggattggaccgatattgattataaaactctcgtttgtgagtcgatatgttcacttcaacaggtagcattgcttttgagccaaatgctagcgagaagggattgtgccctgttgccgtcttctcggtagttctgtgagcacaaattacttgtggtagctcgtcaacccacctacctttggcagcatctaacttcttcttaacagtatccttcaaggttttattaacaacatccaattgtccgttcgcctgaggcctggatactgacgagaagctcttaattatttcgttcctctcgcagagctcagtgaacaagtcgccatcaaattaggttctattatcgaatactatcttcatgggaattccaaacctacagataatgtttttgacaataaagttgaggactttcttacaggttatggaaataagaggctcgacctcagtccatttagtgaagaagtcaactactactactgcgtacttggctcctcctcgcccagtgggtaatgcccctatcccccatatagcaaataggtaaggtgaggtcatcatccttagttctgtcgatggtacgcaaggtatatgtgaaaacctctaacacttatcacactttttgacaaactc

SEQ ID NO: 356545 - DNA, 940 bp, Cannabis indica
ttaagaatatatgttgattttggattctgtaatttcgaataatgaccaatattaaataaaatactaagtgaaagtagtttgtagcattgtaactggcctatgcttaagcacattttgtactggcctatgctttatttatcgattgtattgtaactgtagtaaaatagttggagaaaatacatgtcttgtatctgtttgattaattttctgtgagaaaatatgggtttttgttttccgttagtgggatttgcataataattaaatttaatttattttgagctttgacaaagtaattgaagagtttgattgttgattgtgtgtagtaacatgtaatcagaacagctatacaaagattggcatttcaaaagggttttctgttgaattaagaattaaaattgtatctaataatcattagcatttgttcatttaaaaagaaatgagaagaactcattaacttgtttgtgtaattagagagggaaagttttagtaccatacatattttggtagtacatcacttataattgtttttttaaaggacttattattattgttgattataattactgatgcttgcttatctatgtgagaaaggaaaaaaataaacgttcataaaattttaaaggtgaaaggtccaaaggaatatgcagtagacattttttttttcaaaagaaaaatatgtataatagaaataatagacatttgaaattaggaatgtcttaccatactctgttttatatttttttattaggcttttggcgttttgcaagtgtttgaaaagaatttgagtcaagtggaaatttcgatctcgattcatcagaggtatatatattttttataattaaattacatataattttatagaagagtttgaatatcttatatattcatccatagtgaagtaggttctgcgaaaattgtgtgctgcggtgatataaggatg

SEQ ID NO: 356546 - DNA, 619 bp, Cannabis indica
accgtttcgaagcttatgaagagctttatagtatgagatatagattagagaaaaaaaaagatgtattttattttagggtgcttttaccataagatttggtagaaaaccctaagttaatttatgcagtttttagatagtgttttggaatagacccttattgatttacctttgtcgtgacataggacttgagatcctcgagcatcattccactcaggtcggctcgcatacatgactttggacttgaggtttagacgatagaagctgtgttcggccataagtcagaggtcttccagcgatgtacatatcagccgtggtgtcttggcttccgggaagcaggatcaacccttttttttatgtttggaaatgtaaccttactttttaatagcggttttgtaacatgttttaaaaaaaatttataaataggggatccccgtattatggtgatattttgtacgaaagttttattttaatttaatcaaaaagtttttagttaaaccacacacttcttaaactaatagattagttagggataagtttgtaaaagcacactcgtggcgtccctatggatcaggtgttgggttttgtgccctaaataaatttcatttcaatataatcagat

SEQ ID NO: 356547 - DNA, 559 bp, Cannabis indica
aaattctaataatactggaaaaaagaatcgtcgaaaacgaagtcacgaaactacctcactctctctcactctccggcatccgcgagtgggcttcgtcctagcaggttgtcttcaacctccagcagcctccatggatgaaaaaatgggttttgtgcgactcggttcagacccggtcgggttgggatgaaatttcggccaaaaaagtaaggaaacagacgggaaaaataggggttttgatcggtttacaatttttattagatctacgatattaatttcatgtaaaaacacataaacttaggtatatctaatctaaaacaaatccgaaaactaaagaagaaagtaacccgaatatgtgatccaattcgaaaattaaaggtgtacaaacattttaaaccaattattgataagatatgcacaatcaattttcaaattataatcaatagaattgaaaaacacaaaattaatttcataaagaaatacatgaaccctaaaagtttaatattaaaattctcctaatttactcaataattttatgctagtaatatatcaaaagaaaaaa

SEQ ID NO: 356548 - DNA, 477 bp, Cannabis indica
caaactatgggggatacaatgaggctggggagccactcattgcggatggtgacgtcctggttgagggcgtggactatgccagtcaggaacttactactgcagttcctcacagaagacaaggtacttttggtgccaggtggatgagccctccgtccaaggttaccgaggcacgcttacgggatcttgaccaggatggctacctaggcgaattagactgttacattcccgcccacaacaatagagccacaaaccttgaaaggggaatgtgcgcctagtcgggtgctcatgccaagcaaggggcattgctgcctttgcacccgtactttaggaatgtggcagacttcttccgcctctgtctgacccaatttactcccaagggcattaagtatatgtccgccctcttcgttctctatgcctcccagaggtgggatatgtcctctccccatgaggtaagctggttttttgattttaagtcca

SEQ ID NO: 356549 - DNA, 660 bp, Cannabis indica
gttaaatgaattatatgcttcattcatttattgcctagattagtctatctctataaatctcaaagctttatctaagttaaataaattgcatgcttcgtggatttactgcttaggtaaaagagttaattattgagtgcttcgccttgattacgtacaatagggagattgggataattgacttctttagcgttatctgcgggattaatagtttgattggaaattgaaaattgcattctttaatagaaattaggaatgattgttgagggtggagaataacctttaactcgtctctcacatcgtagtctcaattttacaaaatttgatgtgtttcgtaagccacaataaatttactatttttttaattccaatacttctaattattttagtataattgtaagtaagggtcgatcccacgaggactatgtttattcaattattcaaaaattagtgtcaaacattagaaaaggggggtttaaagattgaaattaaaatggcagaaataaaagtaaaacaaacaaattaaaattgagactatgatatgagagactagttaaaggttattctccacccttaacaatcattcctaattcctattaaagaatgtaattttcagtttccaatcaaactattaatctcgcagataacgctgaagcagtcaat

SEQ ID NO: 356550 - DNA, 633 bp, Cannabis indica
agggttattatcctttatagatacaaatttgtagttgtgtctataaggaaggtattttctgagtttttattacaaaagctctcaatgatagtgtcaaactgttaccgcagatttttattaactaaaaaaaaacgcctttgtgtaataaatatactaaagaattaattacaaagaaattataacaatactaaattaatactcaaaaaatatatattatgctaacaaaattatatataccactattaaaatatgtatacataccaaaaaatttatatataatcattatatataataaaatagaaataaatatcatcttaaataaatgatatattatataggggtgctcgcggtgcgggtggtgcggtttttgaccttttttttaaacaaacctgcagatgtagtttttctaatttctcaaaccgcacccgcaccgcgaaattaaaagccacagaaaccgcagaacaaaaaatagtgcggtatggtacagtttatgcggtttggactatcatcaataattaaactatcacaaatacaacaaaatttgagcaacacttgtcaaaaataccataaggcttgaaaataaatatgaaaaaaaattaagtttaataatacaataattagtgggctttgggt

SEQ ID NO: 356551 - DNA, 1142 bp, Cannabis indica
acccagctgaacgagcccttttcgtgcgaggacttggtttcaagagttaccaaatcggacatcactacctttacgaggctaaacctattgcgacttgctactctgcgacctaaaccgaccaagagggcgcaccttcctttgaccaatccagcaattattcccaccgaggatgtggtaatctcaatacccattcttcgatgtggggtatcagtcccttttcatccctttattgtggctatcctcaagcgttatgatgtgtctcctttccagctaacccccaacatttatcgcacaacccttgccttttacgcgatgtatatggagtatgtacatagggctcccacagtagaagagtttagctacttctatgatataaaaagtgtaagccttcacaatggtttctactgcttcagcaaatgggcgacttctgaaattaacggggtagaaggcatggtttctaatatgggagattggaaatcaaagtggttctacatattcaaagtcccagggattagaactgactttaaccgtcgacctagtatgtcgcatgtttcctaacttagacattttttctgagttattttgaggttttaagctaactcgctcttttttgttttcgcagatagaccatctcgccctacactcgacgcaactcgcagagagacagttgaagttcttgggagccttcatgtacaagatcgcgactggcgattattgtatacgactgctaaactgcgagaacacaaactgatccctgagaacgcgagtctctggagagagccggtgtataaggaaccttctcaaaagcaacaagagcgaattaataaacgtctttccaagcaaactcctcgaccatcatcagctagtttatcgcatacataaactagggtgttagaatttcatctttattagtgttaacccttattttttccttttctaattgcagaaatgactttcctgaagtccgctcctatgctcaaccgcaagctgaagcctgggacagcagcgacttcccctatcacctcccaaaagaggaaaagcgatgtggtggtttctcctatcgcagattcttttaagaggcttgctaaaggcattcaagagaaagggaagaaagttgtgatcgacccagcggttcgagctcg

SEQ ID NO: 356552 - DNA, 597 bp, Cannabis indica
cgccagccacattctgtacactgatgaatgaagtcttccatgatgtcttagacaagttcgtggtggtgtacttggatgatatcgtggtctacagcgccactttagaagagcatcaggaacacttgacaacggtgtttcggaagttgaggaaggaacagttgtatgtaaagcgcgagaagtgttctttcgctcagaaaagtatcaagttcctgggtcatattgtggaacacgggaaaatccgtatggacatggaaaaggtgcgggcgatccaagagtggacgaccccaaccaacgtgaaacaacttcgctcgtttctcggtctagccaattactatagaagatttgtggagggctattcgagaagagcgacacccttaacagagttattgaagaagggtgttacatggacgtggtctgagaagtgcgaagaagcttttcgaagtctgaaagaagccatggtcgaagatcctgtattagccctgcctgatgtatgcaagccttttgaagtacagactgatgcgtcagattatgctttaggaggggtactcgtgcaggagggccaccccgtggcatttgagagccgcaagctttccgaag

SEQ ID NO: 356553 - DNA, 619 bp, Cannabis indica
caacctcaatacagttacaatcaaaagatcctaactgaaataacagaaaacagaagacatatacctgccagctcatcacccaaagctacttattctactcctatccaatcagtataaatgactgctcctggtttcaatttttgcccagatctgaagacatagagagagagagaaacctacaattactctgagttcaatgataagaactcagatttgagaaaaagagaggagagtaagaatctgtgagaagagagagagagtgttcttgagaagaaaagaagtagaaccaggagataaacaaaagcagtagagaatcgagtcttaccagttgatctgtagctggaagctccatcaatcgtgtattggatcttgattttgaatagtgcaaggctttgctcattttctgaggcgagctcaagaggactaccccatcaactcagggggaacctctataaaatactgtgtttgcttctcctcttccctaactctcatctgcataatcaaatcacattcatctttgaacattgcatatatattcgataaaaactaaccctagaaactaagcaagaaaacctgatcaattttctgtgtttttgttttggtaaagttaaatgcttta

SEQ ID NO: 356554 - DNA, 510 bp, Cannabis indica
gacgacccattaacctataaacaggcaatggcaagtcaagaacagatacaatgatcagccggcatggattcaaaaatggattccatgaaatagaacaaagtctgggaatatgtagatgcccctgatgactatcgtccaattagatgtaagtgggtctacaagaagaaaagtggcactggaggtgaagttgaaacttttaaagctagactggtcgccaagggttatacccaaagagaaggcgtggactatgaggaaacttttagttcagtcgccatgctcaaatccatcaaaattcttctctccatagcagtcgctttcgattattaaatcaggcaaatggatgtcaagaaacccttccttaacagaatccttaaagatgaccatctatatggagccaccagaaggctatgttcttccagggcatgaaaagaaagtttgaaaactcaatacgtccatttatggacttaagcaagcttcttgctcctagaacaaaaggtttgatgaaatcat

SEQ ID NO: 356555 - DNA, 258 bp, Cannabis indica
tttttttagatgaaaatgcgtattatattaaataaaaagttcataatacaataagcatttaaagggggaggtatttcctccaattaagaacaagtagagtccaccgaaagagcatactaagctagcaaatgagcaagtcgtattcgaaatctacacacatgagaaatctgcagagaagttagacactaggtgtgaaatgtctatcaaaagacaatggaaatcagaaaccgagacggtaaatgttgggttttatgtcct

SEQ ID NO: 356556 - DNA, 633 bp, Cannabis indica
acataaaaatattgcataaaatacaattcaatataattcaatacaatacaatacgacctaatacggcgttccaaacgagccctagatgttggatttcttcaaccgatctaatccaatattgtaggctcaaccgaatcgaaccgatctaataaattcttggattggattagttccatctaatggatgaatctctaatacttttgatccaatatttattagaccggattggatctatccaatattaattagattgattggatccatccaatcaattccaagagtaaaacctgatttttcacctaaacggctaatatattagttcataatactacaacccaacataaatctaacctaatttatatatctacatctatatatctatatacagtcccaatttgggccagttataaataagaataacctctaaattataattagttatacattttctaagtcccgtattaacaaagtatacctctatataagaataattgcatcttaataaaatatatacatatattttgtaaatttatttacataaaattaataattttatttcaaattgtaacatatgtattacaattatatttactctaaaataattctattataatatagtattaataattattt

SEQ ID NO: 356557 - DNA, 829 bp, Cannabis indica
tttgaaatataaattcacggtcattgagtcacctttatacaatactgtacagggaaaagttttatttgatgaacgaatttcgagtgaaaattaatttctatgggaaataaattcttaagggcaaagtagtaatttgtgaaattattattttaattaattatgacaattatgaattgtgtaattaatagtatttaaatatttagttttgttggataaaactatattaattagttaaatataatattattcttaaataatatttagagagaaatatattattttaaagaaaataatatttattttaatccttgtgaaataagagattaatgagaattaatcaattattatttattgatagaataaataataaatcttatttatggtaaaattgagaaattaatttggaccttaaaatatggcccacacgtgtatgcccattctacatgtgtagggtgacatataaagacacatgattaatttagtttaataatatattaagtcaatataatttaaattaaattaagttaattagcctttaattattaattaaatacattattggataattattaaaataaaagatctattgatattttaatattcagttattatatatttatatttgaatttgaatttttattcaaattaaattagatatttatcttttattttaaataaaggattaaaagcttaaaatataacactatatatagatatatagtaggataaatagaacacaaaaaaagaatacaaaaaaatagagacagataacaaactgaaagacgagaaaatggactcttctccttctctcatgcacctctctctctct

SEQ ID NO: 356558 - DNA, 963 bp, Cannabis indica
ttgtagtgtgttaatgtttactttttctttgagttcttcttgataggatgcttaattgttttcttgcagaacttggagtgatggtcatccatgtcttccacctttttaagtttcaagccgcatctagtacaagcgagggttatcatatcattgttgtagactttctttgttatgagactggctatttgaaacttgtaagcgtcttctcgtatagttagtgcagggaataaattatcgtttccaagtttgttcttaattttctttttcttaatgttgttcaaacaattcagaaagagaagtatctatataatgtaggactatatataattaatataaaggataatcgaaaacttagaacaaacttgactatgagcatatatcatttataattatataaaactgcattgacaattcttgatagagacctatatataatttataacacaacactcacaaatatttctaaactatgtgggtttttttgttaaaaaaattctaatgtctcaaaccaccaaaaatttataaaataaataaaaaaaaatatgaaataaattttaaaaaagataatgtaaaataatattctcttaacatgctacatcatcttcccattattctcttttatatagatactagaagaaaattacgtgcaagacacgtatatttagttttatgttatgtgttctataatttaattaagaaagattcaataaataatcatataatttaaaatgatttaaaaactaattttaattagtgtgtgaggttatttgaaaatcaatagtgaaaagtcaaatttaaaatttgcagaaagagaagaggagaatggagattagcttgaaatatatttaaaaaataataatgctacacacttactatggacacttaactcgagccggtaataataaaattataaaaaataagggtagcaggcatataactggacatatgaaagaaagaatataa

SEQ ID NO: 356559 - DNA, 539 bp, Cannabis indica
tttatttagggcataaaaccctacaaaaagtcgccccgggttctgagcagtattcttcttaggctcttctttcttggcttggggacaatctctgataaagtggcccaccatgccacactggaaacatgccttggctcgacactcaccagggtgatgcttcttgcatttaggacactcgggatatgatcggaatgaggacccgcgaccctgacggccacctctgtttccccgaaactttctatttccccctgatgctccggaagcctcagccttccgcttgtgctcagggttgccactgtcggtccccttattgatattaccactagcaggaggatttgatgtcatgacggcatcctttgcagcctgctctttcattacttgctgctcggcctcctcagcaattaaggccaagtctaccactctcttatacagagtgtcatgtgatgtggtaattttcaagtcccgactgattgtagcattcagtcctcgaacatacttctgttttttggtgaaatctgtaggcactagatcaccagcaa

SEQ ID NO: 356560 - DNA, 1409 bp, Cannabis indica
gtaacaaacatgagaaagaagaaagcaacttacgatttaaagttagggctcggggcaatgcctagtaattccgtctgtaaaccttcgaacgaagcaaggatcactttgagaagatgaagtcgaaggaaactcgcaggaaaaaggtcaaggacaaggatggcatgcaagtcttcatacaaatttaatggtgatccttgacgaagaagtttaaggatttttctcgaactttctgaaatggtgcaaaggtggttctttttttcttattttatacccatgatagtggtttcgttagaagatttgatcctatggacatgattcaaaacgaaagtggagaagatggtcatttaattctaatgtacctcgaaactgcacaaccgccaaaatcagaggatatgcgtctttttaaaaaagaggaacatgacggaaataccctttgtaatcattagaaagctctttttaattaaaaagaactttttaaggggcaattgttatacctaaaattcagtgagcacatcagaggaagacacgtgttgagctgggaagaacgaagaactcaaacacgcaaactaaaagtacacttagcatggaacgacttgttggaaatataattcgcagggtatgtttataactcggctggctgaatagccttctgcgagacagaaacgtacgaactgctaacttacgtattgacgagataccatgtgggtacacgtgtgcatgacgaggcctcaacctcgctgcgtagaagagaaacgataacactaaaaaacttagcgtatattatacgatagacaaactgagtgtagatagtgtggcaagtcaagataacagacaatgaggtgtttatctcgctagaagaacgtatgcatgcgaggaagatcagcccgacattagaaaatatagttatcagagttaagacaatattaatctcgagaagtcaaatgacaagcaactgctcgccatcaaagttaacttggctccattctcggcgaggcatccctatgagataagacttaccgtatatctttaattacgcgtttatctcggcccaataaatgcgggatattcacagctgtgtaaaaacctcatttatttagcttgatttgtaatcaaatcccctgatttgagggaataattgttgtaacgattattgttaacttttgtaaattactgtccactatttaattataaatagtggcacacaagatcaagaaaggggacaaaacaactcatatgaaagaggccctaaagagaaaaatactcagaaatttgattaagattgactcgtggactatgcaaaattttaattgcaaaaccatgtaaaaaaatctggtgttcatatattatttttctatagtttttattcttcctatgtgtatttattactatgaggctcaaatttagttaac

SEQ ID NO: 356561 - DNA, 506 bp, Cannabis indica
atggctttcaggtcttgatacatcttcgttgaccctggatgaactgagtaaggagtcgtatgagactcattcatgatctctcttttaatactctcatccataggtacacaaacgcgattcctgaatcgcaacattcccgtttcatccactcaaaagtcactcgccttcctagccgaaaccctatcttgggtttttaccaactctggatcttgcatttgtgcttctttgattcgctcaaaaagagtggattgcagggtgatattaagcaactgtcctacaaccaactcaatcttagctcgggtcatttcatttgctagttgctgagagatttgtttcatagtattcatctgaatctgaccctttcttctcaaggcatcaacaaccacgttggctataccagggtgataaaggatttcacaatcataatccttcactaactctagccagaatctctgtctcatattcagatctctctgggtaaaaaagtattttagactcttatgatc

SEQ ID NO: 356562 - DNA, 751 bp, Cannabis indica
ccaataagtgaactagaatttaccaaataaattcttttacttattaattcctccttgcgccattatagatttgaaattgcactcttaatatatagaacgctctatgtgtgtcaagatatagatacgctatacataatccatcgttctaatcgaaatagtcaaagattctctatagatgatctacatcgaatagggataaatttatcggtctacccttcaatgtattttatccttaaaacacttagctacctgtaaatgatatttcagtaaactaatataattactgaaatgaggcctcaatcatttatctttattaagctaagctcaaaggaaatcatcgtttcacttctaaatacttatagaaactatagattccatatctatgatcagcgctcccccttaattgcactatcatgttcccaagatgcgagtattcgaccaactgagttttaacaaacggctataatacaattgagatcgaacctaaccatattaagattaagatctattgacctaagatcaactaactgatattgacttagatagatataacagtaagtttatgataacttatccaagttcaatatcggtccagtccgatgtatactccatacactcaatcctagcatactttgctaatgtccaaggtgtaagtaagctcttatcgctgattatcatgtcagtctaaatctagtgtactgacaaatcatgggacttaaactttaaaacatataatcacaattatattcca

SEQ ID NO: 356563 - DNA, 556 bp, Cannabis indica
tttctttaataagtaattattttattttaatatataattaacattaaatagataaaataaaaaatatttttattttaatttttttaaaataatatataaagattcttgtactcaactaaacattgtaatttaattaacacgaatatgattacaaattaccctacacagtcaaacacagtttacacatttctctataatcatattctcttttataatattttcgataatcaaattattttgaacacctcatgtcaaacgcccccttagagtatattttgatttcagtactacaatatatcaaatattattgtatataatataatatattcattcattgtacccaatatattaacaatatattaatatgtaatattaacgaatttatataatttcttgtatatattaacaatagatttcagtactacaatatatcaaatattcttgtatataatttaatttgagttttttttattttttacactttcaaaataaattttttttttagtcattttttacaaaatttctacatagattttcctattgcaactagcgctgc

SEQ ID NO: 356564 - DNA, 643 bp, Cannabis indica
tatttttaaattaaaatatatatgatattttatattaaaatgtattaataataatgtgttacgttttgttttagagtactattattggacattagtagctagtgcccaatactttttataagtagttaacaatatttgttaaaaattattttttaagttatgtaggacccaattacaccaatagcagtatgacaccgatgaaaatgttagctaccaatagtaatttttagcaattctttttgttttatagtgcttaataccttgaggtgtatgtttggtaggagagagatatgggtggatggagaggagaggggtggagggagagagatggaaggagagactaaatcacttgtttgataagagggagagatggagggagaggagagatagagggagacattttccctccaaacttttaaaatttaatccctccaaatttagaaagattgtaaaaaaagacaaaatatattttacaaaatacaataactattcttaaaaaacaaataaaatttactctatctttcccagctcacacctaataccaaacaatacaaaaatattaacaatcctctccatctctcttactcctcatcctctctaacctctccatccatcctactctccctccctcccaccaaacata

SEQ ID NO: 356565 - DNA, 689 bp, Cannabis indica
ataattataattgttatattttaggagaaaattttaacaagtcgtatattttaacgaacaaaattagatagaactaaaagtttagagagtaaaaatacaaattattttaataattttgtttcctaaactataatatttataggattttgccacataaattagttaaaaaatatgtaacgtagtattttagtttgtgatcacatcaataaactatcattaaaaatgagtgaaatatgacaaaaaggaaaatttgaaattatttccatacctaggagaattgttttatgaaaaaatatttcataattcagagggaaatattctatttatttttaaatcaatactttggattatagttcttttaacataattttacatatttggaaataaatcctatcatataaaacacttatttaaaataaaagaataaatccattaagtaaatagaaaatagtaataataaaataagatcattcatcaatttataatatataaaacaataaaatacctacaattttggacgtagctagttctcaaatagttagctttaataagttgaaaaatattaaactagaacttaacatctatcatatacctcattcctaactattactagggccggtcctgaaatttagtgggtcataagggaaaaaaatatttttgagccctcatttagaaaaaaatgtagcatt

SEQ ID NO: 356566 - DNA, 647 bp, Cannabis indica
tgactcgcgtttatccttcctctttctaattagccagagaatttttctattatcttatgcgactcagccatagcgaagaattctaccagtaattctggtcttcgagcttgtagctctttccagaagtcagttcttagcaagacacctgtaatcataatacaaactaacgaagactcggggtaccttctcgactttagttactttagcattaaaacgtttaatataattctgcaatgactcaccgacctcctgcttgatgttagctaaagttgtgtaaggcggtttatatgtcatcgtggcttggatatgtgttaggaacaaatccacaaaggtttcccaagtcgatatggacgcttctggcaactggttaaaccaatcgtgagcattgtcctcccaggttactgtaaggatgcgacattttgctaactgaggtacctggtctacttccataattatattaaacttttctaagtagtctatgggattagtagtacctttatatttttaggaactcggataataacgtcttggaaaatcgagcttgtcgcacctctgtagtgaagggagaagtcctgtgaagcttgtaaatgggctttctctactgctcgattatttttaatgctcgcagtaaaatgctctgatcaaca

SEQ ID NO: 356567 - DNA, 654 bp, Cannabis indica
ataattcaaacctaaacctagatagattcctataaatagatagtgatggtctcaaattgaaagatgatgcactcaagcctttcagtcaaaatttgagcattcagtcttctctctcatattcgaatccttctctctctttctctcttcaatttcgaaccttatagtgatagagtacatgcccacacatagcaagttggtactcaatcatagtgtataagactgtgaagaattcattcaagtgaaggagaattgggctcagatcttggtgatattattttcttataggtcgagttggtttatttttcagcttccttacacgtgtcgtaaccatattacttcgtcaaaatatgggtataacagtcgttgtggtacgatattatgaatagtaataaaaaaaaacttcaacaaactaataataataatagtaacttgcgacgtaaatacttaagtttaaatctcggttgcagataaatacttaattttaatttttgacggtaataataattaagttatatttcttaaaatttccgtaggtatttgaccattaaatgtcaagttattatccacgcgttattttcttattggtatatttaaatgatttttttttttaaaaaaaagacttaatgatgtggaccaatcagagattttcacgtg

SEQ ID NO: 356568 - DNA, 972 bp, Cannabis indica
atgtggacgacgggttggctacagatcaactatctgctgcaggaaccgcccttgtcgcacctagggggcaacacctgcacggtgtagttaagtttggattcaaggcatccaataacgaagtcgaatatgaagctttgatcgctagcctaaaattagcctgggagatgaatgtcgcacacatcaaaatctatagtgattcacaactgctgctaaatcacgtatctggagaatatgaggctcggggagaaaagatgatgacatatctgagcaaaatacatgacctgctcgcacaattcaaaagctacggttttagacaaattccaagggaagaaaacacgactgcagacgcgttagctcgattggcaagcagtaatgtgagtgataaagcgaacttggttcctatccagttcctcgaagagcctagcattactggcatagaagagattgaaatgattgacacttccccaaactggatgacgccaatagcagcctaccttaacactggggaactcccagataatcgaaatgaagctcgaaagatgagaaggaaggctgcaatgtatatcatattagagggaattatgtagagacgagggttctccatgccattgctcagatgtgttactcaagaagaagctggaggactcttatctgaagtgcacgatggattttgtggaaatcatgccgtcgggctgagcctatctaagaaaattctaaggcaaggttatttctggccgacaatgattgaagattcaaaggcttatgttaaaaaatatgacaaatgccagagatttttgaagatacctcgagctccgcccaacgagttaactcagatgcagagtccatggccttttgcaatttggggaattgacctgatcagacaattcccaaaggcaaaggaagagtgcagtatgcagtggttgcggtggattacttcactaagtggacggaagctgaaccacttgcaaccat

SEQ ID NO: 356569 - DNA, 489 bp, Cannabis indica
gcctctaaaggggatttttgtagtagtgttggtggaagtcaagttctaataattaatcacgtagtgcgagttaactgtcttgaaaaagactttgtaagcatgaacacgatggtggattaggatttcgattgtcacttaggagattttagtttatctatgttgggtaagcaagcttagcaattggtgtctaacaaatcatacaaaaacaaattcatcaaattaatacaacccaaaaccaaactttcttttttaaactaacaacataaaagagtctagggctttaccttagtcttcctttcaatccttcctcaaaaacaagctaaaacccttattgaattgctaaagtttgctctaaaaatctgcttggttccctgattcctactaggccgagaagaagagaggcaaagggaggagagaggaacttaatttttgagtcgattcttaaattaaaaatttcatcttactccactaaggataataaaataaaaa

SEQ ID NO: 356570 - DNA, 660 bp, Cannabis indica
ttccactattttctaccaaaataggctacaatcactccaaaagactctaaatgcatttttactcttcaaaatagcctaataaatcataattacactaattaataatttaaagaattaatataagaatattattacataaattagctatatttataagacaaaatatcaacttatcacacaacgataatgaatctatgtctacttcgagtttttatttctcacaagaattataagaaaactggctaagtgtagggctcttgtaatatcccgaaaattttattgatatttatttggccatattttattaaatatgtagttatgtggatattagagtaagattataatcttacttaagctaattacgagttaattagtggaattttagtaaatgaataaataaagcgtaattgattaattacggagattttattggaatatgtgggtatcatagataccataatttgaataaaatattttcgggcttggcaactgtggaacttgacggagtggtcaaaaatgttacgacaattaagttatattgaactgggtttataccggatgaggttaaaatgttgaatagtggattatatcgggaaagttagaaatgactaaaataaccctaggttttattttttacttaagtgtatggtggaaggccaa

SEQ ID NO: 356571 - DNA, 980 bp, Cannabis indica
ttgctaatcaattttaagttaacgtaaattaacttaacttcttatatatattaagttataagtgaaacagaacagaacaaacgaatgaaaccctcgttctccctctttcgataaaaccttctcctcctatatctattttcttcgaatttcaatccaaaacttagcgatctaagctccggtagtagcaggatagcaaatccttgaaaagggaaagcttaaggtatggtttaatttcgttttaagtttaaaaacgattggttttatataggggctttatgatttaaaaaggttatggagattctgacttcgtagaattgttctttggtaactatgggactagtttatatgtttacttgttgaatttgaggtgatttttgagttagaaatcgagtttggaactttttaaagcttagtccgaacgttaatggcgtttttcatttaaggggtcgatttttatttctgttacgtaaggatggtagtatttatggcatacatgcaccctgtgaagtttggagtgatttggataagttttggtagtgtttcggtgagtgcgaaaattgaaattttcgtatttcacagtttatagaaattcctaagagatcagaaatcgtatttttgtcataacttttgactcaggtgtccgttttggacattctatataccgtttcgaagcttgcgacgagctctacaatatggtgtatgttttagagccaaaatataagttttattttagtgtatttatactgcggggtttggtagaaaaccctcgattgtcttatgtgaatataagcagtgttttgggataaacacttattggtttatcgttgttgtgacatagggccgagatcatcggggatagttctccacttgggttggccgaaatgtatgaacctggattaaaggtaagaaaagtatattgtactgtatagtacattgtatgtaatacaattagtattgttatgaattgattaatattgaga

SEQ ID NO: 356572 - DNA, 761 bp, Cannabis indica
ttttttgtatttacattaaattgtttcacatttaatgcttagaagttataattttaaagcgaaggaaaatctatttttttattagaaaataattggtttgattactggttaaattatgagaatcaatataaacataaatattttatatacacttaagtggattctgaacccttaataatatccccaaatacctctgaaaatatttgttactgtcatttttatcgtttaaacactttattttattttgttacaaaaaacctcaccattttcggaactaggttagagttttattagcttagattaaattagtattttcttcgatttcacgcaattcccatgggttcgacctcgttcttcacaatctccatactacaataaagattcgtgcgcttgcgagttgataaatgtaaaacgtaccatttcggcatttaacaatgcttccattagcctcctactattggggcattcttagagccttgggattggctcccttctagctatgttctaatagctatcggatcctggtggggcttaagtgttggaatatattttaccaggatctagatttactaacaagtatgttttttaacatcctaatatgaatttctaaaacgatgaaaataaacacataggtatgagaaaccttacagtggttgcagcgaaatataatgtctccttccgctcagaccccaaacccttgtatcctttctgtagcagagtatcatcaagatctgagcacgattcttcttcttgttgattgg

SEQ ID NO: 356573 - DNA, 877 bp, Cannabis indica
gtaatgggttttatttagggcacaaaacccaacaaagtcatgcattagaccaccaggagtggatgctaacaactttgaaattaagcctgtcatacttcaaatgttgcagtcttcagtccagtttggtggactcccttctgaaaaccccaatctgcatctatcaaacttcatggagttatgtcagactttcaaagtcaacggggttactgatgaggccatccgtttgagactgtttccattctcacttagagaaagagccaagagctagttaatctccttgccaccaaattctatagctacatggaatgacttggctactaaatttctttctaagttctttcctccagcaaagtctgctaagctccgaggagaaatgaacaatttttgtcagcaagagaatgagtctctccatgagtcttgagagaggttcaaggatctaatcagaaagtgccctcatcatggtattgagaagtggatgctggttcacaaattttataacgggcgggtgggtaacactagaactcttattgatgctgcagctggtagagcatttatgaggaagagtgcgaatgaggcttatgatttgttggaggagatggccctgaataatcagcaattgccaactgaaagaagccaaacaaagaaggtagctggtatgctagaggtggatgccattacaaagttgacagcccaggtagaggccctaataaaactgatggctgtgcaagccaaacaagctcaagtggtctgtgagctatgtggaggtcctcatcgcttttctgagtgccaggaagatgtgaataatttgccaatggatcaagcaaaagccattgggaactactattaaaacaataattatgggcacaaccaacaaggg

SEQ ID NO: 356574 - DNA, 1103 bp, Cannabis indica
tgtatttcattatgttggaaaccttgaaaaacaataaatatatttagtttttggtatttttacaaacatatttgctttacttgttattttctgaacttgtgtatgaatttattgaaccaataatttatttctgtttattgatatttgtagtgtcaaaatgtgaaacccacaccccaatcctcatctagaatatgcctttaggaatgaacttcaaagtgtgaagatgactcctggtcagagtatcacttcacacttgctcatgatgaacatgaaattccagaaagcagctatgctgggaattgtttgatctggagaccaaagagttcattttattctcaacagcttatcagtagaatttaaccaatttgtgattaccaattagaactcgtctgacatagacaagctggacgctgaattgcgtgcttatgaacggacattgttacttgcatggagatccttctccagtaatgcagataagggcaaaaggaaagctgaagatattgagaataattcctttgacaatcctactacttcaggcttagttgagaataatagagaaagtgattccacttcctcagattatctttcacaatagattgaaccagcaataagaacaatccacaaacagttaaggagtgataccaatgctttagtttttgaatcatgtgttttagagactgacaaatccatctggattcttgattctggatctactaaccatgtctgttgttcattgcaattgcttgaaaactggaattatttaaaatccagagagttgaaacttaaatgtaacaccctaactagcataggcgtgttgacgtgattttaaacgtattgtgcagctcgttgctaatcaacgaggttaatgaaaatcgtgattaattaaaattttgctatttaattaaaacttgtaatattacatacaaaatgtttcgggatcccgtttgcgaaatactttacaaaagtttactattcaatacaaagtatttgtcgcctaccgactaactacaaaagcactgttgtcccaaggatcgtacgctccaggcctaaccgccccgaaatgtacaatcttcattggctcgtcctcacggttcctcagcttt

SEQ ID NO: 356575 - DNA, 508 bp, Cannabis indica
gtatggattgtaagggagatgttaacaaatccgagtttgttcaggaatcaaaccatattattgactcatgcttccatggtgttaaaagagattactgaaaaatctattgaagatgtcattttgagttgtatgtggggtgatgacaatgctttagcatgttgtcttgtattttgtgcactatttttttcttagtaacacaaaggagaaagagattagtagggatgaaattgatattattaacagtggtagatgggacgagtactgttggggtagagagtcttttaagttgacattgcgctcttttaagggtaatgttgctcacaatgttaagaaaaagaatgaacatgtagatgtaaatacttattacaaggttggtactactacaaaattggcttttcccaacagtttataactgtcatttatactatttcccaacggttcctaaaaccgttggttatgtgggtgtcgataaaaaagccggaactttaaaagacagtttataactgtt

SEQ ID NO: 356576 - DNA, 722 bp, Cannabis indica
aaataaataaatttaagggtgcgtctgaaaagatattgtaattgaatttatgtgtaattgactgtaaacgatataactgttacttctgacagttagtttagttagttacaattagttatgcaagtagtttgttctgttattttccttctgtattgtacttcataacagtataaataaatggtctcatgctaaccactttggttaagcttttcttggtaatctgttgtgttcaaaggctatgccaattgctctgctgtacactctgtattttctttcatattcaccactgttaaaccttacatggtatcaaccgccattgactagcgtcactaatggcctccactgcaaatgattctggtattcccactgatccaacaccacccgctgtcgcaactcaagctcctgctcctacgaattggaatcctttctccaattccctgactgcttctctcaccgttcgccttgatcgcacgaactttcttgcatggaaatcacaggtggttcccacagtcattggtcatgacctcgatgacatcctcttcaccggcgttcctccccctgaactttctgtttctggcgctcaaacccccaatttctcatctggaaaaaacgtgatcagcttcttctctcatggctccgttcatcaatgactgaaggagtcctgcctcagtccgccaactacacctagtcgtactctgtatggaaagcattggaacagtaaa

SEQ ID NO: 356577 - DNA, 541 bp, Cannabis indica
tagaataacccattaagagtatagcagaacctagggttttggttttgggtttcccgggattagggttttaatcatgtgacttacccggtttcaatatgtgattagggcatccatctagcacgagaattccgttcaggtcggccagcacacttgaattcggaaaacaggtaagaactgtgtataatgtatgatgtgattatctgaatgtgtgtatatgtgtttgtatatgcatgcttaaattatgttttgcactaccaacacttgtatgaataagttacagagtgcattggtatagtgattattgtcattgtgagtacgatacagtgataccaacacgggcacgggaaaatgctaaggtgtgtggtacatcactcagtgttactcagtgttcggggtaaaccctaccaacactcgtatagtgaggtacgatgtgtatgtggtatagtggttgtaccctagtgttgaacgttcatactcatctgttaagctctgtaaataggtgtatgggcgcctatttacaggtcggaaattatatgatatg

SEQ ID NO: 356578 - DNA, 851 bp, Cannabis indica
ttataatatgtgtggatttgattccaatccgcacaagtgccgatatccgcactttgcggattggattggatcgtgcagattggattggatcagctgttttatgaacacccctagtagcagccgacttagctcaggaataagcgtatgccatcttcaaactagtctgtgtggaaaaagggattaaaatccgaactagtcaaagaggaatgaaagaaaaatgttagaaaagacttacctatgaaagctctttcaagactcctcccgtaactagttccaaagacaagtcattatccgccccagccaattgttcgttcacctctgggaccgaccagctcacatagtggttgagcatgtctctgcctcttttggtctctgtgtgcaataccaaaggtggagcgggagccttaacttgttcgaacctgcttctgatcagctcggatccacctttcacctgcttaggttcgttcaaaatccctcctcgggagcctttagacttagtaactttcgaggcaggagggtccacaacggtttgttctttagaaaggtcaatgaccacttcagctagtaccttctctttaaacggagtctcactgcctttggactttttggctggaggggacaagcccaagctgttggaaatatattttaccaggatcttagatctactcacaagtatgttgatttaacaacctaatattgaacttctaaaacgatgaactaaacacataaaagttaagaataacttacagtgatggcagcggaattaaatgtctccttccactcatatctctaacccttgattcctgtctgtagcaaagtataatcaagatctgagcccgaaagttcttcag

SEQ ID NO: 356579 - DNA, 1243 bp, Cannabis indica
tctaccatttattctatgtgggataatgtccacaacattctctctcaagatgatgactatttttgctcatcaatcttgaaccgtatcagagtggacatggtcactatctgtataggtgcggatcggataggattgcttgcccgcaagggatatggctctgataccatgttgagaatcatggggttccatctcaaaatcaattggcaatgagtggagtagcccatgttcttatatatggcttaattctctactatttattctatgtgggacaatgtccacaacatgcagattggattggataaaaaaaataaaatccgcagttagtgcgaatcgaatgcactatgagcaaaatagtgcggattgaattgaatggtcatccctattaattatatattataattctactggtagaaattatgttgttttttatgtttatgccacataaataaactctaaattttttaaatagcattatacatgatatcaaatcaaatactaacaaaatactaaaaaaaaaatatcatataaattggttaaacttgaaacaagttaggaaatttacttggtaaatttcaaatctacttattaggagcttaattacataggatcatggtccctacactaagataatattattttgtagtcttaattaattagttttaattaattaattagaattctaaataagattgtgtattgtttgtgaatttccaccaagaaatggcacaattgagaaaaaaagagaattcaaggtttctttatttattaagagatcttggaaggtttagctaataaatatatttaaatagtaattttatttaataattatttataattattaaataaataaaattagtatttaactaaatagagcagaaaaatagcactgctgaaaaaagacaagtttgtttcattaaggaaacaaaataatggcaaaattctaactcatgggctttgttgcccctaatttttcccaatatacgtggaccaatcagacagggacacgtggatcaagcaattcacaatattcgctaagtctttgtgccataaggtaacgtcccggacgtaggtcccggagaaggcatatggaagtcaatatgctcccggaagctcatataacgctaaggcgtctccgcgaggtgtcaggtttctcctgagcaatcaagtcgcattaaatgccgcatgggaggaagcatgttgggactgctacacgcaataaagtctgacggcacaacctccaacc

SEQ ID NO: 356580 - DNA, 542 bp, Cannabis indica
ttttaaaattgaaaataaaaatgaactttacatactaccattcaatataattgaaaaatggtatttgtgagtattttaatttatttctttagaaactgtaattaaatacaacgatttgcagtaataggtttaaatcttgttacagcagaacatatatttgtagtatttaaacagaatcataaataaattgtacagaatttaaaacttgacacaagaaaattatgcatggtattatagtgttctttcacacactactagtccacgaggtcacgtttagagaatgaaatctgttgcccctgatttcgcccaatatacgtggatcaaccggacagggacacgtggatcagacaatttataaatatttgctaattctttctatgccacaaggaaacatcctggacataggtcccgtaggaggcacccggagttcaaggtgctcccggaggctcacatagcactaaagcatctccatggggtgtcaggcttctcctgagcaatcaagtcgcattaaatgctgcatgggaggaagcgtgttgagactg

SEQ ID NO: 356581 - DNA, 511 bp, Cannabis indica
tctctctctctctctttctcttccatatttcttcctttatagtgataaagtacatgcccacacatagcaagttgataatcaatcatagtgtgtaggattgtgaagaatccaatcaactgaaggagaattgagatcagatcttggtgatactctacaagagaaaggaacaaggtttagagatcttagtggaatgagtaatttaattccactgcaaccaatgtaaggttacttgaactttatatgtgtttaaattccattattttagaaattcatatttaggatgttaaacaacatacatggtagtaaatatagatcctcgtaaaataatctccaacaacaagctcaaaatgacctttgaaaacaaaaaccaatgtagcgtccccgcttcaagcctccattgggctcttacacccacaaactaatgactcttatacacgggtacgtcaatttggctacttcctggactgatgactgaccctacagaccaacacgagtgtttccagcatgcttt

SEQ ID NO: 356582 - DNA, 431 bp, Cannabis indica
catataaagtttagagaaccttacattgatggcagcagaataatatgactccttccactcagatctctaacccttgtttctttttgttgtagactaataacaagatttgaccctggatctccttctctcctacgatttggttgaccaccatctttcgcactatgattgagtacttgactttctatgtgtgggtactctatcactaaaggcttgaaaattgatgaagaacaacaagaaggtttcaaatcactatgaaaggagtctctcatctactagttgtctgacagaattagaaaagtaggtttagtttagttgaaggttgaactggatgagaatgagagcatcatgttctatttatagtatttcaactagggtttaggatttaattatatgaagtaaaaaacaataaaataataggcaaaaatacacta

SEQ ID NO: 356583 - DNA, 661 bp, Cannabis indica
taacagaatattcttttatttttaaaggtatattctgttaaaccaagaaatgccgttaaataagcacttttaatatataaagatacttcaaatgaattatttatctataagaaaatgaaaggaaaaacattaatatttgaaggtttctagataatttacggatgcaatgttggagaacaaactaacgttatttgtgaagagatttatatatttttatataatctagttgctataattttagatgaggtttgtatatataaatatgaaaattaatcaagtgatggaaatcctacacataacactataattaaagtggtaacattttataagacctatttgaaactaagtggctgttttttttttttgttctgaagagagagaacacaaagagtgttatgtagtaatagtcgttatcacatgaacttgaatatgtgtggagtgtatattagtgcaagagaaatgcgtcatccacgcgttaaaccctaaactttaaccctggtcatgatagagataaaatataacatttataaaaggatcaaactaattatattttaataggatattgacgactaaatcatttaaattttaaattttttgacacttaaccacaaaaattaattttttgagagcaaaaatacctaaactcgcattccattttgct

SEQ ID NO: 356584 - DNA, 915 bp, Cannabis indica
ttttggacccttatttataaaaaaatgtggtatttttcaaaattagtaaaaaaatttgtataatttcagaagggaaatattttttttggggcccctaggcacaggcctagcccgcctatgcccagggtcaggcctggttaaacgtaaaccctaaaccctaaaatatataacacagtaaacacaactaactaagtaaattacaacctatgtaaattacaactaaccaataaatcacaactaatgacaatcaataatcataaaaaaagtttaaataatggtacatgagtctctgtcttgggcaaaggatcattttcaacatattatgctattttttctgcttatcttctaaaaacggttggatcttgggtgtcctcctcagcctgtgcagcatccacccactctcaaccaggttctccacaccatcataagagattgtcctcacatattcctcattttctgtgcgtagaagtaaccccttcaccacttcaagatgttgtttaagattcaaaaaataaaagagaaaaatgatgtagcatttatcacaagcatttatcttaaataattactctaaacataagagaaactcatacccgtctagaaaataatgcactaaggtccttcttcactatatcacccttgctcgtccaactaagcatcctgggaaactgtatcccatgattcgtgccatacctcttcccaacctctaaaatggctttttagcccaatattgtactgcaggtgtgaagccataagctgtgtatttgcagtcatgctgaacttctaaactcaacttcttctcttagttggccttctgtttcaacatgtccttttggagcgagtgcataagtctggtgaatgagtgcttcccacaaggaattcgaaagaagaactcgagatctttgacatatctaagta

SEQ ID NO: 356585 - DNA, 1134 bp, Cannabis indica
cttcaaaaaaattaagaccgtacttccaaactcaccccatacgagtttactgttggttttatggtactaaatttggtacgcaactgaataaaaggtttctgattatcatcgtacaatatcctcaggatcaccatatgtatatgtattatatctgaaagtaaatagacaaaaatatgattttcccctcgaagcctatcagggtattcttgagtctttttgtatgttgtatccttaattgatctcgatttacccacactatagtcttccagatcttccaccacacacaaggactagtgtggattagtacaaaaaagtgtatacaaaattcttagtcaattctcaacacatgagcaagaactattttatagtgataatagagagaaaatattaattatattaattctttttaggcttacaaaaagtaatgcgtatatatttttagtttataaggtatatttaaaataaaatcaataaaaattttattgaattaaatgtttaaattcaaattatttattaaatcatatttaattatttgaattaagaaatataatcgaattctattatagatattttttttaataaccgattaagggaatctcttaactaccttgagagaatatctcaaccatcagaaatatatataattacttttcaaattcaaatttaaatatcttttaaattaattaacctgttaggctatttttagcctaagttttgggtcacattttatagttgtttttcttctttattattatttttggaatagaattacgcttgttttctttgatttcaggtttctacacttggaatgtataaattggacaaatttcggaaaacagtgatctataaaatagagaaaattttgaaagagaataaagctgaaacttcaagcctaaattcgactatgttctgatcatattttggaaaaagtcaaaacataaaagttttagatctctttcttatctttccaacgcatcttgaatcagctcatttggagttcggatgagaaagttatgctcattttactaaaacagatcgaagcagaaaattccatctcgccgcggcgagatttccatggccgcggctagaaagtctgggcagaaacgtagttttttgatgcacttttggccgcgg

SEQ ID NO: 356586 - DNA, 536 bp, Cannabis indica
tttttttttcgcatttttacggaatttgacatagaaattcctatagcaactaacggagcaacctgaatcgcaactaaaatccgtataacaacttacatagaaatcactagaaaaactactagagcaatccaaacagtaaatttgaaaaaaaaaattcaaaaaaataatatatagagtaattaagagtgagaaagagaaagaacattgttctttcttttctcgagtttcttggttcatataaataaaaagataaaaataaaatgtaattattatgaggaatgtgaaagacactctgtgtaatatttttcttggtgcaatttaatatcatattctacttatttaaatttaataaaagttatagagaactgttaaccaattataaatagaggtgctagataatttgatgccccataataatgctcagagaattgttataggacactagtggtacctagcgccctcctacgtgtcaatatcgttattggtctaactgagtatcgagtctcatatattttagtgtaataacttttagtgag

SEQ ID NO: 356587 - DNA, 709 bp, Cannabis indica
cgagatcatagccactctcccgttaggtctaggtggcaggccgggaatatgttgtgcatctctgggggaacagctggagccaatactcctgctgcaccccctggtgccactcgcggcaaagttccagccacctgacctgggttgaggtgaggcaaccgattcttgatccactcgtagaggtgtcccaatcggattaagttttcgatctcgtctttgagatttttgcattcattggtattgtgcgcaatgtcgttatggtactcgcatctcttgttggggtccatccgagagctgtctttgtacaaaggaggtggtctccggtagtgcgtattttgcctagtagcaaagtacatacgttcttgggagtctgttagctccgtgtactgcgtatattggggagtatacccccttttctgttgcttttcctccgtgcgggtgttgcctttagaggaccttttactctttgagccctgggaaggacctgctggactggctgttggagcggagtgcgagggggcttgtccatttatccctgagggatttccaaaatgggacgatgcaagggccagggcctggccttggctatattcgggagtggtagaaaactgtatgccgctcatcggtggagctgctgctggcacagtgccggagagctgggctatgggcacatatcctgctaccccggtgggataatatcctccgtaggcca

SEQ ID NO: 356588 - DNA, 502 bp, Cannabis indica
tatatattattgatttaatatacatttaacacatgagattaacgaaaaaaactttaaatctaaaatattaattctcatctttgtaaacgctaataaaattatcaatgcgtattgaataaattttattttttagcggttttattataagattatgagaattaggttggagtaaactaatatttattatatatgttggattattataagttttaaattatgtttcaatatattttaatgaaattaacttaaatggtagctaaaatatagattggatggatccaattcaattcaataaaaaaaccattcaatgcattcaatggttgaaaacgatccaatccaataaatccattggatcagatcgaatcggaggactcaatttgattgctgtaacgtccccgcttcaagcctccattgggtccttacgcccacggattcatggctcttatatacgagtacgccactctaactgcttcatggaatgacgactgaccctacagaccaa

SEQ ID NO: 356589 - DNA, 595 bp, Cannabis indica
aattaattaagaaattaatttttaacatgaatataatttatttaattaattaagtttcatgaaaaatatctactatttaagtgtcttaactatttagataccaaaaatatctaataattaataaatttagaaaaataccaaaaagtcaccttagaaaataactatctagatttttcataaactaactgttgatagtataatatatttagtctatttattttatttattaacgagaaattagttgatttaagttgatctaaaattaattaataaattaattttcaacattaatctaatttttaaaattaaaaattttaaacaatctatataacgccccgatttcccgagacatcacacttactaatccgtttaaaactatttataataaaaacaataaacaaatttattgaaaataactaaaacatgagatcacattattttaaaacaaaaacacttgattcatttataaatttttaaacattaacttttacaaaagtgatcgagccataatctttaaagatatattctcaaaccaaaacatcgtgacaataccctaacatataatccatgactcgagctcgccaccctcactgta

SEQ ID NO: 356590 - DNA, 946 bp, Cannabis indica
agtgttgacatccacggtggattgagactgttgagcatggttaatttgttgagtgagttgtgaaatcatttcttgcagcgaggcaagcttgtccgaaacggagtgagaagcggaagcttggttggcagccgaccctttgacttgggaaccccgatctaaagaggagtgctgtgaagattcaaacttgcgcttgtcaaaataaccaggaggaaaaccatggagaacatagcatttctcctttaagtggcccgatttttggcagtgagtacaaaaaggtcgcattttcttattgcgaggtggatttgatgaatgagatgaagtggcagcaacaaggttcggaaggagacgaagtttcctttgtcgctcatgctgaatgatggtggagaacaccttcgaaagagaagggaagggctcggtgatgagtatttggtcacgaaccgcctggtatgactcatttagaccagtaagaaattgaaggaccttctcttaattctgaaattttatgttatcggcagacgcttgacaagtgcatggaagacaaggtcggagctcatttatctcatcccatatagcccaaagcttggtgaaatatgcagtgatggattcatcaccttggcgtaaacctgtaagagattcttgaagctcaaaaagaccaggtccatttccttgactaaaacggttagtaagctcattccacatctcatgagcagtattaagaaacattatactgctcttaatatccaaagaaacacaatgaataatccaagacattaccatttggttgcagcgagtccaagaatgaaatagatgactagtaggatcgggttgagagagtgtaacatcaatgaaaccggttttgctaagtgaaagtcccgacgccattgctgaaagttatggtcggacagaggaggtgtcacaagaatcaacccgggatggtcaccggagc

SEQ ID NO: 356591 - DNA, 798 bp, Cannabis indica
taaaaggtctttattccttttgtttttaacttgtacaatactttccgaatttccctcatttttatttattttgaagagaaattttgatgacagtttccatgtactttggagtgcccaacctttaatttatacatagaatttcttgaggtaccttgcattccagcttctcgtgatgtcggctccgtccatggtggatagcatgtacgccccttttctcgtcgggttaaccactcggtacggtccttcccagttggtggataattttcccgctcgggtttcttcggtgttttgaaaaactttccgcaggaccagttctcccgggaggaaattcctctgccttacttttttattgtattattttgccacggcggagcagtaattctgcattcgggttagggcgcgctcccttctttcttcgatatcgtcgacagcttgtagtcttagggaagtattgtcttcatcacttaattctgaccgcaaagtaggtacttgcgtttccgtcgggataaccgcctccatcccgtatataagtgagaacggggtctcccccgtactagtccgtggcgtggttcggttggcccagagcacaccgggcaattcttgggcccatcttcccttagcactttcaagtcactttttgatattgcatatgatgactttgtttgacgactccgcctgcccattgctctgtggataacggggcgtggagaatatgagtttgattctccatcgttcgcagaaacttctaaatttgttgctgatgaactgggagccattatccgctacaatttctcgggg

SEQ ID NO: 356592 - DNA, 493 bp, Cannabis indica
catgtaattattaattattttgccaaacaagatactaggaattcatatgtaattaccacctcatatccaaacacaccttgcgttttaaaatatagtgtaattactaaactgtgtaattactaccctagtaattaccctacctaataattacacagttacttccaaacacacccttagtattttcatttaattaatatgatatattatttcttactattataaaagtgtggtgtttgtgtgataattttcatgacaataatgcccttatattttatatgttatactcacttatttatactcttgtatcttttcttatgtacaattgtcaatataattggtcagtcaactattatttacttttttatatatatttagctggatttacttttatattttaacgttatttatcttatttatttttttcacttatttccttttataaaaataaaaaaaaataatatattattatacatagtattagttatagtgttgg

SEQ ID NO: 356593 - DNA, 713 bp, Cannabis indica
cctagttcggttctagttccatttgagattctgagttcgagttttggtttgtgtccggatttaagtctaggtccagatcaggcttcggttgtgggttcgcgtcctgggtcttgctctaagttgggtccgagtcccaagttccaatcccgatctgagtctggattcagttccgggtctaagtccttcgttctgatcctggtctgggttcgagttgggtccgggtccgggtctagctttgggtctgattctagatgtgggtttgagtttgggtctgagtctgtgtccgggtttgtgtccaggtctggaccccgatctgggtctaggtttgggtcgaggtccaagttggggtcctcagtgcaggtccaagttttggtctgtgtcaagatctcggtccagaactaggtcaagcatttcgatcccactcttggtcttggtcttggtccaagtctgtgtttgggattgggtcccaattttagatcaaggtccaggtctcagttccggtctgggtacacgaccttgtctgggcccaagttccaatcttagtttggttctgaggctaggtctatgttgggttcaaggtctgggtccaagtccttgtcacggtcctagtctctttctagggtacttgttcgccgattcttgttcaggttctaattaatggtcccaagtctaggtctgggttcgtgtttaattcatcgtctgggttctggtcc

SEQ ID NO: 356594 - DNA, 606 bp, Cannabis indica
tcgcttatcaaaaagactcattgtcgttggctaaaagcgaagtcaacattttggtgctttcattgagagaagaatcacagatcgctcttttgacacgatagtgcaaacttgtagaggcttgtccgacccatcaaactcagagacgctggatccgatgttgtaggagccagggagttcgaggattccacccgctgttactgaaattgcgcttggtgtgcaagagaccggaaacaatggttccgcacacagccaggacgttcttaacatgactgttccgccaggcatcaacgcccagacgaccatcggagatgcaaccgaattagaaaacctccgcgctgtgcttggactcatgcagggtcacaacaataccctgcatcacgattaggaggaattacgtgccgcaataaacctcgcgtttgacgaacataggcgtatgttcgccgagtggagggacaaagagatggaggcattaagggcttaacatgcagagatcaaagatcatagttggcaagccactgtgctaatacgaagagcctatcagattgtaggccagcaagcgcagagcgtcatcccccttggagaaaccgaggatgacccaacggtgaa

SEQ ID NO: 356595 - DNA, 550 bp, Cannabis indica
ctcagttccggtctgggtacacgaccctgtctgggcccaagttccaatctcagtttggttctgaggctaggtctgtgttcggttctaggtctgggtccgggtcctggtcacggtcctagtctctttctagggtcctggttcggcgattcttgttcaggttctaatttttggtcccaagtctaggtctgggttcgggtttggttcatcgtctgggttctggtcctagtctgagtcccagatctagacaccgactactggtctattccaggccccgttttccgaatccctggtcccgtttttgagtttgggttcaggatcgagactggggtgcggttttaggtcctgaccctggtcctgtgtacctagtctggttccatgtttgggtctgagtttaggttcgggttcaggtcctgagtataggtttgggttgggatccgggtccggctcccaattcgggtctacgtttgatttggagtccgggtcctggtctggttacggttttggatctaggtccaatttcagttatgattcaaagtccaagtcctagttc

SEQ ID NO: 356596 - DNA, 975 bp, Cannabis indica
aaccattacatcaaagaaagttcaagactttattgtgaagaacataatatgccagttcagactactgtacaaaatagtctcagattatggcaagcagtttgacagtcaatcctttactgatttctgtgtgaaccatggtatcatcaaaagtttctccgcagtggcgcatcctcaggcaaacggtcaagttgaagcagtcaacaaaaccttgaaggatacactgaagaaaaaacttgaagattgcaaaggaaactggccagatgagcttcctgaagttctatggtcatactgtacaactgaaaaaatggcaactggacagacaccattcgcaatggcgtacggttatgaagctatgctgcctgtcgaacttgagccaccttcccacagaagattgacgtacgatcaaggtaccaatcacatactcctagcagaatcacttgatcaaatcgaagaaagacgagcaagtgcaaacttaaagttgatggcccatcaataaaaagtagctcggtatttcaacaaacaagtgaaggctcggaaattcttcgtgggagatatggtcctgagaaggctattcctaaacaccaaagacagtacgacgggtgtacttggacctaactgggaaggaccatatcaagtggtcgaagttctcgactccggagcatacaagttaggtaagtatgacgaaaaaatgcaactcattctagtaccacggtattggaatggagaacatttaagaaaatactaccaataaagtaccaagtcggatgaccactttaagtactaaatgaaaatttgcttttaagtgaatggccttctaggcggactacgctcaaaggtttcgataaaagaaacaaagtactcaggtcgggtgaccacttttaagtacagtttcttatgtctgtaatttgttttatctcatgttaagctaaaagatcagattagatcaaatagctctgatgtaagttactacggtaa

SEQ ID NO: 356597 - DNA, 898 bp, Cannabis indica
tctccaaaaggtggattaggtctatgccaatcatagtagaggataaggagttgagtgctgatttaatagagatgaatttagtggattttgatattatactgggaatggatttcttgtccaagtacttagccagtattgattgtaagaggaagatggtaatctttcaaccagaaggcgaagaaccatttagggatctcggatcccggtaatttcagtgctaacagccagggaattgttacaagagggatgtctagggtttttggctgtggtattggataccacttgacctgactctgttcggccagaaaacatcgaggtggttcaggaatttgtagatgtttttcctgatcaacttccgggtttacgacctcagccaaaaattgattttgttattgacttggcacctggagcagaactggtttctaaggcctcttacagaatggctccaccagaacttaaggagctgaaaattcaacttgaggggttgcttgacatagggttttctcggcccagtgtgtcaccctgaggagctccagtattatttgtttagaagaaggatggctctttgtggatgtgcattgactactgggaattgaataagctaacaagcaacaataaatatcctttacctaggatcgacgatctttttaatcaacttcaggggaagacggtcttttcaaagattgatctcagatcgggctatcatcagtttagaatccgagaggaggacattccaaagatagctttccatactaggtatggacattatgaatttatggttatgtcctttggaatgaccaatgctcgtgtagctttcatggaaccgatgaatagggtattgaaggatttcctcaatatttgtgttattgtatttatcgacgacatccttgtgtactct

SEQ ID NO: 356598 - DNA, 574 bp, Cannabis indica
taggagctaccaaataaataacctttgttgcaacgcttatgtgacacttataaatcctcacagggggcggagccatatatggcctaacagtggccgtgtcccccctacaaattttaaatgttatatgatagatatagatacttatatatataaatatgttatacatgattttttatgaaaaaaaaagtaaagagttgatatttatttatcattatatataattttacttatatgtattaagtaggtcccacaaatataatataatataataatagtataattgtattatagttgtactatacttatttgtatagactagttttaatttaaaaatatatttagtgaattctttaattaatattagtagaattaataaattatatcattttcttttttttttacttgaaattacaataaatattaatatgtgataatattaaattgaactccaaatactttaagcattggttacattttaattttaatttaataaattattgatttttaaagtattatataaaaatttatgaaaaaaaataaaaattataatatattttctcaattgacacacatc

SEQ ID NO: 356599 - DNA, 537 bp, Cannabis indica
atgtctcatgtttcaaatggtgtcaaggaatacaattaggtctgacattatgaaaatgtataaaactgagaaagaaaagtgcaggcaaaatttggaaaaaagtaggagcagaatagccataaccagtgacatgtggactgcaaatcatcagaagaggggatatatggctgtaacagctcattttattgatgattcttggaacttacacagtcagatattgagttttaagtatgttccgtgtcctcacgatgctccagcactacttgaggccctaagatcttgtcttaatgattggaaaatagaagacaagatcagtacagtgactctcgataactgtactgccaatgattgatcttttgaaaggacaatttgagcctgacagttttattttgaaggaaaagttgctacatgtgcgttgtgcacatattttaaatcaaattgtcaaagaaggcttatctgtcattggtgatagtgttgacaaaattcgagacagtgttgcttattggtcgggcacaccaaaagacatgaaaaatttga

SEQ ID NO: 356600 - DNA, 818 bp, Cannabis indica
ggcgatcatagtggaacctggcttgtccctcacaagggccctgactatggcgagaggatacgtagccttaaaagtagaagagaagcggcacaatgaggaattgtcgcgtgaaactttagcatcgggagatactttcctttttgaatctaaaaattggacaccagctgcacggcctcataatagaactgacaaccgctcggccaatgaaacgaactcccgagggacagtaatgatgagcatgggcgaggcggtgcagccgcacgcccgacggggagaagaagagctaccacggatgaccattaccctaactgaattgataaaatgactgcgcggattgaaagaaaccaaatggcccccacgaatgaccacggaccccgtcaagagagataaggggcgatattgtgctttccatggggagcacggccattcaacctgcgagtgcaggcagctgaagatagaggtcaaccgtcctggaaaagaagtattcttccgggactgcctggtttcggacgtcgcactccacatccaacgggggagtaccaaaagccgggatcagtcccctccgccgtacattaagaaaaccgtaaacgtcatctcgggagggtcagacttgtgtggaaattcagtgcgggcttcgatggcccatgcccgacgggtccattcagtaagggctatgacgtcaattgacagcgatggccctgatgtgctcttgtcattcaaccgaggggaagcctccgaattagaacacccccaccacgatgctcttgtcatcaccttggacgttgctcgatgttcgaatgaaatgcatgctcgtcgac

SEQ ID NO: 356601 - DNA, 510 bp, Cannabis indica
gttggatgtattggatttttagacaccccatccaccatctgataagatccaattggatatttaaaaataacatccaatccgatccgatcacaattggatatccaatgtttggcggtcggttgtaattggatctgtcagttcttattggattggatcgatttatgcacacccctacctgacgtggcatgtctatgtggtcaacattactacctcgtgacagtgcatctcaccaataagaaggccaagccatctactcaataatttaacaaacgaggggtctgagtactcaaccgggatgatgaagtgataaaccaaccaccttaagggggatagctgaccaccccttgctcgcgctatggccagcatcggctagctagcttctagacatcacatggacgaccaacctttggcgtagcatgactttgttgtgcaggtttcatctattgacagtaagtcagaccacgaattggatcttaacaacccacaaaaatagagggaaaatattagcaa

SEQ ID NO: 356602 - DNA, 594 bp, Cannabis indica
  modified_base (502)..(502): a, c, t, g, unknown or other
gttagagcatctgggttgtagactccagtggtctttacacatatgcaaaaataaacaaaaaaaacctctaagtccgaccaaaaaaaaacgatcgaagccaaacaaaaaggagccactaaaatccaaaaaaaaaaaaattgatccaagagccaaaaagtaaaaaaaaaagtcacttattcggagatagtgagccaaaagaaaagagccacgcaaaaaagagccgctttgtgtggaaagataatagaatatataagatggatgaggtattcttctcattgccaattaattttgagatggaacccaattcactttatttcaaattctaacacatatataatgtagtataatttttcaagactaattttgagtgaagtgttagtcagtatagataatagtcacatgtcatttatttttatgaaatatatttttgcttaaaaaaatcattaatttaatatactatgagattatgtggcaacttttgaaattgtgaactattagagtntttttttaaaaaaaaatgataaattttatgtgtatataaaagagaaattaaaaataatattttaggattgatatatatatatatatgtattt

SEQ ID NO: 356603 - DNA, 696 bp, Cannabis indica
gtgccaaaaataaaatataaatagtttgttgtagtcataatttatttttctatgtatggtaaacagtttgtttgaactttattttcatcattgtaaattatttaaaattttttggaaatttaccaataatattaaccaagtacaacagacacaattaataaaaaaataaaaaaaaatgtaattataataaaaattacagaataaaattataatttttataaaatttaaatatattatttaaatgattaatttctaattatatttaaaaacatttattcatcataattatatttacattaataaattacacagaaaagatagtgataataatacatatgattttattttatatgttaatattttgatagttattaattttttctttgattggcatatacgtgattaactacacatctattatacataatttttaacaaattaaggagggccaggccacctcaccctattaagtacatccgaatatctccaacaataaattagtgaagatggtattattgttggccatatttcaatattttcttgagttatgtaatgctggttcttgttattttatttttcctgagagaaatattatgatccatatattagttaaactgtgttttagagatgactttaatagatgtttttcaacaaaaaaaaaaaaaattaaaataaataaatttaaaagaaaaatat

SEQ ID NO: 356604 - DNA, 608 bp, Cannabis indica
aaaaatcagcatacaatatcgcacataaatcgcacaaggtactacgaaagtcgcacaatgtcgcctaatacaacaataatatgctgaagtatcatgtcgcacaataatcgcacacaaaagggacaatatcccataaggtcgcacaagaaaacatacatgacaaaatcgcatagtgctgcacaaatgtcgcacacaaatcgcctaacatcaaaatcgcacactaaatcgcataacaatcgtacaatgtcgccaaaattaatcatgtcacccctaacctcagatttctcattaaattgcacaaagaatcgcacaaagttgcgtaaaatcgcaaaaaatgtaaaaacccagaaaaacacagactgttcggaacaaactctacctccattttaaggacacaaaagccacaaattacaactaacaacgttcaaatccatacaatacaacaaaaaacaacactatttactaagaaaaacacttacccattgctttgttgagtgtggtggaccttgaggttgaaaatggtgaaggtggcagttggccgagacgttgagatggtggtggtggcagtcggcggcagtaggcggcagtgatagagagagagagagaga

SEQ ID NO: 356605 - DNA, 1025 bp, Cannabis indica
atatctttgactctcacctaaacaggacactgtatcagtttgttaaaaaccttggaaactatttaagatgtgtttgttttgtattgttacatgtctatattacttgctagatgtatgataatttctgaatgtgtaagaatttatattgaactatgttattttctgttattaatgttctagtataaattttgaatcttcattgttgctctaacttagtttgttgttttaatgggacaaattataaaggattgtcatccattagacaaacataatagtgttagatctcgacagataagtatttgtaaatgcaacatctagttgtacatccaaagatgacaacttagactagtgtttacgatatgaaacaatgaaaaatattattatataagaataactttgactctcacctaaacgggacatcgttggattcttattttaatcgaaattatcctttacttttcctcttagctttttcattaagaaatttcctaaatagtgtatcattagatagatggtttataaatcatatgcttataatgtcattctattttctcttatgaaattgaatggcacacatgactgtattccagcaatctatcccgaaatgatataagtcctcgatctaagaaatttcctacttgtatatgtttactagaggtaacttatatttagagtgaaattagtagtgtggttcaagaaaaaattattactcaaagattatttggtataaatttaagcctgtgactttaaattttagattccaatagaaattttaaatttcagtttccaagaatgcattgaacattacagtaaaactttcacaagtttaatatccattttctacaatggatctgaactatatattatgtatggaatatgagttttgtatttgtgaccagaacccacttggactattctaagaactctttatagtaactaaacataagtcatccgaaaccacaaccacattctaatatatctatggcatttgcatcttgttcatagtggttttgacaagatcaatc

SEQ ID NO: 356606 - DNA, 489 bp, Cannabis indica
aaaattaaaaaaaataagcaaaaaaaaagtaaaaattgagtttcacttatatcgtcataagtaattaaagttttatatttgtaagcgggataaacccaatgtttatgtttagcggcataagtacacaatgtttgtaaaattgtaattttcttccagtttcgtcagtacggagtctgttttaaatttattaaaagaacatttagaagtaactaatactacatatttctatctagacccaatgatcaagaatttaggccttataatagtatatgaaatattttccctttaatataatagtatgtatataaaatatgtatctaaacactaaactaaaaatatttgttaatcaatcacatcaaggaaaatatagtactttagtgcatttgcatatgattaattgtctacgtaatgatgtagattattatttaaataagacgtttgatacgcaggattggactggattagacagactaatttgtccagtccagt

SEQ ID NO: 356607 - DNA, 609 bp, Cannabis indica
tagttacactgcggtcgcggtagtaaacaggctatatgtcgtatccacagggaggaaaaatacactcaaaaagacagttagtaattttacgagaacaaaacaagaaccttgaatgtgatgagaatattgagaaaatgatttttaaaaattaaacaagtaattaaaatgagaagtggtcagaaaatgattatggatgacacaagcttcatacatgcaattatattttcttaataaaattgattcttcaaactcaactacaattctacaccattaattatagttagaaaatgtgtataattaagctcactaatgttctctaattaaataaatactacttctaaaaatactatcatattatgtaatttaaatcaacaaaatacaaccggcagaatgcagtaaaaattatataatataataaatactttaataattaatagcctaacttacataagaaaagcatgactgaacttatataaaaggtattattaaatttaaagtgcaaattagaagaagataaatttaatatgacaaatgtgaaaatgaagaacaaagagaattaatatattagaaaaataaaaattgcatgaacttacacttgagtcttgccaa

SEQ ID NO: 356608 - DNA, 494 bp, Cannabis indica
ctagtggaaggagcttttgacttgccaggcttttgctcaccttctgctcgctgaatagcctcttcaagtttgatgaagccttcagcacggtcgagaaattcactcatcgagtctaccgggccgttcttccttatgtccttccaaagttcaccgaggacttcaatgcccccagtatcgcggacaactttccatcttcagttccccatgaaatcttagtcacctctgtcatgaatttgcagatgtaggctcggagaggctcgcctggtcttcgcttgacttcgactaggtctcccaggtggaacggaagttggcaagaggaggagaattttgcatggaattccgaggagaaaatttccatgagaggaactttccaggggccagcttgaaataccattgctgggcgacctctgagagggtggcgggaaaaattatgcaacatacatctcctcgtaccccctgcagatccatttccatttcgaaatacttgagatggg

SEQ ID NO: 356609 - DNA, 768 bp, Cannabis indica
acaacaattatgtgtcttgaacttattgtcatgccatgttacttaaacaaagaaagaaagaaaaaaagtgactcattttgcagccatttctctttttcttctgatttgcaggttgtgcagattctgaaaggcgatgaggacagttcggagattgtaaaactgcgacaaaagtctaaaatgcggcggacatattcagaagagctttttgatgcagaagagtacaattcaaccaagtatttgagtgatgttaataaacatatggagactgttttaggctcctctaatgatgtttgaattgagttttcttagtcaaaaagatcacttggaaccatacaagtttttctgatttggaagaagatcaagaaaacacacacacaacaaaaaaaaaaaaaaaagagaaagaaataaggaatgatgcatataatcataaattcagtactactgatcagagacttgtaacaaaaacattgcctattaattatggccaaaattgtatggtgcaaaagtgtttcaaaaggttgtttctttattgctcttaagttaatgaaattgaatttccattccaaaaaaaaagttgtttcttttatggaaagatttgagtacatggtaatttttatctatctcaccactttcctttgcttcatgtctccttagaaaaaaaaaatgttacggtcaatctcttattataatttcttaatcaacttcagtatccaaaaatacatgttggaatatttttttttcaattttttttatagtggtgttcgttat

SEQ ID NO: 356610 - DNA, 570 bp, Cannabis indica
ggtctggtggatgcattttgatttgattgtaccccgaataggcgtccataaagctcaatatttcgtgccctgctattgcgtccacaagctgatcgattcttggaagtggaaaatagtctttggggcacgccttattaaggtcggtgaaatcaatacaaactcgccatttcttttttggcttgggtaccagtatgggatttgcaacccaagccgggtagaaagcttcaattatgaaattattgttgcgtagcttctctacttcttctttcagggctagggctcgctgcttgtccaacagtctttgcttttgtttaactggttggaagtttggatcaatatttaagacgtgcaaaattatagaagcatcatttccgaccatatcctcatgtgaccaggcaaaaatgtctaggtttgctctcaaaaattttatcaacgctgattttactttgagcaacaaaccttttacaattttaagctttctggctggaatatctgggtcgatctcaatctcttcaagttcttccactggtccaacattgttgcttgggtccccaagtcgaggatccacat

SEQ ID NO: 356611 - DNA, 944 bp, Cannabis indica
agactgggatacgggacccaatagtcggacctgagacctgagaactgaattgtgacttagacccagacaacgccaagacccgagacaaggacaagtaccaaacaaggactgggacctgcactcaaactaggatgataaccaagactgggaccaaggaccctgaccttaatccgggacattgacccatgactcaggacccaagacccaaacctagacccaaacctagaactgagacccgaactaggacccaaactaaggacctagaacttgacttggaccaggatctagatttggacccgggacccacacgaggcttggacccgacccatagtcagtgtttaaatctaggaataggacctagacttggacccagacccagactagaactcgagcccgaaccaaaaatcgaactatagtcgacatgtggttggtgtttggatttgggaccgagactcggttttgaacccaaacacgaacctagagccagaccaggactttaacccagaccataaatcgtaccctgtgacaaaaaattggacccggaacttgaattggacccttaaactctaacccctaaaccttaaaccctaaatcctaaactgtttacacttacccctaaaccctaagccctcaaccctaaaccctaaatccctaaatactaaatccaaaaccctaaaccctaaaccctaacctggacacaggcccaaacccatactgttatcccaattttacactttgacgtggcatcacacaatggcgacacgtggaatatactctatgtacctgctcacaagagatacgccgaataaggcacctcatatattcgctcggacaaagccctctcagccgggtagtgagcaatctgcgcagcacgccaacacttagcaaattcaactttcgcatcgtgagtcatcaaagaaatccctataactttgggatcaaat

SEQ ID NO: 356612 - DNA, 688 bp, Cannabis indica
atatttaagtttaattatattaaaaaaatattttattttaattttaggatttgaaaattgggaaaattcaaaatttgggaaaaaatcccatgaaaatcgaatttttggtgcaagtgcacctactgccgagaaaactcggcggatgcagtctcaggacacggaaattgtagggtctcgtgtctgaagcgtgcgcgttcagacaaacatctgtcttaagcttccgcgcgcggtgtctcccttgtccgagtgcctggtacactcgatgcactattaaacccaaaaacttcaaaatttcataactttgtcaatttttatcagaattgagttccgtaaaaatcaaaattgcatatttttcacaaggaatccaaataaaattattgtcagaaagaaactaaaattattttcatggaaaaatttcataaatcacatacaatcatcaaataatcacataaaccatcatgaaaccatccaaatcaacacaaagatcgttttaattcatatttcatgaaagtaaatcattaccatggctctgaggccagtttttggaattattttaccaggatctagatttactaccatgtatgtttttaacatcctaaatatgaatttctaaaacaatgaaaataaacatataaaagtttgagaaatcttatagcgggtgcagcgaaattaaatgactcattccgct

SEQ ID NO: 356613 - DNA, 863 bp, Cannabis indica
tgctaccttggtcacgagtgacaaagtgagtgttggtgttgggatttgccttatgatagtgagaagctatggtcagtgcgagtatcttggctagagagcctcgatgcattgatgcactcatggatgtttgcgagcataactcgacgggaggtgttcgagagacagtggtgtgcacgaggcacacggtcacgcgaaaaatgtgccattgttactcggatggttggaaggctgaccttggcttagataagtcaaggtgccacacaggtgtttcgctgcctgaaaatggtgacctcgtgatggttggtattagagccaagttcatcttagtgggaggttaacctggttggcctatcctagaggggatgtaggtgtgtggaaggatgccagaaagacaactaccacatgcaattttagagaggcgcaacagaatgtttgaaacttgttggcataatacaaggttgattgggtagtccatactgtatgcttagtaaataaggttgagtttgcctgagtgacatcgtaagccgcaggaggcacttttgttgaataggaagcttgttggcaagggtgtggaagtattacaagggctgttagatctttgttagtcacgacagtggtcgagagttgatgaccgagattgttcaaagtgggacaaacatggaatgctttagttgcgacatggtgtgtcaagagggacgcacatggagaccaagggggcagaggccgcaattctcagatgattattgtacttggaggtatttgcatgtgacttttatttgatccatatggaagcgctgagacagttgtgtggaatgtgttggcttttatttgatccaagggggctggaaattattttaccagga

SEQ ID NO: 356614 - DNA, 718 bp, Cannabis indica
ttgtacttgaagaagcagcattgttagaagcttcatacttaattcttttcttctaacttaagtctacgaaataggagggtgcccccattgcaggtaagcgccgttcataagcacacaattctccttctagcttgtccatgtctgaagagttaaaattgttcaccatataagatacaacaaatccattatacttaggaggaagactattaagaatgaattaaacccattgttctctagataaataaattcccaacaaatttgatttctagagcttcagattcatcattaacaagtgtgaattaatgctcttactaggaagcattttcacactatagaattcatttgtaaaggcatttactaggagtgggccgggattctgggttgtccatttttgacactacaaatatcaataaagagaaataaatcatttggttttacaaattcctacagaagttcaaaaaataacaagtatagcaaatatgtttgtaaaaatacataaatataacatatttaatattttccaaggtttttaacaaactgatacagtgtcccgtttaggcgagagtcaaagatatcatccattgaatagagtagtcaactcatctaaaatgaccaacattctagcaaccttttattcaatcaaaatgagaatccgacattgtcctgtttaggcgagagtcaaggtcattctatttcatgagcctccaccattgtttca

SEQ ID NO: 356615 - DNA, 934 bp, Cannabis indica
aaaacagctgcatttcttgcattccaacacttccataacatacaaagaaagaggttaaaggcacctgctgaaaaattaagctgcatgtataaaatgatatctaacatgttcaagtgtttggtatcctttatggcagagttaaaaaaacgtacctgaccaagccttcttcatattcttgcactcaaacaaagcatgttgtaccgactcataacagagatgacatctaggacaaataggagagctaagacagtgcatatgataaagattttcagcagtaggaatggagttctgagcaagcctaaaactaaaatgcctaatcttagggggtattggaagacttcagagggatttttaccaacgggtaagggttcccatgtctgaagaggaaggttgtgtcaagtttatggatcgttttgcaacatggtagccggtcttaacagaatagtggcctgaaggggtggcacatcattactgcctatagcaaaagccagagtcgaagggatatcagcaatgtgggccacaggaagggaatccagttgggctgtggaggtggaaattatttattattaaaaataattttactcataaattttgctaatttttttacactaacaattgattataacataattaattacttaagtacttttgctacaaatttatttagatacataattttactataattatcttttaaattaatttgctttattaattgtttttatcaagaaagtctattaatcaaattgagccaattagatcgacaagaggattcctctttaaatgaaaaatttacaattcaattttattcatgctagacatcttccttccttgaacaaaattaagtctattgttgaagctctctttaaatctactatctatacaactacaattcatacattttttcttatttatacacaaattttggtttagc

SEQ ID NO: 356616 - DNA, 485 bp, Cannabis indica
aggtgaattatttgctctagacctaggctcagaataattcaattgttgcgaattaacggataattcttcaagagcttcccaagcctcttgcccttgtaatttcaaaaaatatctggtatgcatagattgaatcatttatcggtttgaaggggttaaaccatcataaaaatattttacaagtctccatttttcaaaaccatggtgggggcattttaataataaatctttaaatctttcccaacattcataatattctttattatctttttgataaaattccgatatttctcttcttaacttatcagttttggacatgggaaaaaatttggcaagaaatttattaaaaagttgatcccaagttgttatggttccggttggaagtgagtttaaccaagctttggctctatcttttaaagaaaaaggaaacaacctaagtttaaccgattcatctgaaaaattttgaaaacgaaaagttgagcaaatat

SEQ ID NO: 356617 - DNA, 845 bp, Cannabis indica
ccctttgggctggaaaatgaagacgccaggtatcaaaggctggtgaacatgatgtttaaagatcacatcagtcgcaacatggaggtatatgtggacgacatgctagtcaactctgaaaaggctgggggcatgtggaggacttagacgaatgctttaaaatccttcgcagctataacatgaagctcaaaccctctaaatgctctttcggtgtaggctctggaaaattccttagcttcatagtcaacactaggagaatagaagcaaacccagacaagatccaagcccttttggacatgaagtcgcccacaattgtcaaggaagtacaaagcctaacaagacacattgttgcattaagcatatttgtgtccaagtctacagacaaatgtgtaccctttttcaacattctcagaggcaacgaaaaattcgagtggacagaggaatatagaaacgcatttcgggagctgaagaaacaattgtctcaaccacctgtgttgtgtacgcccctagacaatgaagagctagcgtgtacctagcagtcacagaacatgctatgtgtgttgtcctcacaagagaagaagacggtgtacaacaccctgtatactacatcagcaaaaggctaattgacgtcaaaagtcggtatccactatgactataacataagagtcaaccatacaactgttgggaatattttaccaagatctagatttactaacaagtatgttgattaacatcctaaatatgaatatctctataacaaagaaattgaacacataacggtttaagaaaaccttacattggttgcagcgaaatataatgattccttccgttcaagatctctagccctt

SEQ ID NO: 356618 - DNA, 614 bp, Cannabis indica
actgaaaagaaactataaagaaattgttatgcacttgaagttttatgtgatcttacattttttgtcaatgagtccacaaagttatcgattaacttcttctctattgtaggtgtcaaaattgtttagttttctgtgcttttgtcttgtttgtgtatgcctattgttgtatcaaagctctcaatgactccattagtgttgtgattggtagttctctagctgctaagtttgctgagtttagagatttaacaatgttagaagtcatagttgtatacctgttatgtttgttgtggtaccttgaccatttgtggtatccaacttgtggtaaatatggtctaacatgattgtccaagctgtcaagctcgctcatggtattcaaatttcctctgtgtatgcttttgatgctacaaagaatgttttatcgagttttcttacattcttcttgaaggttgcttaataggtggtatacacagtagccgtgcattatttctgaaaatacatgagcaactgccttaattatgctctcatgtttgtctaagatcaagcactattcttctctgaccccatatgttttccttaattttgtaaaaaaccattgccatgagttgttattttct

SEQ ID NO: 356619 - DNA, 552 bp, Cannabis indica
tggttgttaaaagcccaataaacgacattatggccttcactttgaaatgcgaataattttttttaatatgcgatagaatatttaattacatacatcaatatagcggggttgaacgaacatcaattcaatataaatagaaaaaaaaaatctgtgggagctagctagttaagctaggcaatacattttcaaaagttgcaattgtatctatgatatcaatttttataaggatttttatactattgaaattttcttatttttttttctttattattgcggtgcaaatttttttttacaactattgtggttttttttttaaaaaatactgtgtaatttgttaaatttttactgttgtttcacgatttttttagttgttctactgttgttttaattgttctgttctgctgttttacgattgttttataaaaagatagtatttttgtaaaatattccgtatgacaataaaattgtaaacttttacccaaaataatattttataaaaatcccatttttataggaataattacataaggtatcattttttgtaaaatattt

SEQ ID NO: 356620 - DNA, 521 bp, Cannabis indica
atttaattaattataataatagtgatataacatttttagtaatattgggtataagtactattttttctcaatatttatatgctcatgaatattttgctccacgtgcgtagcacgtataacttcactagtatattactaaaccaaactgtatagctcgatcttttttgtatttgattttgtgatagctatttttttttaaaggataagttcatttatgggttaaaatcaaagtaaactaaactacatatatatatatactagtaaaaagttacgtgcgaggcacgtatactaaattttatgctagtttttttctacgttattaaaaagtgatacaattaaaaattaaaaaaaatattattagttattaggttcaacatcattaccctgtgttcatttttaaggaaaaaaaatatttatgaaataataatttgttgcaacgcgagtacaggcaaaattcagaaaatatagcatttattagtagagtattgacaatttcaacaataaattaactgattgtatac

SEQ ID NO: 356621 - DNA, 530 bp, Cannabis indica
atattatattttatacccacaaaattaatgtattttatttatatatttatacatttcaatttttctacctataaaatttatatatatttttttaattttatcttcatatttttttttactatttttgtccctataagatttatatttttcattaagactcttttactaaaaaaaaaaaaaaattgcccccactagaatatgtggttagctctgccactgacacatctaggtggttgttagagtgcgaatttttcgcttagaaactcgagatcagtctcctataaaattgacacgtggatccaatcctcaagggatggatgagttgtttattaatgactccgagagttgaactcgcttgaaccaaactcgcgagatgatgcagccttaacagattctagtcccgtaccgtgtgatttattggtgaaaaatacacatttcttgatcttaaagtttaaaataaattaactttaaattaatatttcaaaaattaatgaaatagtttttatattgaaaatattttatttggattt

SEQ ID NO: 356622 - DNA, 658 bp, Cannabis indica
agatagttcacatctaggccagataagacattggtgatgagctaagactcgggataaggctctccagctagggcaagaaggtctgcccagttcttcttttgcctaagatattctgtcatgggagtgttttcctttctagtaacctgaatcaaggttctagtttcatccattttggacttggaatgagcttcatagagttgttcaagagccttccataaccctgcagcagtagccactcccataacttcggttgctatagtctcagtcattgagctatacaaccacccgatcaagagttgatcgttgatgatccagttctcataggctggatttacaacttgagaatcagcagtatccaagctttccatgactgttcctgcatcaataaactcaggtggacaggtgttagtaccattaagaaaaccatcaagtttatggcctctaacaatagttgagaccatagttttccatagactgtagttgtgtctatcaagcttaaaaaggtatgattgagggtgttgaagtggtttgagactgggttttgaagctgagaaaaacttgagccagcacccattacaatggatgctgcagtggctggagtggattatgcagggttgttgtttcctgtgttttggggttctgcagacatggtgagagg

SEQ ID NO: 356623 - DNA, 339 bp, Cannabis indica
gttaaattgcacgtaatatctattcaattcattatcccttagttgatcctagatcaaatgatcttaatcgtgacatgattaggttcgatctcaagagtattattcatgttctttgatttgttagttaagcctactttcgtgtcagtgtgatacgtacattttggaacatgatagtacaattgagtgggggtgctaatcatagatatggaatctatagcttctataggtattgagtgagtgggagagctgaaggaagcgtctgaaagtagacagtatgtaaagaccacttagtttaatttggaaattagcaattaattatgtttaattatggaaaattat

SEQ ID NO: 356624 - DNA, 557 bp, Cannabis indica
attttattaacttggtgtactgctactactagtctcatctagtgatctgtcaaatgtagcaggtttgtctagttagttcctgaatttttttttttttaattaattaacttgggtacccctcagtttgagttgcttatataaggctttgtgtactacttctttagggagtatcgctagtcaatcgtaaagcgacacgtcttaagagtgctaggcaccactgatgcccaatagcaatgctctataattaagtataacagtgattggttttggagttttgccatgggtctcagcattatgttcaaaccatatacactacagaaaaacaacaaattgctcaataattcttttgataattttcctgaaacgtgagtaaaaaaaatttgggcaactcattgattttggcaagtgataatcaaagtttaagttcaactgttgttagatagtctcacatcgctaataagtggaaagataataaaatatgatggaacataagagcagagcatggtttattatttcagtgttgtgttggcagagcaagcatcggggttcatttgtca

SEQ ID NO: 356625 - DNA, 1949 bp, Cannabis indica
gcacatcttggaggcagagtccccaaaaattttaagatgccaaaaatggaagcttataccgagaactcggaccctagcgatcacttgtcacggttcaaccgagtgatgacggtcatgagagtcagtaatgatgccaaatgtttgtgcttcccgctaacattgagcgggtccgcggaggaatggttcaagaagttggagccaggatccgtagattgctggaacaagctgcaagtcagcttctggagacagtttgtcggcgcgagaaaggttaatctggaggtcagcgccctgactaacatcaagcagctgcccatggagagactgaaaaatttcataaagaggtttaaggaagaagtctcaaagactaagaaagttgatgacggacaacaacttgcacttcttcaagcagggatccgtacagagactccattctagaacgagttgcagcaagaaggagcctccaaccttcaaggcttccagaaaagggtccaaaaatgcatcaacttagaagaggcccaaatagtggcttatgggggatactacccgaccggaatagcagggtatgtactcggagcccagctcctgggaactttaccagcagctactccaccaatgagcggcatacaattttccgctaccccaggatataatcagaatcaggcattggctcctgcatcttctcattatgggaatccttctgggataagtggacaagtcttgtctcactctgctcctactgcaagcttagcaggtccttctcaaggctctcggagcaagaggtcctcaaaaggtagcagccgaacggaggacaagcggcagaaaagggggtatactccccaatatacccagtacacagatttgacagaatcccaggaacgtgtgtacttcgccactagggagaatgcacactatcggagaccgcctcctctatacagagatagctcccgaagggatcccaacaaacgatgcgagtatcataacgacattggacacagcaccaacgatgcaaaaaccttaaagataagatcgaaaacttaattcgattgggccatctttatgagtggattaaaaaccggttgcctcacctcaacccggttcaggcagcaggacctttgccccacggagcgccagggggtgcgaccggagcattggcaccagtcgctcccccaggcaaacctcagcaaattcttggcctgccacaagacccaatggaagagtagctatgatctctgaaggaccccatatcggagggactactcgaatggaactgaaacgttatgctggggccgtaaaacacagtgaggtttgggaagttactcagctcccagctcaaaggccccgactaatggatcaacccattacgttcacaaaaaaagatgctaagacagtgcgttttccttatcatgacccactggtcatagagactcccatcgccaacaaaattgtggccataatcctaatgacaatgggagttctgtgaatttattattcaaagaagccttcacggcaatcggcctcgcagaccaggatctctcgccgagtggttcccagctcacggggtttaatgggacaacgcttatcccgatgggaaaagtgaggctcccagtcacacaccccaaagcacttttaaatactgcacgtttgtagtggtgaacggcccaacaacttataatgcaatcctcggccggccggccctggtggatttcggtgcagtcgcgtcaattaggcacttgtgtctaaagttccccactcaggaagatgggatagggaccgtgaggggaaaccaggggaaggccaggcagtgttacaatgctgctgcccacctgcccatactgatggtccggtaagttattgagccaggaatggtggaagaaaatgagttagatccccgtgtgggatccgaaaaaattgtagaacctatggagaatgtcgaggaagtatcggtgtgt

SEQ ID NO: 356626 - DNA, 579 bp, Cannabis indica
aaaaaaaaaaccaatatttatttttcattattccttttaaaaattaaaagtaaattattacggtaaatctatattagtttttctaatttttttttattttaaagttatgtcaatttttttaattttttatgggttgttgtgggttgatatatatatttggaaaattttacaatgcacccccttaaaatggatatattgatgcacccctatctattttagcatccgaaataattttttagtcaaattttttctcgtggtcatgtacgttatagttatttaagacatcctgcaaaattttaaggaatttagaatagtttaaaatgctgaaaattatgttcaaacagtgtgttgcacgcgtgactattttattttatacgcgtgtaaaatagactatttgaatattgttttctatattgtaaattattccaaatttttcaaaattttataggatatcttaaatagctataacgtacatgaatatgaaacatataatttattgaaatacatatatcatactaataaaattattatatcatactaataaaattattcaataaaaatatatatatacatactaat

SEQ ID NO: 356627 - DNA, 680 bp, Cannabis indica
attatcacaaaattattaaactataacattcaacagtaagtaatataaccagtcatatgcatagaaatagatatgctcatatatttacattgcctaatcaggcaagtccatgtcctaatgtaatatcatatataatatcattgcaccacctaatcaggtgagcctctgccacaatatcgcatcgtctaatcagacgatctcgtacctacgcccggtacttatcaatgtcatgacccgtacctacacccgatacgtcgccaggaatattgcatcacctaatcaggtgagctcatatattatgtctatagtatcatcacattatcatttcctaatcagacaatcgataatttcaaaacctgtcatgccatgtggtacagtaaaattttcttacctcaagtcccggttcaggtatgttggtcaacttgcttggagaacaatcgataatcctaggccctatgtcatgacaatggtaaaccaataagtgtttatcccaaaacactacttaacactcgtgtaagataatctaggattttctaccaaatcttgcggtacagatacactaaaataaaacttatattatgactctaagtcatacactatattgtagagcttgtcataagcttcgaaaaagtatatagaacgtctaaaacggacactcgagtgaaaagttatggccaaaa

SEQ ID NO: 356628 - DNA, 601 bp, Cannabis indica
tgtggacggagcctccaacgaaaatgaatccggagtgggggttgcaatgatattcccgagtggacttcgactccaggcagccctacggttcgacttctcagcttcaaacaatgaagccgagtgtgaagccttgatagcagggctgagaatagcaaagactgtgggggccaaaagagtagaggtctacagcgactcccaactggtcgtgaaccagatatcaggagagtatcagacgcgcgacaaaggaatggccgcatatgtaacgatattctgggaacttctccacgagttcacggattataaagtagaaagaatccccagggaaaagaacactcacgcggactgcctggctaagttagctttagacagagagatggaaggacttggggtagtacccgtggaacgcttggcagagccaagcatcaaaataaaagaggccatagcaacggttgggcaagaacccaactagatggtccccatcatagatacataacgaaaggtgagttgccccaagaaagggcattgtccagaaagattcagtatcaggctcaccgttatgtaatgatggataaaattctctaccgaagaggactcagcatgc

SEQ ID NO: 356629 - DNA, 854 bp, Cannabis indica
ctgctgaaacatcagaaatcatggctgctaatgtgaatgctaatgctgcaaacaatggaggtaataacggtaataatggaggtgccgttgaagatcaagctattggccgcagcttgagagactacattctccctactcttatgggagtgcagtcatttaaataattatttatgctattatttgaattcggaatgcattttatgtcatatagtgaaatttcataatttttgcatttccggtgccagacaacatggaaatcggtgtttggctcagtagaatcacaacttagcatgttaatatattgggacagtttattagacactgggaatatcaagattggtcgggaatttagaatttccaaaaatactctttagtaccgttttatgttattttagtgtggaggggcaaaatagtcattttgccccaattatgttttgtcctttagtggacttattattattttgttatgtgatttattttatgtgtgttggctgaattacttacactactacaaaattgggctttagagtcagtttttaagggctttcagcgtcggtattggcgaaattcgctaccgacgctgttccgggtgacgctaaaccctatggcgtcggttatttcataataaccgacaccatagggtcttcctatggtttctttttcagcttccaattttgcattttaacataatttatatatattattttattattaatataattaaattaagtataaattgtatataataaccataaatacaaattaaattgaaaagttgaataaatacacatctacatcactctaagtgtttgtatattagcaatctttttattaatattttatattatgtgttt

SEQ ID NO: 356630 - DNA, 526 bp, Cannabis indica
gataagtctgactgtagttcaagggcttcgaactctagacatgagtcgggactgaaacatatttcctcaacattgaaatatgaaatacattatggacagtcgataacgctggtggtaaggctagccgatacgctacctgcccgaccttctcgagaatctgaaatggcctattgaacctagggcttaacttacccttcttcccgaagcgtttaacacccttcactggtgaaacccacaggaaaacctattcccctccctgaaatgtaatgtcactacgcttcggattagcataacttttttgcctgctttcggaagcaagcatccgagccttgatcttatttatagcctcattggtcctctgaacaaattccgaaccttcgtacttcctttctccagttttgtcccaataaattggggagcgacattttctaccatacaacatctcatagggagccatccctattctactttggtagttgttgttgtaggagaattcaattaaaggcaagtacttactccatgaacc

SEQ ID NO: 356631 - DNA, 435 bp, Cannabis indica
aggcgacagttttaaaccgtcggttataagggcccaataaaaaatcgttacctacttctcgccacattttccacgtgtccacctacttcttttctatttcccacatgcccacctatttcttctccatttcccacaccataaaacaaaaatcttaactctccaaaatcctacccacgtctccgaaccatcgccctcctctctcactgtcttcctccagccatctctcgatctccctttcttctcgtctctctcgtccatcgatctcgacacacccctcctcccgtcggtgtccttctcgtctccgtcgtatatgtcagaccaccaccacctcccgtcggtttttctctcatctccgtctcatacgtcggaccaccactacctcccgtccgtctccctctatctctttctctctctccgagctcgatataaatacat

SEQ ID NO: 356632 - DNA, 662 bp, Cannabis indica
gaagtcataagaagtaggcaagaagggaagatgacactgactcagagaagctacattgagaaagtaatcaagaaattaaacttggattcatctaaggccactgctgtgccacttgcgtggcattttaaattgtcgaatgaatattgtcctaaaactgaaacatagagaaaaaacatgaaaggtgtaccctacgctatggctgttggatgtcgaatgtatatcatggttagtactagacctcatatagctcattctctgagtgtattaagcaggtttatggcaaaccatgggttagaacactggaatgtagtgaagtggctgattagatacttgaaaggtacaatcaagtatggtctcatttatcaaaaagacacatcaaatgtgagattagaaggctatgttgatgctgattatgcatcaaacagggataacagaagatctactactgcctatgtgttcatggtcaacagaagctgcatatgttggaaatcacaacaacaactagtggtggcactatcaactacagaatctgaattcatggccaccattgaaactttcaaggaagctatttggttacagggaatactacaagagttgcaactactcaaagacaaagggacagtctattctgatattctgtcatcaattcacctatgtaagaa

SEQ ID NO: 356633 - DNA, 1266 bp, Cannabis indica
ttggggaggaagtgatgtactctagccggccatgggtactcttgttggtggctggccgaccaatggctgcacaatagggggtgttgctgagccagagatccctggccggccctccatgccggtgattgctgggatctggttgttgtcgctatttaacctttgaggaaaggtctctcctccctctggcaagggaagatctatcctagttcctgaggaacagagtggtagttttccttgaagcggatccctaaggagatcgtggccttttctatcggttctctaattgaactatcttattagattgctagcctcccgactgtggcaatctcattctgcttggtgagatcgaaagatgtactcctggtcatccatccatctcaggaattcgcgtctctactgagcgaaaacatcacaatcatcagcgcgtggttcttcagttaggcctgcacgacctacagcgtccctgagtctgtccaactcaaggtcttctcctaggtccaggtgaggctctccaatttcttgctcgcccactctcgggcctatctctccagcgtagaattagagttgaggtccagttatttttccaaggggttgtcgcccctaggtccttccttcagtgggaggcgccaatagtgggtctactcttggaggcgtgggcctgacacttggttcgctggggtgctcgtgtcagtttggtcagttgtagtggccagaattgtaacgcctgttgtggtgacgagattcaccacatcttcagtattcatggagattccagttgtgactggaacttgaatgcctagatctgcaatctgtgggtcttgaggaagactcgaagatgcagacggtgcgacaagatttcctcttgtgttcaccatgacatttgatcagatcacgatatccatgctctcaatgagagcaccaaaatgttgacctcaaaaagtgatcaaccgatatgcttcccacgtacgtgcacaaataagaatgaaaagcaatagataatatgatttgttatagaggttcagcccccttgtaatagcaggtaatgacctactcacattttagttgtatttataccgagaaatcactatcaagatcactataggttggatctgctatagtacccttaggattacaaggtgtgaatcaatacttgcaaaactcaagtgttgaggagcagtagggtaggcgtgtgagagagagggagtgaggaaaagagagagtttatcagacacttagagtttaggatcaggtttctagcttagaggc

SEQ ID NO: 356634 - DNA, 1037 bp, Cannabis indica
cagatccttgacagaaggataaagtcctacgaaataagacaatagttttggtgaaagtactttggagaaacagcaaggtggaggaagccacctgggagctggaatcagatattagagctcaatattcagagttattcaggttagatttcgaggacgaaatccttttaagtgggggatagttgtaaagactgcttagtttaaatttgaaaattagcagataattagggtttaattatgaaaattatttattgatattaaaataattatttatggtgatttatttgaatttagaatgcatttcatatgttatatttagaaatttcataattttgcatgttcagtgcccgacaacattggaatgcagtgtatgtctcagtagaatcacatcttggtatttttgtatagcggcccagtttagttagacattgggaatgtcgagattagtcgggaatttagaatttcccaaaatacccttagtacccttttatggaatttagaatcacatcttggtatttttgtatagcggcccatatgtgatttgtctttagtgatggttaattaagttaataagctgatttatttcctatgttttaagctgagattattatggtaacactaggtttgaattcatttattcaaaaattgaaatttggaaaagatcaagagagaggctttttctctcaaactctttctttctctctttaagcctagagcagctagggtgtgggggtttctttgtgattttcaagctggttttagcaaggaattagtgatctcaagttcttggtaagcttcttgtaacttcctttttgatttcttgatttgtaaggaagagaatagttttgcatgcttgaagtttatttgctgtggttgctgtagttggttgttgttgtattcaaaggtttaatttgttgggttttgtgccctaaataaaacacatttcaatataatcatatttacttattaataagatcagaaataacattttatgttgcatggttcacatgatttatttcatgattatatatataatgtat

SEQ ID NO: 356635 - DNA, 676 bp, Cannabis indica
ccgaagactgcagcgaaacccactctagccagggtgtttgcgataacccaggctgatggataagccagcccttcagtggtaacaggtcagctctcggtcaacaactcttatttctctgtgttatttgactctagggccactcattcgtatgtggcagccagaatttttagtaaattggatagaccgcatgatagttatgaatcagggtttggaaccctactgcctagtggagagttagttatctctaaaaggtggattaggtctatgccgatcagaatggaagatagagagttgaaagctgatttgatagagatgaatttagtggattttggtattattctgggaatggatttcttgtccaagtactcagccaatattgactgtaagaggaatatggtaatcttccaacctgaaagtgaagaactgtttgtctttgtcggttcggttcacggatctcagatcccagtaatttcagtgctaacagctagggaattgttacaagagggatgtttagggtttctggccgtggtattggataccactcagcttgactttgttcggccagaagacatcaaggtgatttgggaatttttagatggttttcccgacgaacttccgggtttaccacctcagagagaaattgattttgttattgacttggcacctggagcagaac

SEQ ID NO: 356636 - DNA, 515 bp, Cannabis indica
gttcctcgcaggcagaaaatcaaaaattcataactcaaccaaaacaaatccaattaacctcaaaccttccagacctgttctatatgacccaaataacaattctaaagcaacaaaatcacccagaatgcacagaaacaaaaagtgccattaaagcccaagctttgagttccaaactcaaacttggttaaaaccaactaacatgcatccaaattagatcaaacctacttaaacatgcatataaaagcttctgaaaacacaagaaatcgacctcaacaaacacagcaacaaaactcaccattttactttgaaaactcaagcttttgcctaaaaaaaccataactcaatcaacctaactatcatgcattactagtagctcaattcaactcatttaaacatgcttaattctctgcaaacaacaataaaaatcacagcagcaacaacaacctaaactatgcatgcaacatcatctttttccttgaaaaccaagaaaattaaagagcaagattcaaggctta

SEQ ID NO: 356637 - DNA, 928 bp, Cannabis indica
gttcactagatttagactgacatgataatcggcgataatgtatacttacaccttggataagtgttatgtccttcatgggcattggaaaaattccagtatcggatatatggagtatacattggattggaccgatattgaacgtggataagatatcataaacttaccattatatctttctaagtcaatgtcactggttgatcttaggtctaaggatcttaatcctgatatggttaggttcagcttagttgtattatttatgttcttagaggtgttcatggatgctaacaaatgcaactggcggatatttacatcttaagaacatgatagttcaattgagtgggagcgctaatcataaatatggaatctatagcttctataagtatttagaagtgaaaaaatttcattcgactttggctgaataaaaataaatgattgaggcctcctttgagtaattatattagtttactaaaacatcatttataggtagctaagttattatacccgaaattcggctcgtacttcaaatgatggcacgtgtcaatatcagggaatatgaaccgtcaaatataacgacaattatgttattaaataattaaatgaaataactcattaaatgcagaagtcaatagggtatacttataactcacagaatgcacagtccctagcaagacaaggatgtacaaactattgacttaagtattaacgagaaaccatttcatgtctgaaggcataataccaaggaagatgttgataatacatattgagacatctactttgcaatatgtaaagagacactgatgaggcgagttggttgttaaaacgcttagcgtataatatacattatactaactaagtgtaagagctagaagggcatagataatgatgttggaagttattttaccaggaacttagatctactcacaagtat

SEQ ID NO: 356638 - DNA, 637 bp, Cannabis indica
gaaaaatttcatcaagaggttcggaagaagcctctaaaacaaagaaagtggatgacggacaacagtttgctcttatccaagcaggcatccgtacggggactccattctggaacgagttgcaacaagaaggagcttcaaaccttcaagacttccagaagagagtccagaaatacatcaacctggaagaggcccaaatagtggcctatgggggatactatcctaccgggatagcgagatatgcaccctgagcccagctctcaggcactgtgccaacgacagccccaccaatgagcgacatacaattttctgctactcccggatatagccaaggccaggccttagcccccgcgtcttctcattttggaaatccctcagggataaacggtcaagccccctcgcactccgctccgaccgcaagtttagccagaccttcccagggctcaaggagtaaaaggtcctccaaaggcagcacccaaacggaggataagcgacagaaaagggggtatactccccaatatacccagtacacggagttaacggactcacaggaacgtgtatattttgctactaggcaaaatacacactaccggagaccgcctcctttgtacaaagacagctcccggagggatcctaataa

SEQ ID NO: 356639 - DNA, 560 bp, Cannabis indica
gctttgaccattgttattttgtacttagaatacatatattagatattttgataatatacaaaatatattagattttattatattgtaattacgttattttgaaaaagataggcattataaaatttaataatttcactataaaaaatacaaaaaaataacattaacaaagtattattattaaaaaatacaagaaattattaagtggatttggactcttgaacgtaatggacgcttttcatgtaaatccacttaccatactcaggctttggaaagagttcctccatgtgaggtggctccatcgctgtggaacagtaaaattctggaacgccataaggttctttggtggtcaattctttccaatgctctacttgttcgatctgtgatccgaaaacggtttcatattgaagatgcaagttgccgtgtgggatgggggaggaaactttagaacacttatttctctcttgtgatgtggcacttcatgtttggagggcctccccttggggtatttatcctgcttgtgatactggtatccatatgtgggattaggtcaaattcatctg

SEQ ID NO: 356640 - DNA, 828 bp, Cannabis indica
taaataaaattataaaaatcgtaaaaatatttaaaattccgtacaatttgtaattttttttatgtatttataaaataatcccttaaataaattaaggttttgtcatttaaaacatatttttaattattaaaattttatttaaaaaatcatatatctatctgtttaattctattgttaagcatatataaatatatatagatttttttaaggtggggaatttaaaaaatatcctatttttaggacttttaataatttgttctaattagacaattgcattgtaatatcatagtcttgaatgaaacatatttgaactagaattgattgaattttttcggtcttattcaaaaaaataattcaataagtagtgctaagaagactctattttacactctctttttatttttacgacaagtgttaattattaaacaatgttcatttttacttaatatttagtcataatattatcattttattacacttatgtcattaattaaatcacttcactaatttataaataactttatatttatttttaattgtcacattattttttatagtttttaaaaattactaccgtataatacatagattattataaattcttcttaaaaaatttaatcaaatacacacatcacatggccaatatactatatatatatatatatacaattgtaataattctatacatataaatatatatatataaacactataatgtaagtagtttttacaccacatattgaattttctaacttttttatttttttactgtaggtagtaattttttcaaaaatactgtataaggtttatacagtgtactgtgttaaa

SEQ ID NO: 356641 - DNA, 689 bp, Cannabis indica
ctcgcgcggccagataagtgcctaaaaatacctctttgtaagtttcaaatggccgcagcgagggtgtgtctcgccgcggcgactgtagcctcaaaaatcctgcacctgcttcacgatctagccgcggccaagctgtgtctagccgcggccagatatgcatttttcctcaaaaagtgtttttcttggctcagctcgtcttttattggactttttcatcccgagacctctattattccaaagaacctgaaaacttagaaaacaagcgtaattctgtcccaacacagtaaaaaacacacataaaatcgatccaaaatataggctaaaaatagcctaacacttatgatatcccaagataggcattgttgcagcctgctattcccaaataccctccatgataagagccttcaggtcctcctgaggttgaacaccagctagtggtggttgcacaccttgtggtggcagttgtgtgttgcctacaggccgcgctgaggacgaggattgttgcccaatctcactctccttttgtctcatactagcttggtgagataactgtgttgagaatcgggctactcattcatccctctcggacaatagtctttgtagttcttagatcttctcttcattactgattgccccagttactaacactggcatatttttatcattgccaatggttagtgcttcgaact

SEQ ID NO: 356642 - DNA, 640 bp, Cannabis indica
ttttatatataatcattcaacaccgtatctcacctgttattatcactgtatctcacccgttgtctctcatcgtatcttgctcattgtcatcattgtatcattaaatatcgtatctcatctattgtcatcgtcatctcactccaatcagtctcttataatttttgaatagtcatcttgttgatgaacatgttttctttaacagttgtcctcttaacattataacttccacactcttggagttggtggaaagttttgggattaatgagcagttttgttattccaattttggcactctgacgtggcatcacaggctggtgacataatgaattgactccccatatctgcccgaaaaagatgttctgaacagaacaccacatacatctggacggacgaagtcttcctagccgagcagtggacaaacggaacagcatgtcaacacttagcaacttcagcatttgcatcatagagcataaaagcaatccctataaatctgggatcgtatcacagagatatggcaagctgtccaaatccttcaatcagtgtattctatttatttaatgtgtaatcttaccaattatagacattgtaaacaaaggggaaaccttccctcaagcacagagccctataaatagtgatctat

SEQ ID NO: 356643 - DNA, 565 bp, Cannabis indica
gtgcctttcatgtacatgtaaagaatttctaacttcaattcgtgcacaaatgggtccacctccaattcctcatgcaaaacttcacgcacctttttttagtgtagagtcaatgtcaaacatcaatgtcttactttttgaagaatcaaatacccatttgaaaccctctacagtccaaacgccatcatacagtccatgcacaaatacagttgaatctgtctcaaagaaatacaaacaaataaacagaaataatcagcatactatttcgcacaataaatcgcacaagctactacgaatgtcgcacaatgtcgcctaatacaaaaataatataaagaagtatcatatcgcacaataatcgcacaacaaagaaacaatatcgcataatgttgcacaataaaacatacataacaaaattgcataatgctgcaaacatatcgcacacaaatcgcttaacatcaaaatcgcacaaaaaatcgtacaatgtcgccaaaattaatcatgtcatctctaacctcagatttctcatgacatcgcacaaaacatcatacaatgtcgcataaaatcgcaa

SEQ ID NO: 356644 - DNA, 598 bp, Cannabis indica
tatgcctgtgttgtctttttcaagtgtgttctgacaggttggcgcgatatagtcacagccgggtgtttcgggccgaaccggattcgagcccggaatgcaatttggattgaaattattggcattatatttatgtgtggataatctaaaattaattgggtttaaattatgcatgaaatgactaaattaacctttgtgagtgtttatgcatgctttatggcccttgggggcaaatgggtcttttggccatttaatggaattctaattaaattgaattttggtaaaatggaagagatttttctggttctttttacctcctacccgaaccctctctctcactctcttaaactctaaattttctagccttgactttggttgaaaagtttgatcttgctacctttggagggtggaaactcaaggagagtcttgcaatacttgaggtagtttctttttagctcaaagtgttgagtttgtgttttatgttgcttaatctgagttttgatgcgtttagttggtgaatttaatgcatgagttgtgaattttaactccctattgtttgctagcaactctatttagtgatttgagagtttgattgtgtttt

SEQ ID NO: 356645 - DNA, 517 bp, Cannabis indica
aaacacctgtaaatgtgataaattcattgcgtcgttatcagtttgtaataattgacatgtcaagttttagagcattagcaaaacgattatgcaactgtgatgcaaaattgagtgagttgtggttgttttacttaaggaagttcatgaccctacacctaggttgacatatgacatcaacctggatgttgggtaagtgtaaaaacatccaagggatgtactttataatgcctaagtgatattttgccatcatttagttagttttagtgtcatggcaaagctggtcagcagttctcggagttgttgctattttgtagacatgagagactcgaaactcttcagtttcgggtgagctagaaatgagaaatgtaaagttgtgaatttgacttcatggatctttgtcattgtgcaaaactcgacagacggtcgaaacgacatcaaattcgaataagcaaagggaaatttcattttttgcccctaataaaacccccaatatcaaaatttagaccctccactaatt

SEQ ID NO: 356646 - DNA, 599 bp, Cannabis indica
ataatatattatttttatattccgatccttttaagttattgtcactattaaatctcactcgttatcatattatcgtatctcacttgttgtctcaccgtatcttacctattatcattactgtagctcacttgtagtcgtcattactctccttcccaaatcttaatattaatcttaaattctattttaaatatcaccgctttatgtctcaattttatataaatatctaaatttatatagatatataaattaatactcattcaatctaattatatattatacatttttaatagagtaaacaaataatattcaaataatatagtttagaaattataaaattataaatagtctaatatatgtacaaattattaataataaaaataataaatgaagaaggaaaaaattatataaaattgaaaagaaaaaaataaaaataccttgtgataaaataataagcaatttttttttttttaaaaaaaataaataactaacaattttttatgtaattaccatttgaaaaaaaacatctaccactaagagaataatataaatatcgtacaaaaatataataatgaataaaataattaaaataattatactat

SEQ ID NO: 356647 - DNA, 627 bp, Cannabis indica
ctttacctcgaattgatgatcttttttatcaactgaaggggaagacagtcttctcgaagatcgatcttcgcataggctatcatcagctgagaattctagaggaagatatcccgaagactgtgttccgtactcggtatggacattatgaattccttgtgatgtcttttggactcaccaatgccccggcagcattcatggaccttatgaatcgggtgttcaatgattacctggatagatgtgtgatcgtgtttgtcgatgacatcttggtgtatcctgaataagaagaagagaatgagttgcatcttagatttgttttgcgatggttacgagaccataagttgtatgctaagttcaaaaagtatgaattctggttgtctcgtgtctctttcttggggcacatagtagataaggatggaatcatgatgtatccggccaagattgaagctattcaggattggcgaaaacaaaaatcagccactaaagttagaagctttctgggtttggctgggtattatcgtcggttcgttgagggtttttcaaagattgttgtacccttggcagagctgacccgaaagaacttgaagtttgtttggactaatcagtgtgagaaaagttttttggagttaa

SEQ ID NO: 356648 - DNA, 717 bp, Cannabis indica
aatttcaaatttattaattatttaattcatcatataagataattttaatatattatttcaaattaaaaggataattctctcttttaattgaaaatataccaaatattaaaatatctaaccttataattaaataattagtagattttaagaaattaagtaatttttaaaatctagtcataatttaaaaaataaaataactaatttttaaatttgaattttaaaatatctcaaattaataataatctatttaaaaattaaatatttaagtttaaatgttaaaaataatattttatttagatatttagggtttgaaattcaaataattcaaaatttggtgaaaaatcaccaaaaaatcgcattttttggtgcaaagcacctagctgcccacgagcccagcagcttatcacgctggtggagagggtgatttgcagggtgtcctaccgagaaacctcggtgcctacagggtgatcactcggcggatgcaccatctgggcgtgtctgaaggagtggcacgtcgagttcagacaaggagatgtctgaggcacgagcgcacacaagcaccttgtctgagtgactagtgcttgcagtgctcgaccctcgacaccacttggaccgaatttttcaaactttcatatctttctcaatttttatcggaatcgagtttcgtaaaagctaaaattacttaattttttttacaaggaatccaattaaattatt

SEQ ID NO: 356649 - DNA, 859 bp, Cannabis indica
tggccttgattgtacatatcttgacggtcttcagtgaacaacctggtggctctgataccaaactgtaacgcccgtataataatttactaaactcaaaaaaataactttataattatatgggtcgagatcccgagtaccaaaatatattttaaagtaattttacaaattcaaagtttactagtatatacatatatatatttttacaacgggcaactaagttaactcaaaatattgatagaccgaaacctttcaggttgcactgccgcgatatgtaaaaaaaccaccgagcaccatctcactgttcccccactttggcttttcctttacctacacaaggtagcaaattgatgagtcaacagactcagtaagataagcaagacatatatataagtaatgcaacatcacctttatgtttaagcctccctgagctcagtaacgagctcaacaaatggttaagaatgttcttaagggaagtacaacctctgtaccaaatgcactacagtaccaaccctgtgctcgtgttggtagagccattattgtactcatgggagttactaagtgtagtaccacatgcacgacgtaccttctggtactcgtgttggtaacactttaaccattctgatatcctacactatactaacactcttaaatcacacggacaatcagtattagtagtgtaaataatcaaaacaagcattcatttacatgtacgttatattcatgctatcttacctcgctccgtgctcaagtgtgccggtcagcctgactggaagtgcagctcgacgttttacagggccctaaaccataatattcaaaattcaatgagagacacgctaaaacatctatcggggatttaaaa

SEQ ID NO: 356650 - DNA, 519 bp, Cannabis indica
aaaaaacggattaaaaaagtgttaccaaacgccacctaaatatttttttttaaaaacaatgtagtgactacgcacaacatatatgtcgtgtaatgtcgagaaatcttcaaaacgctaccataaatgttatctctttggaagaaatcacagcatacatgatagctttgtcgtgtctttggacatgctctaagaagagattgcgtaaagggagcaagaagaagctccacttctcccatcagaggatgaggaagaagtagaggaagacgagaaagaagagtctgagtatgagactaattgagacgaagaacccacgagtatagcaatgcttatacctgtttttgtgcccaagttagagagggataccgttgcagagcgtgagcgtcatgaggttgaagagcttaaaaaaagaaattggagaagagataaatacatggaaaagtttcttaagatataaaaatgataattaaaaaatgttgctgcccaggatcgaactggggacctttagtgtgtaagactaac

SEQ ID NO: 356651 - DNA, 573 bp, Cannabis indica
attaattatttattaattttttgaagaaaaaaaaagaatattattggccctaacctcaattagtatacttatataaaataaaacatatttttagggtacaaaagtaaaggttctttttgtgaagctaagagcttctccaagaaagtcgcattttatataaatgacgttcctttttgttccaacaaggcaccatctaacacagcattttgaggttaatattacagtgcacgacatatatgtcgtgcaatgtagacacggtataagttttatttagttttttaaaaaaataatatttatacatattatttgatttatttattacatgaaaaatttaattttgagaaattctacaatacacttttttaaatgtaatgtattgtttcggcacctcacaaatttttttagtctaatatttttatagtcgtacatattataattatttaagacattttgtaaaattttgagaaatttagaaaaatttaacacgccaaaaataatgtatcttttcaaaagtggtgcactgatgtactcctacctattttagcatttcaagagacttttttagtctattat

SEQ ID NO: 356652 - DNA, 812 bp, Cannabis indica
tctgggacatgcatttttatctggttatatccagaatatgcatccatgaatgacataagctcgtgcccagcagttgtatccaccaactggtcaatcttgggtagtggaaaataatcttttgggaacgccttattcagatcagagaagtcaatacaagttcttcaacttccgttaggttttgggacgagaacaagattgggtatccacaaggggtaaaacacctcgcgtttaaagtcattaaccaacaacttatccacttcctatttgagtgccccttgtctctcagaatctaagggtctccttttctgcctctttggtgggtagtttggatcgatatttaaatgatggcagataatgttagggtcaatccttatcatatctccatggctctaggcaaactgatcctagttcgcccttaagaaacttattagttgttatttcaactgctcgtccaaattcttcccaatgtaaacacactttgtgggattttctgggtcaagaacaactttttccaattcttcaattggtttcaataagtttctttcatcatgaatctaaggatcaagatcttcatccttcttttcgctttcctctaccaagactgccattaactggtgatcgacttttctgtgttgtagctctatgcgatagcaatccggagctagcatctgattgcctcgcattactcccacaccctctggtgtttgaaactttagggataaatgcttgattaaactaacaacccctaatctgatcaatgctggatgacccagtaatatattgtaagccgatggcaggtcgacaaccagaaa

SEQ ID NO: 356653 - DNA, 849 bp, Cannabis indica
atacacccagatatttatatcacaagttatattcagttcttacttgatttccgaattcaagtgtgctggccgacctgaacggaaattttgtgctagatggattccctaatcacattttgaaacggggtaagttacatgattaaaacctaatctcgggaaacccaaaaccaaaaccctatgttctgctatactctctatgggttattctaactctggaaatggggaaacacccaaccgaggcaccgcaaagacgaaaattgagaaaatgaaaggcccggggaaccctgccaaaaccggctagccggtttttgtggcactgcaaaccggctagccggtttgcaccaggtttcccaaagtctttcatttgttgctcaattctccaccaaatgcaatgaaaccttccagagtacctaataagggcatacacaataaattccagccagtatttcacagaacaaaccaataaaactcaagttgccattaaagctcaaagctttgaactcaaagctcaaaattgcacaaaacctaaactaatcaacaataccagctgctaggatcctaaaacaactcaaattaaacataaaattcgaactccaaacaaccctaaccctaacagctcctatatcacaatttcactacttcaaactaactaaaaacttgaaaactagagaagagttcattagggcttaccttaggttgatcccccccttgaattccttgcttaaaactcagaaaacaacagcttgaaattggatttaccccctggtttttgccccagccgaaagagagaaagagagaaagagaggtttatgttttttttgatttttttcttgatttttccctaaatgg

SEQ ID NO: 356654 - DNA, 1016 bp, Cannabis indica
cgcgttagctcgattggtaagcagtaatgtatgtgataaagcgaacttcgtccctatccagctcctcaaagagcctagcactactggcatggaagagatcgaaatgattgacacttccccaaactggatgacaccaacagcagccacctcaacactggggaacacccacataattaaataaagctcgaaagatgaggaggatggctgcacggtatatcataatagagggaattatgtacagacaagggttctccatgtcgttgctcagatgtgtcactcaagaagaagctgcacgaattttatttgaggtgcacgatggattccgtggaaatcatgccgccaggcagagtttatctaagaaaattctatggcaaggttatttctcgacgacaataattgaagattcaaaggcctatgttaaaaaatgtgacaaatgccagagatttttgaagataccccgagcttttgcccaacgagttagctcaaatgcaaagtccgtggccttttgccatttggggaattgacttgatcggacaattacccaaaggcaaaggaggagtgcagtacgcagtggttgcggttgattacttcactaagtggacggaagctgaaccacttgcaaccattacatttaagaaagttcaagacttttttgtgaagaacataatttgctggtttggattaccgtacaaaatagtttcggacaatggcaaacagtttggcagccagtctttcaccaatttttgtgcgaaccatggtatcatcaaaagtttctccgcggtggcgcatccccaagcaaatggtcaagttaaagcagtcaacaagaccccgaaggatacactaaagaaaagactcgaggatgctgaaggaaactgtccaaaggagcttcctaaagttttatggtcgtaccgaacaactgaaaaaatggaaacaggacagattccatttgctatggcatatggatatgaagctttgctgcccgtagatctcgagccaccatcccactgaagattgac

SEQ ID NO: 356655 - DNA, 520 bp, Cannabis indica
tatattattattattatacatacataacttaagaaaaacatattattaatataattatatattataaattataattaatattaatatttatattttggtcaaatatatacatattatttatttctcactatattttaattcagtctttattttacgcacttatatggtaggcaccgcctcctaattttttctgttagtttaatttttgtaatacttggtgtataattcactggaaacaaaattctaaaaatcgtttagttaaaagaaaattattgtcggttaaaattaaaattgaaaattctacatcatgaaactaagtaaatgtggaagaaaaaactctcattgatcatttttctaccatttatgttaatcttccatcatgcattatttttcctgaaacaaatgctacacattttgtgttgaaaccttctataattcaatttttaccatctttttatgggttagatagagaggatccatacatgcatgtgaaagattttttagaaatttgttttacttt

SEQ ID NO: 356656 - DNA, 502 bp, Cannabis indica
tgggccatttcagatactcgagaaggttgggcaagtagcatatcggctagccttaccaccagcattgtcagttgttcatggcatatttcatatttccatgttgaggaaatacgtgtcagacccgactcatatcttgagttatgaagcccttgaactgcaatcagacttatcctatgaagagcaacctgtacagattctggatagaaaagaaaaagttcttcggaacaaggttattgctctagttaaggtactctggaggaacagcaaggtggaggaagccacctaggagtttgagtctgatatgaagactcagcatccagagctattcaggttagatttcgaggacgaaatccttttaacggggagataattgtaatgaccgctttagtaattggattagaaagggcgattagcactaatgtttattatttatgaatttatttaattatggaccccaatatttagaaataaatattagagttataatttctcaattccggag

SEQ ID NO: 356657 - DNA, 549 bp, Cannabis indica
taaaaagaaatatttaattttattttaaattatatttttctagaacttgtgtaagtaactgaccattaagtctcataagtggagtaattttatttttttatgttaataatatttttgcaacttttgtacatagctacagtcaatgaccacgtggtatttcttaattagtccagtcattaaacttttagtttttatttaaaagttaatttatatattaataaaaaaaaatgatacatttataatgactttgatcagatacttacacttaaatatttatctactaataaggatattgagagttagggctgtacatcggttggcttggacggtttatcttatatattttctaacctaatttaagattcgggttactaaaatttaagtgcaacccacccatttaaaaaataaaatttgtaaccgaccaatggtttgggcagtttggtcgggttaacccgcccaaaccggtcaaactttttttttggtttcaaagtcaataaaaattaaaaagataaattaaaaatatcaaattccaccaaagtacaacacaat

SEQ ID NO: 356658 - DNA, 1004 bp, Cannabis indica
atcacattccattgtgttgacatcaccgtaattgtgaatgactatatgttctggacataccagactttgtatatattaaaccataaacatgaaaactacatgtaaacataaactacttctaatctttcattgataacaaatcagattagattgaaatgggttttatttagggcataaaatcccaacaaactcccacttgcactaacataaaagaagtagtgcatttcaatcaatctattgtcttgatcttcagatcaagcgtagtatatttgactcaacccaaatctctagaactgtaagtctgtggtaagctactgctttctccaccattacttcctttgcgttcataaaacattgtgcaacattatttactatatgcattactcatttaggaatactgaattctttactgcttataaagtacatctaaataaacagaagatgtccctctaattctttccagaatggaatagagattacacaatgtagaatttcttcagttaaataactttccagtgttttcaaaattacaaatttatgtatctttactgatggagcttaaattattatagatggacttttacattctactagaataattcctccacctccagagtaaccaccatctcagattctttatgaggttgtgtagatgtaaggacctattatctaacatataggtcactttcagaaatctttcttgactgtcttttaatgttccttgtttgattacatcttagatggatcctactcaacagtaggagtctggctaaattcatacataaaagtacatttaacctcttactattgtttttgagagatatcttgttgtgacatattatcttgatctgaaactgtaaattccttctagactaagtcatcaacatagcaatctagtatttaacattaatgttcaatacttgacttaagattaagtaatcactagagtataccataaaactattcatgaggattaggaatttttttgcctaagtcattcgaat

SEQ ID NO: 356659 - DNA, 958 bp, Cannabis indica
atctccgaaattgagaaattataactctaatactcatttctaaatattggggtccacaaataattaaattcataaataattataaaaataacataaattagtgctaattgcctttactaatccaaattactaaagcggtcattacaaccaggctttccaatggatttttgtagccttccccaaagaactccaccaaaactgagccatgagcttttcaattttatgataaatggacacaagaagtttaaaacaagacattacataagagggaatatcctggattacaactttcaaaagtacttccttacccgctttagagaaaagcctattgttccacacattcaaatgtgaactaaccttctcaaggataaagttaaaactggtcttctttgatcgaccaaaacactgagggacacctagatatttacacataaaaggtttattatctagtcctagagtgatgcaaaagtactctgaaataagagagggtgtattggaggagaataagatagaggattccccatagttaacttgttgcccagtagctaagttataaagctgaagagtatccttgagagcatcacatcaggcataagaagcatcagtaaataaaagagtatcatcagcaaaaaagtaaatgagaaatatcaggggcagaatgaacaatggaaatgcctttgagattaccaagcctttcttggatctaaagggcagaagagagccctttagaaaaaaggatgaataattaaggagataagggatccccctgccttatacctctggaggggaaaattttcattagaaacatgaccattaattgagaccgaggacaaacacttacttataaggttaatgatctatcaagaaaattaagcttattaagaatagccaaaatgaaattccattcaacacggaaagtattctccatgtccagcttaagaccaacccaaccaagctt

SEQ ID NO: 356660 - DNA, 561 bp, Cannabis indica
cagaccaagcgggttaagggtctaccagcgatgtattttgaaactctattttgccgcttaggccggctgaaagaaaaagacttgtaataaagtttgtaaatattttgggatcccaaatgttataaagtttaaattattacaagttttatttccattctgtttatttcaaaagtttaaattctgcgctattttgattagcaatcctgcttaggggattagggtttcgtaaataactcgagtatcgtgcctaattatttagggcgttacatatcaaatgtctagctatattgccctgctataactaaaacattaatctataagaaagtgtgattttatcggccaaacatcatgttccaatgttgctggcataaaatatgaaaaatatgaaattttatatacgtataacgttaataacattcttagaattcaaatatatctccataaattcataaatcttaactaaaagtctaattcttgaattaaaccctaattatatgctaatttatcatattaaaattaagcagtctttacaacacgttcccttagtctctctctctctct

SEQ ID NO: 356661 - DNA, 541 bp, Cannabis indica
ggcagaaaagttatgctgatccgaagcgcagagatgtcacatttcaggcaggggaacatgttttccttcgggtttcaccaatgaagggtattagatgcttcaggaagaagggtaagttgagccctaggttcattgggccatttcaaatacttgagaaagtcaggcaggtagcgtattggctagccttactaccagcattgtcagctattcatgaagtatttcatatttccatgttgaggaaatacgtgtcagactcgactcatatcttgagttatgaagcccttgaactacaatctgacttatcctatgatgagcaacctgtacagattcttgatagaaaggaaaaggttcttcggaacaagactattgctctagataaggtgctttggagaaacgctaaggtagaagaggccacctgggagttagattctgatatgaggactcaacatccagaattattcaggttagatttcgaggacgaaatccttttaacgggggaataattgtaatgatcactttagtaatttggattagtaaaggc

SEQ ID NO: 356662 - DNA, 682 bp, Cannabis indica
gaagggtcgagataatggttttagagaggatgattgacagggttgacgctggtttcggagagcaactgggcgaatttgaaggggctgagaaggtggtttcgccagagctttctaagatttttagggttaggaatgtgtgaacagtggccttgtgttatttggcttttagggaatctatcaaattcgcgtctgtttacattttttataatttaattttacgccagttttaaatcccacaaacaaaataattgactgttaataatagacgcaaaatgaaagaaagttttcaaaatctttttggctttatttcgtcggttgcccttttaccgtcatttaagcaaatgacgctaattacacattattagcgtcatttttaaacagaagaatttaataatttgggtactattcacgtcggtcaacgctaatttggctactatcaacacccagacctgaacccattcccaaacccaaaattggacccgaactcgtaccttgtgacccaaaattggaaccaaaacgggaagttgaacgagactagaactaggacttggacttggaatcataactgaaattggacatagatccagaaccgtaaccggactaggacctgaactccaaatcagacctagaaccgaattgggagtcggacccagatcccaacccaaacctggactcgggaccc

SEQ ID NO: 356663 - DNA, 520 bp, Cannabis indica
ttttatttagggcattaaacccagcatggatgatgttgcggagccatctggttctaaaaacagacctcttctagataagattgaatctcgtaaggtaaagagaactaaatcttcaaaatctgtcaagaatgtaagttggatcttgtgaatgtgatcaacaacaacaagtgaaaataaacattgtctaatgtaagattacctgaagaattaaaataattaaaataattgatgttttgattttataatgataatcatgtattatcattgaaactaaatactcttcctaatatattcttattataaagaaacacataatatataatgggaaatttaattttctatacttacatatacttaatattttatttttaaactaatacatatcaccattgaaaatatatgaccactttatctaaaacccaaaaatacccctctcaaattttccatactttttttagtgcaaaaatataaaaaaaaaaaaaaatggtagtccgatggggtccgatggtggtccgatggt

SEQ ID NO: 356664 - DNA, 639 bp, Cannabis indica
ataaaaaaactaaaaagtaaaaaaaaaaattaaaataccaaagttggattggtcggatcatttggtttaattgggcgggttggacctattttcaacccgcccaattaacagattaagcggtttttaattttttcgagttatttcggtttgtaatttttatcagttttttcgatttggtttgagcgaattattcagtttaagcggtttacaattttttttgtacaaccctagttttcattctaagggaagaaggcaatttcctggttataaggacatagtcgtccttgctttacaaatagcttgtaagttcttattctttaatctttgaatgagttatacagatcatcttatatatctatatgggtgcacttttaatgagtattacctattcatgagtaatattataaacatttaagtttttatgcttagtttttctatcttatttaaaaatctctcatttttgtattatatgagttggagttgttctttcggctaaaaaaaataagagaaaaagtttttcggcaaaaaaagttgagtttgacttaagtattttgtatataaatatgtttttgatatagtgtaaaaagtaatatttttttgatattttttttaattaagtagctaaattaagtatagaaa

SEQ ID NO: 356665 - DNA, 664 bp, Cannabis indica
ttaacctagtccggtataatttaatataacacaatttcaaccatcgtgacatttctgaccattctgtcgagttccacaattgtcacgcccgaaaatattttattcgaattatggtatctacgatacccacatatttcaatacaatctccgtaattaataaattacgctttattattcatttactcatattttcctaatcaactcgtaattagtttaagtaggattataatccaactctaatacccacttaatcacatatttaataaaatatgtccaattaaaatatcaatacattttttgggatattacaagatctaagatcctggtaaaataaatttccaacaaagggcaggtccaaaaaaaagtatgcatcaaaaaagagcatatgtataaacatcctgacccaaagggcaggtccaaaaagaaaaaatatatgcatcaacaaggatcatgtatatatataaaaaatcctggccctaaaggcaggccaaaaaaagatatatacaaagggtccggggacaggccttaatcattgtctccccttagaaaataaaacagctattaaaataaaaattgtcttaaataaaagcaaaatagctgtaaataaaaaaaaaaagaagataagaaaaatacttggttgaaatgggttggattcgaaacggcc

SEQ ID NO: 356666 - DNA, 490 bp, Cannabis indica
ggtgctctactgtgcaggaaagggtaaatttgtttctgatcaatcatgagtatgggagcttgacggtgtatgtacatgttcaggccacactagaccaagctggttggggtctaccagtgatgaattttgtaactttgttttgccgcttaggtcggctagtggaaacggacttgtaatagtattttgtaaaatatttttgggatcccgaaacatgtaacttttggtttgtatagttaaaattattacaagttgattttcatttcgattgtatttaaagtttaaatttccgtgctaattttattagtaatcccgtttacgggatttggatttcttaattatcttgggtaacgtgcctaatagttagggtgttacaacacctttacgaaaacactcacaaactcacataagagatatttgaatgagttagaacatgaaggggaagtatgtgccttgttgcagtttccagcccaacatcctgttgggttttatg

SEQ ID NO: 356667 - DNA, 773 bp, Cannabis indica
aagtaggaaggtatcttaaattttatttcttacaaaaacacaaaaaggcaagtgaaataaactaaagattcagctaatatttcaaacccctaaaactccataaagctacgacccaactaatatttcaaagcaatgtcatctgcaattaataagtacccgatgaataataaacaaaattctaagtagccaataaaaatatctcaaaattaaacaaatttttggaaaaaaaacactaattatatacatttttccaaataaaactaattaaaataattcataattaatgtgatgaattacgtttaagaaagaataaaaaaaaaaaaattagaccttcatcttcttcttgttgtcgttcagccaaaggaaagaacctattagtagagtaccttacataacaacccgcgaacatggctctacccctccgacgcaggagcacaattcaagagtgaagcactagcattcaccaacagttccgacactcatctttgctaagagttttccaagtagagttttcaacatggaatttggattttctcgggaaaatgaggagaagaaaatgagatttggtgaaattgggatttaatttagggtagattcaattttttttaaaaaaaaaatatattaaaaagtaaaaatctttttttttaaaaaaaaaatatatatatatatttaaaacggatcgggtcagatccgatccgtaaaaaattaagcggggcgggtcggatctgatccaagatccaataactatccgaatgtttcggatcagtaatgat

SEQ ID NO: 356668 - DNA, 613 bp, Cannabis indica
atttcaagcctcttgcacgccggttgatcccaactagaggggaagtcgcactgtggcccacaataggtggctgtgtgttgggcttctcgggattagttcctggtgggacccatgtattcccaagggtttgtatagcagggtctgtcaccattgggtcactctgatcaaccaagcctctgcgagtttgcaccaccattctgtatgcctgttgaaacttaaaacaaagaacaaacttggatttttgctctcaatgaaagcaccaaaatgttgacctcgcttttagtcaatgtaagagcaagaggcaaagccttgcgagttgcagagaaaagaaaacaaagaaccagatgaacaaaatagctaaaagcttatcttcaatattgatctgagagtatatatacacaaagtcttaaggaaagaaacagagaaaacaaactaacagaaaacagttaaaaccaactaactaactgccacttgtacacttattaaacagtactaacagtatttacatcccccctcaaactaaatggtgtggaaaccatttttagtttggatttaaggtacaagaaccaatctgtagttagagactttgggagtaagtcagcagcttgatcta

SEQ ID NO: 356669 - DNA, 465 bp, Cannabis indica
tagggcacaaaacccaacagcacctccttgtcaaagggtttggttcgcatggtgcaacccctcgacacccaatggactctatttttcaaatcgtcatatctccttcgttctgtaaaaactaaaatcgcttaatttttcacaaggaatctaaaaaaattatttttaaaatgaaaataaaattattttcatggataaattttgtaatccccattcaatatcaaataacacataaaccaacatgaacacattgttggattttgctccctaaataaaacccatttcaatataatcaaatttactaattaacaaagatcagaaatcattttatgttgcatggttcacatgatttatttcatgattataaattctattaagtccagaacatatgtatttattcatgattatagtgttgtcaatacagtggaatataatcatgattatatgttcaaaagtttaattccctga

SEQ ID NO: 356670 - DNA, 613 bp, Cannabis indica
atcaacgaggttaatgaaaaacgggattaattaaaaatttgcttatttaattagaaacttaaagtattacatatataaaattttgggatcccatttacaaaataatttttaaaagtttgctatacacataaaaaaaaactttgtcgctcagcgactatgcagcaatagcctcaatgtcccaaagatcgtacgctctaggcctaactgccccgacatgtacaatcttcacctgctcgtactcacggctcctcagctttagccttgcccttacctacacataaagatagcaatgtgagttgacagactcagtatgaaaagcataacataaatatacaaataacccaggttataacttggcgcccatacacctgatcataaccctaatcctcgtgtcccacacggtatcgagtctagaacgttcataagacaatactatcgaccataatgtcaacctatattcaatatgctactcgtactcaagccatattgatgtgacaggatcgatcagtattttagccaacatacatttatcagtaatcagcacaactctatgtatactattactgctatcaatgtaatctaacaggcaataacaacatgtacactaaacatg

SEQ ID NO: 356671 - DNA, 542 bp, Cannabis indica
ttgttaatttgttgtcgatttttattacctatatgttatattttgttcatgttttgatgttatttagatgttattttcatgttacttttatgtagtgttcttgttgttatcgtattgtttctatgaaaaaccttaaaaatatataaaaaaaattctttaaaaaattgttatgaataatatttatagatttccaaattaccaaatgaattatcgattgtattttccttttattacattgatttagttttctattcttttagtcatatttttgtataaatataagtgcacattggaataaacaactgataaattctcatttagtttttctctcttcatcttcttcttcttttcttcttatctattctatattattttatgacacgttatcagcacaagtctctgccaaagccccaaggtaaatattttgttaaagttcttgaatattatttaaatgtcacgatacactaaatatatatttatatgtatactcatatgattgaaataatttcaagaattatttttattttatctataaatctata

SEQ ID NO: 356672 - DNA, 414 bp, Cannabis indica
gtaaaaatgaaagaggacaatataaaaagggtatagagtgtaatttcctctgaaagttttaccaaaaatattgcaaatttcccaatttattatcacttgaatctctgcacatgggtttctgtgggccgacaacccaacccaacccagaccgaaaattggaaaatacaaatttttgctgggccaaagcccattcggtgcttaaagagttaaaggagagaagccaaattgtacggctcggttacgggcccaaaagcccaaacttgtgcaaagccaactctggccgattagcccaaacacacctctctcttcttctacttcatctcatctcattcttttcttttctttttcaaatttcttttctggttatccatttggttgatggttgatggttgatggttgatgagatagacatgt

SEQ ID NO: 356673 - DNA, 530 bp, Cannabis indica
taaggtaaccctagacacttttagctaagttttcttaaggttttaattggtttcatgttgtgatttcaagagttagtggctattagggcttgggatgtttaggtttcgaagtttaggattcattttgattgattttaacttctagtagttgatttggtggtgttgtgttgaatttatgcaagtttgagttttaaactcaaagctttggtctttaatggcaagttgagttttattgggtttttctgtgaaatactagctggaatatgttgtttatatattgtataggtactttggaaggtttggttacgtttggtggagttttgagcaagaaatgaaatttcttgtgtcaattggtgcaaaccgagtaaccggttttacacgtagccggttttggcagggttacccaagcctctcatttcctcaattctcgtccattccgtgccatagttgggtgtttccctatttccagagttagagtaacccctagagagtataacaaaaaacctagggttgtgggttcaggtttcccg

SEQ ID NO: 356674 - DNA, 630 bp, Cannabis indica
agtcaatatatgtatcaattacaaatacacatctatcttgatattttaaataaattaatctatacaaaaaagtcactttagcgacatattatttcaattaatttactgaaaatattaaacataaacaaacaccaaaatttaaattaaattgtttgaaccaaaatatactgcaacatatatataatatacattttgtaatagtagaatggtacaaattaattaaataataactgccatgatagggttttattgtgtttatcgataaaacaatagtacatcaaaaaatttaccaatatataccattcataatatttcatagtctaaaacattgcaagccgaaataaattgtatatatatatataatttataagggctggtttggtatgccgtacaagggtcatactatattaaataataaataacactatgtttaaataaaacaatgtattgtattaattattacgaccaaattttttaatacaatgtatgttgtattatttaatacataataaatggtctgaattagcttgtattataatatttacaaagaatttaggtcaacatcaatttccgacccgaacccaggacctggacccagatccaaacccggacccggactcggacccagac

SEQ ID NO: 356675 - DNA, 644 bp, Cannabis indica
cacacatatatatatagagagagtaccagaaggggaagacaccaaactgaacgacggtgacgactagacgaatctgactgcttcaccttgagatagcagacatcggagtggccgaactcaaaacactaaagccagggcgatcgtttgaagttcgatcgaggtacaattcgcaccagagtggaggttgtttggattttctcaggaaaatgaggagaagaaaatgagatttggtaaaattgggatttaatttagggtagattcaactttctattttttaaaaaaaatgtatatattaaaaagtaaaagtgttctttttttaaaaaatatatatttaaaacggatcaagtcaaatccgatctgtaaaaaaattaagcggggcgggtcggatctgatccaagatccaataactatccaaatgtttcagatcagtaatgatccgtcggatcgaatcactgacccgatctgaatgaatggatctttttgccaactatacccataaccctagttaccattcgagtgagaagaagaagaagaaatcttgaagaaaccctaaccctaggtgcgactgtagagaaaataagaagagaaaagaaagctttagaaccctagagaagaagaagagaaagaaatattagaaaccctaa

SEQ ID NO: 356676 - DNA, 636 bp, Cannabis indica
tttaactttttttaactttttttttttatttatttaagcttttatatatatataatttaatactcgaactcaaaatttccaatagaaacgtcaactgaatatatcatttcgacatctccatacccaaaataaatttaacagtttggatcatttcttggccatagttatcccggaattttcggattggcagtaagtcccatcattactcgtggggccctgggcccttcccattgcagtaggcctattaggggcagatcaccatttataatgggcctaaatgtagttcggtccatggccctaaaattaaagcagagagccttgatgtgaaagctggtaaaggcccagacaagagtccacaatggtatattatattgtatatcaactttattttatttattttaatttttacttttatttctatatttttttttaagatatattcacttttatagatgatatccttattatactttttatattaatataaattatgtgctagatttaagtggagagtataagtatattaagcaatctatttaaaaaaaaatgagtatattttaatgaaatattaatatgaaagtatttttgattaataaatatgaaaaaaaaaagtatttctcaacttatccgaaccgg

SEQ ID NO: 356677 - DNA, 1072 bp, Cannabis indica
ttttgttcccaagtgtgggtttgggtcctgatttgagtttgagtttgggttcacgttctggtctacgtcctagatatagacactgacaacgaatcgagtccaaccatcgagtcctggatccaaggtcccgagatgggtcctatgtcaaggtttgggtctagggtcaggtccccgatccagatccaagttctaaggcccaagttctaggcctagttttggcgcccaattcttaggtctgggtcccccatctatattcgggtcctaggtctcggtccgggttcggcttcgggtcgagtccgagtccacatctcggtttgggttcgggtacgagtttgcgtcccagtcccagtctagctctgggttttgggtcccaggtccgagtctggttcttgggtcctgggttcatccccagttttagggtctgggcctaggtcttagtcccggtctgggtccaggtcccggtcttggtttagctcccaggtcacaagtcctggtctgggttcaagtcctggtatgggtctggtcttagattgggtttaggtttgggtcttgttacagtcccaagtctgggttcacatcctagactgggtttggattccatgtttgggtccgagtttaggtcagagtacgggttcaggtttgagtctgggttcgggtcctagtctgagtccaggtcttttttcggggccgggttggggtcccgatcaaggtcctagttaaggtctatgttaactcttttttgtggtctttagttttgtttgttagtcattgaacataacctgtcaagggggcgaatgttagtgtctttattttatgacagtgtttgttctattcaatgtctagtggatttttagtctgttatatctgcactagcgttctgttacgtgagtttcagttaagtattagttagtgccaagtggacttattttgtggatatataaatagtcggtttctgttagtaaagtcttgatcaattaaatcgttcagacagttatttcggttgtgtgtggagatagagttgtatcttttttcttgttgttgtgaatcaggtcagatcttggagcttgaggat

SEQ ID NO: 356678 - DNA, 708 bp, Cannabis indica
tcaatagtaaggtaatcattcccttacatttgtttacttaaattattaaaattaggaaatgtagaacttgattaaataaggaagaaaagaaagggagaacttcccccaccaattttgtaaagaatgccattaatgacacgtttactaaactgtatttagaatcagaataatcaatggaagaaattaatcgagttaaatgaaaaataatcggaatcaatatttgtaaaccctgacccctgacccctggccccaaacccctacctctaccctctaacccctaaaccctaaaccccaaaccccaaaccccaaacccaaaacctcaaaacccaaatcccatcccattcccattccattccctattcccatttacattcacattcctattctcattctcattccctagcccattgccattcctattcccattcccattcccattctcattcccattccctggcccattcccattcccattcccatcctcattcccattcaaattctaatttccattccctaacccattccaattcccattcccattcccattccctagcccattcccattcccattccctggccaattcccattcccattcccactcattcccattccccgacccattcccattcctattcccattgccattcccattctcattcccaaagcacaaaaccccaaatgccaaaaccccaaaaccccaaacccca

SEQ ID NO: 356679 - DNA, 580 bp, Cannabis indica
taatggtttacactaagtacacaaccatttcatcattctgaaattttcctatcactaggatatatccctagaaggacttaggcaacaactagtaacttatcatagaccttatactatcatcaatatgaaaattgaatttctacggaagtaagtttggatacaattcaaaaaatcaacttaacgatctttgaactgcatatctaccaaatatttctccacccctatcagtttgtaagatgtttttcacttaccttaatgtttttcaacattgctagaaattcatgaaatttctcaaacatttcaaatttctttgcataaggtaaaagctagagtgatcgtcttaagaatgtaacggaaactcatatccacctctgaatgtacatccatttttgaatatagatgatcttactttcaagtggatataggcatattgactctttacagagaatgatcttgtcaaaaccactatgaacaagatgaaaatgccataaatataaagaatgtggttgtaacattttgatgacttaggtctaattacaataaagagttcttagaatagtctaagtggatcctggtcaca

SEQ ID NO: 356680 - DNA, 597 bp, Cannabis indica
actatttataattacatattggagacttaattacaaagttcactgtaatatgtttacaataatcatccctaaaatcatgggatttgattacatatcacgtagtgtaaatgtggtttatgatttaaaaatcatatagcagtgatttttctgcttttactgggtcaaaatgatcgtgtcttaaacacgtctttaattattgtttctggagttgtctcgacaaaagcttggttccagtgatcttaatagcgagctggggccatttttccttccgaggtcgacgatgtatgtcttgtgtcgatcacggttgttatttacaaagagttcttcgaagctcatttgaatgttagcttcttgacttgacagggttgtgggcctcgctgacgctaacgggatgaagttatatgaggtcttcccacaatgagacaggcaccttgcttacttggtcttgggccgatccgtttgtaacacttaatttgttcactaagaacttttgcaattgacatatgtcgctttcgtcttccaatgtgtactgttcttgatgcctcgcaattcgcattcaacgacatatggtttcttgctaatatgctaagtaccagt

SEQ ID NO: 356681 - DNA, 670 bp, Cannabis indica
ggatactaaacttttggccatggaagaagctaaagattttagcacaatgaaggtggaagaattaatgggttctttgtgtacttttgaattgactcaacaaatcaagcataaggacaaaccaagctccattgctgataaaggtaaatgtattgcttttaatgttgctgagaaataaattttagatgatgagatggatgttttaactaaaaaatttcagaaatacatgaaaaagataagtgacaaaaagaatttttcaaaattctccaaaggtaatactttttcaaaaccttcaatgactaaaaatcaaaagagaattcaatgcagagaatgtgaaggttttggacatattcaatctgaatgtgcaaatacactgaaaaagaataagaaaagtttcaatgtcacatggagtgacgatgaaactgatagtgatgaagatatttctaaaatgttgcactaaccaaagtttcttctaagtttgtttgtgattcacatgtgaaagaaatattggtatgtttgaataatactattgataaagaaaattcttattttgatgaatctaaaatttgtgatgagtcactgactgagtcttacaaggctatgtatgaaaagtggatacaagttacttctaaaaatagatcattgtcaaaaataaataaacaattgtctcatc

SEQ ID NO: 356682 - DNA, 486 bp, Cannabis indica
aggaaaaaagtaaactacgaaatacttaccacagtgagggaatgactgagatcctggacttgaaaaatggagttcaaggatgcacaagtagcgaaccgcttgggtgcacaccgagtaagctgagacgcaaactcgccagtcatcttcgcggcaaagggagccagggtggacccgacaaaacgattgaaccaatccgccagggggtccaagtttagatctcacggattctggtagttcgaatcgttgagggtattttgcatttcaactcgcaaaaccctcctcaaagcctccacgtcagcatgcccccgggagtactcgtccatggcgtagttgtgtttagctatccggagttcctgtctcgcctcatctccaggaactggagtcagcactatggtaggaggcattgtgtgttcctccacctcgggagagatcccgaaatcagggccaggggccggagtatcaactctccgccgccgtttgggtact

SEQ ID NO: 356683 - DNA, 501 bp, Cannabis indica
cactcgtgggccaagaggtaggcctgctgaccttgtctgggaattcatcaggaggagccatgcccgacggatccacgcagaataatggagccattccgcctgtcaacaaagcgaaccaatcgctaaggtagccaggttcttctgtgttcgataggctgggaacaacccatgacctaagggacgatcgaaacagaagaaggggaacaaacgagtagaataatacaacgatcgtgtagcccggagcccatacttaaatcccctctcagaaagacgctgacgtaatctaacccgagcaaaatgccaatcaagtcagcccagccgtgcgggcctagctcgacaaactgaagaatatgtttcatggcatggccggacagcgtaacaatgatcttgagttagaccatgcacgcggaactcccttctcaccagagatcaatcttctgccactaccccacaagttcaagatgccaacgtggaagatttacactgggagagaagatcccc

SEQ ID NO: 356684 - DNA, 794 bp, Cannabis indica
tgttgaataaaatggattacattgaattgaaattttatttagggcataaaacccaacatgccacttgtatcagtctggccactatagagtcctgccaggtaatcctggccgcccatagacctacaggggaggtctggccacccaaggtgtacaggatccgacaggttaaggcttgtaggatctggcaggccaaggtttgtaggacttggcatgtcactatagcttcgccaagaggaggctagacttatggcgcttgttgtggtgacaagactcatcacatatgtagtgttcatggagattccacttgtgacgggaacctgagtatctggatctgaaatctatgggttttgaaggagacttgaagatacgtatagtatgataagagttcttcttgtgttcaccatggagtttgatcagatatgatatccacaatctcaatgaaagcaccaaattgttgacctcaaaagtgatcagctgacagcagagtcgtatggatctgatgcttgccatgtgttacacaaacaaaatgaaaaagtataaacacaaagatttgttatagagattcgacccccatgtgatagcgggtaatgacctactcccctttttggttgtattgatacctagaaataatactatttagatcactataggtgggatctaatatagctctctatatggatacaaacatgaatcagtaggcagatctttaatgagagagtgagattgccttagaggtgtgtgaaaaaagagagaagagagagccctattgggcgtgagcaagagagagagagaga

SEQ ID NO: 356685 - DNA, 1042 bp, Cannabis indica
caaaaaaaaaaacaagaattgagcaacggtaattttatcgttttaaatttaattttttattattttatttctttataaatagtcactaatcattttacatttttaacacaaattcatcttctaaataatttcacatactcttcttttacaattcatgctactttttttttcttaccaaataatagattcacaaaactcctaaaattctcaaaaattttcatataccaactcccaaaatccaaatttattgtattctcaatttaaccaaaaaatttcaaattctccacatactaattcccgcaatccaaattttcagtattctcaactcagtcaaaattttcccatatcttcattccctcaccaaaattttaactcttttgagacttctcaacatactccattattcacactacgaaattcactaccatatggctttcatagatcaaatatggaaaagagtacaattgatttgaatgttgaaacttcatcggcatcggcatcagcatctgaaacccatcatatagggctggaaaatgtggttatagacaatcagtggcggaaccagacgacgaaataaggaggggccaaataaaatatattttcacctaatttttttagtatgtaatattttataaatcaatataaaaagttaattacctttatacaatgtatataaaataatgaaaaataataaagagcgccttatagtgccaagtactaaaaaatactataaaaactgttacttttagtgacaaccttttagtcacaacataaatttgttgaagttacttgtgactacaacatagtatttagttacaagttgtcactaatttaattttaatcacaacaaatattgtgactaaaaacacatttagtcacaacaaattgtaatttttgtgactaatacttttagccatggacctttcagtcacaacacaataatgataatttataattagccacaacttttttatgtttagtcacaaattttattgtgactaaaaataagatattttgtagtgaaaagtgacctaccgttatt

SEQ ID NO: 356686 - DNA, 772 bp, Cannabis indica
ttttttaagctcttacttaattaatttctaaaaatctcagcaaataaaaataaataaaatcaaataaataactaaacttataattttgaaaaaaaaaactaacttataaaatacaacaaattccaaatatatatatatatatatgatacgaaaaaatcacgtaaatatcacatactaaataaattaatattatataataaaaatcacaaataagatactccttctaatttttttttggttaaaattaaaaagatattactcctttaaaaaaattaaataaattatacacattacgtttaatacttactcaaactataatagtagtatcaaatcaattagaaaaataaagttctgatcaattaattacattaacttttttttttttttgtaatattaaatacactaaattttaaatgaatatattttttaaaaaaagcaaattactgatatttatataaaattaataataaaatattaccgtttaaaaaaacaaaataaaaagatatcttttatttcaatttaaattattaatattaactattgagtttgatttcgattaaaattataataattacttctgtacatataagttgattttaacacacttggacttatataaagagttagaattacaagattttggagagaaaaacaaacgggttgactttgacttatctaatattttaacactcgattttttttcttctttcgaccttttattattattatttttttttatttttttaactaatcagagagagtttgagttaat

SEQ ID NO: 356687 - DNA, 924 bp, Cannabis indica
agtctgattgtctgagagtgattaaggatttggaaaataataaatttatggcttctccttatggccatattatttctgattgtaaggctttgttagccgatgttatcaatgtttcttttcattttgttaagcggtctgctaataaggttgcgcatgtgttggcgcgatcttctcctattgaggctgactgcgtttttagtagagatactctacctattgtaattgcttcccttgttttggaagacttgaattaatgaagtttcttcataattattaaaaaaaaaaaaatagtatctaactaatattcctattggattctcacaagtagttataatatataacaatcttaattttattagtggaagaaaaataagatactaatataatagtgcataaaggtatgcaattcaattacaaccgattgatctaatagttacggatattcaattataattggatcaaaccggatgtaaaatttgaaaattcaatctgatcggatcggttgttggatcgaacatccaattcaatggataaccgaccaaatcgatccaattatcatccaatccaatggttatccaattctatttatatatttttaaaatacatttataattttatatatttaatgaattttatttaaaaatatatattaattgatttaatatacatttaacgcatgagattaaagaaagaaaaatcttagatttaaaataataattcttatcttcctaaacgctaataaaattgtcaatacgtattgaataaattttattttttaacaattttattatgagatcgatcatgaaaattaagttggactaaactaatgtttattatatatgttggattattaagttttaaattatgtttttatatatatagatatttctttttaatgaaattaactcaaatggtagctaaaat

SEQ ID NO: 356688 - DNA, 1101 bp, Cannabis indica
aaattatatttattttattaatttaccattattttataaatttaacaaataaataatattcttagcaaaaaaatatatttatcatgtgatggaaatgtgcacattcttaagcctaattattaaaaaataaaataataaattacatataaatattaaataattagtaatacgatcgtaacatccaaaagggtgagaagtaaaggaggattgatagggaaaaattagacttttgttagtatggaattagctttcaagtgattttatagtagaaaagtaaatccttagtttaggtaaattgtaattccttaggaatgggctttcaagttctaataaagaaaaccaaacacttgattgagctttcttaaggaatagcaagtccattccaatgctcattcatgtgaaccaaacaccaccttaaagatatagggtttgaacacatgacctttccttttttcccatccctcccctaccactaagctaggcttagtggcttaaatataaggaggtgtttagtattattttcttggactaaacatttactttggattttgttaaatttttttttggcaatttagatgttaaaatattttttatttatggtgagatttctttgtattcataaccgattttctcaccttgattttttggtttttattgctcttttctatgttaggaaagattttattttcaactaaacttttcttgtatggaaacttcttgtaagagaagcaattctcttatggaaagttggtttttaaaggaaactttgactattgctatattccttattaaattcgattatgtcttgatacaatcagattatacagagtgtttatggtaggaatcaagacccaatacaagatcagactcgtttatggcaagtttccttttctggtctgaattgttgcgtcagaatctgattttgatgctccaaatcaagtttaacttagaaaagttgtctacagttgtagatttgattttgtggctgtctctagggtttctatgttctataaatagaacctagatagcatccattcgaatcaactcttctagtttttattttttgtcaatttttcttatttgtgagaagagagttctttt

SEQ ID NO: 356689 - DNA, 559 bp, Cannabis indica
attgaagcaagccaactctctttttccaaacaaagtcattctccgctcgccaaatagcccaactcaccatcgctgcttcctccatttcaacttcatgccccctggtgaaaattcccaataactagctgctgaacattgcaaccccagccccgacgtctactatgctgcgatgccaagcagcctttgcgatcgagcattccaccaacacatgttgaagagtttcagtactagagttgcacacagggcaatcagcattgataggaacatgacgcttttggagttgaaaacaagttagaagcacacccgaagcagatcgccataaaaaattactcatcttaggaggaattttttatgaccaaagtcgcttccaaaactcagtaatggcatcccggcaccaagcacccttagattcttgcaagaacttatatgaacttttaaccgaataattcccacaagtctcaagtcgccaactccaaccatcattagcggctgaatcactgagttgaatggacaaaataaggtcctaatcacgcgcaacaaacaggtccctcacaacatc

SEQ ID NO: 356690 - DNA, 539 bp, Cannabis indica
attgaaaaagcactgtagcgtgccttaacattagggcgttacaatcactaatcatgcatatttatgtggttattaagtaactagataactttgccgcccttcatgcggcagatttaaataataataaaaaggaaaaaaaattaactttaaaataataattttaatttataaaaattttgaaattaaattatctaataatatcttattattgatttagttctttttttaataaattaaaacaatattatataccatatatattttataagaaactaaattactaataaaattaattagttaataaataatttttttaaaatatatacatatttaataaattagtttgttgtgtatataatcaaataacatttaacatttaaatttaaattttagaatctatatatacacatatatatactagcaaaaactacgtgcgaggcacgtacactaaattttgtgctagtttttttctatgttatttgaaagtgatacaataaaaaattaaagaaaaaacattattagttattaagtgagattat

SEQ ID NO: 356691 - DNA, 748 bp, Cannabis indica
ctctctctctctctctctcgctctctctctctctctctctctctctctctctctctcactctttacttggttttctggttcatagcaattattgctagcttgctaagcttccacacctgctattctcataataaaaaaattggttttcatgagcagggttgactatcatattagacaagcataaaagtataaaataggcagtgagcaatgtctacccaaaccactttcacggagcatgcatattccacctgctaaataacatcaaaataaactttggagtgcatgaagatgatctgacaacaaacttcgtaaaagcaataaagacatacaagttgacctcatttgatcactacatgatagaaatagacaaaattgacaaacgaataagaccatacttggagaaaattagacacgaggtttggactaggagccactgtcctacaagaaggtacactatgatgacttcaaatatagtagaatcaataaattcagcgatcctaggtgaaagatcattacctattacaacaatgattgagtgctttagaagccttgtgcaaaaatgggtgtggaaaaatggtagtgaagcacatggaatatttatcgaagtatcattagaagctaaagcaatacttagagaaaattcggttaaggcaatgaaataccaagtaaaaaaactaaaacatagagaagaacaataattaaaaacatttcttgacaatgctccaaaaccaatttctaacacattatt

SEQ ID NO: 356692 - DNA, 495 bp, Cannabis indica
ccaaagctgggtagaaagcttcaattatgaaattgttgttgcgtagcttttctacttcttcttttagggctagtctcgctctctgtctagtagccttcacttttgttgtactggccggtaattgggattaatattcagaacgtgcgaaatgatagaaggagcaattctgaccatatccgcatgtgaccaagcaaaaacgtctaggtttgctctcagaaattttatcaattcttattttacttcgagcaacaaaccctttctgatctttagctttctggttgggatatctagatcgatctcgatctcttctaattcttccacaggtccaacattactgcgtgggtccccaagtcgaggatccacatcttcatccccgccttgggaagttccctacttggaaatgttttttcccttgtctatgctctggttggaggatactgttgggttttagccctaaataaaactccattccaatgtaatccattttattcaaca

SEQ ID NO: 356693 - DNA, 539 bp, Cannabis indica
aaagtgtacaagaaaatattttaatcttccaagaaggttcaagctattgtggatggattagtgattgagaagtgtgcttagtattggtcatgcgttgaagagtaatatttttttaagaaactttactttcatatatttaaaatttttttagttaattttacatgtatcttgcacgtgatattgaacattataattttgtttaatttgtttatatattttttagttcagtgaaaaataactattattatatttttaatttatacattaagtatttgtataattataatattcttcttttttttttttgagaaaaaaagacaatagttgtttttttaaatgttaacaatatttgctacgatataaaaatacaaaaataattgtatatataatttaaggaatctacaaatattaactactgaaattcaacgtataaacaacgtgaaatcaatatatttaaaaagtaacgaaattaaacaatatgtttacaactttaaaataattgtaaaacaacaaataatgttattactaaatataagtaa

SEQ ID NO: 356694 - DNA, 958 bp, Cannabis indica
atacacagttcttaccttctttccagattcaagtgtgctggtcgacctgaacggaaagtctcgtgctggatggatgccctaatcacataatgaaaccgggtaaatcacatgattaaaatcctaatccgagaaatccgaacccacaaccctaggttcgattatactctctatggattactctaactcaggaaatagggacccaactacgacactgaaaaggacgggaattgagaaaatggagcattcgggaaccctgccaaaaccggctagccggtttactccagttcaaacccaatattttcatttcttgctcaatcgtccaccaaatgcaaccatactttccagaacacctatacaatgcatatacaacataatccaaccagaatttctcagaaaaaactcaatataaacaaacatgccattagagatcaaagttaagatttctatgctctaacttgcaccaaaatctaaaccaaacattagtatcagctgctagaaactaaattcaactcaaatgaaccctataattcgaaccacataaaaactaaaccctaacgaccctaatttccaaaatcacctaattaaaccaaagtaaaagcttcaaaaacacaagtctatggattctagggttaccttagcttgaatcccacttgaatttcttgctgaaaacaccaaggatcagcagcaactcccctggttttggctagttcgaaaggagagaagggaaggaaagaggttaattaatcttgaacttttggctttttccttatttttctctattttcttcaaatgaaaagagataaactaacttgatctcttgctgaattgaaattttcaggtgtcaacaccctaggcagccaccaagtcgcccacttggcaaattacgaaaaatgcccctaagcctacaacttagatattttccaaaactaggggtaaaatggtcaaattccatagcccc

SEQ ID NO: 356695 - DNA, 954 bp, Cannabis indica
aaaaaaaaaaaaattaaaatggcgggtttgcattatacaatgtatttccagataatttccggttagtcatacataaatactccttaagtaattttaaagactgaaactttgtaattacttgatataaatgattctctttattcataattgaagttttaaatttacatcagtaatgcgagttgcatcatttatttattgatagtagggtcacaaatgttctacgttctagtagttttttattagcgagccatcaggtcgagccaacttatagactccaactccaactactgcttcgatgacttatggaccctcccagttcgggttgaacactcctgctgatgcatctctcgtatttgcaaagactcgtcttaacaccaagtctccaacattaaatagtctttttttgactctttggtttaagtatcttgtcactcggtgctggtatgcagcgttggtgatttgcgactcgattcgtttttcctcaagtagatccaaggacaatttaaaatttctttgttttcttcttgattataaaactctcttctgtgagtcgatatgttcacttcaacaggcagcattgctttcgagccgaatgctagcaagaaaggagtgtgtctcgtggctattttctcaatagttctgtgggaccagagcacctgaggtagctcgtcaacccatctgcctttggcagcgtctaacttcttcttgatagtatcctttaaggttttattaacgactttcacttgtccatttagtgaagaaatcgactgctaccaccacatacttagctcctcctcgctcagtgggtaatatcccgattaggtcgatcccccatatagcaaatgggtagggcgaggtcatcatcctaggttcggttggcggtacacgaggtatatgtgaaaatctctgatatttatcacatttcttgacaaactcatgtgtgtccttattgat

SEQ ID NO: 356696 - DNA, 398 bp, Cannabis indica
aaaatcgatccaatccaattatattatatatattaaaaaatatatataaaataaaaaatattaaaaattcaaacatacatcaattatatttgtagtagatttatttttgtgtgttgaatttgtaacacttagttgttttgtatatttttttttcatgatgttttacttagcaatattgttgtttcaattattttaaacttttagtggtaccctaactattataggcgtgttagcgtgatttttaacgtactgtgcagcacgttggtaatcaacgagattaatgaaaatcgttaataattaaaattttgcttaattattttaaacataatatattacatttataaaactccaggatcccgtttgcaaaatacagttacaaaagtttactattcatatac

SEQ ID NO: 356697 - DNA, 1157 bp, Cannabis indica
ggactttgcatctatattagctcgttggggggtgcacggaggatctttgaaaatctccggcatttatcacatttctttacataggcctttgaatcttccatcatgttcggccagaaatatccttgccttagtattttctttgataactttatcctgccgcatgattaccatagaaatccttcatgtactttggacaagatccgtgcaacctcttcttttgttacacacctaagcaatggcatggagaagcctctcctatacatcacacctttaactatgatataccgggtagcttttctcaccattttctgagctttgttcatactgtttgggagttctccaatgttgagataagctattatgggtgtcatccaatttggtgttgtatttatcatttcgacttctttcgcatagttgatgatgggctcctgaaggaattggattaggactaagttggctttatccgtcactgtgctgctcgcaagctgtgcaaaggcatcaacaattgtattttcttcccttggaatctctttgagggtgtaacccttaaattgtgtgagcagatcttggatcttgcttagataggccatcatcttttctccacaggctgtgtactctcctgaaacctagtttcctaacagctgtgaatcactacagacctcaatgtctttggcgtgtacctctcgaacaagttttagcccaactatgagtgcttcatactatgcttcgttattggaggctttgaacttatttttattgctccatgtaagggtttcccctaggtgtgataagggcaattcctacaccagaaatctagtccgcaactgatccatccacatgtaatttcctggtaggtctgtctttgttcttttctagtaaagattcttgtactagctccgggttatcctttgtattgctctcttctttgcctgtacattctaccataaaatcctctaaggtctgtcctttaactgctgtatggggttggaagattatttcatactgtcccaactctattgcccacttgagtaatcttccgaaggcatcaagcttttgcaacacttggcgtaaaggttggtcgacatatacccgaataggatgagcttggaaatagggccttaacttccttgtgggtaagattagacagtaagtgagtt

SEQ ID NO: 356698 - DNA, 490 bp, Cannabis indica
ggttcagccatggactagaaaagaaaggcatccactgcaaccaatggttcgggtcagagcatgagtttctgggggaactagggtcggggcaatcgccagagtggcaccaaaacccgatacacttacccagagtgccccagttgtaagaagcaccatctaagggagtgtaaagggaatgatgtttttcagtgtggcatgccagggcattacaagtgagattgtccccagctcagaattgaggcaccgaagactgtagcaaaacccactccaaccagggtgtttgcgataactcatgctgatgtagaagccagcccctctgtggttataggtcagctctcggtcaacaactcttatttctctgtgttgtttgactatagagcaactcattcttatgtggcggctagagtttttggtaaattggatagaccgcatgatagttatgaattagggttcggaaccctactgcctggcggagagttagttatctcca

SEQ ID NO: 356699 - DNA, 562 bp, Cannabis indica
aagctaatcagttagtgaggtttggatgctaataatataaatatgccttatacatataaatatcaagacacttattactattattatttaaaataaatctaaactatttggtgacacactccgaggtaattaaacccagtgctctgataccatttttctatcacgacccgagccctaggccatggcagatatgtaatatctataacttggatggtcaaaggtcacactttgacccttgtaggaagataaagcttataaatgatccttttatttatatcacaaaataataatttaaaagtaatggattaactactcctatattaataagaaaatattagtaacaaaattaggaccactcatcaatataaaagaacaataatattgccagagttatgtaatcaccgaatatatagatttaataagtcaataaaataccaaaaaaatatctagcatcaattattcctcatttctaactagtacatagctaatttaagtcatcgagaccatccatttcagcttaaatacaaaaccagtttcattggaagattagagagtagaataa

SEQ ID NO: 356700 - DNA, 611 bp, Cannabis indica
tgtttgtctgcttgatatatataaaaatgtcacttttactaagtaaaagttggtattgcgctggtaaaataaaatttacttggaatgtgttggcaaatcaatattgatattagaacttttaccagcataaaataaaaactgctggcaaaaatgactttttctcagtgcgtaagtgcgctagtaaaaattagattttagtcactgtaaatgtaaaactttgacctctttgccagtacagtttgcgaaatgcgctgataaaaattacttttaccaatgcagtagtaaactgtgctggtaaaaataacatttcttatagggatataaggacaaatcacatactattttataacattattatgtaaattaaacagataattaatcgactaacaatttagaaattacaataagcatttcccgatccccacaaaggtagtagttattaaaagacatatagatcggaattcggaagtagtaatgccaagccaaccactacgtgtataatatgttttatgtatatctatagatgatatatttttattgtaatgcatacatttaatcataaataaataaaaaagataattacataaggtatttaattttttttaaaaaaa

SEQ ID NO: 356701 - DNA, 629 bp, Cannabis indica
agacaaagaagatgcacgagttggatttttgatctgatgcttagaagtggcctgggttgatagattgtcaacctgggcgtaggggtgctcgggcaccgggtgtctaggtgctcaaaaataaaagttctctgaatctgattctaatgcctaaaatatgttcgtggtatgtctagttcatgttttagatgtcaaagttcaacccattttcactaagactatttcgaaaactgaaaccctaattgaggttgtcaacctagacgttgggtgaaaccctaggtgtccaggttgatttttgaggtgttgattcgtgtattttttattcctagggcctggacttgaatgctacatgtcttcatggtatagaatattgaaagatagtgagttaaaaataacttgtcgggatctaaacacccatttcggagttctcaaacgtcaacctaggcacagggctagggacccctccaggtcaatttgctatgattcgagactactcaacttcgagatgttttcttctttccacatgtcaaacattgatgtccacatcatcagggtctactttttggtgtaaacacagacttctatcgtaatcatgatgaaaaaaggtgctcagtttaatctagaaatggatc

SEQ ID NO: 356702 - DNA, 507 bp, Cannabis indica
ttaattgattagtggattttttttattattatttttattgatggattgaatagtttgcttattgaaatgtgtaagctgttagagaaatatgataagttatgataaaattgttaaatatgtttatgtatatgtggtaatacttattagcattaattcttgtttgaaagattttaatgatggaaataaatggtcgcgagtgtactggaaaatgtacctgggggcgatctagtaagtataattgtgagcttgcaaggctcggagttggtagcatgagtatgaatcatctactaccacagacagggaataaatgtacgataaagtaagggattaattgagtggcaaagtagcaaaacttacatgattaatcccgggcagtgtggtgatggggaatgacactaaactggaccgattggtaaagttctattttgaggaagcgactattaaggccgctagagagcctaatctagttgaaggtgggaaaagtatatcgctctaaatgtggatata

SEQ ID NO: 356703 - DNA, 592 bp, Cannabis indica
ttaaaaaggggtgatgacattttagattttgtttgggtgtttgtttgacctagactgagactggtgctagtcttttccaccgtgataagttgaacttctatgaaccatactttgttaatagttttaattgattttggtacaatgtaatcttatatttcaagaaggatgattggaagattgaaaagttttactgtagaactagttattctacagcaagtggttcaaatcccttccagagttgtgggggaagaagggaatgcttggttgtaatcgttgagctaagattagagaatcttgaggatgaattagggatggattgatttgtaaagtttaatgcaattatcgattgtgaaagaaagatggtaactcttggacctaaaggtgaggacccattcgtgttcgtgggcaaggttcaagagtcctaaatttcattaatttcatcatttaaggcaagagatttaatgtggaatggatgcatcagtttcttaactagtaaggtatacattatgaagaatacctatggaaccagaatacgttccagtggtatgagaatttctgaatgtctttccaggggagttactggagttactat

SEQ ID NO: 356704 - DNA, 1343 bp, Cannabis indica
agttatgaagacattgaacttcagaacgacctgtcatacgaagagcaagtagtgcagattttggacaggaaggaaaaggtgatgcggataaccttgacaaagtgctctggcggagcagcaaggttgaactgacataagattattccgctagttaaaatgctgtggcagaatagcaaggttgaagaagcgacttgggagttagagtcgtagatgcgggagtagtatcccaagcttttcaggtaaattttgagaacgaaattcctataaggtggggatagttgtaatatcccgaaaaataaataatattgaaatagacatattttattaaatatgtaattattttggtaacgaagtaagattatgatcttggttagggtaattattgagattttactcaatgaaataaatagcgtaatttattaattacggagattacattgggatatgtcagtgccaaggatatcaatttcgaaataaaatattttttcccggtaattgtggaaatttagcgatgtggtcagaaatgtcacatgacgttaatggaagaattattttgggaatattccagactaggttagaaattttagaatgtcagtttaatggaattagaaaaattacaaaaattccctaggttattttaaagtttattttttttcattgggggtaaattagtctttttgcttttaggttttagtgtcccttttatttttgggctggtatggtaagaaaagaaaagaaaaaaaaatgaaatgaaatgaaaatgaaatgaaatgaaatgcatgaaaccttatttaaagggaatagcttccaaggcaagaaactaagtttcttcttcttctccccttcgtgtgaaccaagaccagccagcaagaggattgaaagttcaccatttcacttgaattgaagcagcttgtagaacctaagtccaacctagaagcaatcaaggtaagttctcaacaatttttggattgaaaatcctagttttgagttagttttgaagtagggttttacttctttgttgctgtaggacttaaactaggtttggggtgtgtttagggtaggtttttgagcatgttgggaatagtttaaagtggtctccatggctgcttgaattggttttggtttgttgaaaccaaagttgagttttcttcactttgaagtgtgattttgagcaaattgatatattacaatgaattggttgttgggttatgtcatgtttactatattatactgttttggaaggtttgagcaggtttggtggaggtttgattggtttttggggtgaaaaaccagaaattaccatggctgccaggaaaaaaaggcaggccgtttttctgacaccc

SEQ ID NO: 356705 - DNA, 994 bp, Cannabis indica
aaagaaataaaaatgggcttggacagtaaaaatgtaaagtttgtcctgtcccagtatttttgaaaacatttggtaaaaaagcagtatttttgtaagtttcccccatatatatggggtcgttaaacaatatggatagtgttgggtccgacctattaaaggtcaggttaggcccagctcgacccataagcacgaattactcattttatgtcgggctagtgccaggcttaaatatgccagtttgtttttgtaaaacaggtcaacctgtttttgtaaaatggattggcccattttattttatgggtcataaggtttatgaaaaagggaaaattacgcagtataatgttttttgctcgttttaaacttttatactgtcatgcggtataaatttatttatactgtataattttaataattttatatggcagtatactgccctttttaaaacttttattttattatttttggccacgtgtctcaccagagttagaccatatcaataaattaattttttttatatatacataaggttttgatgttgacgtgggttatcacttttatgataatttcattttttttaaatgtttttttttaatattatttattctttttttttacttaaaattaataataataaagataaaaatatatataaagttttgatttaatcgatattgtcaccttgctacatgtttttttatttactttatattttttttttacttaaaattaatgatgataaagatgagactcaaaaaaaaaaatttcattctatttcctattctttctctctccgtgttcatcatcatattcttcttcatgtgttttttttttttttcaaaatccatacacttattatcttttttctcaatatcttctctctctctctctctctctatatatatatatatattactatataagttttttaattttattttctttattgtagttattctattctttttttttggtttttttaagtttttttctttag

SEQ ID NO: 356706 - DNA, 1088 bp, Cannabis indica
taaatccataacaattcctataacaatattcagcataaagaaattaaaaaggaatagagaaagaaattgttggtggaatgactctagatcttcactttgatttcctcttttcttcttgccactttctacagtgttttaggtctccaaatcgctttcctgatttccaatcgcagttttctatttatatctgatttttagggttcgtcggacaaaaataccctcagtcgtacggactctcgatgcggccacaggatgcctcgccgcggcgagatgggcttttgaaaaccactctctgtaatggaccttatggccgcggcgaaggtgtatcttgccgcagctactggaacttcaaaaatcattcattctgttctcaagttgtagccgcggccacaacgatctagccgtggacagaagtgcgtcaagctgaaaaatggcatttttcttggcttcgcttgccttttattacacttttgcatcccgaggcctccattactccgaggaacctgaaaacatagaaaacaagcataattctgtcctaaaacaacaaaaagcaaacgtaaagttgatccaaaatataggctaaaaatagcctaacaaattcccccaaactgaatctttactcgccctctagtaaagctgaaactcaaactgaaattaaacaatgcaatagacaactaaaccttccaaggattgaactaccactaccacctgcacaacttcaagaaattcaataacaagaatttcaactcgataactctaagaactaacttggatgcacaattcagaagtaagcaattcatacagacacaaaacatcgcatttgacactcatatcacaaccattctacactctccgacattccgctaacccatgttcaataagcttgagtgacatacctctctccactaatgttgacaattcttgctcggaatcaaaaggtctttttcggttataatagcatggcttaggtaaacgggtagatgagaagtcatttaagctacattataccataagcacaattataccaaacaagcacccacacttatccatttttcatcccaaagaaaatagtaagagattgcatattt

SEQ ID NO: 356707 - DNA, 621 bp, Cannabis indica
gaccacaagcctcattgctccttgtgactcttctctgtgttggaaggatcaactcatagccatctgaaatcttgtatttctgttggacaaactgttgtatgtctatggtttctttgagttgattcttggctgccactatttgcttccaataccaactctcttgatttgttgcttggtaatcccaccaatttccatctttcatataaactgcatgtacccatctgacccacagattgtcttccttgttcgcaacagcccacacatatttaaatagagctgctgtgttccattcagccaatcttttgatgcctatgccccctgcaatctttgactgacaaacattttcccaagctactaacccagctccctgcatcaaatattgacccttccaaagaaaggctctacatatagattcaatctcatttattaccttcttgggaagcttgagaatctggcaccaataggagtgtatagctgtaagcactgagttgatgaggacagccctaccggcaaaagagagatgtctagtgctccatgatctgattcttgctgtcattttctctgataatattgcacattcttgtttagagatccttttatgacaaatagggatacccagat
